United States Patent Application Publication US 2022/0090207 A1 - sequence listing, part 16

SEQ ID NO: 222289 - DNA, 420 bp, Homo sapiens
  chr3:184321856-184322276
  hyper
caccctcccactccgagccggcctgaccctcggtgcaggcggaaggggggccgcggggagcggaggacggtgccgaggcctcgctgctgctgcagcgcccccgccccgcgtcgcctcccagccctggctcccagtgctccgggcttgctgacggtacagggtggacagccccgagacattttcatcagatctcgtctcccgcagcccagcgctgctgccgggggtcggacagggccgatcccagcacccctcccccgagccctggctgggcgagaaaccgagatggtggctgcagaaaccggagcccccgcgccggggcgaccgcgaggggccgaggcctttgagagcgctgccgccccttgccaaggtcaatcaaaccctcccacgctccggaggcgcgcgctgcgtgctctaggcagc

SEQ ID NO: 222290 - DNA, 783 bp, Homo sapiens
  chr3:184870165-184870948
  hyper
gtagaagtagctaaagaaagcgaggcgccccacgggatttcatctcgtcgtcaaggcagcgccaaccccagccgtccggcgcaaggaaagctccggcgggcccggagcccacggcggccccagcctccggcagagcagccccggcagagcccggagccccgcggccgcagagttccggcagcgaccccggacggcccggcgggcgtcccccggaccgcggcggaaggcgggaagacgcggctcgacttacagtgacaccatcctaggtgacagcaccagtgcagcttgaagcacttgccatggctgtgcgtggcacagatagacagcccgtcgcacggctggaagtcgggtctgcgggcggcgcaactccgcgccagggcctgagcctcatctagtttctcgctcttccaaccccgctccgacgccggcgaggccgccgcactcatttcctctccctccgcgcggagccgacaccgggagcccgggagaagcgacgtctgggtgggcaggaagccgagccggctgcggacgcgggagggcgcggcacgggccgggagtcacgccagcacgcggcggcggcgggagcgcggcggtcccaggctcgaggaggagccgccccgggcgctgcgaccgggtccgggctggcagcctccctccctccggcgcggcgcgcgccgcgccccacgcgcacacgcacgcgcacaggcgcgcgccggtcggccccgcgcgacgttcctcagcgagcccggccttctcacacacacgccgctggggagcttggcc

SEQ ID NO: 222291 - DNA, 240 bp, Homo sapiens
  chr3:185825761-185826001
  hyper
aagctcaatgcttcattcacaaaaagggaagaaaaaaaaaaaagccgcagggagcagcgagccaacgaaagaaacccgcttcattcataaagtcacccacattcataaaaacgaggtgcggcgcccggcgctaccaaccgcttccaatccccccacccccaacatctctccctggcaccccctcgtcgaccaggagttcggttcccccccgagttttctccaccctctgaaaatgcggcc

SEQ ID NO: 222292 - DNA, 212 bp, Homo sapiens
  chr3:185826425-185826637
  hyper
gatcccccatccactcgggagcccccgcactcgcgctccggggcgcctcccccacgacgtgtggaaagccgctctccccgcgctccggaaccgttagccgcacccgcccgacgcctcccaggaaccaaaccggaccgggccgcggggggagggggcggtcaacccggggggggtcaccccagctactgcaccccgactttgaagattctgaa

SEQ ID NO: 222293 - DNA, 300 bp, Homo sapiens
  chr3:185826674-185826974
  hyper
cagtggccggacgccccttccgatctcccccctgcccccgcaaagccccctcacctgaggcggcctctctcctccccttgcagcggccccggcggcgcaggcgcgctcacgcacgcgcgcagcgggcctgggcgcctgggcgaaaggctgggccgaaccgctccgaagacggtgaaccgctccgcgcaccagcggctggactctgcgccgcagctgccaaccaggctggagcgctggcccggccccccgcggctcgctgctccgcccgccgccattggcccgcggccctagcccagcctt

SEQ ID NO: 222294 - DNA, 240 bp, Homo sapiens
  chr3:185827079-185827319
  hyper
gccagcggtgcatctctctccaccccctcaggggtctgttttacataatttatgcaccgggggccattggccaatcagcacaggcttgtttatataatgaatgtaaggacgtttttcattcataaaaaacgcgacctgagggggaagcttagctgagtcagtgaagcacttaaaggggccgaggccaggaggagccgccgttacttcccttctcgccgctctcccgacttttcaccgagg

SEQ ID NO: 222295 - DNA, 600 bp, Homo sapiens
  chr3:186078790-186079390
  hyper
ctgcggcgcagccacagatcgcttcgcgctgcagcagacgctcccgccgcggggggcgactgggggaggggtctcgaccgccaccctgagttccgcagctcatccctcccatctgggaggtggttctagctctagtcccaagctttccactgcagtgatggtggggatgggggcagcacgtcaaatcacctgtagggctttttagaactccacagccccctcccctaattctattccactagttcaaacgaagaaaatctcagactaggcaaggggaggtggaccggtggagtctgcgaaagcaccacaggtgactccgggtacgcactcctcaggacacaagcacacacacggacacatcttgtgactctgagactacacagatcaacctcagattcgacccttccctcctttattctctgaggtgtccgtgttcgcttcagcttccctttaagtcgccctgcgcaggggctttgtggagtgcccccaaagtcctagaaccccgcgggacggtcggaggctttggcggccagacattaggaaaagcatctcctgcttctcggactgcctggagcgcgaactggatatcaaggagccaag

SEQ ID NO: 222296 - DNA, 780 bp, Homo sapiens
  chr3:186079503-186080283
  hyper
gagagccgagccccaccctgtgcgttccccaagcctgcacccctcgagcggggcatcccttcctgcagggctttgtggcaggtggaactgtcggggtgggcgccgtggctttggctgcagccccttccctggccgcgggaccggctcccgctttgccctcctttaccaagttgctgcaccgggtgctccctgagccggggaccccctccgccgcgccggccgccgtcttacctcaccaggcaacacttggttgcgcggtggcccggggcgctccttcttcgcggtttattcccttacttgggaggaaagaggaaccgagagacagaagggggaccgaagctggcctctgggcgtcttcccgcctgcgcagccctctcgggggagggggatgcagccccagtgggtgccgcggagaccaggctgccaggctgtggttggtagcgccggggtcttcaccctgtgctcggagttcagcagctccaaagctgtctatctccgtggcccgctactacggcactgcggctctgtgccctgcccctcgcagcctggcaagtccagctgccactctcactgcggagccctgcccccgggcgcagagcccgcccccgccacacacaccggcgcgcgcgcgtacacacacggcacacacagacacgcgcttccacacatgcacacgcgtgcgcacacacgaatgtggatccgctcgatgggaacctgaccccctttggtgcaactagggcgcgggcatcattaggacgctttttactgacagggcttcgg

SEQ ID NO: 222297 - DNA, 47 bp, Homo sapiens; identical to SEQ ID NO: 199254
  chr3:186544979-186545026
  hyper

SEQ ID NO: 222298 - DNA, 262 bp, Homo sapiens
  chr3:187455277-187455539
  hyper
accagaaagccccattttctcgctcacacataagagcacaaacaccagccctgcgcgccggggcaagcctaggcagacttcgctaccccaccccgaccactccgtacctgtcttccagggactgcccgcccctgggcgatccacctcgaagccccccgcaaggcgcgacggaggctttgtggtatgaccgtggcggcccttaatttagttacattcaaataaaacttttggtgcacctcggtagctaacattgtgtgtatgc

SEQ ID NO: 222299 - DNA, 240 bp, Homo sapiens
  chr3:187456684-187456924
  hyper
tctgggaagttaaaatgaagtaagtgcatttattggaaattaggagtcccgtggttccgggagctcaaaccgaatggtgtttttaccgctgcctaacgctagagagagccctccatcaaggtttgaaaccgtcaacccctttctcgcccctcccctccttcccattgacctagtttggccagagcctcccgatttggagaatgccttccgcccttcccccctcctctccagccagagagg

SEQ ID NO: 222300 - DNA, 144 bp, Homo sapiens
  chr3:187462668-187462812
  hyper
agccgtacgcaagcagcagcagaaagagcgagagcgcgagcgcgcgtcctctccgcggtctggggccagacagcccccagactagcccgaatcaccccccaagcactgtctcgtcctctctgctccggccgccccctaattccc

SEQ ID NO: 222301 - DNA, 155 bp, Homo sapiens
  chr3:187463100-187463255
  hyper
aatgatcatgagcagcggcggcggcagcggcaccagcggcaacagcggcggcggcggcagtagcagcagcagcggcggcagcaacagcaataatcacctggtgtccggcctttcctagaaacttcttgcatcaccacttctaagaaccccagttc

SEQ ID NO: 222302 - DNA, 537 bp, Homo sapiens
  chr3:191046935-191047472
  hyper
ccccacctaaagacgcgaccctcccgtaggaggggggcagggcccgggggcgggagcacagcggggccccagcctcaggcggcgcgtcactgagcacaaaggagacaacagcgaggcggcagcgggcgctgatcttcgctcgccagccactcgcaattgcggttacagacctgcagctccccctcccccagccggcccgcccgcctttctgtctcctctctccctccgtactggacggccccggtccatttccgggctccggatatttggtatcgattggggccggggacgcggagcaggtggccgcggcggggcagctgggccgccagcttggtgcctcggggaccgtctcccgctgctttggtcaccagcccctgcccgcccgacccgctccgttctccggcctgcgagccctgccggccggactttgcgccgcgtccggcgctgctgctgcgctcggggccccgctcggcgccggcggtgaccgggaagcccgcgttaaaggggcaaccgggaccctggcccggtatggctgaa

SEQ ID NO: 222303 - DNA, 360 bp, Homo sapiens
  chr3:192127148-192127508
  hyper
ggccgccgcaccgagctggtctccgcacaggctcagagggagcgagggaagggagggaaggaaggggcgccctggcgggctcgggatcaggtcatcgccgcgctgctgcccgtgccccctaggctcgcgcgccccggcagtcagcagctcacaggcagcagatcagatggggattacccgccggacgcaaggccgatcactcagtcccgcgccgcccatcccggccgaggaaggaagtgacccgcgcgctgcgaatacccgcgcgtccgctcgggtggggcgggggctggctgcaggcgatgttggctcgcggcggctgaggctcctggccggagctgcccaccatggtctggcgccagg

SEQ ID NO: 222304 - DNA, 540 bp, Homo sapiens
  chr3:192127544-192128084
  hyper
tcgcgaggcagccgagggcgcaacccgggcgcttggggccggaggcggaatcaggggccggggccaggaggcaggtgcaggcggctgccaactcgcccaacttgctgcgcgggtggccgctcagagccgcgggcttgcggggcgccccccgccgccgcgccgccgcctccccaggcccgggagggggcgctcagggtggagtcccattcatgggctgaggctctgggcgcgcggagccgccgccgcccctccggctggctcagctggagtgctagctccgcaggaaactcggggcccgggcgagagccaccgagatggcaggtgggacgcagagcccgcggcagccagagttcctcccgcacggcccgccgacccacggaagagcgaaagagcgcccaggtggggccgagctgggggccgggcccctggagcgctgggaagcacagcgcgctctagtcaggttccctttcctggagccctccgcttccagactcccttctttcctccctccctcccgccacccctctccctcctctctgt

SEQ ID NO: 222305 - DNA, 753 bp, Homo sapiens
  chr3:192232533-192233286
  hyper
caagaatcttcatggagaagcgcgtgtgtggggttggtcaactccccgcccacctgcgctagtagtccaaccaacaggcggcctgtcttcggaagccgggtcccgagtccatcgcgcgcgcccaggtggaggggagtttgcacatggagccggagggagcccgggcgccggcagggggcgggccgggacgcggaagtgccggtccgccgggggcagccctccgagagcccgaggcgctgccacccctcggtgggctcgagcacggccccttgagaccttccggaggcggtggctggtctgaggacgacgcggaggacgtcactgcgggtcggtgcttccttacaggtgccttctggaccggggtccttggcacctcccctgctcctgccctcggtgccggaccctgtgccctgggagcccgactacctcggtgtcccagccgtcccgggcttgaggcgctgagagggctgcgcggcttccagcccggaaggcagcggtcccgcgggctgcgcgcggccaagggcgactccggtgtgggaatccggcggaagggaagcacccgcagggagggctggaccccggaggctgcagagcgtcagaagcgactctagggaactagggggtggggtagggaggcggggacgtggaataaagaaagctcctgggtgccggctatgagaagtcaggtgtgcgtaggcgtggacagagtgccgatgtgggagtctggacacctggattttctggtcggggctc

SEQ ID NO: 222306 - DNA, 234 bp, Homo sapiens
  chr3:192635622-192635856
  hyper
tcttcatgcaaaacgcgccgagtagcagctccgcggcagcgcggcacccacccccgccccccaccccgcccccctgggcctcctcccctcgcaggctcccaggctttggccccggctcgtgggcgggttggcgggcgggcgtctgggcgggcagtcccccgctccgtgcgctctgggcgtgcgagcttcgggaggagctggactgcagcgagggtgcgtgtgtggccccgacac

SEQ ID NO: 222307 - DNA, 441 bp, Homo sapiens
  chr3:193721033-193721474
  hyper
ggctccgggcacccgagatccttaactgcagcttccaaagccctggctgatcctaatcagtgtgggaaaggagcgccgggcccagcccgccggccggagacgccgcctcttttcataaactttatcgccgcggtgcacagccgctgataaagcaccataaataaacgagcgggcgggagtgcgcggctgtctggaggctgccggagcgcacgccctgcctcggccctgcagctcccgggggaaatgaatcacacgccgggctgcaaagagcagcatgttctcctctccagaccaaggccgtaaataataatgcgttctttccctacgtggagaccctcaccttttgtcttgtgcattccgtaaaaagctcaggagtttccttccggctgcctggcctcccctccttgccccggggggttaggagtgctctgttctgactta

SEQ ID NO: 222308 - DNA, 104 bp, Homo sapiens
  chr3:193721577-193721681
  hyper
gcagggcagggaggccgcagtggggcctgggttaggaggggggtggtttgacatctctagtggtaagtgatggtgagcccggttcccgccgtggtggccacgga

SEQ ID NO: 222309 - DNA, 155 bp, Homo sapiens
  chr3:193852644-193852799
  hyper
cacacaccccccacacgcagcgcgcgccaatgagcccgggccaggcgcagggggcggggttttcccaggctcgagcacagcagctgctatttaccttcttggcttctcccggggaccaggaaccggcccccgctctccgccgcccgtcgccgccc

SEQ ID NO: 222310 - DNA, 180 bp, Homo sapiens
  chr3:193853887-193854067
  hyper
ttcgcgtgcagtcccagatatatatagaggccgccagggcctagggatcacacaggatccggagctggtgctgataacagcggaatcccccgtctacctctctccttggtcctggaacagcgctactgatcaccaagtagccacaaaatataataaaccctcagcacttgctcagtagtt

SEQ ID NO: 222311 - DNA, 503 bp, Homo sapiens
  chr3:193858570-193859073
  hyper
tcaggcctggcctaattatacggcctcgggcacaccagcagcccctctcgccggcccccagcagtgctgatcgctcggggagataaggcacgactccaaactgcgtccggatgcgggccgcgggccccggctgccgcgcgcattagcctctcaatggagcccttccggggccccggccccccgccgtctccagcagcatccggagcgggaaaggcgccgaactggaagggggtgggggtgctcttcggtcaacacgagagccctctccaagcgcagaagcgcgactccggaggctcgcccctcctcgcgccccgtcccaccccacgcgtttctggaatggggaccctggggtttcgttggaccccctcgtcgtcaccaccgtcccgggaaacctgtcattaaagtcaattaacttttcccacacccgttggccggtaacaacccgctcctagcttcctccccggctcctaagtgcaaccagatgggcggacgggctgcccccg

SEQ ID NO: 222312 - DNA, 121 bp, Homo sapiens
  chr3:193859656-193859777
  hyper
gcggcaggccacgccggggcaggagtgggcagagcggcggggtgaggccatcccagcccacagagccgtcccaaaaaagaccttgccaccagacagcaaccctggacgcctaaaaaaaaaa

SEQ ID NO: 222313 - DNA, 161 bp, Homo sapiens
  chr3:193987504-193987665
  hyper
tttccgggactggccgggtcaccctgcggctcggccgtgtctggcagccccacccttcctggcagccaggccctctgaaattccgccagcaccgggggacgaagaaggtcttgctaggatgggggagggcgggaagacggggagcacgagccggctttgcc

SEQ ID NO: 222314 - DNA, 456 bp, Homo sapiens
  chr3:194208088-194208544
  hyper
ttgcccagagtcatggtcatggaggaagcttgtgctagaatggtggagaggaaaccagagcccagctcctaatgcaaggctctttcattcctttagccaccctcgcccccgccaaaacaaacagacaaaaaactgtcattctcatatgaccacggactctgcgccccggccgcaggcggaggacagggaggagcgcacacgagaaagctcccacgcgcccgcgcctcgcctccgacgggaaggcgcctcttccgaccgtcctggatgcaaattaaatacttccctccgcagaagacttatctcggggtagggccgcagccggatttccaaatcgcgggtttgattttcgctgcgtcctctccgcgacgcgcgcagggagcgcgcccggccacctgcagcctctggctgcggccatctttccgcctggggccacctggcctgcgccctttgtgcccg

SEQ ID NO: 222315 - DNA, 115 bp, Homo sapiens; identical to SEQ ID NO: 199273
  chr3:194278585-194278700
  hyper

SEQ ID NO: 222316 - DNA, 571 bp, Homo sapiens
  chr3:194353932-194354503
  hyper
cgcctcccccatggcgcggctgggcgcgcggcgcggggccggggacctgggcgcagcctccctcgccgcgggcaagccccgagcgccgccgccccgcgtgcccttctctgggttccgttccgccgcggcgcctccggccgagcgcaccgaccgcgggcagagaagggcgcgctcccgggcgcgggcggcggcggcgaaggcgccggggaaaagtttccgggaccgcgcgctccccacccctcgcgctattgtcgggggtcggcagggcggaggccgccccccagcggcgggagccgggagctgcgcgcgcacaaagactgcggcccccgccccccgccgacctcttcgcggtcacccacctccaacatcctggccggagcggggcgggcggctgggctcgcggacggccgagtccctgccggtcgctgtaaggcacggcgtcccttcctgcgtattgtccacatttcctgagccaacagcaattagttgcgctgctgaagcgcatgggtgctgggatcccgaggtgaagggggcgtggtcctgatcgccgacagggcgcagtaaaaagggt

SEQ ID NO: 222317 - DNA, 258 bp, Homo sapiens
  chr3:194980253-194980511
  hyper
agcaagcaggcggccgggctcctcctcccagggagaggcctcccgccccaggtacaggcctgggaagccctcatctcaccgcgaggacagtcgcgtgcgacaggcctgtaaggtggcatccgagtccctcccgcaattaaggacgccgggctccaggccagcgccagggacagacccagcaccagggcggcccccggagccggcctctggcggcctcgggtcttttgccaaattccccaccggcgccaggataccgag

SEQ ID NO: 222318 - DNA, 559 bp, Homo sapiens
  chr3:195599090-195599649
  hyper
gggccctggagtcccgagcggggccaggtcagcatccatccccgcccagtactcactcgtcaatcctgtccgggaagccccagcagtggcgggggtcactgtcgccatgccctgtgtggatgaagctgttctgcaggggctggctgatgtcctgggccgacaggccggccacggaggtcaccacgttgcgagggaagggccccacacacagcgtccgtgtgttctggccacgccaccagtagttctcggccctgcgcgacagagatggcacggtgaacgccaggcgtggcggggcagccccggcactgggaccctcctcacaccctggccactgtggcagaagggggatggagctcaggcctcaggaccaggctgtgtgccaccggccctcctccccaacagcccccgtgacccaccatgccccgtacaggcctgtttgcacacggccttacccacaactctctaggtgggtcaggcagctttccctatggtttgcaaataaggaggcacgctggaagctgctgcagcaggcaacatgacctgtccacggttaccagaa

SEQ ID NO: 222319 - DNA, 104 bp, Homo sapiens
  chr3:195610143-195610247
  hyper
ggacatcgggcttcaggcacttcacagccacactcacctgcccagagcgggatttgcaaggactcaggacttgccaggtcccagacacgcggagccaacctgct

SEQ ID NO: 222320 - DNA, 33 bp, Homo sapiens; identical to SEQ ID NO: 199281
  chr3:195636198-195636231
  hyper

SEQ ID NO: 222321 - DNA, 180 bp, Homo sapiens
  chr3:195809007-195809187
  hyper
cccggcccccaggggggctgtgcgtcacttcctgaggcacgtacgctcgcgaggtgctctgacagatcgcccggggggcggggatgcgcgcgcagcgggcggggccctatgcggagggcgctgcgggcgaggcgaaggccaagggaaaaggcgccaaggcagcaggtgccccgaggagcc

SEQ ID NO: 222322 - DNA, 391 bp, Homo sapiens
  chr3:196255599-196255990
  hyper
ggtgtcttcaagtacggagaactgcggtgtcgcgcctccgggccccatccggctcccagcatcttctcccgctgcggaggccgcatttccactcagggcagcgccgccgcggtggttccgccctgtcgggctcagaccggcctgggcgcctccgcggggagctgggcggtggcgggggccgcgggagtggagccggcccgagcctccagggggcgctggcggccgcttcctccatccgcaggcggctcccggccacgcccgtcgctgagcgtgaggcgatggcggccgagctcagaacactggtccccggaatggagagctgaggggacagatctaagggacatttataactccgcagggactccggggtgggagtcagtccgtctcaggt

SEQ ID NO: 222323 - DNA, 223 bp, Homo sapiens
  chr3:196695305-196695528
  hyper
tgggcaaatgtcaccgctgcctccgtccccctaggtccggggcgggtcagtgcttcgagccagcggaccccggcctagggacaggtgcctgcgagaatgcggggggcggcccccagctcccctgccctcctccctagaggctgggcctgctggtctcccggctgcgcgcaaggtgggaacgcggccgacttggtccgctcgccctccccgcacccgctcctct

SEQ ID NO: 222324 - DNA, 96 bp, Homo sapiens; identical to SEQ ID NO: 199284
  chr3:197222652-197222748
  hyper

SEQ ID NO: 222325 - DNA, 456 bp, Homo sapiens
  chr3:197281702-197282158
  hyper
cgctagggaccgaccggagcgctcaaacccacagggtatctatcaggcgcgcgtcagcacgtaagcagagcgcgagaacgcccgagacggcggcgcagccaatcccagagcagcgctccccaacggccggccggagggcggggagagaggggggctcggccagagccacgcttcccattggttgagacagcaccgcccagccaaagcccccttgtcctcgcgcgggtgcgccgcctggactcccaccctggccagtcccgggcccaccaccactctggcatccccagcctgtccccgcggctcctcctccttccccggccctgtggcctgcctgctgtccagcattcttccccagggcgctgtggcgcggagggaggactccccaaaccccgggaacagagccttgcggaggaccccggaggaggaggaggaggagggacgcggacgggactggga

SEQ ID NO: 222326 - DNA, 180 bp, Homo sapiens
  chr4:569172-569352
  hyper
gcgagttgaagacggtggagagcaccaggccgcgctggtagtccttcagctggcggcacttggcggacgtggcgctgtccagggtgctgcgagcgcgcggggcgccgggggccgagcccggcgccgagccgggggccgagcccggggccgagccgggggttgagcccggggccgagccgg

SEQ ID NO: 222327 - DNA, 642 bp, Homo sapiens
  chr4:569435-570077
  hyper
gcgcccgcgaatgcgctgaggaccccgagcatgaagaccaggacgccgagcagaagcaggttctggctgctcaccggccccggggccccggccgcggcccccgactcgcccggcgtggcctcgggagcgcctgccggcgccgcggggacccccaaacccgggcccggttccgaccccgcgaggggcgcgtcccggggtccgcagcagagcagggcggcgccgagcagtgagaggccggcggccagcagcagcccggagtagaaggcgccggcggcggcccccaggcggaacggctccccgcgcagctccgagcccaacgagaagcacttgaggccgacggcggcggcgctgagcgcgcaggcgagcaggaggcaggaggagagcgcggcgcaggccccgcggacgctccacttcatcctccgcgcccgagccggcccgcaccccgcgcgcccgccgccgcccgccgccgcccccgccgcctgcgcctcctcccggcgccgcgcggccggaccgccggcctcctcctcatcctcccgcgtcctcccgggcccgcgccgccgccgccggagcccgcatcctccgcctcccgccgccgccgccgccgccgccgccgccgcgaccccgcgccgggaaccgatgcgg

SEQ ID NO: 222328 - DNA, 508 bp, Homo sapiens
  chr4:657349-657857
  hyper
gcgtcccaagccgacgatggagccgctggtggagagctgggcaccctgaggagggccctgagcagcaggcggattaggggtcccgcccaccgagggcccgagggcgggggcgtgagaggcacaggcagccgaggcggaaggggcggggtccccgggcaccctgagaggtggccgcagggcgcctgacgcgctgggcataacctccgcagaccctgaacatctaccagaacctgaaccggcggcagcacgagcacgtgatccacctgatggacatcgccatcatcgccacggacctggccctgtacttcaagtgcgcgccttccgggagggggcgcctcgcggggcgggcgggtagcctgggacccccggcagacacgggggcgcagcggcggcacagcccgggggacgcagccccggattccgtccctgcccgccggccccgcgcaccccggatggggcctcgctcgggctccgcgcctccctgcagacgggcgcttggggcggggtc

SEQ ID NO: 222329 - DNA, 147 bp, Homo sapiens
  chr4:667619-667766
  hyper
agctggagttctccaaatagcacaggagctccacaggaaagccgagcagaccccgccccggccccgcccgcggtcactcactgtagcgcgtggctccgtaggccacaccgaggaacagggcggagtagcggccgagctgcgaaagag

SEQ ID NO: 222330 - DNA, 142 bp, Homo sapiens
  chr4:819592-819734
  hyper
ggagggagaggccggagccggggggagaagccggagccggggaggagagacccggggagcggaggccggggggaggagctgggcgaagccggggccgcggggagaaggggggccgggaaggagaaaccggggccggcgggag

SEQ ID NO: 222331 - DNA, 309 bp, Homo sapiens
  chr4:966933-967242
  hyper
tcaggctcccgcccacggggcagaggcagggctgcagccgggtaggcatcgggcccgggcgctcaccgtcgcacaggaagccggccagcccccagatgaagtcggagcagaggtggcagaaggtgggcttggtgagcgtcaccttccggaagctgtgtcccggcgcggcagcggggcccggggctctgacgcccgcccgctcgggtcccggccccggccccggccccgggcgcgcgcggcctcctgagcccagcacggggctgcaggccgggctgccggggcgcggggagccgccgcccagccaggcgc

SEQ ID NO: 222332 - DNA, 300 bp, Homo sapiens
  chr4:996070-996370
  hyper
tcagaacctgctactggccaacaccacctccgccttcccctacgcgctcctgagcaacgacaatgccttcctgagctaccacccgcaccccttcgcgcagcgcacgctcaccgcgcgcttccaggtcaacaacacccgcccgccgcacgtgcagctgttgcgcaagccggtgctcacggccatggggctgctggcgctgctgggtgagccggggccgctggggtgggccggccagggccctccaggctggggagcggctcctgcgaaggccccgctgcggggagcgcacttcctccagcc

SEQ ID NO: 222333 - DNA, 600 bp, Homo sapiens
  chr4:996393-996993
  hyper
cgcgtggcggggcctggggactccttcaccaaggggagggggagcgagtggtgggaggcccggccctgggtcggggggcggctgggcaacgaccccacgcggcgacggcccccccccgccccgcagatgaggagcagctctgggccgaagtgtcgcaggccgggaccgtcctggacagcaaccacacggtgggcgtcctggccagcgcccaccgcccccagggcccggccgacgcctggcgcgccgcggtgctgatctacgcgagcgacgacacccgcgcccaccccaaccgcagcgtcgcggtgaccctgcggctgcgcggggtgccccccggcccgggtaagccggggttccagggaggtctctggccccgctggggctctggagggggcggcccggggagccgaggcctgagtgtcaggccccgcaggcctggtctacgtcacgcgctacctggacaacgggctctgcagccccgacggcgagtggcggcgcctgggccggcccgtcttccccacggcagagcagttccggcgcatgcgcgcggctgaggtaggtgggccgcggaggggcgaggggccgggccgggccggggtcccg

SEQ ID NO: 222334 - DNA, 104 bp, Homo sapiens
  chr4:997116-997220
  hyper
cggccactgcgcccaggacccggtggccgcggcgccccgccccttacccgccggcggccgcctgaccctgcgccccgcgctgcggctgccgtcgcttttgctgg

SEQ ID NO: 222335 - DNA, 105 bp, Homo sapiens
  chr4:1004393-1004498
  hyper
tgggatggtgactccgcggagtcgagggtgtgaggcgggatgtgggcaggccgtgaggtttgtgttgcaagactgggaggcaggatgaggggaggccatggggcg

SEQ ID NO: 222336 - DNA, 105 bp, Homo sapiens
  chr4:1036517-1036622
  hyper
cgcacaccgatacacacacctacccacacacccaccccacacaccaacacacacccacccatccccgcacaccgacacacaacccacccccgcacactgacacac

SEQ ID NO: 222337 - DNA, 140 bp, Homo sapiens; identical to SEQ ID NO: 199293
  chr4:1243421-1243561
  hyper

SEQ ID NO: 222338 - DNA, 240 bp, Homo sapiens
  chr4:1332425-1332665
  hyper
gggccaggctggcacgcatcgccatcgggacagggctgtgtgggacgggcagggcaggggggccaggctggcacgcatcgccatcgggacagggctgtgtgggacgggcagggcggggggccaggctggcacgcgtcgccatcgggacagggctgtgtggggcgggcagggcagcggggccaggctggcacacgtcgccattgggacagggctgtcctctcgccccaccctgccttagct

SEQ ID NO: 222339 - DNA, 300 bp, Homo sapiens
  chr4:1399573-1399873
  hyper
tggcgatgcaggccctgcagtccgggtcggatggaggccacgggtgggctggtgcggacccggcgctcagcgaactttccacggagcctcggcgtgggccagacccaactcgccacggtgtcccagggtcgtaaacgcatagaagcctccggtcccccgtccctgcgacctggtgccgggcgcatcctactcactcggcggctcagctccggcggctccgactcccccggcgccggcgagggcgcggcgctccagctcctccgcgcgtggcgggcgtcccgaggcggcgggtgcaggggc

SEQ ID NO: 222340 - DNA, 420 bp, Homo sapiens
  chr4:1399931-1400351
  hyper
caacgacgcctcctgctgttgaacttgttggggtccaggatgtccagtaccgagaaggaggtggggcgcaggggcgctgcgggccgggccgctccagccccctcgggcgccgcaggcacagtgtcgctggccgcgagcggcggggctccagcgcggggaaaggccggcagctcggcgcgcccgtccatagcttcctgggcagcggcggcgggagcgggcggtgcgggccccgaacctggctggggaggcggcggtagcgcgggaatgtccccaggagcctcggggccgctagcgctcatgccggcctcccgccgctccggcggctcgggccccgccacctactgggctcccatccctggcggcccccgcacctccacacgaccccgcgcaggcggccgctgctccgctcgctctcggcgc

SEQ ID NO: 222341 - DNA, 105 bp, Homo sapiens
  chr4:1404048-1404153
  hyper
gggggcggggggtgcgggcggaggacggggaaggaggctcctgtgtcccctcttctcgcccctgcacacactcgcgccacggcgacccatgttgatcaccggagt

SEQ ID NO: 222342 - DNA, 510 bp, Homo sapiens
  chr4:1404219-1404729
  hyper
ggggcctgtgactcctccagaatgagtgtaccacactcgggacaccagaagcgagaggggacacaggctctgacctcgagagcacgtcagctctggagacccgcggccccagcctcgtgtgcctccgcacagggcagcttcagcactgcgaacagcgccagcaccgcggacagcgcgctcccacctcgcccccggaggccacgggctcgggccgtgttcagcaccgcggacagcgccagcaactccgagggtctcctggcctccagcccgccgtctctgacctccctgccccgccctcgactccttctcaaactttgggatgccccaggggaggaagagggcggcaggctgtgtgtggagtcttggcacggcgtacattacacagcccgatcaaaagccagcccgttcacctcgaccaagccagcatccaccaaagggccagaagtttaccaggccgctcaccgcgtgggcttccattctcctacctgcaagctgcgcgagttaaggagg

SEQ ID NO: 222343 - DNA, 256 bp, Homo sapiens
  chr4:1407532-1407788
  hyper
cctcgtggctcctccgacagggtgggcactgtggcggtcgtaaggggcagggatgagcgcgctcagggagaccccgcggttaccgcagcctttcagggaggagggaggcggcggatgcggtctgggagggctccaggcgtgagaaggcggcccttgcctggcgcaggggagcagggagcttccagggtgggtgcggggaggaaggaggagtaaggggttagaggccaggtacacagcaggtgctcaataaacgagt

SEQ ID NO: 222344 - DNA, 210 bp, Homo sapiens
  chr4:1794936-1795146
  hyper
gggaccgggcgggagcggggcggggccggggcggggcgcggaccgtcccccactggctgcggcgcgcggggcagcccaggctcagtgcgcggtggcggcggcgtcgcgggcagctggcgccgcgcggtcctgctctgccggtcgcacggacgcaccggcgggccgccggccggagggacggggcgggagctgggcccgcggacagcgagc

SEQ ID NO: 222345 - DNA, 1260 bp, Homo sapiens
  chr4:1795182-1796442
  hyper
cgctcgccaggtccgtgcttggggccgggcaggctcgcggaggggtccaacggtgctcgcggaggggtcggggcgcggctgtcgcggaaccacagaggtccctgcagcgggccgggccggggcgcgggcttcccgctccggaaagtttgccgccgccgccgccctgggagggctttgcagcagccagggagggaagggggaggagggagggaccgcggcggggaggaggcggccggcgccaggcggcccgggagccctgggcggcggcggcggcgggcggggcggctgggggtcggaggggtcgggacgcaggagccggccaccgccgctttcgtccctgtccgcccctctaacgagctgccttcctcctcctgtagtctcccgagcggcgcccgcctcccgccggtgcccgcgccgggccgtggggggcagcatgcccgcgcgcgctgcctgaggacgccgcggcccccgcccccgccatgggcgcccctgcctgcgccctcgcgctctgcgtggccgtggccatcgtggccggcgcctcctcggagtccttggggacggagcagcgcgtcgtggggcgagcggcaggtaagaagggacccactaggcacgggagaggccggcccgtgcgggcagaggcgttggggacgggaaccggccccgggtcggaggggccgccgggtgtgagtgacgccccggggttagagcccggattccgctgcctccttgccggagagcgcggccagagctagcgcggcgacttgtggtgcgcccggagccgcagctaccctccaagtgcgaggccaccacggggagccaggctgggggttggcgtccgcagccccgatcccctgcgactccctagccctggcctgtcgggagggcgcggggggccccatttccacgattcccgctgttgttattcgggttctgcgcagacggaaagttcccattgttggcgtccccctcccccgggccccagtttgtggccagcttcggccaaggcgagagaccggacttctaagggtgggtgtgcgcgtcagcgaagcccggcccctgcccgcccgaagaggcagcagcctccagcgtccccgctgccgaccctgcccctgcctgggggccgagggcgcttccccgtgggtgcgcgccgagctccaggcaagcgaggggcgcgtgtcccagcgtcgcgggccctagactgggctggcggtccaggtcccgcgggacgtcgagggtctgaagggaggtcccaaggggcga

SEQ ID NO: 222346 - DNA, 104 bp, Homo sapiens
  chr4:1828625-1828729
  hyper
gtggagtcggcgctccacccacgaaggcaagtgctgaagcttcccctccgtctgttctgagtctcaggtgtcgcctccactcgcatcgtcgcctccacccacac

SEQ ID NO: 222347 - DNA, 392 bp, Homo sapiens
  chr4:2042167-2042559
  hyper
gcgagcgggcgcagcgtgggaccgaaggggagaaggacgcctgcggcccggcgcgtccccggaggcacgtcccccccagggctccgcggccccggcaacagcgcggggctacccctctacggctcccgccccactgggggaccgcgacggcctgctcccgggctcttggctccgagtggagaagagcgcggaagtgcgcactagcccgacactcgggagggccgctgcctccccaggcgcctgggacagcggcccgcagcccccacccggcccctcgggccccgcgtgcgtttcagcgcgctgaggatgcagcacacccccgaggtgcgaccgggtccccgaagcccggcgtcggcccaacccggaggaggcagcggcagtcacgggcacgc

SEQ ID NO: 222348 - DNA, 646 bp, Homo sapiens
  chr4:2061447-2062093
  hyper
ggggccgccgggggggcgcggcgtgtgcatccgcgagttccgtgcggccgagcaggaggcggcgcgccgcatcttctacgacggcatcatggagcgcatccctaacacggccttccgcggcctgcggcagcacccgcgcgcgcagctgctctacgccctgctggcgggtcagtgcgccgggcccccggctgccgcagtccctcgggccggcgcggagctcccccgccccggcgtccacgcggaccccgcgcccggctcccggggaccagcctgggaagccccccgctttctgccgcgccgggccccgcgcagggctggctatgggcgtggggatgggcgcagggccccgagcgggccggagccggggagggtccggggtccgcacctgcgtccccgccgcgcagccccccacccccaccgcctcccctgtcccctcccgggcatcctgggtgggggcgggtgccagggcaggtagcgcccgccgcggctgggccccggcgagtgcctaaatataatctgcgggcgggggaggccgcctcccgctcggtgctaatttatgaggggaagacagccggcgccgcggggggtgcgcgcgcctggcacagccggggcggtcgcagagggcggccccttcagcgtctttggg

SEQ ID NO: 222349 - DNA, 1064 bp, Homo sapiens
  chr4:3767426-3768490
  hyper
aggctgcaggcggccctggagggggcgccctcgccgagcgcgcgccccgcgccgccgccccggactcctccccggcgccgcgcgggcaggttcgaccaggcggccgcgggctccggttcccggccagctccccagggcccgcggcccgccccgccccgcgcgcccgccccgctgcgcaactcgacccaagttggaagccgatcgcaggcggccgcactcgcgcccagcgcagggcggcggcggcggcggcggcgcagctccggcgagcgaggcggcggccgcacggccaagcgtggaccgcggggggcgcccgcgcccgggagcagccggaggactcgcggcggcgccggcgccccgcccgggaaagtaaagttggagacggagggagcgcgcgggcgcgggggcccggaggagcggcggccggcgccccggcgcgccgagccctagccggccggatgggaggcggagcgcccgggccgccgccgcctgtcgcctgcgccccggctgggctccgggaccgcggggccgctcaggcacgcccgctcgggcgccgcgtcgccgtgggctcgacgccggggcgctccccgtgagccgggccgagggcggggccgcgcgaggaccccgggacctgcccccctccccccgcagccgcgtcgccgctcgctccgggcgcctcctgctctgcacttacacgctcggcagctgcggggagcccggcagccacgctctccggcgcgccgcccgcggagccaccacggccgagggccggctgctgggcgccgcggtccccggcgggcgcgcccgagcagcaggcggcgatgcgggcgccgaccccggctggggggcgcccgagctgccgcggctgcgccccggctccaggagggacggcgtagctcgcgggaggaccatggcgtccccggcgctggcggcggcgctggcggtggcggcagcggcgggccccaatgcgagcggcgcgggcgagaggggcagcggcggggttgccaatgcctcgggggcttcctgggggccgccgcgcggccagtactcggcgggcgcggtggcag

SEQ ID NO: 222350 - DNA, 105 bp, Homo sapiens
  chr4:3873084-3873189
  hyper
ctggagggcgatcgcgggctccaccgggagggagcagctgtgcgccttgacgtaaaatccccaccctggctccaatggcccgcacctgccctggggtgcgccggg

SEQ ID NO: 222351 - DNA, 360 bp, Homo sapiens
  chr4:3873222-3873582
  hyper
acggggaggagcctcgaggagcccatcccttcggcaggtggtgggggcccggatctgggtctacgccgccccacctccctcctggccacaccgctgcggagaaggtgccgcacctgcgcgaccgctgcctggccggtctagagcccaccgcggtggagcgtcagccctcctgagtggcggttcctgtgggcgggacgcctgggttgccatggagaccgagagcccagccccgcggagccccgggtgtgcaccgggacaggaagccgaaagcagagcgggagactcgacttgcactttaataggctctcccaggagccgttgtccagagggagcggggttcgcggggctggcggggacgtg

SEQ ID NO: 222352 - DNA, 180 bp, Homo sapiens
  chr4:4388457-4388637
  hyper
ctttctcctttctaagcgcctcgcgcccaggccgccgcccggggtggcgcagcccgcagccctcccgctccgggcgccctccgccgctccgagaccccctgggggcgcgtcctctcccgctcccctgttccctcccccggctcagggcgggcgcgtggtcccaggggaggctcccgccca

SEQ ID NO: 222353 - DNA, 1020 bp, Homo sapiens
  chr4:4388721-4389741
  hyper
agcccccgggagaggcaggaagggaggcggcggcgcgaggaggagggagcggccgtggagcccaatcgttcgctccccttcccgggtccgcgcgcggcgccgcctccgccattgctgcgagcaggagcaggagacgcggagctcggagcgctcagctgacctgccggagccgggcgtgggtgagtgcggccggccgcgcctgggcttgccgaggccagaccttgcccgcccaggagcagtgcccgggggatgcccatctcccggagtacgcgggacggggctgtgaacagcgggtcgcccgggtgcggcggccccaggaccggggaccgggtctggaggtgctgggcaggggcggcgcccccttccctggccgcggtgcgcccttgcgcccggcgcttgggtcctgcgagatgagggtctagaaatacacagcaccacccgacccccgcatcgggccgtgaccaccgcgtccccacgagccctccccgagacgaagcggggccggggagctcgcggacgccgggacgccggtgggtgtgggtgcccacttcccccccgccccgccccgggtcttgcttgtggtgactccccccggccctcccgccgcaggctgcagcctcggagctcccggaacgatggtgaagttggggaacaatttcgcagagaagggcaccaagcagccgctgctggaggatggcttcgacaccattcccctgatgacgcccctcgatgtcaatcagctgcagttcccgcccccggataaggtaagcccccccacgcccctccacgttgccgggtgtgcacccccaaatctcgcacggcgggcgcaacaaaagaaacgcgccgcgtgcgctgggtacgcgaagtgggggcgggctcgggaggccggagggagcgcggcgaggacagtgtacccgcgcgggattctggatcgcgggatgctgggcgggggaggggagccctgccttagatgatattctcgtcctgacagtggaacgcggtggggcaagattccttcgc

SEQ ID NO: 222354 - DNA, 118 bp, Homo sapiens
  chr4:4389815-4389933
  hyper
aggggctctggatcgggggtgagcctaggggcgggcgaggctgcccctgtaccttcccgggtgtggcagttcagcccgacttgccccaccgaggcgggggagcgttctccttggtcag

SEQ ID NO: 222355 - DNA, 900 bp, Homo sapiens
  chr4:4861657-4862557
  hyper
cactcggtgtcaaagtggaggactccgccttcggcaagccggcggggggaggcgcgggccaggcccccagcgccgccgcggccacggcagccgccatgggcgcggacgaggagggggccaagcccaaagtgtccccttcgctcctgcccttcagcgtggaggcgctcatggccgaccacaggaagccgggggccaaggagagcgccctggcgccctccgagggcgtgcaggcggcgggtggctcggcgcagccactgggcgtcccgccggggtcgctgggagccccggacgcgccctcttcgccgcggccgctcggccatttctcggtggggggactcctcaagctgccagaagatgcgctcgtcaaagccgagagccccgagaagcccgagaggaccccgtggatgcagagcccccgcttctccccgccgccggccagtgagtagccagaacccaggcgcagagggagggggccgggtgggggccgggtggggtgtgggacccgagggctcctggtggcctccggcgcctgcgtacctgcagccggtgctagggagccgtgggctgcaaggccgggtcttgcgcctccctccactcccacccaggaagaaggttccagacctcctcgccttggcccagagacgctgcgggtgggagttaacggataggacaccgatgtctgggcaccctgtcctcctgcccccaccaaacgacctcaggggtccatgatccctcatctgatcccaaactctgtttcatcggcttcaccccagcggatgaatgtgtgtggtgcggtatcttccctgcacccggagtttcactttctcgcagtaggagctggtgtcccccagcccctcttccctttcaagtacctctttgcctagaggttccgaagctcct

SEQ ID NO: 222356 - DNA, 332 bp, Homo sapiens
  chr4:5052365-5052697
  hyper
ttccctgcagtcccggagagctgggcccgcaggactgcaaggcagggggacctgcctgtccctcagggagcgtcctgggaacccgcgctcgccccacacgtcttggggcgcatctgccgcaccccttacttaggcacccgcaactgtggcgcgtatctcccgatccaggctcccgccgcaggagcccagggaccctcatgctagcctcgcccctaaatcggacgccgatgccgcccaattttgggggaatcccgagactcatgcccagccattcccagggagaatggtttggggcaaactatggctgtctggggcctcagtttccccatgta

SEQ ID NO: 222357 - DNA, 1020 bp, Homo sapiens
  chr4:5052789-5053809
  hyper
aacagcgtcggttggagagccagcagacactccactgcccatcccaatatgaatgggcaaatacaggctagcggggagtcctgggactcccttcgcagccggggccgactaaccacagacctaagagcccctctacctctagacctccgtctactgcgctctaaaatatgaacgatgctttcttactgctgggttgtcggaggcggatgtgggatggtgctaacaaagcgcgtagccgaggcctggccatagtgggtgctgacaaaccgcttactgcctgcagggaccgagctcccggccgagggaggagggccgagcagggattcagattcttccgggccgatccctttctcagctccttccgccctgccgccgcccactgcgtgctgccttcgtccgtcccctcctcccccgctccttcccctccttcccctgctcccgcgccgcctcgcgtctcccgcccgctgtagccggcgaggagcgccgcacgttggccccggcgcgaggagctcccgggttcccgggcgggcactggagtaaggagctgcgagcgcagcccgaggcggggcacggcggaaggcgcggcgagagcggggtccctgcgagcgcagtcggaagggcgtccaggagaagggggacgccgtccccgcccctgcacggtgctcggccccctcgggctccgcgcgcggctacaacccggactgggcgcgcccccggcatcccgcatctctgcgcgcgtcccacatcccgcatccggcatcccagcggccgggcatgtagcagcggcagcaacggcggaatatgggcgggaaccactcccacaagccccccgtgtttgacgagaatgaggaaggtaagagagcgagaggtgcgaattcccgcttcgcggggcatccccttcctccaccaccctcggccgagccctgcggggcaccgcatgctgcccggcgcggggacccaggcatggccacttcgcccagcgaatgcagtgtgtgcccgacccgtgccaggcgcggcgct

SEQ ID NO: 222358 - DNA, 400 bp, Homo sapiens
  chr4:5889213-5889613
  hyper
tcagctccccaccccgagacaaagcgtaaagacggggattcctttgtttccggccacacccagggacgcagcccggctgttctgcctccaccaccgtccccaccctctcgcggcccagcgtcgggaacattaacccttcccgggccgcagccgccagcgtcgccccattaggttatttttagctgcggggaggggtggaccgagcttccatcatggcgctgtccctaggtccggacttccactccatcagtaaaggcggggagtggggagcgctggatgatctttttccctcctccagcgggggaggtaccgggctgtggggtgcatgggccggacggtgcgggggccgagccaaggaggctcagctcaccctcccacccccgcgcgaggcctgcgggga

SEQ ID NO: 222359 - DNA, 300 bp, Homo sapiens
  chr4:5890189-5890489
  hyper
ccagcaccgcccggatcggcgaggagggcgggagaaggaggagggagaggcgagggcgggaggagggggctgcagacagctcctcccggcggcgcggagcgaagccggattcgcccctctcggctcgaaccaggaagcgcttcccttccgatctcccaccccgccccccgccccccacccgcccagccccgccgacccccgccctgcgcacacgcccttggcgggccctggcctcgctctcgcgatccagagagtatggttttcagggctcctttaaaagaaaaagacggcgcggtcagg

SEQ ID NO: 222360 - DNA, 180 bp, Homo sapiens
  chr4:5890543-5890723
  hyper
catctgcgggggtgtggggggagggagtgtgggacgggggccaaggatcggcccaagctgctgggaacgttcttgtccctccaggatcgcgcccaaggaccgctcccctcttgcctctccttccatagcctccgtttatccttcccgagtgcctctccctgaatgcaccaagcacttttt

SEQ ID NO: 222361 - DNA, 396 bp, Homo sapiens
  chr4:6271359-6271755
  hyper
tcgctgtgggcgagccggacccgccttctggcccctcgggcccaaccacgcagggggagtgccgggccgcagctaggcgaggcgcaccgtgattggcggagatgtggagtgattggcggctacaccggccactcagcaggccgagctggcgccgcatccggggggccgcgtctggagtggagggaggccgaaggccccgcccctgccccgccccctcgtgcagaaggccgcgctagccggctcttcagcagcgagtgcagattgctcccccgcggccgcagatctcccgtttgcgccgcgttcagctgctcccgaacaacttttctgccggcccagaggccccagggcgtcgcagcgccgcgtgcggcccactcacgggccggtgagtacttcggc

SEQ ID NO: 222362 - DNA, 122 bp, Homo sapiens
  chr4:6717792-6717914
  hyper
aacaaaggtggatgcgcgtgaacagacgccctcgcaggccgccggaagcaaaggcgtgagcgcgcgtgcgtgcgtgtgcgggtgcgtgagcgtgagcgcgcggaggccggaagcgagcgctg

SEQ ID NO: 222363 - DNA, 162 bp, Homo sapiens
  chr4:8160408-8160570
  hyper
gcactcatctcagcagccgctcggagtcggggcggcccggcgctgcgacagccagaccctcgggcccgcaggtgccgcgcccgcgctatcctccgcccgcccgccggctccgcgcccgctccttgcgcacacgccaggcagcgccgccgcagccccacggcg

SEQ ID NO: 222364 - DNA, 42 bp, Homo sapiens; identical to SEQ ID NO: 199340
  chr4:8594310-8594352
  hyper

SEQ ID NO: 222365 - DNA, 131 bp, Homo sapiens; identical to SEQ ID NO: 199341
  chr4:8609443-8609574
  hyper

SEQ ID NO: 222366 - DNA, 420 bp, Homo sapiens
  chr4:8861808-8862228
  hyper
gtggagcgccgttgcgcacaagtgcgcgggtcagcagggccctggtgcctggacacccccgggtgcgcgcggcgtggctgccctggtgccccagtgagagcatgactgcgcgccaaatggaagtgggggcgccccctggcctttcctatacccggggccaaaaccgctgggaccgatatactgcaggagtccgggcacaggctgaggggaccggcccgtgcgttgagcgcctcggaggtgctccgggtcatggtgggtgctgagcgggaacacggaaggctgtgtacacagcagcaagcaatgcacccgcgctcccgtcattacatcgcgccgccttcacccccgctacgatgaccactccgcagatgggcaagacgggctcagagagatgaagtgactttcccaaagccacacagcggg

SEQ ID NO: 222367 - DNA, 180 bp, Homo sapiens
  chr4:8862295-8862475
  hyper
acccgaaggggccaggcggcagagagccccgcgtcccccgccacgggctaagacgcaaggcggcccgccgtgtctccacctgcgcgcctcgagcttcgctccgctctagccttcgggttaacaccgcttccttccagaagcctaaggaggcccgggcggatcagacgcctcccttctccg

SEQ ID NO: 222368 - DNA, 464 bp, Homo sapiens
  chr4:8863431-8863895
  hyper
ggcgccgtcgttccaggggcctctgcgcctctctctggcgtctgtctggaccctcagagccccgggatcaaggcgcccatcctcttgatggcggggcgcacctttcgcgtgggtcgggcgctgcagaccaagcacgccgagtgcgtcaaggaagtgcccggaaaccaaagacaacgcacccgggaccaagaggaggccgctgcgcgcaacctcccaaacactgcagcgaagtcggaaccacgtccgcgtgggtgactcgggctggggagccgggaggcggcgccaaggacccttcagcccttgtccgtcctccctgatatgtcctcgacgcggtctgaggcctccccagcggaggcgacgccccggcgccaggtgccctgggtgggggaacccggagggggcaccacgaccagtggagaaggggcggaggccgggaaagctgcgtggaaaagaggaagggttaa

SEQ ID NO: 222369 - DNA, 669 bp, Homo sapiens
  chr4:8872917-8873586
  hyper
tgacccaccctccccgcgccctcactcactgtcaggactgaggccgcctccatagccaccgtgcgcccgtgggtaccagcgcgctgcgcctccgcagcccagagcgaagggcggcccgggaccggggggcggccgaggaccgaggcccagcgcgcccggcccgagcagcgcacgggcccgcgcctccccgccgggcccggtgcccgcgagcaactgtcgccgccgctgtagccgtcgccgccgcgcctgctcggcgtcctcgtcttcggggtcgtcgtcgtcctcctcctcgtcctcccggctgccgtcgccctgggtcgcgcgccctgcgcccttggcctcggccgccagcaggttctcgatgaggaaggaggaggcgcgggccggcgtggcgcgcccgggctccgtcagctcgtcaggcatcgcggccgcgggcttctcgggctcggccgggctcctcggtccccgctggggatggtggcgcgcggctcccgggcgcacgcgcgggccggccctggagctgctacccggaccgctggcgtcgggccccgcagggcaggcggcggcctccgcgccgggctgggctgggccgggccgggagcgagtgcgcgccgacagctgatcgggcagccgcctggctcgcctttcaggtcgccgttctggtcgccg

SEQ ID NO: 222370 - DNA, 390 bp, Homo sapiens
  chr4:8873641-8874031
  hyper
cgcgggctgggccgggagggcggcccgctgagccccgaggacgctgcgccggccccgagcgcggccgctgccgggagacgctgcccagacctgagcgcgcgggcagcggcgcagccgagggcgggcggccccgggcgcaggcggggggtcgcgccgggtccgatcccgcgtgatcagttcccccgtcccgcgccacccgctccgtgggggcggggcctgggctgagcggccacccattggctgtggggccccgatgaggaacgggctggccaatcaccgtccggccagagccgtaattaccccgctgcgaggagggtgttggaccgaccgtgagtaactgtgtgtgtgcgcgcgcgtggtgtgtgcacgagtgtgcgtttgaatggctgt

SEQ ID NO: 222371 - DNA, 209 bp, Homo sapiens; identical to SEQ ID NO: 199346
  chr4:9684933-9685142
  hyper

SEQ ID NO: 222372 - DNA, 58 bp, Homo sapiens; identical to SEQ ID NO: 199347
  chr4:10089890-10089948
  hyper

SEQ ID NO: 222373 - DNA, 236 bp, Homo sapiens; identical to SEQ ID NO: 199348
  chr4:10090133-10090369
  hyper

SEQ ID NO: 222374 - DNA, 420 bp, Homo sapiens
  chr4:10458401-10458821
  hyper
tccgaggcccgcaggaggctttaaaaatggcctcctgacgacacttcctgctcggcgcggacggtaggagccctcggaggaggcatccttcataacgctgggggcggggagcgcaggccgggccagcggcgccacacgaacggccccgcgggacgctgccacccccgcctcggtcgccccggcgcgtcggccgagtccgcggggtcgcggcgcacaaaggcgagctgggggcgccgggccggaccccgaccctaggccaggcccgcgtacctgctcaacgcgcgccaagccgcggcccgggcccccaccccagccggtgccccacgcccaccagccggagcccgcgttcggcctacccggtgccacttgccacgacgccagccctcagcgcgggcacgcggggccgcggccgctcgaccc

SEQ ID NO: 222375 - DNA, 512 bp, Homo sapiens
  chr4:10458854-10459366
  hyper
cgcgcccccacgacccggccgcagctggcgcttcggtcacgtacacgcggatccgggggccctcgccctcccgctcagctacttacccggcaggccggattcgggtgccaggtcccggcgaaggggcgtctacaccgccggccgcagaccgccggcgccgcgcccgctgtaggtccctacccggggggcggagcccgcgccagccccgcgcgtgcgcaatgtgaagcggcggcgcggctccagcgaggccggcgcctgaggtctctaaggctgcgcccgcccccgccgggcttctaagctgtccagagcggggagcctcagacccagccgagccccacttctgggcttagagcttgacccaacacgttcgcaccgtagcgagcgaggtccacatttagccatgccgcaggcaaaagaaggattcggcttcggtcctggcccagtctgccatcccggggcgcctgccttgtaccgggtcccgcggagggcggccttggcgcctgcctccctgg

SEQ ID NO: 222376 - DNA, 600 bp, Homo sapiens
  chr4:13545414-13546014
  hyper
tgatagagcagctcgcgccagagcgcagaacttcgggatttggccagcctccgagccccagggcgcagggtgctcaagccgaccaccccactcggcgtggttgccctccgcgtccatcccctcagcccggcccccatccccgcgaagccgcagcagacctgagacgctggcggacatctcgctgtcgctccggcccgcggcttcctcctctaggtctttggaagcggccagctcacagaccggctggccgaggctcaaggatccccccgcaaggccggccccgctggccccccgcgcgtccgcgcagcgccgcctgctctcgttctcctcgctgagcgcggagtccgagtcccagccttccgggctctccgcagtccgccccgcagctgttctggtaccggcaggagacgccagcagagagtcctcggcgccccccaacgcgcccgcgtccctctccccaaagagccgccaacagcagacagcgggagccgcggccaccgatgccgctgtgcccccgggcgccgggcgcccctctggcgcggccagcccgccgcgctcctctttcttgttgaggatcgcctggatggagaaggacgtcaa

SEQ ID NO: 222377 - DNA, 206 bp, Homo sapiens
  chr4:16228976-16229182
  hyper
gtgtgaccccgcaacgagcgtggtgtcgagaccaccaccagctggggcggtgggagcgaaggtgccccaggctcggggaaggtggaaaccttttccccgctccccaagtgattgttgcgcgctccggtgaggggacagtggtacctcgatttcccgtgtgccagcttcgggactcagctgtgcttttgtgtctctttgattagcaa

SEQ ID NO: 222378 - DNA, 272 bp, Homo sapiens
  chr4:16229205-16229477
  hyper
acactaagcttcctggaaacttccctagacctaaacttgagaaccgcatataaatgggccttgagggttctgtcgtcagtagcgggttacgtgattgcaaacgagcaagtttaaaacggagtgggctttgggctgcagagccgcctggcattctgacagctgagcaggaggcagaggtgagagtccaagatggactaaaaatgtcccagcagctgggagcccaacctcggcccaacctcgttgaaaggaggaacattcggtgcagccgtcgg

SEQ ID NO: 222379 - DNA, 106 bp, Homo sapiens; identical to SEQ ID NO: 199361
  chr4:18024246-18024352
  hyper

SEQ ID NO: 222380 - DNA, 915 bp, Homo sapiens
  chr4:22517139-22518054
  hyper
gagatactcacagggtgaccgtgcggttgggcagagtatctgggggcaggacctgcgcgagttccaggctgctgcacaccaccttgccctcggcggcgcccgccgccctgccagcccctcggggccgcccatcgtgcttgcagccggcgggcagcgccgcggcgccgccgccgccgccgcctcccagcagcgcgagcagcgctaacagcgagagcggcagcaacagcggcggctgcgcgcggccccgccggcgtccgggtggctccatgctgcgggccggggcctgcggggcgagcggcggcgcactggcctagcgggccgccccggagcccgggcgggcaggagcgcggcgcgggcccagcggcgaccggagccttatggcggccggaggacgggccttccccggcgcggacatgctcctttgtccgctgcggctgcgctgggcctctagggagccgggggtcacggccgcatgggtcccagcgccgctctaccgcccggcgcgagcaccgcctcctcctcctcctctgccgccgccgccgccgccactgcctcctcccctggccaggacccgcgcgcggcggctcctccccgcccgccgccggcggccgcccccgccccttcccctcctctttcccggctctcctgctctccccgtgtctgcagctgcccgggacctcggggaggaggcgcgcgctcccgggacctgccgagcccgactccgacccggtgcgcgcccgggcctcggcctccgggcaggagttgtggggagcccgcgggaaggcagtaactcgtagagagaacggaggaaagttcgagtccgaacggaggaaagttcgagtccaaactccacccgcggtggccactctcctgctcgtttcccttcgccgccaccgcgctcgcaccgcgggcaca

SEQ ID NO: 222381 - DNA, 560 bp, Homo sapiens
  chr4:24914314-24914874
  hyper
cgcggccacttggagtgcgcgcccccctctcgtccctcccagctcggcctctctgggggcgcgggcccggggctggcggccgctcggcccggcccatcccgcctggccggcgccgcggcctcacctcgctcaccagcccctgccagtcgctctcagtccggtcgccgttcatggcctcctcctccatgcgctggccggcctcctggacccccgccgcctcctcctcctcgcgacgtcgcgtcgccgccgccgcccgggccccgcgcggccccgagagggcccggcgcctccgagccgctgcgccgccgcctctcgcggccgccagcgctgttgactccacgtcagcctccgccggagggaaagggaggaggggcgcggccgccggggccgcagacacagcccgggccgcagccgagccccgccgggcccgccccgcgccctcagccccgcgacctcgggctccgcgcctcctgcccggcctctaggcaaggggaagccagggtctcagcctacaggtcactccggacccctcagcgctctccgcgcgggaggcgggcccc

SEQ ID NO: 222382 - DNA, 623 bp, Homo sapiens
  chr4:25863667-25864290
  hyper
agtcaccactctggcggtaagcgtgttacagagaactagatttctttccggcatccgcaacttggctggagtgaccaaggaggagttgaagagcgctggagatgcgaggtgcgttggcagaaaactgtccgggccgggaggacccggtggaaactaaaaggagggtcgacgcgggtggcgggcgccgagagtaagaggcgaagttgggcacgggaaggaaaggagctgcgagaagattgagagggaagcccaggaggggtggggggttggggggtgctggagactgcgcgcggcggggcggggagcgaactccgggcggcgaggctcccgggtggagtcgaggacaagaaggggtctcgagggtaacccgacccgggtctagagagagtccaggagggaaaggaatgagcacgagcgagagagcagcttggcaagtccggtccaagcgcccctctccacgcccggggtacctatcccaggtgccgggaacgcccggggcgcagcgacgaggaagagagaaaactagcagcggcgtccccgccccgcgtggcgggtgtccccggccgcccccacccgcgtccccggggccccgcgcggaggggaagacccgggcagggtccggc

SEQ ID NO: 222383 - DNA, 993 bp, Homo sapiens
  chr4:36245409-36246402
  hyper
taacaagcagggtgcggggcagcacagacacccgggcaaattcatgatctctaccgagtaaataacttggtgcctgaaactcactacagcttcttcttatttaaaggtaggggagaggaatggagggagtgtccagctgtctatccggatcctcaccctcccgggtcaaatcccagaagtggagttcttggatcacttaccggcttctggtttcctttcagacgcccacacgcgggagcgaaatccaaggggcggacaccagagccgagcactttgcgctgaggaaatttacccggtgaagtgtcgaaaagccccagcccctccagacagggtcctcccacccccgcgtgggccatcccggcccagccttcccgaggccccgggtactcgccttgcgctcgggtcgcggagttcgaaaagcgaggtgaggcggcgctgggaagctcagcgccggcgtctctcccagccttgggcgctcggtcctcgcccctctgccggaggcgccaggcctcctctttcccggtccccgccggctgtccgcagtcgcctctgctgcctggcggcggccgcgcgggcggcgctgttagtggggccggcgtgtcgcggccgccgcacctggaggcggggagcgcgggccgcggacccgcgctcagctccggaaacgccgagcccggcgcccgcgccttgctcaggtgctcccgcgcctcgcctcggccgccgcttcctctccgcccgcgggggcggggagcaggcgccccgcgcgggggaagccggagctcaacggcgggggcggcccagccggcctccctggttccgcagcatagttgggtgactgactcagaccgccgcgacttggccgcgcctggcaccctcgccacctggcgcacctcggcccggaggcgtcagaccccgctggggaagctgcgggggcgcgccctggagcccagagcgacaggggcattacccaccttcccgggacggagatgcccagga

SEQ ID NO: 222384 - DNA, 1140 bp, Homo sapiens
  chr4:37245589-37246729
  hyper
cagcaacctggcggccgacgggcccgggagctgtcaggcgagcagaacagccggtgagtgcgccttgatgggagcagaaaggcccctaggaaccttggaggcctcggaggaactacccgcggagatccgctcccagaaaggttccgggaccacgcggcgaggagcacgtgaacggcgcagcttggctataaaaaccccgctcaagcgcgcgtggggagcaaccggagcggcaggacgctgccacctgcgccaggagagatagggatgaagcgatcgtccctccaggacgccagagacaatctggagacttgatgctttaaactctccgggtctggcttggggttgtgtgcgtcgaactttgaggctggattccctgcacttgggcagagacgcacagacgcccgagcgtgtggattcccgaaaattctcagggcttgtgtgacctttaggagagttggagggggcgtagtagaaatctcaggctaattgatttcttgtcctccaccacggaggcagacaggagccctcggctgtccacagaggagtccaggaggctcctgcgcacccccgaggcccccgcgcccaagccccggccgtcctctaagccgcaagttatttctgcgcccgagagaggcgggctcggataaagtcgggacgccttctggtacataaagtttcatctgctctcctcgctcgcacggtccctgccgcctggcggccccctcctcccacggcgggcgcgggcggggagatggccgccggcgcttcccggcgcaaacgggcgctgcgcgcgtagccgccgccacgctgacctcccgctccagctggctgctgctcggagccctagcagcgggcgaaggcggaggcccagaagggcaggagaccgccgcgacaggagcccgagggtccgtatggcttctcctcgccggcgggtgctgtgcgccacggagctcgccaaaggcgcttcgggctcggagcggctctgagccgcgccgcctgctgagatcgaccgcctgctgagccgttccgtggagctgcgggcaggaacccgaggagcaggaggtggcggcggcggcagtggctgttcctcccagagggcgatgtggccggccggcgcgggcaccaagctgccctgtcccc

SEQ ID NO: 222385 - DNA, 86 bp, Homo sapiens; identical to SEQ ID NO: 199386
  chr4:37688564-37688650
  hyper

SEQ ID NO: 222386 - DNA, 300 bp, Homo sapiens
  chr4:37891998-37892298
  hyper
gagaaggggtaaggcgggggagagcaaggtggcttggtcgcccccggcccccgccccccatgttgtgtgcagtttccaccacgtctgtttcggagggagaagaggagggtgcagatgaggcgaggcgccttcgggagcgcggagagcgggcaggcagtgccacctgctgagagccactcaggccgagcaagcggcgggcagtgccacctgctataaataggccgccaaggacagggtgtgcgactgtacatcccgccacgagggcctgcatcacgcgcggggccccgcgcccccggctcc

SEQ ID NO: 222387 - DNA, 740 bp, Homo sapiens; identical to SEQ ID NO: 199390
  chr4:38868924-38869664
  hyper

SEQ ID NO: 222388 - DNA, 189 bp, Homo sapiens
  chr4:39183810-39183999
  hyper
acatcttagtcatcgcggtccaaaatttacgcacgcgcctttgagggctcacagagcccgtctctcccggacgaatctcatccaatcagagccagccaggaagccgaggctcagcaaggcctcgcgacgcccaacttcccagggttagcgtctctgatgtcatgtgattccaccctccgcctctcaccc

SEQ ID NO: 222389 - DNA, 248 bp, Homo sapiens; identical to SEQ ID NO: 199394
  chr4:39529737-39529985
  hyper

SEQ ID NO: 222390 - DNA, 704 bp, Homo sapiens
  chr4:40751829-40752533
  hyper
aaacaggtgtctccgcgcgctgggggaagagcgactctcccggcaacaggtagcacccgccaaatcccgcgggaacggccctcgcgccgcgccccctgccccacctccgctcgcggttgccatgaagacccggtccgggagcagtcgactgccggagactcgggaggctgagctttcctcggcctgagccagccagaccccgggcaccgcgctcacccctcttcgccgccacgtccgcgaaggcctcacgcgcgaggccaggcgaggccccgaggcgcccaccacttcacgacaccggagcgaaccgggcgccagaggctgcgacccccctgccccgaatcctgccggtgggagtggctgcatttgaaccaaacggccttcgcgggcagcagccgtcgccccgcagtcccggggctcccaagggcctgtgaccgacgccgccctccgcgtcttcgtccccgaagccccgggaaccatccgccctcggggtaagggaggagtcgggggagccggtgactgggctgtggggacgcggacggggctccgggggcagctctgcccccagactggcttgagggaagccgtcggtctccttggggctcttctccctccgccgctgcacccctcctcgcttttttttttttttttgagcgtcccaggctcgaagtctgggacactcagatgggacgggaaatgctccctct

SEQ ID NO: 222391 - DNA, 138 bp, Homo sapiens; identical to SEQ ID NO: 199395
  chr4:41216265-41216403
  hyper

SEQ ID NO: 222392 - DNA, 209 bp, Homo sapiens
  chr4:41218383-41218592
  hyper
aggtcggtctcttcccgacggagaggaaaacccgcggtggagtccgcggcggcgggggggggggggggggggggggcggggcggcgcgcgcaggcgcagaggccgccaggttgggccgaggaggcgccctgctccacacctgatgcaatcagccttccggaaacgggtcccgctgccgcgctcacccaggaaacacttccgcgccctcc

SEQ ID NO: 222393 - DNA, 738 bp, Homo sapiens
  chr4:41259135-41259873
  hyper
tgaacaaagtgagtggcgtctcgcgccgtctctggccccctcccccgcgagcgccgaggcgggggcgcccaccggttccggctgctggcagggaccaagccgcccgctgcgagcaccggagacggccgggctggggcgtgggctgggcgcctttcctgggcccctgcatttagcgggtgactctacgaaaccggtcacggggagacggagggggctgcgccccgtggcgagcgagcgccaggcggagctcccgagggcgtggcgcgggcagcacagactcggctgcacgggcttcgcgggcgccacgtgtgggccgcgctttgtgctgtgtcattgcgccggcccgggtgggggtggcagggcgggactggggctcctcccaggctcgggtgcgggcgcggagggcgcgcgcctcctggccccgccccctggcaggtgcccgcgacccgcgtgtccccgtgcgcctggccgccttgtctcctctccgcaggtgctgtcccggctgggggtcgccggccagtggcgcttcgtggacgtgctggggctggaagaggagtctctgggctcggtgccagcgcctgcctgcgcgctgctgctgctgtttcccctcacggcccaggtagggcgtggggcccaggatgcgccggccgccggcagtgcacgccgctccccagcttgagtcctcgggggctccccgccccgccccctcccctgtaggtgatgcggggcgcgcctaca

SEQ ID NO: 222394 - DNA, 1174 bp, Homo sapiens
  chr4:41362244-41363418
  hyper
gtacttcccggcgccgggccaggggctgccccgccttgcccctacctctgcggccaggaaggactgcaggtgctgcgcggccagtgcccgcgcgtcctactgctccggtgccgcagcgcccgctcccccgggcccgggtgcgccccactgggcgcgcgtctcccatatgatgccagacccatccgcccgcccctcagcagccggcggggcgcagggacgtgcggggcggccagcggattccctctatcgggccgggtgtgaacgggagggagacacgcagcgctcgctccgggttatttttagtccgtagctgtgctccccctccccgggggcggagcggccctcgaaggtggggaggagaagaagctcccggcgcctccgcgctcgctcccgcgggtcactcacggcgcgttggagcccgggcggcgccgggaacagctgccgcggcgtcctctagcagcgcgcggctctcccgggacctgcgccggccgggggcggggagaggcggggaggggaggccggcgggcgggaaggggcggggagcgcgctcctgcggcggcgacggcggcggccgtcctcatcccggcgcttgagaggacgcggggctgcgcaaatggcttgtcccgctctcggtctggaagctcttcagcccctgcagcccgagccgccccccgagcccgccttctccgaggcgcagaagtggattgaggtaggtgcgggtggctggcgggcggccttgcactggcgccctgagccacggacccgcgcacgctccgaccgcaggtccagccttgcctccccccaaccgcccccactttcttttgccagctgctccaggtcacccccccgggcctcggcgagccgcgaaaccttagcgctttggcattggaatcccgggcgagggtgggcgtgaaaggggacactgcagtctagctgcgcgcgtgagggcaggaagggatcccctgcgcgtccatccttcctgcccgctggcctcgcaaatctcagctagcgccgcttccaggcgctgccaagggaagcgcagtgctagcaaagcgttgcaaaggcgcaggaagcgcgagcccccagagacttcaccggtgctcgcatttcggggtatcttgcttctggtcccacatttcgccccttgtccccctaccccgcacccttccggagc

SEQ ID NO: 222395 - DNA, 714 bp, Homo sapiens
  chr4:41883807-41884521
  hyper
cgcacccgcgcctttccagcgcccgggttcccaaaccatcgctaaaggcggacggggggcgccaggagtaacggctgctccccggagaccccaccgagcccagcgcccgcccccgccccctgggcgccctgccccattttctccctttcccaactatcccagacccccagaagggccagaattttccagaactgtcccactccacccgcgcccagggcttctgcacattgcccttggcaggacgcgagccggtcgaggggcatttaggggtggccctgcacggccctcactgctgtcccttcttctccctccgttctccgggccagggtcctcggagaccccgttccgcggcaagtacccctcccccacccccggaggcgggtgcagtgcagggcgggggcggcggtcgcagcggctcagaagccgaccctccttgaacccgaagctgccctggcccgagtatccgcactggcctgggcccgagcgaggctgcaaccctgtgaaaccccctgcaaggcggaagcctccaaacccaaacgaccccgagggcgattccgccagaaatccaacgcgggcccaaataaagtccgaggcctttttgtcggaagcccgggaggtgcccggccaaggtgtcccctgcccggccaaggtgggggctcgaaccctgagcggccgcgccggctacttacgttgaaggtgcgcgcattccagacg

SEQ ID NO: 222396 - DNA, 1566 bp, Homo sapiens
  chr4:42152842-42154408
  hyper
tgtaaggctcgggccgagatgctcgggaggggcaggaccccgcggcgcggcagcgtgccacggacggggacgaggggatggcggggacgacgacgtgggcggtgggagcagagtgcctgcgactcccggggcaggaaggaggggcgggatggttccccgcgcccgaaatccacggcgtggcggacgcggaggagccccgagtctcacaaccaaggggtgggaaggaaaagggacagagcgagacagagcgcccccgagaaacacaggcgcacaaaaaaagacagaaggaaaaacggaactgagagccagccagcatggactgcgacagcgtgagagtgcatcaaagaggtggcgaagaaagcactagaaggcaaaggagaagtggagagaagaagaaacaaatggaggaagaaggagaaagggaaaaagcagacggaaaaagtgaagtagtacgagggcgtcccagcggggcggcccgagaagctccagcttcttcccgagcggccgccgctatcccccgggggggcgtctggccccactccggaccacgcccgagcgatcctggtcgccgactgccacagccgtgcttcccggcgcgggatccaagccgcggagccacctgttaggcgcgcgccgtcggaagcccaggcgcggcggcgctggagaatcctctcgaagtttccgggtgcgcggggaggccccaggtgcgccccgacatcccgacacggcccagcacgggtaagtgtcggcggccccccgcttctccttcctgggtcccctcccgctgcccccggccgtggcgggaaggaaagttgtgcggagagttggtacctgcgctgagctccaggctggcgctgtcgctacccgtgccgccggtgccggcggccgccgccgcgcctgggccatacctgacgacagcggcgaacgaagacgacgaggaggcggcgggggacgcgggcggcggctgcgccggagtcctcaagtggccctgggatgtggcgggcgtgcaggacggcgacgacgacgaagcggcggcggcggcccggccgggcccgggggggtaggagctctgcgcctggaactgctgcggcggcggctcgctgctgctgatggagacggcggcgtgcggcgcgaagggcggcgggggcggcgggggcgcccgcacgtgcggcagctccaccagggtgggtcgctcgtagcgcttggccagcgccggtctcttgctggggaacgtcttgaggacgctgtaggggctgcgctgcttgtagattttggggacgctgggcccctcctctgccggctgcatctcttcctccatccggcgcctcggggccggtccctcggagcacgtcccctccccgccgggcgccgggctccgagggtgcctccgccgcctgcccgccgggtctgccctggtgcgcgcgtgtgggagggtgtgtgtctgtgccgtggccgccgccgccgccgcctgtcgctgaggctggcatcgccgagcccccgcgcggggggctgccgcccgagctcctgattgacaggctgcctcgccaatgcctggagggagaaagg

SEQ ID NO: 222397 - DNA, 180 bp, Homo sapiens
  chr4:42154471-42154651
  hyper
cgccgcagccgcccgcggggtctgcctggcggctccgcgcctccgacggggagcgggggaagggggaaagcgaggacctggaggacgcccgggaactggtgaagaaggtggggatccgggatctggctacggcgagactttagagacccagatgtggactcgaggcttctgcggctgcgg

SEQ ID NO: 222398 - DNA, 1620 bp, Homo sapiens
  chr4:42399071-42400691
  hyper
tgcaacagggcacagatgattcgacaaacttcaatgactgcaccgcattcatgcattatatccattgaaaagtaaatccagcgtctccactcgcgcgcccacgtgcgtggataaacgcgggaattcggcagccctcaacgtcactctgcagagatttccgggctgtgagagagttggggtgtgcggcgggggaggggagggtctgatatcttcaggttgagagtcaagtcctgggggagcggcatgggcgggggtggccggggggaggcggaggatggagcgcgaaccagaaagcgcagaggaccctcggcccgcgccgcacccgctgtgattagctccagaggcgcgatccgggagggcggactctttcttaaccctcattgtctcctcctccctcttcctttttaaaagacgccttgcgggcagagctgtcagcaaccccgcggccgtttgtacttggccgcggcggagctgactcctgctcctgtgacagataggggctggggctgagcggccgcctgtctggggtactcgcacgtggggaacaaattcttttcctccggctcctctcgggacccggcgatcgccacaggttgggactctgtgcggcgctggagttggcagccccgggcgctatggctcccttgaggagtggggagggaggtggccggggggttggcgcgcccctcgcgcggggagcgctatgagccgggcgaagggcggcagcgacagccccagcaactgcctctgccggcgcctcccgcaggccctcgccaactcgccccgcgcaccatgctgactcccggcctgcggaactcgtagtgcagcccctgtcgcctccccggcccctgctatcccacgcaggactggcttcggccgccggggccagcagcttgcgacgtgtccctggggaggcggaatcgctgtgcgccctgagcccgggctcagcccttcgctttccagctgcgtcctgctcccggccgcccagggagcccagtggcgatgagggcactgctggcgctttgccttctccttggctggctgcgctggggcccggcgggcgcccagcagtccggagagtactgccacggctgggtggacgtgcagggcaactaccacgagggcttccagtgcccagaggacttcgacacgctggacgctaccatctgctgcggctcctgcgcgctccgctactgttgcgccgcggccgacgccaggctggagcagggcggctgcaccaacgaccgccgcgaactggagcacccaggcatcactgcgcgtaagtgcggggccctcggggacatatccccgcccgcctaacggcggcggctgcatgtgtgcgcgggaggatgcacagacccaggcaggtctatgcgccttcctgggtctgtgcgccagggggacgcggccgggtgggggaatcaagggatgagtgggtggtcgcgtttcagatcatggtcctctattcatttgcagtcccgcttcccgccacttgcggtctctgcgggtcggcccgcagggaaagtttgccagggacagtgaggagcgcggggcttgtgcctggtagccggggggaagacagctggagctcccgggagaagggtagtgcgggtaaagcca

SEQ ID NO: 222399 - DNA, 420 bp, Homo sapiens
  chr4:42657975-42658395
  hyper
agaggacaaacaaaccttgggatatttacagtcttggctttgacgcgagcaaaatcaaataatatttacagagtgcctgccacatggcaggcaggatgttgagggctcctcggagacgatgaagagtctgggccctcggaaagcttacttgcttctaccccggagcatctgttgctcagtgttgacaaccatggccattcaagagctggccccaggtggagcaaagaaaacagcttccacctggctgaaaagtcagctcagctggccgaagtgagggtttcgggcaaaagggaaacacaaaaacgaaacctcagacgcgagccggtgggactccgctgcaggaggcagaattgcagaagctgtaatgcagggaacccactcggcacccgaccccgatgaaggctccccgcgcttcgagag

SEQ ID NO: 222400 - DNA, 180 bp, Homo sapiens
  chr4:42658520-42658700
  hyper
gagtggaaatcgaactggtggggagggaggtgggcagggcgagtgagctcagtgactgggacctaatggtcacactgcggtgcaaagcacgcctcggggctcccgcggagaacacccattcgagggtactggagcctggaaagggtctgcgagtacactgggggcagcgcggggggaagg

SEQ ID NO: 222401 - DNA, 137 bp, Homo sapiens
  chr4:42659536-42659673
  hyper
ggcaggcgaaggcgaaagggtctgggactacaaggtttagctcccagccagagcaggaaaggaacgactgactgttcgccatctgggtgtaattctaacctctctgcacgcccagcccgactcgtggcctgagccgc

SEQ ID NO: 222402 - DNA, 105 bp, Homo sapiens
  chr4:47487073-47487178
  hyper
accaaaccgtcaaccgcgagcaacctgtacttgggaggtgaaagtcagaggtgagattgtaagggctctgggtcactggggcatctgcgctgggcagaagggcag

SEQ ID NO: 222403 - DNA, 240 bp, Homo sapiens
  chr4:55524088-55524328
  hyper
cgcggctctgggggctcggctttgccgcgctcgctgcacttgggcgagagctggaacgtggaccagagctcggatcccatcgcagctaccgcgatgagaggcgctcgcggcgcctgggattttctctgcgttctgctcctactgcttcgcgtccagacaggtgggacaccgcggctggcaccccgaccgtgcgactactcggcgaagcctgtgcctgggagggtggtacccgccagggtg

SEQ ID NO: 222404 - DNA, 229 bp, Homo sapiens; identical to SEQ ID NO: 199420
  chr4:55561714-55561943
  hyper

SEQ ID NO: 222405 - DNA, 91 bp, Homo sapiens; identical to SEQ ID NO: 199421
  chr4:55564469-55564560
  hyper

SEQ ID NO: 222406 - DNA, 75 bp, Homo sapiens; identical to SEQ ID NO: 199422
  chr4:55569950-55570025
  hyper

SEQ ID NO: 222407 - DNA, 45 bp, Homo sapiens; identical to SEQ ID NO: 199423
  chr4:55592094-55592139
  hyper

SEQ ID NO: 222408 - DNA, 302 bp, Homo sapiens
  chr4:55593416-55593718
  hyper
tgctgattggtttcgtaatcgtagctggcatgatgtgcattattgtgatgattctgacctacaaatatttacaggtaaccatttatttgttctctctccagagtgctctaatgactgagacaataattattaaaaggtgatctatttttccctttctccccacagaaacccatgtatgaagtacagtggaaggttgttgaggagataaatggaaacaattatgtttacatagacccaacacaacttccttatgatcacaaatgggagtttcccagaaacaggctgagttttggtcagtatga

SEQ ID NO: 222409 - DNA, 62 bp, Homo sapiens
  chr4:55595497-55595559
  hyper
tagggcccaccctggtcattacagaatattgttgctatggtgatcttttgaattttttgaga

SEQ ID NO: 222410 - DNA, 34 bp, Homo sapiens; identical to SEQ ID NO: 199425
  chr4:55598031-55598065
  hyper

SEQ ID NO: 222411 - DNA, 42 bp, Homo sapiens
  chr4:55599306-55599348
  hyper
tggtctagccagagacatcaagaatgattctaattatgtggt

SEQ ID NO: 222412 - DNA, 96 bp, Homo sapiens; identical to SEQ ID NO: 199426
  chr4:55602683-55602779
  hyper

SEQ ID NO: 222413 - DNA, 34 bp, Homo sapiens; identical to SEQ ID NO: 199431
  chr4:56412390-56412424
  hyper

SEQ ID NO: 222414 - DNA, 180 bp, Homo sapiens
  chr4:56501628-56501808
  hyper
gtgatgagaagttctctattccttttcctgatctagtgcctgaaaaccgataaggcacaaagcccactccttcccttctaagcggttagcgtggggcccgttgtaccgctcaggtttatctcagcataacactagctcactcaccaaagaggctgagcactcgccaagtttaccttgcct

SEQ ID NO: 222415 - DNA, 180 bp, Homo sapiens
  chr4:56501899-56502079
  hyper
ctattttagtacccgtttccacgggccggggggtctggaaatcccgaggatgagggaaccctaccagtctccatctatcgcagccggcccggcgcagggtctccgctgggcatcaacgagcagggcctgggtatttcggccctggccgggccccttgctcctacgtcgctagttgccctg

SEQ ID NO: 222416 - DNA, 420 bp, Homo sapiens
  chr4:56502143-56502563
  hyper
agaagccaagtaaaggtgagagaaagagggtggaggagagcggtgagtggagccagagagaggcgcgcatggcgtggaagcggccgggtgcggggccgtcttacctcggcaggcgcccgcgcaccaggcgagcagcagcagcagcagcaggagcggggacgccgcggccacctgtccggcgggcgacctggggcggcagctctctgttcgcagcatctcggcggctgcgggaggctcggtgctagggacgctgcgctgcgccacgcgtagctggtgctccacctggtgccctggctgtgcctcggggcccggacacaggactgagcgcccggcgagccgccaacttttaaatctcgcgcacaagtgggctgggctgcgcggtccccgccgcgcgtcacctcgccgcctgccgcccccggc

SEQ ID NO: 222417 - DNA, 980 bp, Homo sapiens
  chr4:56914935-56915915
  hyper
atgttctcgccacacgcaggatgagcctcgctgtgagcccaccactgtaacctcagaccccacgagttcagcactccctcgagtcaggctttgcagaagccgggagggcactggtcaaccccacgcccctccttggggcccgctcctggtttctgggcacccctggggaggggagccatctggtgtgcgccactcccggagggcgcgagaaggaagccggcgcctcacgctcagctgtccctgggcgaagccgggcggggcggcggcgcgggtccgagcgcccgaggcgccggcggagcatgtgaccacgccgcgcggggccgggcgcgcagtgccgcgcggtggcggcagtggggagagcaatggaggccacggccgactgagaggcgggtgcgctgctggtgctgctgccgcggcggctgctgatgcggaggctgccgcgcgcagtgccgccgagtccgccgcccgcccgggaccgccggtcgccggccagccgctctgccagccggagcgccaggcggggacctcaggtgagcgcctgctcggcccgcggccggagccagacaatggggacaggggcgggcttctctcctccactcgcgcccctccgggccgggcccccgcagcgccccgggactccaggggacctggccccgggggcgtgggctcggcgcggcgggcggtgggcttcggggcggtgtccccatgtgggaggcgcggaccctcccggaggaacctgcgcgcggcttgcgcgctttggatccccgcaggggaacctgccgccgggctgcaccccgggaacttgcggagaatatgggacctcgcctgccttctcctcttcccgcgcctcgccatcctgtccccaggtccctggctcggtcccgaccgcggcaagggccagaaccagacctcaccgtccgggatcgcggacgccgtccgggctcagccctctccccaccgcccccggagctgcattgctt

SEQ ID NO: 222418 - DNA, 597 bp, Homo sapiens
  chr4:57396531-57397128
  hyper
ttagtccccagatgcgcccagaaggtcctggagagtggtgcgtccccttggcaaccgtacaacgcgcaggaaggcggagtgagatgaggctgagtccggccggggcggggctgtgtgggactagggcggggctcgggggctagaccggggcggggctgtgtagggctggggcggggctcggggcggggctcggggcggggctgggcgcggggggccccggcagcccttatcgtatcgcgcagagagcaaactgcgcctgggcaaccagtcgggagggtgagtcccgcgcgcgacagaagcttctggcgcgaatggagaaccaagagtttctaagttcatctgcgccgtccgaggtgaccgatgggcaggtctcaacagaaatatccacttgctccgaagtcttccagaagcccattgtgctcaggattctcgacactcacagagagcttgaggagtccgaggatcccgagaaacacgagaatcccgaggaacccgaggaggtcagggagcaagaccagagagacgagtccgaggaatgtgatgagcctcatgagtcctatgagccccacgctccctatgcgccccacaagccccggg

SEQ ID NO: 222419 - DNA, 180 bp, Homo sapiens
  chr4:57521635-57521815
  hyper
acagaccagaggggaccgagccgggaaggcgagacagggacaggcgagagacgctgctcccaactcgcagagggagaaagcgtgtatcccgggctgccggggagagtggaaaagaaaggactggtgaccgaggggtttctgcgcagctcccggggaaccacggctggatgggggtggcgg

SEQ ID NO: 222420 - DNA, 900 bp, Homo sapiens
  chr4:57521866-57522766
  hyper
catgcagggtctgggcccctgggatgcgggcagaagcgatgggagatcatggggagggcagcccggcgggaggcgcggacgaacaggaccgcccagccgcgagaaggctcagcccaggcaggggtcggggcgcgctgggcgcgtgtggggacgcacctgggtctcctcctcggaaaggcctgcctcggccgcgatgaggcacagcgtggtggaatccgggtgcttgtcgaccttgttgaagttgtactccaggatttccacctggtcctctgtggggccgctcgcggtctccgccgacatggtccctgcgcgctgcggggcagggagaagcggcggcggtgagcgaggcgtggagcgggcgggacgcagcgaaggaaggcggtcgcggcgccgccgggcagccccagccccaggccgccccctccagcggtgccacggccgcgcaagtccccggtggctgcacgctgagcgggggcttacggctgccccccacccgggcctccctccctggactgagcgctgttgcgggctgacggcagagcctagcgtcctgcgcctcccgcgccccccgggaccccttgcaggaactgtatccctgcctgcgacgggggcgagatagatgattccgcgggccctcaccgacctccggctctaaggaaggagtgaaggaagcgcgggggtgattttgagaaatccccttaaaaacttcctcccgaaagggggacctcccctggggacagacttgacagatcgcgagggtgggttcgcccgagtccgcgactagccggcctccggcctccccggtaggcggccttctgtctccgcagtgggttggcgctttggggccctctccaggcagggctgcacaccccacccttcctccaaaaaagttccccgcaa

SEQ ID NO: 222421 - DNA, 300 bp, Homo sapiens
  chr4:57687556-57687856
  hyper
caagaactaaagagggtggctgactccacaaagccacccccacaacccccagttcgcgttcctccacctggcaggtcctctggggaaccgccagtaacgggcgcgcgggtaccgtcgccgaggccgcccggagcagggcagggtccgccgccggtctgactcccaaacccgcttttctccggaggtccccgctcgccaggaccgctccgagcgctacctgcgaaggtaactgccaggagcagcagcgccaagcgcagcaccgacagcgccatcctcctcccgcgccggctgtcttgcccc

SEQ ID NO: 222422 - DNA, 600 bp, Homo sapiens
  chr4:57976405-57977005
  hyper
ccggctcgcaggggccgcaggtgtccgaagaggaggaagaggagaggggcaggagcaggagcagcagcccagcggcgccgaggagcagggcgcgcagcgacggccgctccatggcggggtgcggtggcagcggcaagggcgcgagtgagccgtgtcgggccggccggcgccttaaacccgccgccccgcccggcctgtccgcgggaaccacaccccggggcggtgagagcacgggggccccgcccgtgccgccctcccggccccgcggggcctgcgcgcgcgctcctgctggcgtcggggggtgagcgggcacccggcgtgaccggcccatgggcgctcggtctcacgcccgcttcgcagagctcaccccgccagctcctgctcggtccccagtcccctgccccgagccctcagggatcgcaccgcagtgcgagcggctcttccaccctctggtttctccccgtttccggtcaatatatttaaacttcttaacaaccacggcttcgagacgatccagggtttcatctattaaatcctccgtgggcctgagacacctgagtgctcattactctgtggtttgggaagctctcttaagaacaa

SEQ ID NO: 222423 - DNA, 300 bp, Homo sapiens
  chr4:57977057-57977357
  hyper
tgtggtcttgggtgtcaagcactaaaaggacaaaccgttgccaaccacttccctttctggaacctcttaactgcctgcacctccctccccgctttgtctcccagtggcattcaacaagactctgtgctttttttgtgctgagccgttttcagtgagtactggaatccgtgtgagagctgtgcccttgttttgagttcttgctgaactgctcgccctccagcaagcctctcgggagaacagagcgcagctgagaggagcaggggtcccagctccttcctcgttggagctgccacggaggca

SEQ ID NO: 222424 - DNA, 180 bp, Homo sapiens
  chr4:66535565-66535745
  hyper
ggggtcctacgccttctggcacgcggctcctccaaatgtaggaaccacggatccggctgagacagctgaagtttgcttctggctcctctcgcctccccctttggtggggttaaatgaaatattagttctggttgctagtgcagatctggactcggatcaagggtgtcgagagggtcctgg

SEQ ID NO: 222425 - DNA, 180 bp, Homo sapiens
  chr4:66536056-66536236
  hyper
agggactgacggctgccggccggtaggagcgcggagctgcgctgcggcggcccaggagctgctgcggttcccgctgctcggggagcaggcggtgtgtgcgcggctgcgaagtcgaggttgaaactgcaccgccaaggcgcgctcctgctgtgtctggagctccggcgtctcctctgcctc

SEQ ID NO: 222426 - DNA, 367 bp, Homo sapiens
  chr4:66536313-66536680
  hyper
gtgagaatctactgtaagtgtgagttgcttcgacgaagtcacacacccacggagggaagtaatctggaggctgccttggtgagtgttgcctagcggtctccgggaaaggcgcgtcttcctcccgggataattagggcaaggaatcctgacgacgctggcgaggactggggttcccgggaggcggaagggagatcagccccagctcagccggcggcccttagagacgcgggtccctccgtttggcatcttgcctgctgtccctcacaggctgtggcatcaacaaccttgtcgtcacatcgccgcgcattcgcaggctctgctggtccgtggctagtttcttaaacacccataccgcttaccgctgctg

SEQ ID NO: 222427 - DNA, 300 bp, Homo sapiens
  chr4:71768019-71768319
  hyper
ctttccttcccctcccctggagtgattcaagacgagcgctacccacttccgccccctccccctgccattggaactagctgagccgaactagttgcggccaccgagcagccggctctcggcacctcctcctccgcctccctgtctcctgttccattcgcctttcctcttctttcctggcccacgccgctccgaggcctcgcgaccgccgagcctgcagcctgccccgcggccaacatgagcttcttgttgtgagtagccaggccccgcacgcgccggctttgttcgggtggacctgggccc

SEQ ID NO: 222428 - DNA, 146 bp, Homo sapiens
  chr4:74702603-74702749
  hyper
cccagcctctgcggggccgctgcgttccagggaactctcccagcaacctgccctataaaaatgtctttcttccccagctggtcctgtctctgctgtgctgacagagctgcgttgcacttgtttacgcgttacgctgagagtaaacc

SEQ ID NO: 222429 - DNA, 180 bp, Homo sapiens
  chr4:77227975-77228155
  hyper
tttcgtttggctgctgcggggcggccctggcgacaccgggaaggacggggatgcggagcaggagaaagacgcccctcttgggggagctgcgattccgggaggccatcagagtggcagcagcggactgagccctggaccttccgggcaggagctggtcaccaaaccaggtattcttccccc

SEQ ID NO: 222430 - DNA, 330 bp, Homo sapiens
  chr4:77228214-77228544
  hyper
acaaacccacctggagctttcctaggggcccattcctgcggacgggctctcctaaggggactgggccatccccacgcccctcggtttcccaggctggttggtacgcgcaggcaggtttcttgtctggtcctccaagggccgcgcccttgccgagtccctcagcgcccgcgcctgaggacttggtcctgcccctccggcggggatgagctcctccacttggcggcgcttggtgcagtgcgggcggctgcagtggcggcgccccttcccggcctttggaaaggggggcttaggtttaggggatcctacaagcctcttcgatctctgcccaag

SEQ ID NO: 222431 - DNA, 206 bp, Homo sapiens
  chr4:78980370-78980576
  hyper
tgcgggaggcccggggaggacaaagctctgcctcgggtcgacctccagtcactggagcagctgccttttctttgctggcttcccaagagaaaggccttgggaatccacgcacaagggtgggggactttcccgtgggtccaggtgctgccttctgcactcttccgggatgtgtgtcaagtgtgtataatctccgcgaaaggcacatc

SEQ ID NO: 222432 - DNA, 300 bp, Homo sapiens
  chr4:81106094-81106394
  hyper
gcctccccggacagtcttcaccgttttttttcagaagcagttgcgctgggggtggggaaagggagggaagggacattgaaaggccgcagtggctggcaactccgcgcccgtccgatgtcctctctaatcccccagtgttctggcgcgtacccacagtgcccccagaccctccgctcgcccgtgcgccgaggtcgttgggttttagacccagagagcacgttccgtaagctcccggcccaaatcccctcggaaaaattaatcacaaccaccagcggatgcaaaatgtgtgcctgtgttgag

SEQ ID NO: 222433 - DNA, 960 bp, Homo sapiens
  chr4:81123807-81124767
  hyper
ctgcaggaggaggggacagccgacggcgcgggagtcgcctccgaggaccaggacgctggcggcggcggcggctcctccacgcccgcggccgcgtcaccggtgggcgccgagaagctgctggccccgcggcctgggggcccgctgcccagccggctcgagggcggcagtcctgcgaggggcagcgccttcacttcggtgccgcagctgggcagcgcgggcagcaccagcggtgggggcggaacgggcgccggggccgcaggcggcgcgggcgggggccagggcgccgcgtcggacgagcgcaaaagcgccttctcgcagccagcacgctctttctcgcagctgtccccgctggtgctgggccagaagctgggcgcgctcgagccatgccaccccgccgacggcgtgggccccaccagactctatcccgccgccgcggaccctctagcggtgaagctccagggggccgcggacctgaacggaggttgcgggtccctgccgagcggcggcggcggcctgcctaagcagagccccttcctgtacgccaccgccttctggcccaagagctccgctgccgctgcagccgcggctgcggcggcggccgcggggcccttgcagctgcagctgccctcggcgctcacgctgctgccgccctccttcacctcgctgtgtctgcccgcgcagaactggtgcgccaagtgcaatgcctccttccgcatgacctccgacctggtgtaccatatgaggtcgcaccacaaaaaggagtatgcgatggagcccttggtgaagcggcggcgagaggagaaactcaagtgccccatctgcaatgagtccttcagggagcgccaccacctctccaggcacatgacctcgcataattgactcggaaaggaccccagctttccacgcgcgcgcaagcacagttaagccacctgcaggaataaacacgcgagaacatccacc

SEQ ID NO: 222434 - DNA, 480 bp, Homo sapiens
  chr4:82135897-82136377
  hyper
gccacaccgagcgaatgcaacgcgtacacacgtccacactcgaacagcacaagcaagagaccggctgggtgtggaatagaggcgcacatcgcgcaacgcattcacagcatgcacacgcgcgcaccccgaccccgtccctccccgcgcgccctcacaccccggcgcccaagacccccggcccacgaacctcaccagacagccgggtaactttccaggtgcgcagcttgtcacctcggcgcggccgcccctgcgtctcagcgtcctctcccacgccgccctccccagccgcctgcggcgccggagcccagcgcaggtcagctcagccagccccgccgtgcacacggtgcgcagcgtgggcccggggctgccggctcagtcgctccggctacgtgtgagccgggggcgcgggttagcgcgatgcgggcaggagctgcggcggcgtcggtgctgccgcctggctccgcggcgggggccggtgca

SEQ ID NO: 222435 - DNA, 85 bp, Homo sapiens
  chr4:84292570-84292655
  hyper
ctgcctctgtgatcacgtgatattctcccgctgtgtcttcacatcatcttgtcaacctaaaaatcatccaaagggtcagagtcta

SEQ ID NO: 222436 - DNA, 180 bp, Homo sapiens
  chr4:85503877-85504057
  hyper
cgcctcccagctcctcagcctcctcccgccccaccgctcccaccttttctcaggcccccacctgccagcacgcagaggcgggggcggggtcgcgggccgggctcctgacgtcacctcacggggaggcggggctgtgggaaccgcagtgcagcgcagaggggcggggcctgcggcgcgaga

SEQ ID NO: 222437 - DNA, 955 bp, Homo sapiens
  chr4:85886793-85887748
  hyper
ggctccttccataatcgaagggcttccagcgtagggcgtagggggagaggcccgaagccctggagacagcgcccgagggatggaggccgcgctcggctgcgctcaggtccgggtggctccgggagctgagaccccgcaggatgcagcgggggggggccagggcctgatcccctacccctgcgagccagggccgcctacgcccccactgcttcccacaggtaacgtccagccctctcctcccctatcccccgaaatatcccggttccgctccgctccgctcgccgcccgtgaccccgaccccgacccgtccgcgacggcgccctccccaggaggcagcggaggactagggccaggccgcccaccctggcggcggcggcggctcccggccaaggcggaccctggggaggacagcagctgggccgcggcctgtccctagggggagcgggcgcagggccgcgagtgggcagcgcctccgccccgcacgaacaaagcggccaggcgcgccgggccgaggcagcaccgcctctccgggagcgcggggggcggggaggatggcgggggtactcacctgagggccggcggagggcgcgggcgggacaggcccaggagacgggaccgcggcgggccggggctccgcgccgagggcgcacgggctacggggaaggggcgaccggcgcgacgtccgcggcggggcccgggagccccgcgccgcgggccgggggccggggcccgagctcgattctgcggccgcgaggtatgggaaccggtccgccgggccaggcagcggtgctaggcagcaggggcagcgacgccgccgcctttcccttctcctgcccccgtccctgctccgccgcgtcctcgtcctcgctgggtccccgccgccgccgcctcagcctcggcgctcctcgggtttcttctctccatcaaggccgggccgacccgcagggaccatccc

SEQ ID NO: 222438 - DNA, 360 bp, Homo sapiens
  chr4:85887857-85888217
  hyper
atcctcctctttcccctcctgctcctcctactgagccggccgcagaaattgcagccgctcagcttctaccccctcctgcctttccttcctctttccttacttccttcccttccctcggcttcccgctcttgcctcactctcagcggctgccttcgcccctgtctgcagacagcgccgctggatgctcccagctggacttcaaccccactcctctcagtccctctccccactgccttccagacgcgcctcttccccgccccgcgcccctctctcctctcccacccctgcccctctccgcggcgctcaccctcctcagtcccagtttctgaaaggactcagctgagaaaggacaactgggtt

SEQ ID NO: 222439 - DNA, 180 bp, Homo sapiens
  chr4:85888272-85888452
  hyper
acgcaaaggtgcgttaattttactctagccagagtataaaagaactgcccacgccagctattgtactacgcagcttcgaaactcctgcacgctctcctgtgtggctcccgtccgtgatgggactgtagttgaggagctcggtctcaaatggtgccttccgtcagtgaccttgagtcggtt

SEQ ID NO: 222440 - DNA, 101 bp, Homo sapiens
  chr4:86396088-86396189
  hyper
tcagtggcgccaggcggtgtagctccagctctcagataacccaggctttgggagggcggggctcctgccggcctcccctgtagtgcggctcgagtcctgtg

SEQ ID NO: 222441 - DNA, 543 bp, Homo sapiens
  chr4:86396422-86396965
  hyper
tgtcaaggctgcggcggggaccagagaggagcctggcgggggtggctgggtggctgggggaatccccccaacttcccatcgcaggcgcagctctctcggccgcctatttcctccgaaacccgcgctgcggagcagcccagtgcatagagttcaacacttccccttgttgtggaaagtaaaggagcctcactaccacctttttttctttgcgttttcttactgctggtcctgggagccttttccttcggagcagcagccctgtccggcatctgtcttgagctcccagcaaggtaggtgatgcggtcgcgaggaagtgcgcggagctaccgcgggaaggacggacgcggctgcctgcgccaggggagggggctgcggggggcggggagggggctgcggggggcggggagggggctgcggggggcggggagggggctgcggggggcggggagggggctgcggggggcggggagggatcgcaggaatcccgtgctgatgtagcctgtctgtgtttgtgtgtgtgtgtgcgcgcgcgcgcatgtttgt

SEQ ID NO: 222442 - DNA, 570 bp, Homo sapiens
  chr4:89378391-89378961
  hyper
ctctgggcctgggaccccgcaaagcggcgatggagcggaggtcgcggaggaagtcgcggcgcaacgggcgctcgaccgcgggcaaggccgccgcgacccagcccgcgaagtctccgggcgcacagctctggctctttcccagcgccgcgggcctccaccgcgcgctgctccggagggtggaggtgacgcgccaactctgctgctcgccggggcgcctcgcggtcttggaacgcggcggggcgggcgtccaggttcaccagctgctcgccgggagcggcggcgcccggacgccgagtgagtggggctggtgtgtgagggctgtgagggctgtgaggggtgagggctgagggctgtgaggggcgggcagccgggggtccgcgcctgagggaggagagcccagaaggccgcagacgcgcgcctggctcggatagtttcgccgacggcgcacctgagctgtcttttatcccggtcagtgtcaggcgcggggtgagcgggatactggcgaccagcggatcctccgctcagcaaagtggccggtgcggggcatgcgggcaccgtcttcatcctttt

SEQ ID NO: 222443 - DNA, 105 bp, Homo sapiens
  chr4:91760071-91760176
  hyper
cttctcctgttcaatcgtttctttggaaggcagtggatttttctcttgcgtctctgtcttcttcagtttcggcttatcgaatttctcgatctcagccatatcggg

SEQ ID NO: 222444 - DNA, 233 bp, Homo sapiens
  chr4:95373794-95374027
  hyper
ctgtgccttcggtgcgttttacaataagtggaaaaaggaagggcgtgtggacagggcagagcttggaaggaaaattcgtggcggcgctgggcagggcagatttagggtgtgatcgccagatcctatcccaagtccgccttcctgacggggaggacgtctgaacccgcctgccacggaaacggcccgttcggtagccttatttggccaacaaggctaggcgcgaatccctcctg

SEQ ID NO: 222445 - DNA, 215 bp, Homo sapiens
  chr4:100867919-100868134
  hyper
tccccgccccccgcgggcccctagggcgcgatccgcatccgtcccggcccaggaccaacctcctgggccggggcgtccgagctgactcggtggtccgcgcacggcgccagcaggctcgaagcggacctgcccgggaggcggacgatagcagccgggctgcccatcgcggggaggggttccgcccgggacccgattgccggcattggtagcgccgt

SEQ ID NO: 222446 - DNA, 220 bp, Homo sapiens
  chr4:103266878-103267098
  hyper
tctggtctcggggacgcatgcatcttttcgtgatcttgatgaaaccaacttgctgaaatggagcctggagacccttgcattgtctacataattaacaggaattgcttttttttctcacttcttaaaatcagaggagaaagaggaaatccaatggtagcggtggcgggctagctgagccagcactgcccaagccggcccttcctggcgggatatccgcaga

SEQ ID NO: 222447 - DNA, 979 bp, Homo sapiens
  chr4:103997159-103998138
  hyper
aaagcaagcaagaaaacccacgccaacaccttacaacagtaaacagacacgcgcccgtcaccgggtgtacaaacagaaaaggctgggcccctcgctcgcgtctccggtccagcaggcctacagggtacccgccgctggcgctgggtttatttttacccttagtgtctctggggcctctcacctggcagtctccggcgaagtcgaccaggctccgtctgaacgattaggaaaggggctgtgggggaggcggcggagcccggtctagccaccgcgctctggggttcccgattcgcgcatcttcccaggctgagccgggaggctgcgttgactgcagataaacggtctcagggcgcggcaccgcgtgtagtcggccccgcctttcgcacgaacccgctgggcgacaccgcgcagggaggtccgacccgtcggcgccggtacaggctccggagtaagcatgggttggtccggggcccgcagcggcagccccgtgtgccctccgccgggtttcaggtccggcggcgcgggtgcagagccgcgtgcgatgcctggtgcgcgtggcttcccccggaaaggtggcgccaggccgaccatgggcccacgtcccggggcctcggagcggcaccgcgcggtctttcagctgcttatcctccctgggcgggtccgcaggcttctggggccaggaccagcgagctcccgggaaagcttcccggaaagcttacccagagagcgcggacccaggcgccgagtcttcccggagatgacgagacaccgcgagaggagcacagcgcaggctcctcgggactccgcggcgcaggccgggcagcccgttacttgttttatcgttcccgaaaccaacctctaagttgtctatcagtcctccaccttttagctgtacctcttagaagtgtcttctcagctgcggtgggaagataggattctttcttaaggtgaccaattaaatggccggataaaagacttg

SEQ ID NO: 222448 - DNA, 387 bp, Homo sapiens
  chr4:106067031-106067418
  hyper
aaacagaaggtgggccggggcggggagaaacagaactcggtcaatttcccagtttgtcgggtctttaaaaatacaggcccctaaagcactaagggcatgccctcggtgaaacaggggagcgcttctgctgaatgagattaaagcgacagaaaagggaaaggagagcgcgggcaacgggatctaaagggagatagagacgcgggcctctgagggtaaggtgggcgcaagcggaggtgtggtgcggggagaggtgccagtgggtggaggcgggggccagagcgagggcacgtgcgggtacactccggaggaggtgggtgcgcgcgggggcgtgtgcgcgggacctcgaagtggtggtggagtgcagaccagcaaaaagtttcaaaggga

SEQ ID NO: 222449 - DNA, 295 bp, Homo sapiens; identical to SEQ ID NO: 199518
  chr4:106067841-106068136
  hyper

SEQ ID NO: 222450 - DNA, 105 bp, Homo sapiens
  chr4:106068588-106068693
  hyper
tgatagggtgtttttcgacccttttatcagctgtagggtctgggtctgggtttgtgtctgcctcctcctaccttcttatccccctttagggggctgtacgaagtg

SEQ ID NO: 222451 - DNA, 146 bp, Homo sapiens; identical to SEQ ID NO: 199520
  chr4:106111516-106111662
  hyper

SEQ ID NO: 222452 - DNA, 4461 bp, Homo sapiens; identical to SEQ ID NO: 199521
  chr4:106155053-106159514
  hyper

SEQ ID NO: 222453 - DNA, 240 bp, Homo sapiens; identical to SEQ ID NO: 199522
  chr4:106159634-106159874
  hyper

SEQ ID NO: 222454 - DNA, 180 bp, Homo sapiens; identical to SEQ ID NO: 199523
  chr4:106160114-106160294
  hyper

SEQ ID NO: 222455 - DNA, 120 bp, Homo sapiens; identical to SEQ ID NO: 199524
  chr4:106161134-106161254
  hyper

SEQ ID NO: 222456 - DNA, 2721 bp, Homo sapiens; identical to SEQ ID NO: 199525
  chr4:106161374-106164095
  hyper

SEQ ID NO: 222457 - DNA, 230 bp, Homo sapiens; identical to SEQ ID NO: 199526
  chr4:106164712-106164942
  hyper

SEQ ID NO: 222458 - DNA, 177 bp, Homo sapiens; identical to SEQ ID NO: 199527
  chr4:106180762-106180939
  hyper

SEQ ID NO: 222459 - DNA, 107 bp, Homo sapiens; identical to SEQ ID NO: 199528
  chr4:106182911-106183018
  hyper

SEQ ID NO: 222460 - DNA, 161 bp, Homo sapiens; identical to SEQ ID NO: 199529
  chr4:106190752-106190913
  hyper

SEQ ID NO: 222461 - DNA, 376 bp, Homo sapiens; identical to SEQ ID NO: 199530
  chr4:106193708-106194084
  hyper

SEQ ID NO: 222462 - DNA, 3101 bp, Homo sapiens; identical to SEQ ID NO: 199531
  chr4:106196198-106199299
  hyper

SEQ ID NO: 222463 - DNA, 1601 bp, Homo sapiens; identical to SEQ ID NO: 199532
  chr4:106199359-106200960
  hyper

SEQ ID NO: 222464 - DNA, 281 bp, Homo sapiens
  chr4:108853113-108853394
  hyper
gctcctggctcacctagcccgcgtgtacggcagcatcttcagcttctttatcggccactacctggtggtggtcctcagcgacttccacagcgtgcgcgaggcgctggtgcagcaggccgaggtcttcagcgaccgcccgcgggtgccgctcatctccatcgtgaccaaggagaagggtgagcgggaggtcgtgggctgtgggtacgcggatgccgcggatgagtctccaggtgcgtgggggctgcagttcctgtgccccttccggccgcccgcgcccccag

SEQ ID NO: 222465 - DNA, 104 bp, Homo sapiens
  chr4:109089919-109090023
  hyper
agagctgcgccccttgagttcgcccggccgaggggaggggacgccccgagcttggccgcgtgcgaggctccgggcgcgtcctggttcctcggcccgagagcgcg

SEQ ID NO: 222466 - DNA, 1164 bp, Homo sapiens
  chr4:109093421-109094585
  hyper
ggggcctacggaagaggatacccaggagccagggagaagggctagaaaacgaataatgtgactccagaggcggaaccccgaccccctctatttcccaccccggcttcacccggagacgaaagctgtgggcatcttcagtttaacggacttcgcggaaaaggagagaaggggggcgagggaaatggcagtttgtgtcccaggggttcttccccttcttcttgccgcctcctaaagacaaacaaactcaaccccccaccctccggggtatcagggaactcgtgggaccgtgaaaaagtcgttcccaaatccggccgcctgcggacgtcggacttccgcggggccggcgcccgttggcgtctgtagctcggcgcagccacgcggggctccagcgagcggggtccgccacccctcgcgccctcctgcggctttcccagcgctgggccagtgcaggccgagccctgcgtccctgcctcgctgggtgggggtccggggcgcggctgtccacagggccgcctcctcctgcggcccgcggggaaggggcgcatcccaccccgctctgcaggccgcccttctgccagctgggaggcgagggcacacgtcctaaggctgcccaagggggagaggaatcgcgccggtaggagagcgcacgggaaccaggaacgcaaggcgggcacaggggagccgaaggagccagacagggcccggccacgcgccctcctcgctcggctgcgctccgtgacgggaacccaggctcccacgcacggggaatgcctagaacggagctagaatggaggtgggagctggagtcattttgcgggccacaggactgctcatttcgtgggcaggacgtgacattcttgtccctcctttctgaaaaacttttctcaggcgcctgaacttggcatggggaccggcctcgaaaagccggcgggtagcacggccgcggtatccaacccttcgccctccttcccaccggccctccgcgtccctcggcccgccccccgggtcggggacgcgcgcggaaaggccgctcgcgcgctcgagccgtgccttatatcggctgagggaggcgcctgcgcacggccccgcgcggcggcgcggcctttgaagtcgcggcggctgccgctttcatcctttcttttttccctcgcaggcccctttgtg

SEQ ID NO: 222467 - DNA, 211 bp, Homo sapiens; identical to SEQ ID NO: 199548
  chr4:110651657-110651868
  hyper

SEQ ID NO: 222468 - DNA, 156 bp, Homo sapiens
  chr4:111117165-111117321
  hyper
tcattttcagtcccacgagggctgagacctgtctggctcagtactgagtgaatggagagaagaggcgggaaatggtacctgaagcaggcctaggaagtggcctcagagaaaaagcaacaagtaaataagaggcagtatcgactgcagtgggctagg

SEQ ID NO: 222469 - DNA, 411 bp, Homo sapiens
  chr4:111119823-111120234
  hyper
cccctcgtgcgatttgagaaattaacccttggcgagggagtgtgcgaaagagcgcgacctctctccgcccgggggggacagttttgtttacagcgaaggtggttggaagagtgggggaagggcgcagagagaaaggaagtggcctggaggtcatccagatcccctaagcccaacctcgtgggccgccttgctttgaatgaagtttcagcttgcagggcgcatccccgcggcgcgtggacccgagagcttggcgagtaaacgattgggaaatagtaaaacctgccagctctcttgcaagagaactccgggcaaatctacgttgagatcaccagtgaagggaatacgcttcccacctcctcgccctacctctgggaccacccccacccctacccccacccccacccgggagct

SEQ ID NO: 222470 - DNA, 105 bp, Homo sapiens
  chr4:111539229-111539334
  hyper
ggagttgccccatccggcaaggtcctaggatcccggcgctgtgggtgcggctcacacgggccggtccactgcatactggcaagcactcaggttggaggccgggtt

SEQ ID NO: 222471 - DNA, 180 bp, Homo sapiens
  chr4:111543609-111543789
  hyper
agttcatggacgagggagcgcgacgctctactagtccttggctactgccccgccgagcccccgtagccgccgctgcccgctccgggtcgcgctctaggcgcggagtttccccgctgcggggagagccaggggacgcaacccccgccgagttctcaagccaagctgcccccgtctcctccg

SEQ ID NO: 222472 - DNA, 480 bp, Homo sapiens
  chr4:111543919-111544399
  hyper
gggcaaagacccccttcttctctccctccctcccccaagaacccctccaataaggaaagctaacgccgaccgcgctctgcccgccccccccccacgcggcagccctgacagagaagtgtcaagagtgacagggacaggtaggtgatattagatcccctgcggcggcagcagccgctgcagccacgacgcggccctctgagcgcaccctccgcaacgcgcacacgcacacccctcgggcggtcgaacaggagccgggccttgccgcagctcagctccaggcacccaggcgagcgacggaccagatctgcggctccgcgcttccctgttggcctaacatcttaaaaccagaggcgggcttcctggtgccgagacgtcactccgccgcggccctccccagccctctccgcctccgcctcctcccagacccttctccgggtgcgactgacgtggctccgcaccaatcaggacgccccgagccgc

SEQ ID NO: 222473 - DNA, 1020 bp, Homo sapiens
  chr4:113435806-113436826
  hyper
gcagctctagatacaatccctggctatggggaggtgaggtgcatagcggtgcttgtcgggaggtgggggctgccaatagtccatgtctgacccggccgggctggcgggcgataaagtgcagctgtagggggaggtggaattggaggacacggaggaggacggcgcggggctgttggtgcaactccacgtggaggcgggcgaggggctgtctccgctgctgctcagggcggcgctggctcctcccgggctcagcaacactgcctcggagaagagcgcccccggcaggcccccgccgccgcccccgcagtgatccgccaggcgcagggtctcggtgagtgcccagatgtagttgtgggcgaagcgcagggtctcgatcttggtgagcttggcgtcctcggggaacgtggggagcacctcgcgcagcgcgtccagtgccgcgttgaggttgtgcatgcggtttcgctcgcggttgttggccttcagtctacgggtcttcttgatgcgctgcaccgtctcggccgtcttggcgcctcgggagacggcccgcgcccgggaagggcgccgtttgcaatcgtgtaccagacccagcagccgtgcgggccggcagccctccgcacccgcagccacgccgccccgcgccccctgcccggcctcagccccgcgctgccgacgcgccccgcctgacgcgcccggctcctcctcctcttcttcgtcggcgctggatgacagcggggtcagggccgccaaggcgggggaggccgatccgagcagcactaacacgtcctcttcctccttcaactccaaggtctcggatttgacgaacatcctaccgaagagagaaaggggaaaaaggcagtgaggtgtaaggaaagaaacagaggcgcgatcttcgtgtcacaggggcgtgctccggcgcgcacccgagaagaccagctccgaatggcgcggagcaggaaggcgaaggaagaaacccaggcagtgctaaccaaggtcaggagcgccgctagcgctcgctgtgac

SEQ ID NO: 222474 - DNA, 434 bp, Homo sapiens
  chr4:113437617-113438051
  hyper
taaagctcctgttggagctccgggctgcggccggagctggcgaagccgcagcggccgcagaggctcaagctgcggctgttgtcgccgccgctgtccattgtgattggtggctcgcgctcggctggagcgtgccgctaatttattaatgaatggaggtcgcgaggcgcagctggccaatcagggcgccctggactccgggaggcctgcgagccacgcgcaccggagcccgctccctttcagcagctcattaggggcccgagcgctgggggcggatggggggacccgtgctaccgcccccgccttcgtcctcgctgccgccgaggctccccccgcccggcgcgcgcgcaggcaccgcacccggcgctgccggccctcctaactcccgggtgatgggaactaggaattagttaatgggggtcagaatcccggggaaa

SEQ ID NO: 222475 - DNA, 180 bp, Homo sapiens
  chr4:113438123-113438303
  hyper
ttttaaaatggattcatttggttaggggaggagaatggcgtggatggagagatgtggacacctcgtgaacaagtgtgtttggggtccgtcgaaactggcgtgggagagtgaagggagaggacactggggattcaaacaggcgtctcttgggaggggaggtcggataggggagcagttgat

SEQ ID NO: 222476 - DNA, 180 bp, Homo sapiens
  chr4:113438463-113438643
  hyper
tgggtggcagcgaaccgagcgggaggagcggcagagctgctgctcctgcaagcaaatgcgctgcgctgacatttctgtgacctctgctccgcgctggggggcgttgtagggacaaggggcccatcttcccaattctgcttttcaatgagaaaaaagagctgaagggctactggacctcgg

SEQ ID NO: 222477 - DNA, 557 bp, Homo sapiens
  chr4:115520617-115521174
  hyper
tcttccccctaaggaggaacaagagcgggatgtgttgggggtggggaatgtcttggggctgtacaagctcgctgagacttttcggggcccgccgtttccgcgtgcccgcgcgactctcgacaatggacagtgtacagtggtggcagggtttcacgggtccccgcgccgatttgggaatggtacggggtgcccttgcattagagaagcctgtgcgggcccccgggattagagaagaggtgagcgcctgcgggcggggagagaaggacgcgctgctggcaaaaagaagggcgccttccatggactggaggagcggcgagggagcctggtatgtgtgttttggatttgaaggaggcaaaccgcatcggagagtgcaagtagatgcagtgcgtcggggcaaaaggacaatctgaggaggtgggcggggtacccaatctctatatacaagctttctggtttaattgagggtttataaaattgagtacggtaaacctgccattgtgcagcacttccttaggaaaggaatagcctctgtacctgtaccgcgagttcccatcacc

SEQ ID NO: 222478 - DNA, 265 bp, Homo sapiens
  chr4:120549978-120550243
  hyper
gccagcctcctgccccgccccgccccgcgcggttctacgggcgcccaggtgtggtgggcggggccaggcgcagctgctgcgccccccccacccggggtccggcagtgttccgctctcgcaggctcttcagtcccctggttcccaggaggcggcggcggcggcggcagcggcagcgcccggcgagctctccggaagccaagtggcggcggctggaaggaggccgcgcggccgctggggtgcgctgtgtgccaagccgacttctggg

SEQ ID NO: 222479 - DNA, 300 bp, Homo sapiens
  chr4:121843987-121844287
  hyper
tcctgctgcgggggcgcggggggcgcgggcctgggcgctgcgggcgccgggacgccgctcgctgattggcccgaagttggcggctctgacccgcgcccgggcgcgaagcccggagcagggctgaccccagggcctcaaacccggaggcccgcgagctgcgcgggccgtcagcacccctagccccggcgcggcggcgtgcgttcccgcctttgtccagctctgggttttcaaaccttgccccgctgaaccattactccctgtaggggagtctcgcttgcttctcttcagatgcaaaacgaa

SEQ ID NO: 222480 - DNA, 660 bp, Homo sapiens
  chr4:122685855-122686515
  hyper
cccaccgtccctggcacccgaacgcgctgcgagccccgggcctcccacaggagcggagacgcgggtccctgcgcctcacgccggaacggacccgtcagagccgccgagccccgcacctggaagctgggaggccgcgaggacggagaatcgaggcggagacccagcccagcgcccgcgcagctcggtgccctcccgccagtgcccgcactcgggtcacaccgcttgctctcgggagaagccccaaggctcgcggtgcaccgagaggcgcccgggctggagcgccccggccgtgttggccacggagttcttcagctgcttgatgaccacgaagagcaggaggaaaagtaagaagagcaggaagaagaagagcgccaggtagagcagcaagttgagttcccactccatgctggaggcgccggcgctcgctggccctgcgcgctcggcgcgggctgcagctggagggcgagcgcgccgcccgcacacccacctcccgcactcccgcccctcgcgagggcgtcccgctatgggcgccgactccggggtccgtgctttgcctcccccggctccgaggaaacgcgccaaggagctgaggaaatccggcgcagactctcccagctggcaccaaagccttccgcttcgccgagatcctctcaggtgctc

SEQ ID NO: 222481 - DNA, 360 bp, Homo sapiens
  chr4:122871322-122871682
  hyper
tcatttaaaatcagaactcttccctatgggatctactcccagccactgattgtgttcctgtgttctaccggcaggtccagcctgaccaggcgcagactctgcgcgcgcggagcagcgcgcgatcctggggatgcaggggtcatcccggaggtctcggcctcgggcggtgggcctctcgccggcagcagggggcgctgcagaacctcggtccccatcctggagaaccacctccccggctcagccggtctgcgccgcccgccaccatccgaccccaagttctctacctagttctgagcgttcttcctaaaaaagacagtaaaccctgcggcactcccagtgttacgtgacagaaaaaataca

SEQ ID NO: 222482 - DNA, 300 bp, Homo sapiens
  chr4:122871782-122872082
  hyper
tctttctcatgcattagcgcgccgaccgctccttcgtttagaaagagagagagggaaagaaagaaagagaaaaagagagcccgcgcgccggggcgcgagccgctgaccctgcaccgcctgggaaccgcagtcaaagttatcactaaagcggttccccggctgcccgatgcccactctctccctcaggggaccctatagggcttcggttccagttttaccccaaatgtgactgaaccacagagagacgaggcgcctgggcaaaccttcaacccacaccctgtatcgcactgtcccctccct

SEQ ID NO: 222483 - DNA, 360 bp, Homo sapiens
  chr4:122872331-122872691
  hyper
tgtctgaagtcagtgtgcccgcctgcgggctgttccgtgtgcttgagcctggacagagcccctgccacgcactcggcagcccctgtgtccctccaccgcgcgggaccgagggggcgagcctccggccgaggtctgtcccctccaaatcactccaaatcgaactgcctggccgtaccatgtgggtctcggaggtcccgggctcgacgtggagccgcccggcgcgcgccttcccgccccccgcccggcaccgccctccgaggcgcgggccgcggccgggcccggtactcacaggtccggcccgtgggagaagggcggcgggcagtagccgtgcggctcccgctgcgagggcgccgagcgcgg

SEQ ID NO: 222484 - DNA, 180 bp, Homo sapiens
  chr4:123748425-123748605
  hyper
tactgcaaaaacgggggcttcttcctgcgcatccaccccgacggccgagttgacggggtccgggagaagagcgaccctcacagtgagtgccgacccgctctctccgcctcatttccatttcgtgggttctcgcccgctctctcccctccagcctgcaccctcctcccggatcttcactgc

SEQ ID NO: 222485 - DNA, 300 bp, Homo sapiens
  chr4:124318510-124318810
  hyper
gcgttgcttgaacgttgtttgaactcctaggcattccagggggcaaaagcacctcggcaaaaacgtgcaggactgcatgttactttggttcgcggctgacacgccgactgtgcgccggcctgtcaatcaccgggagcagcaacagggagcacatggcaacgggctgcgggcgagctggccagcggcccgcccggggtcccagcccttcgaagaaagggacattcacgagcttctatctctaattctctgtcgcaggcatttcggccgtggaaccccaggctcggaggactgggtgtgagc

SEQ ID NO: 222486 - DNA, 539 bp, Homo sapiens
  chr4:124426677-124427216
  hyper
aggctgtgtacacccgcaagtctggaagggtgatgatgatgatgtgatgatgagttagggcaattataactacggcaaaaaaaaaaaaaaaaaaaaaagagttcgcagggacgcagcgctgccgccgccgccgccgaggccgcgaccacggcccgagccggccaccgcgcgtcaaaggagccattcaaggcccggcgaggcccgggggttgagaagttaaggagcgggaggtggtgcgccggggccgcggccgcgccatttgcatttcaatgcgacccgcttgttgactcagtgcccggcgcttccgcagctcccaccagaatctgcctttgttggttttagctccggtcaagtccacttcttgcatcgggggagccgcgcgcattgagtttgtgtagtcaggcagaacgctcgacaggaaggaaggaggaaggggcgctctgcgcggccattgtctgggcaaccgggcttaagcagccgagtgactatttaatctataaggtgcacttgaatccctcgcaaatcctctcagtgtggag

SEQ ID NO: 222487 - DNA, 932 bp, Homo sapiens
  chr4:125633097-125634029
  hyper
agagtagagtgcttcggtgctggtgggtgtctgcccacaggtccggcctccagtttcagctgacagacaaaaggaactccgggattcccagcgccgggcaccaccttgggttggaaccgcccagaggagccacaggggagccacctcagagaggccacgagcgaaggtgcagcctccacaccgaggtctgcccttccagaggctgggagcgcctctgcaccccgccccgcaccgagattggggtgtgtcttttgaagggggagggggtgactgaggtccttgccaatcccagacgaggggtcgcctcccggtcggcttccgcctctgcgctcccgccccatgccccgctcccgctcccacccggccgacggcggtgcgagggaagagggcaaatctggggctcgaggccggagagggtgggtggttgggtcaggtccaagccacggcctcggcctcccagcttccaacccgagggaggggcctcgcttccaccgccgccgccgccccccggttacctcggccccagccgccgccgtggccgccgctgccgctgttagggactctcagtctcagacacttgcttcgctgagaagtcgctgccagcagcgctcccaagactccactccaactgcagccgcctcctccgccgggcccggggcacgctcccagctccggatcctcctcttggcccccggcggctgccagttccagctttcccagcagaatcggtcgtgctcgccccagcccccaccggccaaccgccgccgccgccgccgtcagggcagtaactgtctcaggcagcccccggccggccggctccgccccgcccgcccagcccagaccccgcccccgcccccgcccccgccccgccgctcggcctttctttgcccgccggctccgcctccgcgtccttcccctcccccaccgcgctc

SEQ ID NO: 222488 - DNA, 372 bp, Homo sapiens
  chr4:126237753-126238125
  hyper
ccatccagacgcgccccggcttcacctacaggctcagcgaaagccacgccctgtttgccataaacagtagcaccggagccctgtacaccacctccaccatcgaccgcgagagcctgcccagcgacgtgatcaacctggtggtcctttccagcgcgcccacctaccccaccgaagtgcgagtgctggtgcgggacctcaatgacaacgcccccgttttcccggacccctctatcgtggtcactttcaaggaagacagtagcagcggacgccaagtcatcttagacaccgccaccgactcggacatcggctcaaacggtgtggaccaccgctcctaccgcatcatccgcggcaatgaggcggggcgcttccgtc

SEQ ID NO: 222489 - DNA, 104 bp, Homo sapiens
  chr4:126238450-126238554
  hyper
cttccaaatggaccctgagacgggacttatcacggtgcgggagcccctggacttcgaagctcggcgccaatactcgcttacggtgcaggcgatggacagaggcg

SEQ ID NO: 222490 - DNA, 137 bp, Homo sapiens; identical to SEQ ID NO: 199594
  chr4:128703235-128703372
  hyper

SEQ ID NO: 222491 - DNA, 102 bp, Homo sapiens; identical to SEQ ID NO: 199600
  chr4:140097254-140097356
  hyper

SEQ ID NO: 222492 - DNA, 180 bp, Homo sapiens
  chr4:140587058-140587238
  hyper
ccttttccccccacccggtccccaactttgtttacccgataaggaaggtcagcattcaaagtcaagaagcgccatttatcttcccgtgcgctctacaaatagttccgtgagaaagatggccgggaactcgatcctgctggctgctgtctctattctctcggcctgtcagcaaagtaagag

SEQ ID NO: 222493 - DNA, 862 bp, Homo sapiens
  chr4:141071945-141072807
  hyper
gggaccggagctacagtcgagatgcgggaccggccccgcctccggctacaatcagaaaaactacagtgtgtcagtggttttcggtttcctgtttgtaaagcgagaacctcccccgactcgaactgtcgttcttcctcaaaaccaaccgagacggccccttcttcgcgctcggggcaggctcagccgcagggggagcggagaggagggacgcgggggcatggggggcgcggcggggcggggacagccgcgatgaagcgggcagggccacggggcgcagcacccctcccagcccagcggccccggggtctgagctgggccgcgaggcggacaaagcgcctcccgctccctcccccacggccacgttccaaaagggaggaagaaggcgggcaagagtggctggaggaggaggaagggaggaggaaggggagggggaggaggaagaggaggagggaaggtgctgccggcgggactgggcaggatcgcgccgacctgggaggggagggaggaggggttgagcgcccccggagaactgggaggagggaaggattcttgaagcccaagataaacaaattgttcctcttcacgtgcggggtggggggacgtggggagcgagcactgcggcgtcgcctcccctcccccaagccgactctttgtcaccgagcgccggcccgagcccccggcgaaagcccacggcagcactggcaccaccccggcgccggggactcacagaccgggaacgtgtgcgatttctaaaccgcacgacgggagggccgcccctgccgggctctgcgccgccgatcgctgggcggtctgcacgggaaacaggcgaaggcgcgcggccccggcacgctccaggattccc

SEQ ID NO: 222494 - DNA, 619 bp, Homo sapiens
  chr4:141073109-141073728
  hyper
agcggggcagggggcgccaagcggagaaagactccgtgcacgcaagtttaaaaggaaaaaaggaaagaatcccaagcgaagttgtgtggtggggcctcttggcgcaaaccctgggtattgctttcccctcccgccccctccaggccgctcccctcttaaccctcccagccgctccacctgccgggctagccccgagtcgcgagcaaagagcggagcgcacccgcgccccgcatccgcgcgcgctcccgcgagcacccccgcgcgcagccaccctcgctcgtttctcacccacttcaaagttcattcacaaaactctcagactttctcagcccaaagggggtgagctggggagaggaggcgagaggctctccttccccgcttcccccctaggggttgagggcctggtgcccgcccagaacctgcgacagcatcaatatttccacgcacccggcggatgtgctgagaggggtgggcgtagggggacgggtctggggaggcgaggcggcgcggctagaggtggggtggggagcggcgaagaggaggagcaaggtttcaactcaggggttcactctttcaaatcggtatcttaagaaagggaaggggggaaacttttccagca

SEQ ID NO: 222495 - DNA, 469 bp, Homo sapiens
  chr4:141074043-141074512
  hyper
cgaggcagcctccgcatcttgctggggtttgctcgggtgctgctgtttgccggtgccggcgcccgatttcttggccctctgctccagggtccgctggtagaggctcacggtgtcccggcgctccagctccagctgctccacctgagcctgctggtacctgttctcgcagttgacgtggtgccgacggcagccctcgatgcgctggcggagccgctccaccacggtgctgtgcttgggaacggccgccgaaccgccgccggggcccccggagccgccgcatccaccggctgccgggtgattgctactcggagcagcgggagtactattgggagtattattcacaccgatcccggccccgccgaggctgctgttcaggctactgttgatgcaaatactactgccattcgcggcagcagcgggggctgcgaaatcccccatcctgctccccgggcacactattttggaagaa

SEQ ID NO: 222496 - DNA, 865 bp, Homo sapiens
  chr4:141074526-141075391
  hyper
ccccctatcagcctcctccttgggtccaaggattaaaatagtttaagtggaacgcgggggagacgcaagcacatggatggaaacggcgatcccgacggggcgaaaaaaacggggggggagattttggggtggtttttgtttcctttttttaaactgtaaaagctcaaggggaagaaaaggggggaacgttatcggaataccatcagacacctatcaacaaaaagaatcacaacaaactgagccagcagcaaatcgggttgcaactcaaggggagatccgctccttgcttgccttctttttataatccattattttctaataaattccaggagatttccggtggttggcaagcattttctccctacataccgaaaaacacaccccatgtacacacacaagcatatgcctccagtgcggacacgcgcgacacacactcactccacaccgcatcggaaaacggcaagcttgcttattgcattttccttccacaaaaaagttttggtgtttatgccgccccgtgttctcaaagtactttggctgctcagttgcatttcacaggaacctagatatcgaatcctcgggctgggggaagtaaacacatggacagtccgaggcgactgcaaaagtagatcggtgaagtcctttgcaaaacgccgcgcagagagcagcacctaacgctcggctgggctgccgctgccgccgctgctcctgccaccatcacaatgatcaactgctcgccgccgccgccgccgccgcctcctcctcctcctctcgctcctccacctcctcctcctcctccatgccagcggagtgatatcaggacgcgcgagctcagtaaacacggcagcggcggcggctggaggcc

SEQ ID NO: 222497 - DNA, 458 bp, Homo sapiens
  chr4:141348029-141348487
  hyper
aacccagccctttcgcccgccccccggcggcgcacaatgggctctgcgcgggtatcgagggagcggccaacagtccctggccccaccgccgtgaagtggggtcccttcgcttccacataggtggagactgagacagccgagcctattttgatctcgtttgggtttctgtaaggagcagtcagcagagtgagcagcgcccagacgcgccccgggccccctctacaaccattgggagagcgccccgggctcaagcgtggaacggggctgcaatggcaaccgctggaataacggcctcggctcccggtggctcctcaagcccgcaggggaggccggccgggctaggcacctagctgtccccgtgctcgtccgccccagcccgggcgcagcaggtggatgcggcggtgctgaagacacaaagggtcccaggtggcaccacctcctgcgtccacccacggggc

SEQ ID NO: 222498 - DNA, 1308 bp, Homo sapiens
  chr4:141676913-141678221
  hyper
aacatcacgactctcgatgcctcgcatacaacgaggcagggcgggtcgcccagccccaggggaccgggcggcgtctcccgagcctgcagcccaggccgcgggcggcgccgcagcgctcccggctcccctcctgcagggatcggccacggtccttacccgccagtccgccgccgccgcctccatcgccggcgtggcccttcctccgctgcaggatgaagtatgggttggccctctcggtgatccacagcgcgttggccagcaacacctcctccgggttcacccacatggtcctggctgccgcgggcgggcgcacaatgggcccgtgggtccagtcctgcacccaccaccgcgacaggcgcgcactcctgggcacacgcgcgcccgcccgcccgtccgctaggtgcggcggcggcggcggcaggcgacttcagggggtggcccgcggcgtccgggccacaacaaagccccagcaggcggcccgggaggacggtgaggacgcgggcgcggcaagcagcatcctccccgcggcgtcgccgccccgcgagagcccgcggccgcagacgcccggcctggcactctgcagcccggctcccggcccacggcggcgggaggagcgggaggaggaggaagaggaggaggaagggagcgggaggaggaggaagtggtatagctcagtcccgggatccggctcagcgccaggcagggctaagggccacccgagcggattcggccccgcggtcagggccaagctgggctccggcgctgctgctcccgcggcgccgactggagctccagagcccctcccgtctctacctgctcgagctcccgaagtcgccgcgccttaacgcgccgtgtcggggccgcaggcgccactagggaagcccagctccccgctggaaggacgctccggacactgcgaatgaatgacgacaacgcggctcacttggagcgggtccgggtttgtgcggactcggtaccaccgcgggctccgcgcgccgagctgagcagctgtggctggcttcgggggaaccttcgggggaagctcctggggaccgtgtgccaagcactgggcccgacgcccatcccagcagggaggacgccgccagcctgcgtgggtgcgtgtgtgctgtttgtgtttaaggttgacgctctatgggatagcgccaccccttttcccaggaaaagtgtttcaaggttccagacctggagctcggttagagacccggggtcggaagccaacgcagccaatggtcgtcgatgtttttgtttcctgcatccccagggcaagtcatgcgctaaacttgtcac

SEQ ID NO: 222499 - DNA, 720 bp, Homo sapiens
  chr4:142053866-142054586
  hyper
ggtaaagtccaggcagagcagatgcacgaaacaaaaggaaagcagccatgttgagagagccagactgcagcacgcttggatgagagacattgccatctttatccgccggggccccctccccgcccccgcgccctccctccgtcccgtccctcctccccagccccggccaaccccgggccgctgcctctcctcctgctgctgctcactcccgggccggaggggccgcggccgggacgcgcagccgccgcggggaccggattccgggcgagcggatggcgctggccccttcccctctcagctgtagcgcggtggttgcattttgcttcttgggcgcccggggggcgcgggaacagagggcccgcggggcttgcggaggagtcctgctgccgagcgtcctgctccttcgcccggcttcgccttctctcataagggtggccgggggcccacgaacttgcagggtggcggccctgcgccctccagccccggcggggacgggcacgattgctcgtagtctggggtgctgcggtgcggggtgctgcccagggtgtcccggccgccgccactgagcgctggggcgcgcgaatccagctgcagccgctgctgccctgcgccggttccctcaggctgcgggcgctgcgctcctgatctcgccggtggctgcgcctgggcacgcacttgccgcgggcggggcgggcttggggacagtgggagcgagcaggc

SEQ ID NO: 222500 - DNA, 174 bp, Homo sapiens
  chr4:142054759-142054933
  hyper
caaattcaacctcaatcggcgacttaatctaggtggaggtaaagaggaagcgacccctcgacctttgagtacgggaataacttcctgagcgttacatttagcaaatgtatgtgcctctcgtaaacgaccctcccgtttgctggaagtactgccgtgagctccctgattacctgt

SEQ ID NO: 222501 - DNA, 180 bp, Homo sapiens
  chr4:142557401-142557581
  hyper
cccgggtctccaggttcagctgcggaagcttcccacatggtgcccgtcgcttgggatgcggctatccttgtgccttctctgcaggtgtcccggcaggtagaggaggagaccggtggctggtgttcctgcagggcggggctggggctcctcgatgtccttgcgcttgccctgcaagttctg

SEQ ID NO: 222502 - DNA, 300 bp, Homo sapiens
  chr4:142557663-142557963
  hyper
ccgccccacccccagtctccgcgggaggtgtttgtcttcgcctatgctcccggctctttctctttcacttttcttttcgccaggggttgggactccgggtggcaggcgcccgggggaatcccagctgactcgctcactgccttcgaagtccggcgccccccgggagggaactgggtggccgcaccctcccggctgcggtggctgtcgccccccaccctgcagccaggactcgatggaggtacagagctcggcttctttgccttgggaggggagtggtggtggttgaaagggcgatggaat

SEQ ID NO: 222503 - DNA, 157 bp, Homo sapiens
  chr4:144257342-144257499
  hyper
ggaagcactccggcggagtttcagagaaagtctgggcagaaaccggagccgggcctgaacgtgggaaggggaggaggagagggaggaagaaggagcccggcggccgggagagggagggagggatcgggatctggggccgagccgctcaggacctgcc

SEQ ID NO: 222504 - DNA, 189 bp, Homo sapiens; identical to SEQ ID NO: 199620
  chr4:144257937-144258126
  hyper

SEQ ID NO: 222505 - DNA, 153 bp, Homo sapiens
  chr4:144258375-144258528
  hyper
tccgcaagtcccccccggagaaaaagttgaagcgttatgtaagtagagctgcgggcaccactccgcgggcctcggcgtccacacccctccccagtcggctcgccggcggctgcagctggccgcgcgcggggctggttcttaaacgaatgccgg

SEQ ID NO: 222506 - DNA, 180 bp, Homo sapiens
  chr4:146402831-146403011
  hyper
cacgccggccgggccgggaatttggagaggatccctggtcgcgcggcagcggcggcggcgcgcgggtgagcgggtgagcgtgtgagcgggcgggcgggcaggcgagtgcgccgggtattggcagctgaggagtggaggctgggcagctccgactccctgacgccagcgcgaccagatcaa

SEQ ID NO: 222507 - DNA, 383 bp, Homo sapiens
  chr4:146403506-146403889
  hyper
gggcccccgagcctcggctcccgggcctgaccgcgctgggatctccccggccgcgctccccttccgcgcgctcctcacatctctcccgtgctgccgccgggccgaggcccgttcgcgtggcccgcggacccattgtgtcccccgcgccggcggggcgacccctgcgggagctggaggacgaccgctggcgctgctctccaaggcgcctggtggagcgggtctcgcgggcgggggaccccggcgccccgggcccctccacatcccgcacgggttttcttctcggccccagcaagcctctttggggtcgaggtcaaggaaagttcgcaccgagatcccctctaatttattcaaaggtttggcggcggcgcgtaattttttccccc

SEQ ID NO: 222508 - DNA, 180 bp, Homo sapiens
  chr4:147559836-147560016
  hyper
gaggcgagtgctgagagagcagaaaggactcaagcctgaggggagtagagaggaagaaggggcaacgcgagaaaccgaacaggagccggcgtttcctggcaagggagggcggaggcgcgcgggagagagggagagagggagggcggggggcgcgggggtaggcgcggggagaggggagta

SEQ ID NO: 222509 - DNA, 180 bp, Homo sapiens
  chr4:147560155-147560335
  hyper
ggaggcggcggcgggtgagctcaacttcgcacagcccttcccagctccagccccggctggcccggcacttctcggagggtcccggcagccgggaccagtgagtgcctctacggaccagcgccccggcgggcgggaagatgatgatgatgtccctgaacagcaagcaggcgtttagcatgc

SEQ ID NO: 222510 - DNA, 640 bp, Homo sapiens
  chr4:147576124-147576764
  hyper
cccccaccccattcgcgttttctctctcggcctctcctccctcctcgccttgccctcaggcagccgaccggggacacacgggtcaaaattgcgtttgggcggcgcggcgatgcgcggtctcgggcagccgcgcaggggcgtcccgagccccgggagccgcaggctcgtccaaggatccgccgcgcggcgggcgcctgggccctccgggggcccctctggggccgcctggactcgcaggtctcccgcgccaccccctaccccattccccgcctgcgccccctgctgcgctcggcgcgcgtcctgctgcagcctgctggggacagcgcacgcagtgaccgggcgcggcagccgcttccctttcccatcgacctcgctgccttctggcttttctcaaagccttttctccagagccagacagcagacgccccggcgatgccttcgccgcccatttggccgaggtagcccaggcctgcccttgctgcctccgccggccgctccgccgcggcccaaagccggggaagcgtcccaagcccgcgcggtctgccccggagccccggaggacccgaatactcagcggaatgtcaccctggccgggttctttggattcccctccggggccatcctacggaatccagccgtc

SEQ ID NO: 222511 - DNA, 33 bp, Homo sapiens; identical to SEQ ID NO: 199629
  chr4:148538935-148538968
  hyper

SEQ ID NO: 222512 - DNA, 93 bp, Homo sapiens; identical to SEQ ID NO: 199632
  chr4:149364560-149364653
  hyper

SEQ ID NO: 222513 - DNA, 78 bp, Homo sapiens; identical to SEQ ID NO: 199633
  chr4:149364662-149364740
  hyper

SEQ ID NO: 222514 - DNA, 288 bp, Homo sapiens
  chr4:149365970-149366258
  hyper
ctgcgcgtccgctcggcgttgacagcggcgtccctgggagccgggaagtccggcaggaggatcccgcgcccgccgctccgcagcgccactctccgcgccccctccccgggccctgggtggccggtgacagctccggcggccgagcgcgtgtgtgagggggcggtcgcagggggagcctgcgcccccctccccgggtcacgccctcacgagcgggaggaggcggcaccgcgtccggccacccgcgggtgggaaacgggcaggggcgccggcagccgccctcccactacg

SEQ ID NO: 222515 - DNA, 360 bp, Homo sapiens
  chr4:152330029-152330389
  hyper
cgagtgctacactgcgcccagctcaagtttctgtggaaactttccctcagaggctcctcctccttcaccttggaaaccggcgcgggccgtgcggcgcggcactgcctaagtccccggcgcacctggcggcggcgtgtcccagcggcagaggcggggccggcggcggcgggggcggggccggggcgcgctccccgaggcctccaggcaggttgggccccacccccgcccctgccccgccccggcccccgcccccgcccccgccccccccgcgctcactagggagaggctggggggaggcagtgacccacgcgcctcagcccgcggctgacgcaccttcgaaaagttgcgctccgaccttct

SEQ ID NO: 222516 - DNA, 239 bp, Homo sapiens
  chr4:154387495-154387734
  hyper
ccagcgagctagcggcgagcgcggcgagcaacggagaggagcgcgagcagcagcatggcggggctccgacgcccgcagcccggctgctactgccgcaccgcggcggccgtgaacctcctgctgggcgtcttccaggtcctgctgccctgctgtcgcccgggaggggctcagggacaaggtcagccttgcgccgctgggctcgctctgcctctccaccccgcccccgctctttcttttag

SEQ ID NO: 222517 - DNA, 143 bp, Homo sapiens
  chr4:154388053-154388196
  hyper
ccagatgctcgggctgcggagcccggagtgcctcgtggggtgtcttcactcccacttcgtccccccacccccagcacgagcaccccgagcctgcctgcacgctgtcgccttcgcgtccgaggggccgccggctcacaccccac

SEQ ID NO: 222518 - DNA, 720 bp, Homo sapiens
  chr4:154709517-154710237
  hyper
ctagcgagggggatgcaaaggtcgttgtcctgggggaaacggtcgcactcaagcatgtcgggccaggggaagccgaaggcggacatgaccggggcgcagcggtccttcacctgcacgcagagcgagtggcatggctggatggtctcgtctaggtcatcgaggcagacgggggcgaagagcgagcacaggaacttcttggtgtccgggtggcactgcttcatgaccagcgggatccaagcgccggcctgctccagcacctccttcatggtctcgtggcccagcaggttgggcagccgcatgttctggtattcgatgccgtggcacagctgcaggttggcagggatgggcttgcaattgctgcgcttgtaggagaagtcgggctggccaaagaggaagagcccgcgcgccgagcccaggcagcagtgcgaggcgaggaagagcagcagcagcgagccagggccctgcagcatcgtgggcgcgcgaccccgagggggcagagggagcggagccggggaagggcgaggcggccggagttcgagcttgtcccgggcccgctctcttcgctgggtgcgactcggggccccgaaaagctggcagccggcggctggggcgcggagaagcgggacaccgggaggacagcgcgggcgaggcgctgcaagcccgcgcgcagctccggggggctccgacccgggggagcagaatgagccgttgctggggcac

SEQ ID NO: 222519 - DNA, 360 bp, Homo sapiens
  chr4:154710294-154710654
  hyper
ggagccaatgaagggtaatccgaggagggctggtcactactttctgggtctggttttgcgttgagaatgcccctcacgcgcttgctggaagggaattctggctgcgccccctcccctagatgccgccgctcgcccgccctaggatttctttaaacaacaaacagagaagcctggccgctgcgcccccacagtgagcgagcagggcgcgggctgcgggagtggggggcacgcagggcaccccgcgagcggcctcgcgaccaggtactggcgggaacgcgcctagccccgcgtgccgccggggcccgggcttgttttgccccagtccgaagtttctgctgggttgccaggcatgagtgggag

SEQ ID NO: 222520 - DNA, 120 bp, Homo sapiens
  chr4:154710714-154710834
  hyper
gtccctggtagccgcgtgtgccctgtgatggagcccgggacctgcccgcccgaggccgcctcggcgaacttcgttttccctcgaatctccagccaccgttcagcagcctgtcggtgtgct

SEQ ID NO: 222521 - DNA, 179 bp, Homo sapiens
  chr4:154713481-154713660
  hyper
cgttacatgtgcctcggtgaggtgaagtgactaccgggctagccttggggacctgtcgcgacttgtcgggtgtctccaaccgcgttgccgcctggctttcagccgtgcgctggccagccgggcgggtgacgtcacctctccccgggtccgtgcacccaggccttccctgctccgggtga

SEQ ID NO: 222522 - DNA, 180 bp, Homo sapiens
  chr4:154713821-154714001
  hyper
tttggccctccctctacccggccccacaacgaggacgcccctgcagctggctgggccgcttcctcttgccacgcggggggacctgtgcccgcggccgtgcacctccgtgtacgcttctgctcctcggaccccatcggttcagacgcggatttccgagaacgagaccagagtctgcgtctg

SEQ ID NO: 222523 - DNA, 137 bp, Homo sapiens
  chr4:154714077-154714214
  hyper
gcgcgtatctccttaaatatttcaagggtctgggccccagatgggtgctcggaaagcaaacgaagggtccagggaggccgaggccaacgcggagctcagcgcccccttcttgcctgaaggggcgcgctggaggagga

SEQ ID NO: 222524 - DNA, 459 bp, Homo sapiens
  chr4:155254134-155254593
  hyper
tttctcgataacgactgtcagcaccagcagggctgcctgaggatgcacgccttggtcctcggccctgagagtcagcgtgagctcccgctgctcgcccgcgcccaggctgccgttgaggaacagcacccccagggctctgtcgatggcaaagacgcctggctgcgggctggcgatggagtaccggatgagtccgttccgcccactgtctctgtcttccgcacgtgcgaggtacaaggctgtgccagggggcgtggtctgggatattctaatctcatccgaggtcctgaggaacgctgggtggttgtcattgacatccatgactgttatgttgacctcggtgctgctgcaggctggggcgctgccgagctgcgcctgcaccgtgagcacaaccacgggctgcgtctcgtgatccaggggcttccgggtgcgaatagtgcccagccgcgggtgaatggagaa

SEQ ID NO: 222525 - DNA, 746 bp, Homo sapiens
  chr4:156297388-156298134
  hyper
ttcaaaataagtcacgtcttatttaaaaggccatcaaaaggatcgtcggcgtaaaaattatgagcaccaccaccaaaaaaaaaatgtatctatatatttgcatacagcgctattcaaagaaaaagatcgtaatgctaacccgcaaacagccagcgagatgtattgcaagccaatttttcctctcacaaaagtgttaaagagagccagacaaaacgacgaagctttcgcgatgagccgcattaaaatcgcggtttcccgtactcggagcagaggcctggcagggccgcccatagcgttgtgcgccccgggttccgttccctaccaggccaggtgacgtccgggtgctcgccgctcctcaccgcgccgtatgctgagcaccagcgaacgccaggcccgtgcacgtccaagcgcggtctctgtccggatcccccatggcccccaggtcccgctttctgttcccggccccggacgcccgcggccagttctccgcgaccctgagaatcaagagccaagcatcgggtaggagctgctcaccttggtctgggcctggcggcgcccgcagagccggtcctggaccgagcgaggaggaggggctaataacagaggcggagggcggttgctaggaaacagcgtcttcgggaggaagtgacttccccaccgccgggtctctcgggtacccaacaccgctcttcggcccaacgtgtcgctggggcaaccacccagacgaaggaagtgacatcaccttc

SEQ ID NO: 222526 - DNA, 631 bp, Homo sapiens
  chr4:157892596-157893227
  hyper
acaaggcgagggcgccgcggcgggtcccacgggccggggcgccggagcggggccggggggctccgggccgacggcggcccgggcgcaggcggagagaggccgcggggctcccgctcctcagcccggagcgcagttggccccgggttcggagcgccgcagcacggattccggcacctggcttgagttttccgcgaccaaagttcaccttgttcgggctcgtcccccgctcctcaaagcctggggcaattcggccgctcggggtcaccgcggggctccggttgttccccgtcccctccccccacgcctcgggctccgcgctaacctcggggctacgcgcggcgtctccgcacggggtgaagagggaaggccggggcggccgggaggatccggcttgtcccctccccttctctaccttccccccgccgggcggcagacaggaggtgggggccgtgggccgagcccgggcggagcgcgcgcctggcgagcgggggcggctcagcggctctcccgcaggcggccgatggggcgggcgggggtcagcgcctctgggaggggcagccctgggacgcgtccgcgcgagcgggcttggccgcccactggctgtcaacaggtgctgcgcagacagggggtg

SEQ ID NO: 222527 - DNA, 597 bp, Homo sapiens
  chr4:159690017-159690614
  hyper
ctcccgccggggttacgtgagcccggggcgggcggccgccgggccaatggccgccgccggggccgccgcgctcctcccgcgccgccgccgccgccgtggggctgcgggctcctcccgcaggagataactgtcagcgcgcgaggcggtggcgggccggctcagtcatatgaccggcagccggcggctccggcgccgagcagagttactcagtcgcagcggccccgcgctcccgcaaggctgggcggccgcgccgccgcgatggccccgccaccgcggccgccgcccccggctgcgcgctgagccgccggccccccgagcgccacggccggagctgcggcggcggcatcatggccccgaccctgctccagaagctcttcaacaaaaggggcagcagcggcagctccgcggcggcgtctgcccagggcagggctcctaaggaaggacccgcctttaggtgagggggcgccggggggcaattctggcgcgggacccgagttggcttcggtgctcgccggggaggggacgggtaggggaaagggaagggactgtccaggacggcgctgcctatcgccggcacctggtcccgggcttgtcagc

SEQ ID NO: 222528 - DNA, 73 bp, Homo sapiens; identical to SEQ ID NO: 199677
  chr4:170192274-170192347
  hyper

SEQ ID NO: 222529 - DNA, 1080 bp, Homo sapiens
  chr4:174089819-174090899
  hyper
ggagttccggatctggagctggaaagggcaggcagcggagagggcggcagccgtagcggtaggggtgggggaaagagggggaggagagccggaggagggggaaggagggaggggagagcggtggcggcggctgcgccgggctgtgagtctctcgccgccggaggaagatgaggctgaagattgggttcatcttacgcagtttgctggtggtgggaagcttcctggggctagtggtcctctggtcttccctgaccccgcggccggacgacccaagcccgctgagcaggatgagggtgagtgacccgcccggccccctccggcggcagcgaccggcaacttgttttgtttgcccgcgtgtggagggagcaggggcggcggggtcgcggcacggcgtgggcaccgcagctccgcaggtggtgctggcgcagcgcgggccgagggggtgccgagccccgcgcactccgacctccctggccgccgccggcccgccccctcgccgccccttcctccgctcttccccgccccgggctccgtcgccgacacccgcgctgccgcggcagcggctcgggcggccgctctccgcgccgggactgcgggcggagcgggcggagagccgggtccggggggctgcggccgcccggcgtcccgctctggggggccgggaccgcagcgctcacggcccggggacgcggggttggtccaggctgcggcctgtggcgcgtgcaggcctgaaggaggcgagatgccgatgccgccaccgctggtccggtggaccaggccccttggtccagcctcccctcccgcagccgcccgtctgggggtgttcgcagccccgggctcccccggcccgcccgccggggagtgggagggcgatggcgccccgcctccggctcttacggagagcgcgcctccccctcaactccggcggcggggagccggggtgcgatgcgcggccgaggcctcgcccggaccgccggtccccctcgcgtccctgggcgagggaggggcggttggccggagatggcggaggggcgtccccgccccgcctgcccgccgcccccagccctcagcgcctgggga

SEQ ID NO: 222530 - DNA, 360 bp, Homo sapiens
  chr4:174450234-174450594
  hyper
gcatactcggggctgtaggacagggccatgctgtagtcggggggcgacatctcggggtggccgatgagccagccatggaagtaggggttctcctcatggctgcagcggctggcggcggcggcggcagctgcggcggcggcggcggcaaacgggtagccctcgtggtgcaccaccgggtggtggggaaaaccacctaccagactcatttcgccctccgcgcccctccacgcgccccagcgtgcgcgcagccccgccgcgccctcggcccgggcccctgcctcagcgctcggcgtcctcccccaccccccaccccccagcccccgggcgcccgggcccgcccggcagccgcagagggggctg

SEQ ID NO: 222531 - DNA, 420 bp, Homo sapiens
  chr4:174450638-174451058
  hyper
ctcagcagcgctgcggccgccggctccccatggggcgcggcgagctggtcctggcaccgtgcgcccctggccgccgccgccgccgcctccggttcccgccttgctccacggcccgcgcttcggctcctgcttcccgggctgctgcgcggaggcagaatcctctcgtgctcatacaaaggtgccggggctcccgcgaggctggtacgcggagtctcgggaatccaagcccgggccgcggtcctggcaccgaagctaacccggaatccaggggcgagtctgagccgcggctggaggagccggtccagctgtgccggggggcggcggggtcgactgctcactgcaaagctacctccgtgcgaccctccccttcccgcctcttcccctccccccaccagcccgatctgggttcttgggcgctta

SEQ ID NO: 222532 - DNA, 180 bp, Homo sapiens
  chr4:174451168-174451348
  hyper
gtctcagtgcatccattttctcagatcctctcctttcggggcaaggatctggggccctgaatgagccttggagctcgaagaccgcggctcgggctctcggagggctctgcgcggtggccgaggaagctccggggtgacggcggtggttctcctgggctggacgacgtgaggggagcaagc

SEQ ID NO: 222533 - DNA, 99 bp, Homo sapiens; identical to SEQ ID NO: 199694
  chr4:177240753-177240852
  hyper

SEQ ID NO: 222534 - DNA, 48 bp, Homo sapiens
  chr4:179699960-179700008
  hyper
ctgaaatacagtttcgctcagttcatgtgtccacgagaaactctgaga

SEQ ID NO: 222535 - DNA, 1620 bp, Homo sapiens
  chr4:184019342-184020962
  hyper
cacgtacgtagtagctgctgaataaataaatgcctatgcaacagggaacgtcccggcccaccccggccgggccagggcctaggaagggcgggcgtccggcgccgccgtgggtccctccggcgtggccgcccacacctcctggccacggcggggctgcggtggggggacatcctggggcgggcggctggacggaagggactagagtcggggcgcgtccacggccaaccgccccgaaccaagcaggggaggccagggaccaggagcttccggggccccgcggctggagcgcccggacgcgaaggggcggcgggtgacggggcgcggtgcgggcggctacagggccggacgggagttcctccgctttccgccgcgcggctcgcggtctcagccgaggtcatcgagggccaggagccctggcggaggccccgccgtcccggacccaccgacgcactcccagggcttggcgctttcccaccaccccggaccgcccttggggtgccggaggggctcggggcgcggcgtggggagcctttgtgccctctccgcttgttgaggttttttctccggaggagagctccccgcccgccacccctttcctctcgaaagttttgtggtttccctagaagacgaaagaggttgagaaggttgcggagacttttgcaatcttccccgtccagaaactctaaaacctctcggcgtttggcccaggggagctatctggggtcaaggggagggagctggccgcacattccttcgcccgccttcctcccacctggagccgcggccccgcggggcagtgcgtccgagctggtgcggcgacgccggcagcggcggggttaagctcaggaatgcggcgcgaggaatgcgcatgcagatgaggcgggcgggcgcatgctaatcgcatgcaaatgaggggcccgccgctgccgcggcagcgccgcagcttcccggatccgagcccagacggcggcggctccggcagcctgggcgccgcgaccctcggcggccagagggggacggggcggaggaggaggaagaggcggaggcagcggcggcgagggggaggagggttcgctcgccggctccgacgcagacatggtggactgatccgcagcggggccgcgaacagcgtttcctgaggcacctcccgcgcgtggttccgccgcgccccgcgccctgcgcccctcagcccctcgccggcgcccgcgtcgcgggttggcagcctagcccggcagccgcgttcccgccgcgtcccgcgcccggtacctatggaggcgccgctcgccggcgaggccgccgaccatgcctaggagggccgggagcggtcagctgccgctgccccggggctgggaggaggccagggactacgacggcaaggtcttctacattgaccacaacaccaggaggaccagctggatcgacccccgggacaggtgggcgccggccgcgggggcgcgggcccgttcggacacggcggctgttgtcccggagacccggccgcgcggggggctggggcggcgccggcccgcggtgccccgaggggtcccgggagggatgtggggctggctgctccggcggggccgaggagccgcccgtacccgggctcctccgcccaccggc

SEQ ID NO: 222536 - DNA, 203 bp, Homo sapiens
  chr4:184328290-184328493
  hyper
gcccgcgccccttccgcgcagtctccttccgcgtcacctctgtgaccgctgtgcccagtcgggccccacagaagcggcaagcgacgtcctcaaccgcaatctcggctcctcgggcgccacccagtggcctcggggcggaatcgcgggcgagctcggaggggctcggggtggcggggcgcagcgcggcgcctgtaaaacaaccc

SEQ ID NO: 222537 - DNA, 381 bp, Homo sapiens
  chr4:185747618-185747999
  hyper
tccttgacactgacgggcgcggccccacagggtttcccccacgctccctggccggaagaccttttctgtctggtgtctgcagagcctgacgtgggcagcgcccgcagctcgcgccggtgcaggggagctgagggccgactgcgcgctgcaccacggcggccacctgctgtgcggttctgagggcttccgcggttctgagggcttccgcgtccctgccatgcccatcttggggcttcagaagccaacacgatggttttcgggctcacatcccaaaggctgctcttccttttagcacctgggacctaccaggaacctcaacctctaacaacattggtccccgttaccgtggagtttgcgcccagcgttcgctggagggccgtt

SEQ ID NO: 222538 - DNA, 660 bp, Homo sapiens
  chr4:185939166-185939826
  hyper
gagcctcttccccccgcgaagagggagcaggaggggtggggagaaaagaaagccagcgacgtggtcagggagtaggggggagcgtcgcgtgccaaacagcggcgggaggggcgaggcgaggcgaggcgggagcctcgtgtgccagccgcagccccacacctgccgggatgtccggacaaataaagcggtgtaaacaaaaaggggggagaaggacgtgtcaccaagtcgtgtgagaaaagcctgggaacaaacggggcgcctccgtctccaagagctctcccttgaacccggcggaacagcctattaaaggcttacttaattactttaatgactctggacaggctttaaaacgcactcggcgctgggacggcgggcttgctgggatttgtaaacaggcgatcatgtgagactcagcggtgggactaaaagaggcgacactgttttgtgagggtcctcgccccccggtgcccgcggccgctgcgcccctgcgctccgcgcccgcgactgctgcaggcgcttgctcgcccgccggccccagtttaccgcctccttttcccgcccgagctgttgccatgcaaatgttattcctgggccgatcacgtgtcctttgaagggccacgtggattaacaaagctgatctgcccccagctcgcccccctc

SEQ ID NO: 222539 - DNA, 68 bp, Homo sapiens; identical to SEQ ID NO: 199713
  chr4:186130483-186130551
  hyper

SEQ ID NO: 222540 - DNA, 232 bp, Homo sapiens
  chr4:186455983-186456215
  hyper
cgcaggtcgtgccccgcgaacagcgcgctgctgaacttttcatccggacgagaaaaacgctcagatgcgcgccagctccagggaatgccggggggtgccagtccctcgcctctcccacccgggacccatcatttgttacggaagggcgatggggtgtgttttatttctgttatcacatataaaacatttaaaacctaaaggggaggaggcactcgagcctggcagcctcgcc

SEQ ID NO: 222541 - DNA, 180 bp, Homo sapiens
  chr4:186456293-186456473
  hyper
aatctctgagccgctccgcagccacttgacggagttgccgccgcccccggagctgggcgccgaagcccgggagccagcagcgccccgtccgcccgccctcgcgcgctttctggccgccctcggccccggggcatccactgcgtccccccggacgccgccggagtccccacctcgcagcaa

SEQ ID NO: 222542 - DNA, 252 bp, Homo sapiens
  chr4:187026641-187026893
  hyper
gccgcgctccccaggaacccgctccagcctggccccggagagcgagagctcggcgcctgcgtggcccccggggctggccccagaaccctgttccttacgctgcctgacatcggcgaggagggggcctcggacggcgactccggggatggcgaagcgtgagtagcagcgtggtccgggcgcgtgtaccttttgccgggacccccgacccctccgcctgccgcactcaccttcgcaggtgcacttcaggaaatg

SEQ ID NO: 222543 - DNA, 660 bp, Homo sapiens
  chr4:187647687-187648347
  hyper
tccggaggcttccgaccagggcaaacttaagcaccaaacgcaggcgaaaagagagtgcgcggggccggaacgagggcccgggagcagccaagtttgtcaggacgtgcccaggcagccagccgccgagttgaggagttgcggccgccggctgcggcgactcgctgcctctttccccactccctcccccttggaggcggtgggggaggggaggtgacgtcagcgccccgcctcgccccccgccccgggcgcggacgggattctccggctgggcgcgccaccccgacagtggcagcagcggccgtggaggctgcgggggtcccggcctctgcggtctctctggccggccgcagctgtggcgcgggtgaaacgcccgccctcctccttcggctgcgtctcccgggcgccggcgagcgcgggcgttcctcgcactcagcgcctggagccgcctggagccccgctgcgcgcacttccccggctcgcggagcccctccggcggcgtttcccacgccgcggactgcaggtgatgctcttcctcttctgcagccgaaattcgtcgcgatgtgtcgcctgccagatttttgctgggcggaagcatgaacagtctctgcagactggcctggacgacttgtactttgtggccctccaacttctggatgtgaa

SEQ ID NO: 222544 - DNA, 533 bp, Homo sapiens
  chr5:343971-344504
  hyper
cgcgttccggtgaccgggtgcccccttgtcttccaggccgaggacgatgatcccgccgggggagtgcacgtacgcgggccggaagcggaggaggcccctgcagaaacagtaaagtatcccgccttctgcttgtgtgggttgttgcacccatggaaggggagggttggggtttgccttgaaaacggagttttaggaacagggcgagcgaggaaggcttcgggagccgggcgggccggggctgagctccggcgcgggcggcgcaggagtcgtctccccgcagcgccccggtgcccggagcccccggcgaggctcgtccctgcgccctcggggccctgagcggtggagcgaggcggcgggcaccgtgaggcgctgaggccaaggacgcgggcggagctccgggcggcagaggcggaggcggcggggccacggcagcttcccaggctccgcaggcgagaccgccacccgctgggacggagggtgtggcacggccgggtgtgtgcgtgtgtggcgaggctatgcgaggctgtgtgtct

SEQ ID NO: 222545 - DNA, 82 bp, Homo sapiens; identical to SEQ ID NO: 199724
  chr5:368381-368463
  hyper

SEQ ID NO: 222546 - DNA, 265 bp, Homo sapiens
  chr5:373104-373369
  hyper
ggcacagggtcgcccgaggccttggtgctgacttcacattctcgctgttccaaatgagccccttcttggttgcagtgaactctgcagccgtgggcggacggctggtaatggccctgagactctccaaggtggctgaggttctgcgcggttggcagagtgctggcaggacacaggggttgcccaggctacagatccgggttcaggcccagccgtggggactgttcacctctgagagggcagccctgccccgcggccctggccctgc

SEQ ID NO: 222547 - DNA, 285 bp, Homo sapiens; identical to SEQ ID NO: 199726
  chr5:374579-374864
  hyper

SEQ ID NO: 222548 - DNA, 267 bp, Homo sapiens
  chr5:377105-377372
  hyper
tcctcattctgcaccgtctgcttttgcttgtcggtgagagaaccttgtacaaaattaagccttttttcccccaaaatgaaggatttggcaaagtctacactgggcttccctggtgtggtttcaatcttggggtggcctgtgtgacaccctggaagctgtgggcctgggcaggaagctctgtggtgagggggcttttcaccccatctcccccatccctgcgactctgaagtgctgagttgtcctgtgctgtaacgcggggcctgttac

SEQ ID NO: 222549 - DNA, 584 bp, Homo sapiens
  chr5:472580-473164
  hyper
ctcacccagccagggcaccccgggcgacctccgcgccaggtgcgacagctcaggccggagacctcgtctgtggggacgggccgtgtccggggccgccaccctgagaccgggcgcgggcaggacggaacctgggggggaaacggggcaggtactggctttaggagtctaaatccccaaacgctgagcagacggaagacgttcctgccactttacctgcagttcaaagacctggcgagggcctggaaacggcgctcggcccaggccgcttgcgggcgctgggcctgcagccgctgcaggtcgggccctgagtcctggcgctcgggaggtccctgagtcggtccccgagtcagtccccgggcgcggggctcggttgggggggcccggaaccttgggctggtttcacgcaaatccgtttggggcgagcctcggtttcccggcagcggtgggaaagggcgcgagcggccagccatggcgcgcggacccttcccgccggcggcgtcacagcggcgtctcctcctgctccagcgcgtgcggcggtgcgtggcacgagggcggcagcgacgccagcttcagcagcgcggggc

SEQ ID NO: 222550 - DNA, 180 bp, Homo sapiens
  chr5:473259-473439
  hyper
ggccccgcccccggcgcaggccccgcccccggctcgccctcgggcggctctgcgggcgcaggcgcggcactctcggagttctgcgcaggcgctggcgtgggcgaggcggggctcggggctcgcggtcgctgtagccgcgcggggatctggggtttctctgggacagcggcggcggcggtg

SEQ ID NO: 222551 - DNA, 180 bp, Homo sapiens
  chr5:490958-491138
  hyper
cacctggtgggtgatgctggacggcagggactacagggaggggtgagaaggcgccaaggaaccacgtgctgggtgaggcggccccaacccgggagctcctctttctccatgcgtctccttggtctcaggtttcagccccttgattcccatggagaggccgggccgtgctctctcttgaac

SEQ ID NO: 222552 - DNA, 1054 bp, Homo sapiens
  chr5:523800-524854
  hyper
caccgcttttcttttctgcccttgtaactcacgaaaaaacgccatcactccaaggacgtttctctaaaaagcctgagaaccccgaaggaaacccggccccggggactccctgggcgcgagcagcctgcagtctgcggggctcggagcggaggcggggcggagaccccacagggacccgggagccgggagtccggggctccgaggctgtgcccccgccggggaggggagacctcgggacccgcaggggcggcttagcgcggccagagtcgctcccgagtctcgctctgctggacccgagagccggactctcccgggcggccgccgcgcggctccgacctgatgcgcgcggccacaacgaagcccccaggcccagcagaggcggccgcacaccccgcgggcagatccggagaccccggggccacttaccgatcttggccaagctggccacgaggatccagagcgcgatgacgtagggatcctgcacgtgggcccactcgaaggtgaccacctggaagcccccgctctcgccgtgcgcgccgccgggctccacctcgacgcccccggcccgcgccagcccgcccagcgccagcgccagcagcagcccccggtcggggccccgggccccgagtccccacattgccgcctgctcagcgcagggctgggacgcgcatgtcgcggggggtcccggctgggctgggccgacgcgcggggctgggacccggcgaggacccggcgcgctccggtgccggtaccggctacagtccgatccccgcccgccggggtggcctttaatcccgcggccccctcccgccccggggcggagcctgcccgcccccgccgcgcactcgcgagcgcagacaccgccgcagctcccggcacgcccgccccgcccgcgcacgcccaccccgcgctccctggtgcccaccctcccccggagcccgcggcctggaggtccgggaggtcgcggcaagagcgagcccgggactgcgcggccgccttcctggggcgtggggagcacagcgcggggcagcgggacaggcggttccgcgcagct

SEQ ID NO: 222553 - DNA, 398 bp, Homo sapiens
  chr5:528494-528892
  hyper
ggccctcccagcaccgtccccggccggcccgtcagtgcccgtcggggtcgcgcgtcctcccttccgccctcggggacagcccggccggccacgccgccgaactcgccatgggcctctctccgcatccgcatgtgcatccgcaaccgcttccgtcccgctgagcgcacgaaccctctcgctcctgtccctcccgccccgcccgccccgcccgccccggacgcctctgctgcggtgtcttagcggtccgcggacaggcgacctcccccgtggacgcccctctcccggccgccgccccgccccgcgccccgctcccccgcgcccctgggccgagacctccggtcgcctcgccccgtctccggccacgaaaggcgctgcggacctggcggtcacgcgcgaag

SEQ ID NO: 222554 - DNA, 51 bp, Homo sapiens
  chr5:612241-612292
  hyper
ggggctggggtcgcgtggccagtacctgggagaaccgccattcaggagaac

SEQ ID NO: 222555 - DNA, 105 bp, Homo sapiens
  chr5:676505-676610
  hyper
tggggcgctggcgccgcagaggtgggccccacagccttccacacaggggcatctgacccacggcccggccccttgcaaagccaaggccgcagagggggaaggtgc

SEQ ID NO: 222556 - DNA, 420 bp, Homo sapiens
  chr5:676655-677075
  hyper
aatgaaatacatcggccacaggaggacgcaggtgcaaaccaccgaaataaagccattgccacacaggcggacaggacggggctcagggagaaccgctgcttttctcgggtgcgatcatggtggggtgtcgggacatgaggtgaaatgtgctggggcgtgtgagggtgcctcagtgtgcttcccagcattcatccaggagaaaacagacaatgcgtgacacggcaacagacgtgtgcacacatgacacagaaacgcacgtgcacatgcagaaacacatgcacacatgcgcacacgtgcacacacgacacagaaacgcgcacacacgacgcagaaacatgcacacacgacgcagaaacgcgcacgcgcgcatacacgacgcagaaacgcacgcgcgcacacgacgcagaaacgcgcacacgt

SEQ ID NO: 222557 - DNA, 180 bp, Homo sapiens
  chr5:677110-677290
  hyper
acacgtgcacacgcagaaacgcgcacacgtgcacacacgacgcggaaacgcacacacgtgcacacagaaacgcgcacacgtgcacacgacgcagaaaaagcaaacggcacgatgcggtttcaaggtggtggccggagccgcctccttggtgccctttgccattttgccgcccgtgggaat

SEQ ID NO: 222558 - DNA, 35 bp, Homo sapiens; identical to SEQ ID NO: 199731
  chr5:693798-693833
  hyper

SEQ ID NO: 222559 - DNA, 105 bp, Homo sapiens
  chr5:1061582-1061687
  hyper
acccgccgcacccgccgtgcgggatccctgagtctcacccgccgcacccgccgcacctgccgcatccgccatgcgggacccctgcgtctcacccaccgcacccgc

SEQ ID NO: 222560 - DNA, 1076 bp, Homo sapiens
  chr5:1064042-1065118
  hyper
gtccacctgggccacggtgaagatacgcatccggcacttcctccacacctgcagacagggagggcatggctgtggggcctcagaggagcccgtcccggcccgcagcacgtggggtggccgtgctccggctggcgtgtccccgtcgcacgccccaccttgtgctggcgcagcaggaagggcagcagcatgagcatgccgccgtcgtgcacgatccaccacacgtcgatgtggcccccgccgaagcgctcctggttttgcggaaacgagtcgacgttcttggccaccagcagagcctggtgcgcggcggtggtgtcgcggacggtgtctgcggagagaggcggccgtccgcaggtcatctgaggccagggtgcggaaggggcctccccggggactcacagccagtgcaggggcgggcacggcgaggcgaggggggtccccacaaagcccccaccctcactccgtcagctcctccaaggaccagccagagactcacagcagagttcagctgctggtcatgtgtccagggaatcccccagcccctgcggggctctgggagaaggggagggagtgcctggacactttcagatggccgctcccagggccagggccttcgacagcctcagagcacacaccctcgggtcggtggcctcaaggcccatcgggacctgacagcgcacaggcctggggacgttgaggggacagcgaggagacagaggggacggcgaggagacagtgaagggatagcgaggagacggtgaagggacagtgaggggacggtgaggggacagcgaggagacggtgaagggacagcgaggggacggcgaggagacggtgaagggacagcaaggggacggtgaggggacagcgaggagacggcgaggggacagtgagggaacggcgaggggacggcgaagcgacggcgaggagacggcgaggggacagcgaggggacggcgaggagatggtgaggggaccgcgaggggacggcgaggagatggtgaggggacagtgaggggacggcgaagagatggtgaggggacggttaggggacagcgaggggatggcaaagggatgcag

SEQ ID NO: 222561 - DNA, 1020 bp, Homo sapiens
  chr5:1111381-1112401
  hyper
aaacctccagattcccggaacgggggacgggaacacggaggacgcggcctgagcaaggccccggtggctgccccctccccagccagggcgcagtccttcctgttccgcctctggggggtgggcggctcctccagggtcaggcgggggcaggacgggccggcccgggctagtgttaccggacggccgcggcgcaggggaagggagagcgcgggggacgcaggacgccccggctcccgaaccgcccgggtctccaccgccacccctgtcccactagggaccacccaggggcccgggctccctccggaggcgcgctccagcccctccccgtttccatggctaccagcagcggcgtccacacctctgcccccggtcccacccgagctgaccgtaccgggagccctggcagggcccctcgccccctagcgctgccactaacgtggggtgggggccctcgtgggggaccgagaacaggcggtgggggcgcgggaaggggcgcctcctgtacccccggccccgccgcccgcctccgctcccggatgccgggcccagacccgcgctcggggcgctcggcctttgtccggccaggtgcggccgcgctcacccgggctggggcgctcgggctcggggccctcgggggtgcccggagcctccgtccgctcggcagtctcgtccccgccgccgtcggcgtgagcctccacgggcaccacggtgaagttggtgggcatggccgcctgcagccgacagtccccgtcccggcccggcccgcgctgcgccgctcccgccgacgccacgggacttggaggcaggggcggggtccgaccgagccgccccgccccgcccgggccacgtgacttcacctgcttgccccgcggccccacgaaaagttggcccgcggcgacttcctgcagggaccccaacccaggctgcgtctgtctgaccgccgcgacccgggacgcggggctttcgctgcctgcgctcccgaccatcgcagagcccgcgaatccccgctcagtctcctgc

SEQ ID NO: 222562 - DNA, 104 bp, Homo sapiens
  chr5:1279700-1279804
  hyper
cgggacctagaacccctcccagcttcctcagaccctgtttgaaacgggttcctggccgcatgtgtgttgcacacgggatcctcatgccacacctctgtccacct

SEQ ID NO: 222563 - DNA, 105 bp, Homo sapiens
  chr5:1294071-1294176
  hyper
gtggatggggggcccgcgtggtgctggcggcccacggatgggtgggagtggcgcgtgccagagagcgcaccctccaaagaggtggcttcttcggcgggtctggca

SEQ ID NO: 222564 - DNA, 360 bp, Homo sapiens
  chr5:1295121-1295481
  hyper
ccagggcttcccacgtgcgcagcaggacgcagcgctgcctgaaactcgcgccgcgaggagagggcggggccgcggaaaggaaggggaggggctgggagggcccggagggggctgggccggggacccgggaggggtcgggacggggcggggtccgcgcggaggaggcggagctggaaggtgaaggggcaggacgggtgcccgggtccccagtccctccgccacgtgggaagcgcggtcctgggcgtctgtgcccgcgaatccactgggagcccggcctggccccgacagcgcagctgctccgggcggacccgggggtctgggccgcgcttccccgcccgcgcgccgctcgcgctcccaggg

SEQ ID NO: 222565 - DNA, 180 bp, Homo sapiens
  chr5:1875796-1875976
  hyper
acccgccaacctgcgccacccatgcgcgcactgggggctgcagagccccgccaggctgcccgcggccgggagcgtaaggccggggtccacgcctcgattttcagtgtccgcagcccctaccccgcctatctgcgacgcaaggcgaaaccttgtttttgcggaaaatgcctggctttgtct

SEQ ID NO: 222566 - DNA, 360 bp, Homo sapiens
  chr5:1876179-1876539
  hyper
gcaaagcctccccctgccagcgagctctcggagcgcggagcctttagaaattgaggggtttactgtcaaaatgaaaatttcacttcaaattaccttggctgatgctcgctcgccaggccgggggctcccgccgcagccttttgacaggcacatgagccgcgagcttccgaacctcgataatatcatctcgagcgcgaaagtcaatacggtgacagcgcgcggccggatacaatccaattacgctcggctgcccgggcgctcctggggctcggggtccggcggccgagggtccccctcagggcccggtccaggccctgtcgccagggttcagggcaggccccaccacgcgggggactttgg

SEQ ID NO: 222567 - DNA, 180 bp, Homo sapiens
  chr5:1876601-1876781
  hyper
agccgagcctagtgagtccctccaaggccgcccgcccgcaagacagtcctgcgtctccggctatcctgtcccaggcaagggcctgtggtcgcctcctcgccgcccccgggccgctcccgtagtccttgggacacctgggcctttgatgagcccagcagggcttcgggcggagggctcggg

SEQ ID NO: 222568 - DNA, 180 bp, Homo sapiens
  chr5:1882276-1882456
  hyper
ccccgggcctcccgccgtccacaccaggatgctcgcccctttccactagcttgtgcgcgtctggcctcctccgccacgtggggcccagccgagcacctacacccttccccggagggtttccaaggcctctgacgccatttgcgcgccaagcctccttccccaggggttccttggggtcct

SEQ ID NO: 222569 - DNA, 1140 bp, Homo sapiens
  chr5:1882712-1883852
  hyper
ttacctggggagccgaggagtaggggtatccaaactgcgggtaggacatggcgggcgcggcccggggcggacgggcggggcctgcagggttctgcgcgctggggccggcgtggcgcggccactgctccggagctgcaggcttctaggcgctgggagggcgaagcaggagagccggttagtccatccccgcgctccgcaaacttttctaaccgggtaacaaagtgagcagcggtggccgccgcgattcctttaacttcgcattccggaggctcgagggggctctgggaccgagcggcctcgcagcggcgacagaaatacatattttacgaaaaagaaaaaaaaaaaaacgagtcgcgcgaacccgtcaagtcagatgtgcgcggcttgaagcggaggaggctctgacgtcagccccacctcgcgcagcccggcctggccgcagactcgccggtcactcgccggcggctcaggccgggaggggccaggacagtcccggccgcgcggtggacggaggggccattcctccgggcgttagcaaataaattccatccgagtcaatatcgcccagcgaacggtgtttctctttagtcacccgagaacgagaggcacttttaattagaaattaattaatgagcagctgctccttcccgccccactgtaatcattcgtctcaattacaaatgagacctatgaaaggacacgctgaagatgtaatcaacagttaaaattagcccggcgctgcgcaggcggccggcccggcctcgcgctggcgcgctctgctccgagtggcaggaaggggctcgcaggcgccccgcacgcgtctcgtcactattgtttaatcgagaatcagcaacgcctcccgccggtttccaccctacgccggaatggactttcagaacccactgcggccgcaagacagcccgcaagagctggtcaaaatgccctcaggtgcgtgggggcttcggggccttagttggagcccgacaccctgagactggcggcccgagggctgtagggccgccccgggcgtgcgcccaccggctttgcacctctgggcagccgagtgtcgcggagaacgccccatcttctccaccgcggtcttttaagttcccgctcagcccaccgcccccacctcgcctc

SEQ ID NO: 222570 - DNA, 180 bp, Homo sapiens
  chr5:1884193-1884373
  hyper
cggaggccagtgagcaggcggcaagggggcggcaagggggcgcccgggccatcccgaacccgttccccgccttctgcgccatcgccctccgggaccgggactcgccccggttgccctcgccccctgggccggcctcccgtggtaagttgggaaggaagccgtgcaaggcagcgttgtgca

SEQ ID NO: 222571 - DNA, 180 bp, Homo sapiens
  chr5:1886078-1886258
  hyper
gctcccggagtacacagcaccggctcagcttcggggagatgaggtgctcccgctggcctggagcgctccgaagagcggaggaccagggccggagcaggccgcaggggaggcaggggatggtcagcccctaacgcgaagcgcaggcgggtcgcctattttgacggggttaccgttggccgt

SEQ ID NO: 222572 - DNA, 1380 bp, Homo sapiens
  chr5:1886457-1887837
  hyper
ctttctttctgagacctggggccagagaccttgggggcgcctgtgcccgcccaccgctcgggacacccggctggggtgtgggtttgagaggcctcacggtcgctgacgccgcactggcgaacctcgaggttggcaggtcatttcctcacagccccgaggccccctcggagccagtggtaggagaaggagccacagggacaagcggtgaatctctggattcccaaccgccctccatgggggcccgcggccctctccctcctctctcccgctgcgcccccgccgcttgctccctgggtacggcctgaggctggacggagcgccgtccgggcgtccaggactcaggcctggccactccgagccccccaccccccgccccgcgccggcccgcgcaccctgcttcccgcaacttgcagcaaacgcagcggcctctggagagcctagcgacgggtagcaaactttgtccccttaagcgcaagagcaatcctcgcaaagtttgtgcggcggagcccactccctacctgagctggggaagctcccgcccgcgccgtgtggctgccggggccgcggggagcagctcgcagcccgggacgcaccggggagtcgccgcagccgccgccgcccgctcccctcggcggccgcgcggagcctccgcctcctcggaaggggggaggggtctcggaaccccggggcgggggcgggagcgggggacctcacctacctgcggtggcgctgggccgctcccggcagcccgcgagggctccgcgcggaagctcggcgcgcgcgctccagcggggagccggcgacaactaatggagacatttccaggcggagcacctggcgagcggagcgcgccggcgtccccaggcgccgcggtcgtcagccgagcccgcaccggcgtgacgtgggcgagcgagcgcgctgctcccacccggccgcccattaacgctttctcccgcgggcgccgcgctcttgccaactttcccctccgtccggtctgcgcgcggcgcgccgggtgcaggagctggggtgagggcgccccgggtgccagcaggggcgctgggagctgtttgggcggggacgtagggctccgggaggtcacacagccctaacaggacagtgggaaggcgcgcgagccagatttggccaaacgctaagctcgctgcggcctcgggccctcggcccacggggcccctctccccgtttgggctgccccacccagggacgcttgggccgggcgcgaagagcccggaaatagccacccttgtcgtcggcccggtttccctccgaggtcttagtatttcccccctcccccaccccccaaggcctgtggagggcgaggctgctgctccagccaaccctcggaattggctgcagggcgct

SEQ ID NO: 222573 - DNA, 1178 bp, Homo sapiens
  chr5:1930821-1931999
  hyper
ggctacggggaagtcgcgctgcccctcgtctgagcgtgggccagggcccaggtggtgaccaaggcccggcgcagtggccccggagcgtggaggggcagctgctgggcggcctcccgggggagggtgacggcttcacccgccaacgctgcctccctcctgggattaggccggaggaatcttggatcgcccgaggctggtgctcagcctccttcccccatcccacctccaccacccggcgacccccgtagacttgattggcaggccctgccccgacccctacccctccaggtccccgcctcggtgcctcggtgcccggctccgggccactcctgcaggccctgcctagggcagccggcggtgcctggaggcgggctcgccccggctgctccacgcccaggccggtccctggcatttcagccagtgggagggcgtccccgccgcccccgtgcctctccgcaggggctgcgccgcgtccccgggcctctccctccgccgtggcctggtctgcctgctccagggcgcagctgcgcccgcttcagcgcctcccgggtctgcgtggcctgctcggctcagaggcctccaccacggtccgctccctgccggacgccgcgctgctgtggccgcggtggttctgtggctgtgagggccgtttctgtccgtccacaccgccttccctctgcaggtgaggaatggggtctgcttcgtttggaatgtgcctttgccgggtcctgcctgacctccaccttccagccgggacgcgcgagcttttccgtttggctgagtcaaaaagggatcgcgcgcatcccgccgcccctcaccacgaagcgcagacacaggaggttgcagggtcagtgctgcggagaatcccagacggccccacagccgccgccacccgcggggcactcgcccgggctctgccgaggatgtgggggctttggtctccgcagagctgggactcccgaaggccttaccagaaactcaggagcagccccagccctgcagagcccgcgagggtggagacgggagacccgctgtggggcctgaggctgagatgccggcctgcggtgaagccggcgggacgttccaacccgctcagacccgcccactccgcagggcccgggcccaccccccggcctgtggcctgtgctgggctgcgcagccggcggtggagggacctg

SEQ ID NO: 222574 - DNA, 286 bp, Homo sapiens
  chr5:2038651-2038937
  hyper
cgcgacggccgccgcacagccacctcccggcgcgtgcagtgcgggcccggagccaacaggtggcacaaacgcatttgacttgggcatcgatcgccgcgcccgcccggggccgcacctccgccgccagcgtccctccagcccggccccgatgccgcgcaggcgcagtgctcttctctccgcgggccgggccgggtcagggtcaggatctgacccgagtctgggtcaagccatggcgggcggcaggcagcggacggcggcgcccaggcagtgcgccctctgctggcca

SEQ ID NO: 222575 - DNA, 360 bp, Homo sapiens
  chr5:3590627-3590987
  hyper
agtcactttgttcctcacgccgtgcgcagcccggcctcctctaatgacattaggagccgcagccacgacggcgctcacgggggcgcagaagtcccgctggctttgatccgcgcctctccgctgccgagagctgacagtcggctgcgcagcggccccgctttcatttgtcagacacgcgtttgccggtgtacccgcgcaggcagctacacctgtactgagagaatttacatcgccttgcttcgggatggcattgatttgggacgggtgaaatacaaacacaaactaattaaaaaccgcataatggagccctacaggaacaaggcagaaaaacaaataaatacaagtgcagctggcacggcg

SEQ ID NO: 222576 - DNA, 360 bp, Homo sapiens
  chr5:3591221-3591581
  hyper
ctgcgtttgtgggaaatacgggcccagtgccgcagctttagggcctgggtcgcccttggtccgcccgccgcgttcccgggtggtgtccccacgctgctgaggacctggttccgcgatgcttgccgcggggggcactccccgcagcctgcgaccgtcctgcgtccttcgcttctgggcgtttccttctggggtttccttggagcggctcgagtcgactcctcccgcctgcccaactcagctccgctcgccactgggtccctgcagccctgcaccctcggggcgctcattgtagactattcttggtccccaggggccaccggtccctgcctggcgtggcaggaaagcgcagactggacacag

SEQ ID NO: 222577 - DNA, 660 bp, Homo sapiens
  chr5:3595151-3595811
  hyper
gatgtttccctccggctgccagggggctttctgggtgaagagaaagcccctccccccgcgtctcccccacccctccctccgagaacccgcggcgccgactgcgcctgcttcccccgagctggcgacttctccgcgggatttgccctcgctcaaagtttgcacaattgaaagagcccgcagagctcggccgctccccgcttccccaagggcggcgaggccggtcattggcagacgatcggttactacccagtaggggcccacgggaacccgcatctggagtcgggggtgtcacgccacgccggttcagtggctcgcggagagcgtccgggtgcacttctgccaaagatgtcccctggaggccccggccgcgcgggactcgggggagaggccgctcccccctcgctgtcaccagcgtccaggccgccggccccttccccgctgcccaaacagtagaaaagcaggcgccaagttgtttttgttaaaaaggggacacacctcggccgcgaaactgcaaacccggtgtcagacagctgtaaacccgtgtcgacaggttgtcagacagctgcgggggctggtcgggaaggagcccacggcctccgggcccacaccccgccgccccgacgcgcgcgcccaccgcgagagtagctggccgggccggca

SEQ ID NO: 222578 - DNA, 360 bp, Homo sapiens
  chr5:3595885-3596245
  hyper
gggagccaggggcggggcctgcgctcaaggggatgccaatcaaagcatcaacttcaaattgtgtctgaaagccccgccgccgagcggagggcggccgccgcagtcggcgcgcgattgcggatccgggcgcagccgggagccgggcgcctgcgagcaccgggcagaggagccgcgaccggcctccatctcccggcccgcccgagcgcgcccggccggccgcccgctcctccctagacccctcgcggcgccccctgcaaccccctccggccggcctccgcctccctccccgcgcctttaatactcgcccgctgcggcggtcgccgagtccgcggacatgtccttcccgcagctgggctaccc

SEQ ID NO: 222579 - DNA, 180 bp, Homo sapiens
  chr5:5139678-5139858
  hyper
agccagtcaccggcctccgcggcctggccagttgagggtggccgtgaccgcggggccaggagcgccgccacatctcggggcaaatggcgcgggggaagagtttcctcctcagcctccccgtctccgatcgctccgcaaactccagagcgaggcacgcgcctttaaaggcaggtccgcggc

SEQ ID NO: 222580 - DNA, 773 bp, Homo sapiens
  chr5:5140218-5140991
  hyper
cccgccttccctctgctccccgctcgcctccgcctcagcgccccgctgacctcgcctcctcccctctgctctttgtccctgcactctcccctcctcggtcctctgacccccccgccctcacctcctcccctcctctctcccctgcccgccccgcgctctcccaccgctcccgccgcccccgccgccgcggctgccactccgccccccgcgccgcacggagcttcagtaataaccccggcgcggcggcggagtcgctgtggggaatcctcccgcgctctgcctgggtcgggtcctccctgcccgctcgcacgctgccggccggggaccctccggtggcccctagcccctcggagcgctcctggatgaagccccgcgcgcgcggatggcggggcttggcggcgctgtggatgctgttggcgcaggtggccgagcaggtgagtcccgggcgctcccaccagcgcggaaaccgcgggtccggacagctggaggcgagtcccccgcggctcctctcccgcggaccccgccgtctcaccgcgatgtcgccgctgttttccgcaggcacctgcgtgcgccatgggacccgcagcggcagcgcctgggagcccgagcgtcccgcgtcctcctccacccgcggagcggccgggctggatggaaaagggcggtaagtccgtgaggtgggggcttctaatccttgccatttagcagctcgtaatctccgtgccgctggtttattaggtgctgtgaatgttcacgactctgtggaaccctacttt

SEQ ID NO: 222581 - DNA, 775 bp, Homo sapiens
  chr5:6448769-6449544
  hyper
gccagcccgggacccggcaagggaaagggcaagcgcgcggcggagctggccccgcgcgacaaggcgccggcggctgcggcggcggcggcggcggctgcggcgggggccgggggcccccgcgagagggcagcgggcgccagggcggggccgggcccggcggtggcggcggcggcgggcggcagcctggtccccgcggcgcgccagcaacactgcacgcaggtgcgcagccggcggctcatgaaggagctgcaggacatcgcgcgccttagcgaccgcttcatctccgtggagctggtggacgagagcctgttcgactggaacgtgaagctgcaccaggtggacaaggactcggtgctgtggcaggacatgaaggagaccaacaccgagttcatcctgctcaacctcaccttccccgacaacttccccttctcgccgcccttcatgcgggtgctcagcccgcgcctggagaacggctacgtgctggacggcggcgccatctgcatggagctgctcacgccgcgcggctggtccagcgcctacaccgtggaggccgtcatgcgccagttcgcagccagcctggtcaagggccaggtaaggcgagcgcgccggggctgggggcgcggggccgagatcgggtctgcagcgccgccgggcgcccgggccccgtggtgagggccagcgccggcccctccggccatctcgctccctgctctgactacaccagcgccccacggggatgctccgagcgcctccacctcttttccctgagcgtttt

SEQ ID NO: 222582 - DNA, 273 bp, Homo sapiens
  chr5:10441403-10441676
  hyper
tttctcctatccttcgactcgaggctcttttgacagatgtgatttatttcctcctagagccagtcacattggctcaagcaacctatcgtaagaaaacaaatacaatagtgttttagctggaaactgcccactgtctaagcggctttttaaattaagaactcaggttcactacgggatggcttaggccagggaacagcatgtgcgaagttcgaagcccgagaagtttggaggagcggccccaggcgcaggcgggtcccgcagcggggcccgtgc

SEQ ID NO: 222583 - DNA, 166 bp, Homo sapiens
  chr5:10442349-10442515
  hyper
agcaattcaccaaggctgccatccgcacccagccggccgacgtgctgcggtggtccgcggggtaagcgcccttggcccggggagctgtccggtctacatgcccaagccagacgagcccagagagccctcctcccggaccaggggccttacgcggcactcagcgtcc

SEQ ID NO: 222584 - DNA, 960 bp, Homo sapiens
  chr5:10564404-10565364
  hyper
cggagacttttttctttgagcgcagccgcctggtgccggtttccgccgagctggagcgcgcgggccacggcttctctggggacgcagaagcgagaagcggggacctcggcgcgcgccccgcgtcccgctcttcctgcccgcgccccggcccccggcccgcgccccggccgccggcatggtgctgctggccgggaccgggccggagggcggcggggcgcgctgcatgaccccaccaccgccgtccccaccccggggcgcgcaggtcgaggaggaccccgctgactacgaagagtttgaggacttctcgagtctgccagacacccgcagcatcgcctcggacgactctttctaccctttcgaggacgaggaggagcacggcgtcgagagcgcggagagcgtcccggagggcgtcccggaaagcgtcccggagacggcgaccctcctgcgcgccgcctgcgccaacaacgtggggctgctgcggacgctggtgcggcgcggggtgagcgtcgaggaggcgcaggagactgaccgcaacggcagggtaagcgggcgtccccgcaggatttgagccccctcactgcccccactcccctcctccccaccacatccccgcgcctcccagctcctggctccggaccggtccctcggtcactcagccgccgcccagagcgccttttccccgctgtttgggagcgcggtgccctgggtggcttccccgtctcaggctgggggacgcggtgcggggagggagcagtcgaggtgtcagcgcggcagaaacgccagtccggcgtcctcaccgcatccccttctcgtttaccggtccccgtggacctcctgactgaattcgcgctggctgcccgtgctgcaatccaggatgggcttcttgcggcccggtcccctcctgactattacctttccccaggtccctggcaggggaccattcctcctcccctgcaggag

SEQ ID NO: 222585 - DNA, 1483 bp, Homo sapiens
  chr5:14142926-14144409
  hyper
cctgttttcgggccctctatgttcactcaacaactattaagaagccccctccccgagccagggccagcgctgagcccactagggaggcacccgccccggcccgcgtcaccccgccttgcgggctagacgacgaaacgcctcggcgctcaggggaccgcgcaccggtgcaggagccagcgccccggttgggggcgcaatgccgggcctgggaaggtccgccccggctggtcagagctttcctgcgccttccaaggcttggagctgccccggggaagcagaccgaaccaaaccgaacgttcctgcagcctccccgccagccctgcgggagcccatccgcccaacgcggccccgcccctcccccaggctccgcccaccgccgagcccaggctcggcccttgacgaagttcgccggaaattaccgaagcccctcttttttttccttcctctccgttccctgttctcccttttcctttcacccgggttccctcggccgtgatttccccctcccccctccttccttccccattgaaatcaagatggaggctcgcggcagccgccggcgcccgtgatcccggaggtctcgccggccacgggcccccgccctcgcgactgcgcgtccgggaggcgcgtgctgctgcccgcgctccggccggcgcccgggaggccgtggctccgcgcctccgcccctcggccagctcgcggctaccgggcggagtcctcgtctatgtgggcgcgctccttgggccgagccgccgccgccgccccccgccgccccggggctctgcgtccgcgcgccgggcgcgggcagctgggtgctcggcgccgccaggcccggcgcggagcgggcggcacgcggcgctaggggcgcggggcccgaggcgggcgcggccgcgggcgccgccgcagccatgagcggcagcagcggcggagccgccgcccccgccgcgtcctccggccccgccgcggcggccagcgcggctggctcgggctgcgggggcggtgccggcgagggggcagaggaggcggccaaggacctggccgacatcgcggccttcttccgatccggtgagtgcaactgcggccggcccgcccagcggcgctgccccaagcgctcggccgacccgccgcggagctgccgagctccggccaccgcgcgctggtgcccgcccgtccgtccgtcggggcccgcaggctctcgcctgggaccactgcttccatgcgccggggctgcccgccccacatccgcgtgtcccgctgcccgcgcagccgggcgcgcggcagcttggcccgaatgccaccacctcgccctccctgcgcccgcccctcgttttagggcagaatcccccggtctgccgctcccggcagccgcggcttcgcgggttggggcgccggctctttgtctctttcgctggaggaccgaggaggcggcggcggagatggcgtgggcggaggctcttaccccggaggccgagcggactgagcc

SEQ ID NO: 222586 - DNA, 871 bp, Homo sapiens
  chr5:15499745-15500616
  hyper
agccaggaaacctccttcaccggggcggggcagggaaagtctggctctcctgggaccgactccctgctaagtcgccccaagttttccctccctctgtcttccattttccgccccagtctccaaacagggaagtcacaggagaatgccaacgcatacacctgaaaggtgtcagaattagacacggatgcgtgtttattttaaatgcccacgcacttaaaataggctgtacttgcagacaaactcaagggattccaaacgacgcctggaagttcatcttatagattgggggccaagcctgtaaaagaacaacagtaaaacagagccaacaggacgttgcttcgctccgaagggttcgcgcgtagcgcgctgagccggtgcccaggctggggcctggagccgcagccccgaaaaggcgcgctgcccctttaaaaggccgcgcatctccgggccggccttcctccccggggctccagctgtgattgacgctgggcggcgagaggaggcgcctggcgctaacaaaagtccggcccgcgggcgagctgcgccgggtcgctagtcttcactcgctccggggacccgcaacaagtggccgccgcgccctccccggggaagccgcgggcgcgcaggggcagccgaaggaggcggtcgagccgcggagcccaggggcctgcccggctcagcgcccaccggaggggatcggggcgggcggatggggacccggcggcggcggcgcggtgagcctctgggcggccccggggcgcgggctgtgcgcggcgctgcgcccgccggcccccagcgcggattgtaagtgctgcagctgtgcccggccccgcctggagccaccgggggtgccaggaggggacgcagcacc

SEQ ID NO: 222587 - DNA, 180 bp, Homo sapiens
  chr5:15500667-15500847
  hyper
cttgggggggatgtgcagctaacggtcccgtcgggcgggctttcctcgggccgagcgcgcaggacgtgcgccgcagctatggagtgtcccgggagacggcgggcatgacggctacaggatgggcgcgaacaatggcaaacagtacggcagtgagggtgagtgggccgcccgtcctcagac

SEQ ID NO: 222588 - DNA, 535 bp, Homo sapiens
  chr5:16178991-16179526
  hyper
ggaaggcatattggagccagcgctcacagggcagaaccagacgagcctcactggaggcaaactgggaggtaggcgtgcgctgtccgtggtgctgaaagcttgaccggcgcgagctggagccgccaccggctgcctcggggtctcgccgggccttacctgctccgcgccctggaagcagatcttgcagatgggctggtggtgctggtgctggtgcccagcgcgctggtcgccgccgccactgctgctgctgcggctgctgcacaccgagcgcgtctcgggctggtctccggcgccccgccgctcgcgctcgccgcccgcgccggcctcagactccccggggccgcctttcgctgctgccgcctccgggaggcgcctcggaccttccccggagtcgccggccgccgccacttcctggccggcgggctgcaggggcaggggcggaggcggcagctcgtccgctcccctgcaccgcggggccacctcccctagcggctcgcttggccccgcggcgcgctcgggggtctcgggggacgcg

SEQ ID NO: 222589 - DNA, 214 bp, Homo sapiens
  chr5:16616869-16617083
  hyper
gccaggttaccgcggccgccgcccggcccgcggcctcctccacctgcaaccccgcgccctccgccgccccagcttcctgcgcttcctcctcctgctgctgccgctctgcgggggatgcctggggcggtggcggcgacggcggcgcctgctcctcggcggcaggagccgggcatccctcctcggcgtgctccggaggcgccgggctcgccatctt

SEQ ID NO: 222590 - DNA, 1161 bp, Homo sapiens
  chr5:16935458-16936619
  hyper
acaggaagcccgcacgttttgcaaaggaaataccagacaagacctttcttggagaaaggcaggtccccgctgaacattttattgggcttcctgcacccgggcagtcgagcgggcggatcgccccgcccgcgccccggcgcgcgccgcctcacctggcgcgggtgtcccagggcgccccgagagccagccacccacgcaaacggaaacgcaccttcgctacctcccggagcaaaatgcgagcgcgggacaggacgaaacaaaacctgcccgggcttactcatcagagactccgcggggggatggggggtgatttcaggagactcccagaaagttgcgccttccagggcttaggaaaaagtacccagggcgcgcggcgtggtgggcagacgcctctctccctgggctccggaggccaggtcggactgggagcgcacttacctcggtgaagaagttatccattgttccagcgcagtcccggactcgccgagtgccgctccgactcgcggaagtcagcgccgccgcgggtccggggaaaccatgcgtgtcacggcgccactcccgaggacgcgcgcccgcggggctcccctgctgccatcgcccggtcccttcttgtccttctcaccttttgttcgcccaaacccaagtccctaactcgcccgtcccgacggcagcctttgtctcttcttcctccaagttcctcactactgggcgcagcgctcgcaagcggagaacagctggtggcacattcttcccccaggcgggggaaggcggcggggtgctggcgagcgcggccccctccctctgcgctccggccgggggccctcggggcgggcaggaggacagcgggccgcaaagtgagcaggagccgcgatccccgcgcgagcgcttggaggtgagcagtcccgcgccgcggctcagccagctctcgcccgcgggactacagcccagcgacctcgccccgccctcccgcagccggccccgccctcccgcagccggccccgccctcccgctcgcggccccgcccccaggagcttggccctccgccaaccacaccgtctggccccgcccgggcggagcgccccgcccccttcccgaccaggccccgcccactctaagcccgaagcagccgcaggctcgttagcggacccgggagggggccgc

SEQ ID NO: 222591 - DNA, 780 bp, Homo sapiens
  chr5:17217660-17218440
  hyper
cggggggagggcactgggcaggaaggggagggggagcgagcgcgagaaatgcagaggctgcagcggcggcggcggcggcagtagcggcagcggcgacgacggcggcggcagcgctccaactggctcctcgctccgggctccgccgtcgagccgggagagagcctccgccagcggccaggcaccagccagacgacgccagcgaccccggcctctcggcggcaccgcgctaactcaggggctgcataggcacccagagccggtaaggaggcgcgcccggtggccccgcgccgccgcggacccgggggcctccgtcccccaccgcgccgcgccccgccccgcagcccccgggctctcccttcatgcagcgggcagcagggatgtgggcccggattggacggcaagggcctggggtccctctgtgagggctccgtcgcacttcggggatcccgggtgatggggggcccagaagtgggaggcttcagccgctcgcatggtggaggggtgaggggggcggcgaggttggtaaacggagctggggggagggggctgtcggggagaggagctgcgggtgacgggaggaattgccgaatgcgaaaccccctcagtgcgttgagtcccggggagacggttctgtgggctgaagggagcgcttccgtcatcggagcccttaccagcctgggagaaagcgctcggggcgaggggcgcagcagccaaagatggagggtgggggtggggtggggcgggagtccggggagaaagaagatggggaatctggcccga

SEQ ID NO: 222592 - DNA, 76 bp, Homo sapiens; identical to SEQ ID NO: 199779
  chr5:17987028-17987104
  hyper

SEQ ID NO: 222593 - DNA, 119 bp, Homo sapiens
  chr5:29296855-29296974
  hyper
cccatgcccatccggaactctagctggcccgcaagtgcgtgggcagccccggttcccgcctgtgcctctccctacacacctggcaagctgagggagccggctcccgcctcaaccagcac

SEQ ID NO: 222594 - DNA, 202 bp, Homo sapiens
  chr5:31639682-31639884
  hyper
gggcggggagtgaggacgccgaaccggggtcccacgttgggcggcgcaaactcctctagcatccggccggggacggggagggcgcagcccaggggagggggctagacagagcgggaccgagacagcgggacaaccggagacgcactgccgggggtactcaagacagggccgggacctcctgctcgggcgcgcatcccgggtc

SEQ ID NO: 222595 - DNA, 720 bp, Homo sapiens
  chr5:31854778-31855498
  hyper
gctccaggtttgccccaggaagctcctgagccctcggtgtaaacaaaggtgtctggatgagaagccccaaactccctgaaatcctccccagggcggtttccttttcccggcgaggggagtgaccggggaggggatcttggaatgccgtggggttttgacaagtgagcaggggagtggcgagccgagtttaggattgcattacaggcttttcctaacctcctccaccgcggcgcggagggaggaggggggggtcctcccacagacctggagccggcggagagcagccttcgggaagtcctgcaggagccgcgttccaggagggcagctggcagccgccccaggcccccgggccgcctgcaggtgattaggctaatgagctgccccgggggcgcggagaccggcctggcgagcggattacccggcgcccagctgctgccggcggagactcccaggagctccggagaggaaccctccgaaggtgacttcagaactggaggtaggaaatcggcttctcaggcgaaagcctcaggttttctgatctgatccaggtcgggtgcagactggggctgaatccacaaatgtggagatttagccacagcctcggaggcgcggagcggccacctaagcgtctgcccttctcgtctcccggatcactggggtgtgttgtttttaaagtgggggatttgcgtgttgagagacggtttgtgttcctcgggagga

SEQ ID NO: 222596 - DNA, 124 bp, Homo sapiens
  chr5:31855574-31855698
  hyper
ggtgcccagaggggacaggtaatagggggttccggagccacggcggtttcagaaccttggggcctgtgccgttgaagccccggtaggggcggggggcatggcagcagcccgggaaatctgtcat

SEQ ID NO: 222597 - DNA, 445 bp, Homo sapiens
  chr5:32709813-32710258
  hyper
ggttccagaaagagcgataaggagagtgctgttaagggaggcgagcgctgacgccagaagttgccatatccccagaaaccccagtttgccttttcaccgtcgcaagtgagaaccagagcgcgttaaaggcctcggagtaaaaaacgcagcgtctgggactgcggcacccgggttgagtcgggtgcaagtttctgccgaaagagggcgtcggtctgagactaaaagaaatttgtggacacggacgcctagtcaaatgaaagaccattttaacacattttcaatgtatttaaatgtgcgggacttaattgtcagaattctcccgcccagtgtagcccgttcacattgcaaatgacttggctgcagtaggcacagaaggtccagttccattttgacccgccccgccgcgcggcggactcccgcgatgctcctctggtcacggacttct

SEQ ID NO: 222598 - DNA, 780 bp, Homo sapiens
  chr5:32711740-32712520
  hyper
gtgaagggggtattctattttgttaaagcgcccaagggggcgcagggaccttggagagaagagtggggaggaaagaggaagggtgggtggggggcagagggcgagtcggcggcggcgagggcaagctctttcttgcggcacgatgccgtctctgctggtgctcactttctccccgtgcgtactactcggctgggcgttgctggccggcggcaccggtggcggtggcgttggcggcggcggcggtggcgcgggcataggcggcggacgccaggagagagaggcgctgccgccacagaagatcgaggtgctggtgttactgccccaggatgactcgtacttgttttcactcacccgggtgcggccggccatcgagtatgctctgcgcagcgtggagggcaacgggactgggaggcggcttctgccgccgggcactcgcttccaggtggcttacgaggattcagactgtgggaaccgtgcgctcttcagcttggtggaccgcgtggcggcggcgcggggcgccaagccagaccttatcctggggccagtgtgcgagtatgcagcagcgccagtggcccggcttgcatcgcactgggacctgcccatgctgtcggctggggcgctggccgctggcttccagcacaaggactctgagtactcgcacctcacgcgcgtggcgcccgcctacgccaagatgggcgagatgatgctcgccctgttccgccaccaccactggagccgcgctgcactggtctacagcgacgacaagctggagcggaactg

SEQ ID NO: 222599 - DNA, 240 bp, Homo sapiens
  chr5:32712650-32712890
  hyper
ggtgagcaggggcgcgtcccgggccccgggccctaacccaaccgctctccgcggctctccctgcacactcgtccactctgcagaccccactccccactgcggcgctgaggtcgggtgcgcgcgggcactcgttcaggtatgcgccgtgtggctgcgacaacctttgacgaccgcccatcgcggtgtacgtagagggtcccagggaggtgaaggggttggaggagagggcgtctgtagctc

SEQ ID NO: 222600 - DNA, 104 bp, Homo sapiens
  chr5:32712997-32713101
  hyper
ctggctccatccagggtctgaagcatccgaggcggaaagaacttgttccccagtcctttgccagcgtgcgcccccacttagtgcggaagcgtccgcggacgcct

SEQ ID NO: 222601 - DNA, 150 bp, Homo sapiens
  chr5:32713505-32713655
  hyper
cgcggacgtgtaatcgccagtgtggcccattttacggtagggtagaatctgagggaaggcggactgagatgccggtatagcgccgatccctcctccctctagtcagggattaggagcactgcgatgagggaatcccgtctctgctccccc

SEQ ID NO: 222602 - DNA, 197 bp, Homo sapiens
  chr5:33936115-33936312
  hyper
ggagaggaaaactggagtggcgggtgggctttgcctgcagctcaactctccctcgcggcgcgggcgcggctgggttcagcacctcggaaagcgcccctcgcggcgccccgggattacgcatgctccttggggcccgccgccttggccgtgcaagtgccaccgtaactggtgagagccgctggcaacccacccggagt

SEQ ID NO: 222603 - DNA, 180 bp, Homo sapiens
  chr5:37840011-37840191
  hyper
cctgggagcacgagactggtttgtctgatgctgctgccggagctgaggtcttgcctggagatccgaacgagacaccacgtcaaccggcgcggggagtcccgtgaagacatgagggcgccaggagcgcaggctggtcttctagagcccgggctgggggtccggggtccggggtgggggagg

SEQ ID NO: 222604 - DNA, 540 bp, Homo sapiens
  chr5:37840253-37840793
  hyper
ggagaggagagcagcgaggaggccctggagttcccgaggcggggggccggggtgcgagtgggcgacgcgaggcgcccctccctgggctgcagggagagcgctgagagcgcggagacgccgcggggctagcgccttctcctctccgggtggatcaaaaatcgagaggaatgtgcggcgctctgcgcgggccagccgaaaggggcaatccgaacttgaccgcggcgcccgcgccgggctttgcccccgcgcgccgcactgggagggtggcgctctgccggtgcagggcagcgccgggctttcctcgcgcctgtcgaaggccggccttcccgctcgggtgtctcgccctctcgcttctccgcagggcaggaggcagtggcgagaaaaggagctgccggccggagttctagcaccgagaaggagaggtgcggagcggccgggtgagggaagccgagtatttgccaggggacgctgcgagtggggatgaatttatagggctctcactccgtgacgtgccctccagtggcttttctgattcgcttt

SEQ ID NO: 222605 - DNA, 699 bp, Homo sapiens
  chr5:41870078-41870777
  hyper
agcgccaaagggctcgggagcgctgccaggagtcctcccgccccttctcagcctctccgcgcgcttctttatcgcgtctcgctccatcagggaagcgactgcagaaccaagcaaaggcggtcatccgaggggccggcgaggccaggaacgcgtcgccgcgtgtccgtgaccagggcaccgcgccacggatgccagatcccaggctggagagagcgggtaggggcagagaagaaaacgcgggcaccactcagggtttggtccacgttcttcctgcccatggccttcctcttcccccgcactttaccttgtaccaggttgccccagatccgcgggcagaggcgcagagccgaagcccggaggagaggagtttgagagccgccatcttcgggcggtgaggcaggaggaggctgcgggttggagcgcgcgtttgagcgtcggtgcgcgactgcgaaggaaacccgggcgggctggaggctcgacagcgcgtcgatgacgtcctcccggcctttcgagccgcacgccaccggcgcgctgctggctgctgcttttaaaagaagtgaggctgggcggggccccggcggggagaagaggctctgtgcagccggggcggatcgcggggaagttcctctcagcgcctcaggtgtctgggcgtgtgcagctgtgttggcgcacacttgccgctacagcccttctgtcagc

SEQ ID NO: 222606 - DNA, 372 bp, Homo sapiens
  chr5:42424337-42424709
  hyper
gcggcagggagttgcgggcgacagacgaaccatcacactctggcgtctgctctggcccgcgagtagtgtacgtggaggggtttactccggagacagttttgttaaagtcataaaagttttgctagtgtgtttctgtttgccatcatctgcctggctgcggcaggaactgccgaggctgctgctgttgcgcggggaagaatccccggcagcgcgactggagagactggggaggtcgagctgtgcgcgtggacacagcgcgcagagcgcgcggtcttttgcgcgtttgtgcgggccgcagccgcacgttggcaccgatggaactggggtcagtagagtgacagccaccagtccgcatgaactggggtaagtgga

SEQ ID NO: 222607 - DNA, 180 bp, Homo sapiens
  chr5:42424831-42425011
  hyper
agagggcgctggcggcgcagagggtgcggggcagggcacttgcgagtgcgtggggaagtctatttggggcgagtgctttatatatagcccgaggggatgcctgctgagaccgagctgcgggggctctcggtctggcgcggactgtgtgtcctgaatgagtgtacgtgtgcgctgtgtgtg

SEQ ID NO: 222608 - DNA, 340 bp, Homo sapiens
  chr5:43557425-43557765
  hyper
tgagggggacgcttaccacaggcaggcccgacctactcggtagttctcaggagagacgtgcgagaccgacagttgacgcccgggaaataaaaacacggggggagggggcgtggaccctgcgccagggttcgctggcgcacaggtgtgttcaatgactcggctccggccgagacccgcggactgctgaggagtggtccctgggagactgtcacctgctccgttagcatcgggggaagggagtagaaacggaatcaaaatatgtgtcccctctttaattcaccctaggtgtttaccacagtaggtcacacctacgtttaacaagcttcgttctcttcccgtt

SEQ ID NO: 222609 - DNA, 237 bp, Homo sapiens
  chr5:43603563-43603800
  hyper
ggggtgtccgcaggccgcaggcttaggtggggaagaagcaccgtgcctcttggtgtccctttctcgtctcctgctggggcgatgtcgaagggagtgggctggtggatttgggaactgggtccccgaagagggcagggaatgaggcggcagctgtgcaggtgcagatatttgcagctttgggggacagcgagagtcgtacggggtcatttcggccctcaagatcgggggtggtggaga

SEQ ID NO: 222610 - DNA, 763 bp, Homo sapiens
  chr5:49736587-49737350
  hyper
agactctgccctgttacctacgcgcccgactcgcggggcgctgttcgttcaagactcgccccaaagagcgcaggaacgcgagccgcagcagtttcagggttcagcttaggtgacacaaacgtagctaatgggaggccgccgccgactctcccacccgcccttaccagcatccccgcgcctctccccgccacccttgcccggcgcgccggcgatgccctctgcccgcggggacccgagcctcgcgcgccctccgccctccctaccctggaccctgtacccatcacacctggggcactgccgtccgccgagcttgggcgcgcggcagcgagaaggcactggaggaggagcagccggggcgtacgcgccctggcctccagcaggccggggagggcgcgcatggcgccagagggtccgcctgggtcctcgtggagactgctccctcagctcgccgccgcgggtgtccagagtccctgcgcacactcgcaggtggcccggcgctcgcagccagtgccgcgggtaggacgctgaagaaaaggcggaatgggaggggcccggccgccttgccccactcccccgagacgctcttaccgcgcccggccctccatcagttatgcagccctcagccggctgctggcgttcccggatgtgcggtggcggtgctacttcccggctgcagcctctccggcctccgccctctcggctctagcaggtcgggagagagcttgggcaggtgatgtctagccaatctcgtggggagaggtcg

SEQ ID NO: 222611 - DNA, 107 bp, Homo sapiens; identical to SEQ ID NO: 199844
  chr5:54469036-54469143
  hyper

SEQ ID NO: 222612 - DNA, 453 bp, Homo sapiens
  chr5:56112740-56113193
  hyper
cggatgtgtcagccattcagtttcaaagcagtggtgactgctccccgcagcccctccggcttggcccggggactgcggcgcgggtgcagtgcttcctgctcggtgccctggcgcgggccgcccgctgaattccaggggccgcagtgcggtgggcttcggctcagatgcgtcttctggtgcatatgaagtacagtatgtgtaaggtaatttagaccagcggtttattggcctcgcccatttttggctactggaaatttttatgttaaaggaaattcttttaagtgtgacagctacatccttgtttgtttgttttttaaaaacctgattaacgtatgcaaagtacaaagtcttgatgggtattttgagttgctggaaatgtttttgtgatagtccctcgtggccctgtagaattccctgacctttattatgagaagaaagcgtgtcattttgtga

SEQ ID NO: 222613 - DNA, 480 bp, Homo sapiens
  chr5:57755480-57755960
  hyper
cgcccgcccggcagcccggcgccctccgcttgtcacctttcccagcactttgccccggcagtagcgcttcccagtcgtggggtcgacgataatccgcgagatctccggccccgagtgcgaatggtggtgatggtggtgaggggccgccgggggcacttgcgcctgggactgaggtggctgcgattcctcggggggctgcggcggccgcttcttcttcgagtccgctccgcaacccttgcccagcgcctgctcgcacattttggtgctggcggctggctggtaggtgatagtccgcaaaagctccatggtcgccttgccgccccgcactgcccgctgccaccccctaggcgcggtcacacgtccgagccggccgtggtcctcgcacccttgcctctggtgccgactagcacccaacaccccggtccacttgtgcgagtgagagcgctcggcgaagtcttatatacggggaggcgggaaggg

SEQ ID NO: 222614 - DNA, 619 bp, Homo sapiens
  chr5:57755985-57756604
  hyper
cgtcacggcctatgccccgccccacggccggccgagcgcgcgtggccgggaagcaagtcttgtcccgccacccgggtctcgcttcccagcggagccgcgcgcctcaaacgccggccgccgagatctcttgcggccgcgggaaggccttcagagccgtccgtgggccccgctgtcccgttcttcgaaggctccgagcctcagcgtacaaaacagaatcgcgagggccgacgcctggcctcacccccgccccagccgcctggtggcagggcagtgccgtgacccgagcgagtcgggcgcgggtgtagacgcagtccctcccccgcacagcccttcccggccgcccggggcctcctgtgtcaaggtatcagggtgcccggagcccgccgcacgggcaggcgaggcctcctccggccgtatgacagggctcgtctgcagctgccccgcagtgcctgcccgcgctgtgacgagctcgctggtgtctagctggggcagtgccgagaggccgtgggggtgaaaggccgggattcgtggagccgggcattcgagcccatcgcgctagggcagacacgggcccgcagccgggatcccgggccgatcggccaaccgtgccaggatccca

SEQ ID NO: 222615 - DNA, 203 bp, Homo sapiens; identical to SEQ ID NO: 199868
  chr5:60626141-60626344
  hyper

SEQ ID NO: 222616 - DNA, 105 bp, Homo sapiens
  chr5:60626723-60626828
  hyper
ctgagagcgcggcgcgcgtcccgagcgcctggactccgcgcagccgggcgccgcgcacccgggtgccggggtgggagccgggccgcagacccaagtgcgcccgaa

SEQ ID NO: 222617 - DNA, 180 bp, Homo sapiens
  chr5:63255163-63255343
  hyper
cctcaggtgtctacccgcgcttcagggcgccccagagcgtaggcggaggaacccagatcctgtaagtcagcagccgggagcgcctagcgcgctgcgagagcacagatggctggggaggcgcgcggattccaggcctctcagcttccccagagcgcaaacagcggccggctggcgcctccc

SEQ ID NO: 222618 - DNA, 133 bp, Homo sapiens
  chr5:63255569-63255702
  hyper
agtccaaggaaacaaaggaaataggggttgtgcactgcacgagagagttaatctcaagtctgcgagaagacggggaatcccgggggcaccgctggcacggggaaaagcagcctcttccgcctctccggaccag

SEQ ID NO: 222619 - DNA, 760 bp, Homo sapiens
  chr5:63461428-63462188
  hyper
aagggagaaaaactttcccacggttccgtctggcccgcggcgcttgtctgcctgcgcggggtcaaagcccggcgccgcccacgcgcggctcgggtgggaacccgcagacgtggggcgagcagggccgctggctgtggcgggcgagcgccggggcgccacgtccgaggccgcggggtcggggctgcaggcacagctcgagcgctttccgcggggtttggctcctgtcgcttcccgtctcgccgaaccggcatcgccgccgccggagccgcagcgagtcctcagagcctggctgctggcggccgggagcgccgggacggggcgcgaagccggaggctccgggacgtggatacaggtaaaggccggcgggtcggagtcgggcggggcgcggcggcggcgcctctcggagggacctggcctcggccgggccctacccagccgcggtggcccgggcccccacgttggcccaggcggggacgtgccaaggggctgggctagggttgccgctggcctggccgcctctcgcccggcgggcctcaggtgacgcggccgcggcttaactttcgcacctgaggctctcggagcggcctcggggcgcgcccacctggaggttggaattacacagggtcgaaaaagctgagtcctggaggcgaggcgctgtaggtgtggcggaggaggccggggaaggtggggtgggtgccaggggtccagtactgaaccctctccaggtctgaggtggggaactgcgtcttgtttaatttcg

SEQ ID NO: 222620 - DNA, 686 bp, Homo sapiens
  chr5:72732465-72733151
  hyper
ctgggcggtctttgaccccccgcgcctcccgcccacagccggagcccggcagctggaagcacccgctaccccggggagcgtctccaggccgcggtctccggccttcgccgagcgaggcgggcgggaaggtagggccgcggtggagcgggcacggcctcccgccccagcccggagcctctccgccccgccgggccccgcggccgccccttcctcacccggaaaatcgtggggaggcgcggcgtagcggccggacccctggcctccgcgtcgggctgcgccacgtggcagctcccagcgccctcccgtcccggcctcgcatgctgtcgggggagcgcctcgtcccactcaggccgaaaccccaggaaggaaatcactctgggctggggacgcggcctttctgctcgcggctgttgggtgatgtgcccgaggtttctctgcccttctccgggcgcaggccgttcattcgcgccgccgctcctgagggtcgctgggcgcagaaccgcctcggccgcggcccggccttaggcgcggcctcgcgcattcctgcgctcgccacagccggcgggaggcggggaagggagcagcccgggtggcttggagaacactgaacctttaattgggctataaatcagacaggggagtgcggtggagtttatgcaggtgtaaaaacagaggggaaagcccgg

SEQ ID NO: 222621 - DNA, 1740 bp, Homo sapiens
  chr5:72743192-72744932
  hyper
ggtgcggccggtagccgaaggcggtccgggccagctcggcggccgcgccgtgcggtggcgggggcggcgggggcgagtgcgggtggaaggcggcggcggcggcggcgcgctgcggcggcgaagagggccgagggcggcgcgtaaggcggcagctgcaggccgtagccgcagccgtaggggccgtagccgtaggcatgcgggggcggcgggggcgcgggcgggaagagcgcggcggcggctgccgggtcgcccgcgccccctgcggctcccgcgccgcgcagcagcagagactcggcggccgcggcgttgggtgggagcagcggctgccgcttgaagcgcttcctccggcgcaggaagctgccgttgtcgaacatgtcggcggactccgggtccagcgtccagtagttgcccttgcccgggttgccgggctcgcgggggatcttgacgaagcagtcgttgagcgagaggttgtggcggatgctgttctgccaggcggggaacttctcccggtagtaggggaagcggccgctgatgaactcacagatctcgctcagcgtcagccgcttcttggggctctgcaggatggccatagtgatgagcgcgatatacgagtagggcggcttcaccagcgggttcttggcgccgctacccgcgctcccgccgccgcccgcgccgccgccgccgccgcccccaccggctcctgcccccgccgccggggccgggcccgggggcgccggggagcccccagcaggcggggccagcaggatgtcatcgtcgtcctcctcctcctccagatcctccagctcgtcctccccggcgtacgagcgccgccgccgccgccgctgcgcggggacagccagccggggcccgccaccgccgccctcgtcgtcgtcctcctcttcctcgtcttcttcgtcctcgccctcccccaccacgtcgatgtctgtttcctcggcgaggccagaggcatcggacatctcagtgctcagggtcatagctgtggcgcggcggcggcggggcggcgcatgggggcgccgggctccgggctccctctgcgccccagcccgggtcccgggcggcaggcccggccggggggcgccacgctgggggcgctgcgactgcggctgccggagctgcgccggggctgccgggtggcggcggagtctcgcgcgccgactttataactcctgcgccgccgcggtagccgcgcggatgctgcgctccctgggctccgctcgcgcccggcccgggcggaggacttgaccttctcctctcggagcagcttttgccccgtcagctgaggagggggtggcggggcccgggcgggcgaatcagaacgccaggcgcccaggaacgtgcgggacgggtgagagtctaagaacagagctcggcgaggccagggctgagtccaggagagggcggaccttcctcggcttatagcagaagggggcctgtcacatggtgtgcacgtcagagcgctgccgagggaaggaaagcaagcctaggaaatcagcccttctcgggagagaaaattcacccgtaggagggaggcagcagctgagaagagtggggaggagaggggacctcactatttcttgccaaagaggctgatgcccgaattacgcggctgtctgcaccgagggccgctgcacgagttagacttcccagcctcctcaattagtcctccaccctaacctcagaagcacacccgcgacactctggtttgacccctcgacagcc

SEQ ID NO: 222622 - DNA, 300 bp, Homo sapiens
  chr5:72921762-72922062
  hyper
cggtaggggcagcttcaggtttcctcctggagccggtgtcgggcgcggccggcgggcgggcctcgccatgtgatgcggccgccgcgagccgggccgggaggtgggcaggcggggatccagtggcagcggggaggcgcggggggagcggggggagcgggggcggcacccgctgctggcgcagccagccgggcccgggcgcgcggccgcggctccaccccctaaaccttggcttcagcccggccgccgccaggcgttggcatcgccggggagagccttccggactccgggcggcggctggct

SEQ ID NO: 222623 - DNA, 193 bp, Homo sapiens; identical to SEQ ID NO: 199892
  chr5:73843885-73844078
  hyper

SEQ ID NO: 222624 - DNA, 762 bp, Homo sapiens
  chr5:73935786-73936548
  hyper
gacgcagcgcgacattcacccccaggaaagcgctgctttccgcagaggagagaggctgactgtatccttagctcggctcctcgcttccccagcggctcgccccagacattgcaccgcggaggggaggccggtcgacctctccggcgatgcccggcttctgcctgctgtgggagggcagcggcgggcaccgtgatctccgcaccgagaagagctccccttgccctctagtcgaagctcccgagtgctcggagcacgctcacccctcgcgaacacacccctgcagccgaagcagcccctgaagcccgcagcgcctgcaacaggtccggggcagtgggggaaacttacagcagtggcgactggccgcaacgcacaactgagttctagcgacggtcacgggcaaggaggcgacgaaccggtcgtctcagcccagggaagcggtggcgaatgccccggagaaaggagggccagccggggagaggactgcgccccgaacgatggctcgcggaccggctaccgatggcgttcgcctccgtctgtcgtccccacgccgcggacccggtgtccaggacccgcagagcgtctccggagcgcgtcacggtagggcagagcaagcctgccactgcaggcgccgcggaaggaggcgggctgtgcgctcgggggagggagctagaaagcgccttgtgtgccggcggccgccaggcgtctggaccgggtctccgcagcgccaccgccgcaccgcctcctctccggctgccagagcag

SEQ ID NO: 222625 - DNA, 123 bp, Homo sapiens
  chr5:73936774-73936897
  hyper
tgcagagagacaaagcggacgcactgtctcagccgctggcagctgcaaccccgggaaccgagaataaaataagttttcccgggttcgagtgtctgcgcctctttgggccagcctggttaatgg

SEQ ID NO: 222626 - DNA, 203 bp, Homo sapiens
  chr5:74162516-74162719
  hyper
agatgcggttaagccgcgggggctgcaacgctgattttgcgtattcctttaatgccgaccttcgcaggattctgttcgcatagcccggtggagttctccagccccgcgtaggccctcctgaaatttacccagagtgggcgcggccatcccggcctcgggacaggggtgcagagggcacgggcgaggaccgccggcctccgccc

SEQ ID NO: 222627 - DNA, 180 bp, Homo sapiens
  chr5:74348694-74348874
  hyper
cctcgcagcggcgcgggccaggctgggcggcgctgggctctgaagggccaggacggcgggatgcccctgctcccggcaagggcgcgcccacgagccgcttcttggcacttggggagagtcccgggaaagcccggcgccggcgcgctcgcgactccagcctggcggctccactccgcccgc

SEQ ID NO: 222628 - DNA, 180 bp, Homo sapiens
  chr5:74349123-74349303
  hyper
gaggccggggttcagcccggttccccgcgcggctccgagagggcgcccccgcctgccgcctggagatggacgcggcgccgaagttttccccggcgggaaaacgaaagtcgtgaggagcagagggtcggggcgtcccggcggagacgaggctgagaccgggttaacatctccagccccggg

SEQ ID NO: 222629 - DNA, 407 bp, Homo sapiens
  chr5:75377822-75378229
  hyper
atcacccaggcatatttacacggatggaacacattcgcggagagatgtgtgtgtttgagttccaatcactgcagcccgtattggcgcggcgctttgtctcgctttgggtcaccaccacaggagcaacgatttcggggacggcacacgcctgtgtgaccgcttcccactccacttgggttccgtgagcgcgcggagccggaggagtcagggacgtgaggatgccctacttcccgcagcatccggatggcagggtctgcgtcggaaggcccgggagggcgacgccctccactgctgccgcggggtgggtgcgccaggcctgggtgtggcctcacgggagcgagtttctctccagccgcctggcccaccgctttggaacagtgaagctcgagttggggtctcctgcacgc

SEQ ID NO: 222630 - DNA, 480 bp, Homo sapiens
  chr5:75379897-75380377
  hyper
ctctcccacatacattcccgaagcgcctgtctggcgtctaagagagagcaagagagggctggagagcaggggagcccgcggggctgaggctctttgtcagcgcctgcacttcctacgttacaacgccttcattcagcaaaaaccttttgggcgcctgctgtgcgccaggccaggcgaagcagacccgaggctgtgaagctcagaggggagagggaccaatcgcagtaaataagctaccgaggtaatcttagatggcgatgagggcagcaaaagccatcagccgaccctctgaccctttctcttagtgggcttttccccttccgcctgggttctagaactgggaagacttttctccagagcgtcgcggggagcgccccgggctgggcccacggggactgcggaatacggggatgaacttggcttggggcagccagcaccccacggcagatgaacaatcgggagcagatctgtgggcgtgcg

SEQ ID NO: 222631 - DNA, 549 bp, Homo sapiens
  chr5:75380462-75381011
  hyper
gctcgcgtcaccttctacgtgtgcgagtgatgcaaatgcagacccgcgaggggcgggcgggggtggcgggcgggggcaggcgacggagtctccgtctgggagcgcgcgtgtgtgcgtcaaaagctctgggttgatggatgccccgcggcgcgcctggcgcggagagcggcgacccggcggggcagaggggggcgggaggactgcggcggcgcggggcggcgaggaaagccccgcacggcctgggctggcgggcaggcggctccgcagtgcgccgcagtgccgggaaggagccgcagctaccgggcgctccccgggggaccgaggagatgaggcgtcttttaaggctcatgagagccttaaggagatgagaccgggatgccgtgatggtctcctctcccgctgaacctaatcccttcatacttagctgactgctagcgcggtagcttccgtttaattcttatccttaattctgaagaatgtggcattaatctctcaggcgttcactcattttccatggcaagttccgaaaggcctcgtgctcgtgggaag

SEQ ID NO: 222632 - DNA, 239 bp, Homo sapiens
  chr5:75698195-75698434
  hyper
gagccgccgcgcccggctctaaataatttcttatcgccctccctcagtttgtttttcctgttatcgggtcacccacacattccacaattgtcaaataggtgagggcacaggtacggaagcgtcccgcattccctccagattttatcacgctgagacacaaagagaaaaatagctcctggcgaccgcatgaaaaccccgatttcaaaacagccacatgcagtttaatttccttaaaagct

SEQ ID NO: 222633 - DNA, 180 bp, Homo sapiens
  chr5:75698672-75698852
  hyper
aaaaaaaaaaaacaaaaaaaaacaaaaccaaaaagacgaagaagaagaacaaaagtcaacgtgaaatctccccagaggaaaaggaaccgcgctgtttgtccctcagtaactgagcaacaccccggacacgaagggctccctgtgacttctgcggtttttcttgcacttctccgcgttggt

SEQ ID NO: 222634 - DNA, 804 bp, Homo sapiens
  chr5:75699409-75700213
  hyper
tatggctgtaagtgcgccgggcgcgcggggttcctgctggccttggggagctccctccccgaggacggcgttggagaagccgagggagccggttgcgcggcgcagaggaaattggaaggcagcaactgcgcggctggcaaagttgggagctggagttgcaaagggcagtgaatcgcgtccccccgctcctcccgccccccaattcctaatatccagctggcaacccagaccctccactccgcatacccaaacggggtgcgcgggcagtgcggggattgcgctctgggacagaccaggttgggattttaggggtatcaggtgaggagtccgcggagctccgggtcgccgccggcttgggccagggggtggcgtaaggcaccggattcttccaacccagaaggggaggaaagtttgtttgctgtggctacaggtgggcaccgcaagtagggcgccggcgcactctgctagtgcaaagccggcttgactggaagggcgggagtctcctcctgtcccgcgccctcgaacttcacctgacccgctagagccattggcctcacaggtgtaagtccctcccctctgaaaccccccaacccctttcccccccgctcccctcgcgcgggaggattgctgtgtggagaggacgcggcactaggctccggggaatccggcgggagcccgcgtgacttgaacgagatggtgtcgattacccagccaggggctgccctcggaaataggttgctttggccgatcgtgagtggatggagccagattaacaccaaccacgtggcttcatgtgcagagttc

SEQ ID NO: 222635 - DNA, 436 bp, Homo sapiens
  chr5:76249916-76250352
  hyper
actgcgcagccttcttcatcagcgagcccgaggagttcattaccatccactacgaccaggtctccatcgactgtcagggcggcgacttcctgaaggtgaggcgcccacggccagccaacctagccggagggcggcacgggagggttggaaagggctggggcgctgcacccagcgtggggctgctgagcgtaggtagccagtggcacttcttagacacttcgctggtgcccgagtcggagaggcgcgttcgaggacccccacacggcgagaatctcgcccttacccgaagacctcgacccacacacatccagtggggctggggccggtgcctctggacgctgccatggtttaaattcccttctgggcgctttcgaggccctaggaacttctaaagacttgaactcgcagcgcggaactctgacgcaatccagggccg

SEQ ID NO: 222636 - DNA, 212 bp, Homo sapiens
  chr5:76506030-76506242
  hyper
gctgggggcggcgtcgggatgagtgcagaagagacgaggcctctggacagcggaggaggaggggagggcgccgaggcgcggtgccagctgccgcgcacaggggccccgcggcggagccgagccgcgggcacgctctgccctgtcgggagagctccgggagcggcgggaggggcggaggggcgcagtggggcccgggcggctgcggccgcgga

SEQ ID NO: 222637 - DNA, 840 bp, Homo sapiens
  chr5:76506414-76507254
  hyper
ccgagggaggaggggaaggcggaggcgcggggagcgtgtttggggcgccgcggcggggagggtggcggccgctggtgcgcgcggggcgctgtgtatgcgcgctcccccgctcggggaggaagatggcccaaaagggaaagttggggtgacgcgcgcggtccccggaggctcggcggggggcaccgcggccagcccgacggagcggcggacacacaggccggggggcgcgcagtccgggcgccgccgcggccgccccctcactgcaggtggcagcgggtgcgctgggtcccggcggccgcgggcgcgggcgggcgcgcgggggagcccggccgagggatgggctgcgcccccagcatccatgtctcgcagagcggcgtgatctactgccgggactcggacgagtccagctcgccccgccagaccaccagcgtgtcgcagggcccggcggcacccctgcccggcctcttcgtccagaccgacgccgccgacgccatccccccgagccgcgcgtcgggaccccccagcgtagcccgcgtccgcagggcccgcaccgagctgggcagcggtagcagcgcgggttccgcagcccccgccgcgaccaccagcaggggccggaggcgccactgctgcagcagcgccgaggccgagactcagacctgctacaccagcgtgaaggtaaatgccccgcgctggcacacgccgtgggggccgtccgccccgtcggcggggctcgcacgggtagggggctccggcggagttgggtgaccgtgaggcggttggtttggagaggttgtcactaaggaggagtttacttttcatttgtggagatgatgggagccc

SEQ ID NO: 222638 - DNA, 651 bp, Homo sapiens
  chr5:77268310-77268961
  hyper
gatttttattaggttaaagacgagttcacagatggtaaatcgcgtggagagaaatgagctggagagttacaccgagtcaacgcgggacacggctcccggcccgggccgggccaggggtgggaggcggttccctaccgcaggcggcgggactcccatgcgccgagggacccaagtctccactccacccacacgcccacccggcgtcggggcgctgcggcctcgcctcacgagcccagagcaggccgcagcctgggctggggatccggcacctgggcagggtgagcttggccggacatcctcctccaggactacccgcaccccacagtcgcgtcaaaagcgccccatccccctgtctctcgccgcgcaggtttcccaccgacgcccgctcggaaggcgagagcccccacgtggcccggcgcggcgcggcccccggggaccgcgagcaacaaaagcccggcccgcagcccctgctcctcgccttccttttcaattctcccctgatctcaggtggaattaggaggattaaagcagcaagtaaatgaggcgagtgtgcaaaatgactcctttctgaaccaaacggcatgctccgtgctggggaaatgagatgcacatttaaatctcatccatccaccgcctgcggccaccgccatg

SEQ ID NO: 222639 - DNA, 107 bp, Homo sapiens
  chr5:77269196-77269303
  hyper
catcctggagggagcgcgagggcccggctcctctgggagtggcggcgacagggcgtcgtgcaatggacgccagcaccaggggcgggctggagggggaccggcgatca

SEQ ID NO: 222640 - DNA, 145 bp, Homo sapiens
  chr5:79551298-79551443
  hyper
tagcaaaggagacggtgcctaaacccacttttcttcctggattcatccgacaagcagagtggagagggctacggagctcagcgctattcaccagtgctcggcgcaagaggcgacacgcccctggagcagtcgggatcctccgccc

SEQ ID NO: 222641 - DNA, 284 bp, Homo sapiens
  chr5:79864945-79865229
  hyper
gaaggtgactggggcgacagctccagggcaccgatgggggcggggtgcgcgtttcgtcgcctcatctctgagccagggcaggcagctggcgggctaaggcgatcaccatccatgaaaacgggttctgcccacagccgctgcggagcggtccctgcgccgctcgcccgccggccggacgcggccctcccttgggaaatggtgcgtctgaggggcgcagccactgcccccatcccggagcaggcgcacctctgcacccggctctctgctaagggggtccggtatcc

SEQ ID NO: 222642 - DNA, 1130 bp, Homo sapiens
  chr5:79865330-79866460
  hyper
agtccccagcccgcccccagcgcccagccggcacctcctgctgcccagctgccgaggcacctgcggagacgcgcccaagtcagcccctccggagacgcgcccaagtcagcccctccgacccgcgcgctcttgcggcccagcgcgcgccgctcccgctgctgcgccgaccttcgcccatcaggccccccgccccgcatcctcctcgacaccccgcggccgggcagccctcgccggttcccgccgctcggcgaggctgagaaggaggcggaacccgcatccccgcggagtccaagccccagcggccgcaaaactggaaccgagaaccagtgggaaaggcaggaggcgcgagggtgagctcgcgtggagcgcgccccggggtggcggggcagagtctctcgggaggcccctgcagcccggcggccctcggctggccctgggtctctcatcctgctcggggcactgcaatgtcagggtgagcgggaggtgcgggcttcaggggcttgcgcgcaccgggcagggagcactgaggccgtgcgggccgctgggttccacgctgcgccctcgatgtcctcctcccggcagccgccactgcaagccaaagtttcccaagtgcagccggcagggacggcgcctcacactgacctgggacgcgctgtcgagttggcggcggcgctttcaaacctctctccggcactgcccgaccctctgtgcggccctagggcgccgtctgagctgagctgtggtcttcggctcctcggcgcctcgaatcgcagatctcggtagatgccgcccagtccccgccctgcttgcggaaagaggcgggcgactgccgcgaagcgctggagctgggacccggagcgcacacctcgccagacgcccgggcagcgaggcgcttccgctgggggtgacgcgtcggctccaggctctgcgcaggtgagggcggcaaggctcctctggacccaggggggccagcagctgctggaagctccgccttctgtccccgtaagtcccacccccgtcccccgcttcggccaccgcgcttcggccacggcgacttggccaacaacagcggcagcagggtctccccattgagggaagcacgcacccctacgtcacgggctttggctcct

SEQ ID NO: 222643 - DNA, 240 bp, Homo sapiens
  chr5:87437123-87437363
  hyper
cgcggccggggaaaagggaggaggcggcaggagggggcaggaggtggagggaggaggaggatcggtctgaatatgcatgaggcacccagcactgccctcttccccggcagctgctcgggcgggggcgaaggagggaaggggaggggaggggaggaaatgaggctggggcggggtggccagagcagccgcagaggctgacgcgggtttggagaacggaagagatgatttgcatggcgcctg

SEQ ID NO: 222644 - DNA, 172 bp, Homo sapiens
  chr5:88178956-88179128
  hyper
cgaagatgtctgggtgtacgcgtgtgctcaagtgtctgtgactgcgagcagagcgagcagagagctggagacgatgtgtgcgtgtgtgcgcgcgcgcgaggggagcgcgcgcgagggggggggcgcggggccgcgcattcgcgcgcgccgaggccgctcggaagaggaggag

SEQ ID NO: 222645 - DNA, 480 bp, Homo sapiens
  chr5:94956289-94956769
  hyper
agctggcctgggaactgctgggcgagccccgcgcggccacgggggacctggcgtgccgcttcctgcagctgctgcaggcatccgggcggggcgcctcggcccacctcgtggtgctcatcgccctcgagcgccggcgcgcggtgcgtcttccgcacggccggccgctgcccgcgcgtgccctcgccgccctgggctggctgctggcactgctgctggcgctgcccccggccttcgtggtgcgcggggactccccctcgccgctgccgccgccgccgccgccaacgtccctgcagccaggcgcgcccccggccgcccgcgcctggccgggggagcgtcgctgccacgggatcttcgcgcccctgccgcgctggcacctgcaggtctacgcgttctacgaggccgtcgcgggcttcgtcgcgcctgttacggtcctgggcgtcgcttgcggccacctactctccgtctggtggcggcaccggc

SEQ ID NO: 222646 - DNA, 277 bp, Homo sapiens
  chr5:95066554-95066831
  hyper
aaaacagctgtagcgcatgttgacaaatgagaaagcggcagacgtggtaaagcactttcggtcaaggccaagagggggggaaatcgggttgctggggcggcactcgggctggaatccctagcttccctaacctcctttttccagtccggagtgagcgggggccccatcgccccacccccctttcctggctctggttacggccttgcgagttgaacaaacttgctgcaggcggattggcggctgggagctctcgggctggggcgttgtatttattaat

SEQ ID NO: 222647 - DNA, 368 bp, Homo sapiens
  chr5:98109213-98109581
  hyper
attggcaggctgagtcgggctgacgtgcggtcacaaccaatggggaggaagggagggacacggcgggggattatggcgtcgtggattggcgggcacagggcggggcgggacggcagtgcgggactgagattgatcgaccgcgggggctgccgcgcagagatatccgggccgccggtgggtggtcgctagggctgggccagcctcttggaggtccacgcccgccgagcccacgctggctggggccggggtgccggcgcgctcgggactcgtctcagcagtcgctcacggtctttgtgtcttctcttccgcccctttccctgcctgccgcctccggccgccacgatgcccctgcgccccgctgctgccgc

SEQ ID NO: 222648 - DNA, 263 bp, Homo sapiens
  chr5:98109927-98110190
  hyper
gaggggagccagccccggggcctagggctttgttcccaaatagccccaggtctcgaaggcgctcgccggggcggaagggcggcgtggcgcaacgggaaaggcctcccgagcccctgacacgcacctctgtcgggctccgggccacagtaacgcagccacccaccgggcggccgccgggcgcagagacgagccttctctccaccctccccgccttcggctcggaccgctgacaaatctcccctccgacagccgcttatcaaaca

SEQ ID NO: 222649 - DNA, 300 bp, Homo sapiens
  chr5:100238886-100239186
  hyper
tcgctccgcgccgcctccctggggctcaggtttcttttcagatgagacaccttgtgcattggaggtggcggcagcttctgcagctgggttcgggggcgtcactggcccttccctcttgctaggagataaacgctgcgcaaagccaatcaccaggctgagggggcggaggctgcttggagagtaacgtccccggctctgcctgctctgtgccgggagaggaagctcacagtgctacgcgcctgcgagctcgcgcacatacacatatacatacatacacacatacatacatatgcacacaca

SEQ ID NO: 222650 - DNA, 240 bp, Homo sapiens
  chr5:100239330-100239570
  hyper
gcttcaggtagagctaggggtggattgcaagaagagtaccttctttcaatcgcttttgctaaacacacaccctcacacgcaaaaacacgccctccaaggtggagtgaaacggggtgcgggggtggggacggcggtggaaggaagaagacttttattactcaatctggaaagtgcaaatacacacatgaacctgttagccgatgggcccactctgcatgggtggtggacgacgaccctggc

SEQ ID NO: 222651 - DNA, 518 bp, Homo sapiens
  chr5:102201407-102201925
  hyper
ccccaggcttgggcgcaaccttgtgaaactactaatgtattaaagaacctcagctgggatttgctgaggacaaatgctgtaacgtgttagtcatccattatctgcttctatttttgcaggttctgaatgatgactgacgcgggtttgggtgatacccctcacagcccctgtcattccggagtcataaggcacccgcgcgtctagccccagcgccagggcacgcgagcggcgctggagggaggaaagcttccgcctgcgggccggacaaaagtcccgcctgcccacggctttttgcccgccgctcgtgaccgagacgcctcgccgcggccagctcgctgctctcgctggcggatggtgtgtggccgccgcaggacgcccgccgtgcccgggccatgaagtagcggctgctggcggcgccgctgcccaaccgccagccccagccccgcgctgcgctgcccggtcctctcccggcggggtcgtatcggcgtggacatggctggccgcgtccctagcctgct

SEQ ID NO: 222652 - DNA, 540 bp, Homo sapiens
  chr5:107005929-107006469
  hyper
tctcccggcgccccgcagaagcagttggtctaggcagccccggggactcccaggggtacctggcctttccgcggcggcttaacaaagaggggcgcgacgcgagcgcttcccgccgacgcctcaagccatcagcgcccgggcgacgcaggctccgagggtgcgcgccgccagcggttggtgcgcgccgatccccgccgccgctccttccgcagggccccgaggcccgggtagccctggctctccgcctgttatcggcttacctggggttgctgctgttccagtagacagcgtagcggtcggcgacggccttggagcccgggtcctggctgaacacacacatccagagcaccagaaacaccagcgtcaacatctccacgtgcaacatcacgcctggccagcggcggagcccccgacgcgccactccggggagagagcggggatccggagggagggaggcaggcaaagggacagagagagagcgggcgccaaataaatatgaataaataaaaatgaaagtgggcgagaaaggaaagaggcgcc

SEQ ID NO: 222653 - DNA, 900 bp, Homo sapiens
  chr5:107006501-107007401
  hyper
gaaaagaaggcggtgggatggggggtgataaagacaaactcgcacccccactggagggttcaggaggaaaaaggaatcacaagatggagagaagcgtgcgtgtgtgtggtggcggcggcgagggcgggggaagaggtgccaagctgtgtctcgggcggcggcggcaggccggtcaccccgggagagggaggtgcgcgccgggccgggcggctgcagcgcgggtcggggcaggcggcggcgcgcgctgcacagtcaccgggagttgcgcgccgcagccgcggggagacatacaccggcccgccgggcccggctcagcgtcggcgcagcaggctacgcacggctccgccaccgcccggggccctcgcactgcgccacgcttcgctccaagttactttggcggccggtgggaaactgcaggagaagggcgacgtgctgatagagggcttcgcgcttgtggtcccgggagtctgagaacccctttcctcagcctcctctgtgccttagcggggcgacccccagaaatctcagaggagtcgtaagtgctgcggtaccgggcggtgcgccgagaagggtggggatccggagccgcaacccagccttgtcggtgtcctggaactggttaagcggcagctgcgccggctttcgaagcggtcttgcctcgaaaacctcaaagaaaagtttggctcttcgcgtcttccggcaggtcccccagcagagtcggaacgcggcggtagcggaagagggcaccccgggggctggccgagcctcggggatttctcgcgcgtgctttccttggctgggtgtgggtgcaccacagtgaatgaagagcagaggttaagaccagccggcctggcagagctgggattcctaaacctgcaagacgacgccaacccaactgtt

SEQ ID NO: 222654 - DNA, 102 bp, Homo sapiens; identical to SEQ ID NO: 199971
  chr5:107007963-107008065
  hyper

SEQ ID NO: 222655 - DNA, 206 bp, Homo sapiens; identical to SEQ ID NO: 199973
  chr5:107359033-107359239
  hyper

SEQ ID NO: 222656 - DNA, 325 bp, Homo sapiens
  chr5:109024684-109025009
  hyper
cccccaggttttaacaggctgtcaccaaaggaggaaatagtgagcccgaagagaatgtgcaagccctcttctcttgcatttcctccagcccgtcaccaagtactcttccaggcacgccaggcccgagtgtcctaggataggaaacctgagcaacaaagggaagtggggtgtaagctcaacccctgttggacgtgggggtgctggcgcctgaacgcccccgaaggcctcaactcccagaaagctgcctgccaggtcacaagagccctgtgaggtcttcctatcgccgggacactgggaggcaggcgcggggcgggtccgccgggcg

SEQ ID NO: 222657 - DNA, 960 bp, Homo sapiens
  chr5:110074328-110075288
  hyper
gcttcctcggagcaggcgaggcaccaggcccgtgagaaaacactgagatctggggcgtagctgtgacatggggtatttctggccgggatctcaccgggtaggctccacccgcgggttatcggctccctccaagaagcatctttgaactcctcccatgcaggccctattcctacaccagttctctttctggaatctctttggtactgtgtttcattaatcccacaaccatattcccacctattccctaacgacaacaaacttttaaggtccaggttaccgccgcgtctccctagcaaccgtgccctttaatggttgccggaagaggctataatcacgtgctccgaagacttccgggtttccaacgtgacttccggttgtcagaatttacccctgacgcggcggcggccgacgggaagctgtgtgtgcttaggtcgtggtggccccggtggtggtgggctccgggcgggctcgcgtcatcctgcccccgctgcgatgcatccgcggcgcccggacggatttgatggcttgggctaccggggtggtgcccgggacgagcagggctttggcggcgccttccctgcaaggtccttcagcaccgggtcggacctgggccactgggtgacgactcccccagatatccccggcagccgcaacctgcactggggcgagaagagcccgccctacggcgtgcccaccacctccaccccgtacgaaggccccacggaggaacccttttccagtggcggcggcggcagtgtgcaggggcagagcagtggtgagaagcatggggaccgacacagggatgaggggttactggggccgcggcttgcggcctgcagaccccggaagcggcgcagaggatcccgcctcctattccttctcatcctatcgcgcgccacaccctttgccctcctttggtcctctgcccctgaggctggcctcctcttcctcacaaacgaa

SEQ ID NO: 222658 - DNA, 291 bp, Homo sapiens
  chr5:110559549-110559840
  hyper
ggtgttaggtgggagggactcgccacggagacgcgctcaaggagggatgagttgcgccaccaccacctaggtccctctctcgctatccggcggggccgcccggacccaggtgctgccagggtacgcctggcgcccgccatcccagagcagcgtcccgctgcgcacggtctccctccagctccggtccccgcgggagggcgcgtgggatgatgcgcgggtccttgtgccttccccaagctccagcatccggagccgccctagccggcaccgcggcagccacagcctgggaga

SEQ ID NO: 222659 - DNA, 600 bp, Homo sapiens
  chr5:110559897-110560497
  hyper
ggagggaaggagcgagggggagggagcctctctcctcagcggtgcagctagtctccctccagcgggcggcgactccgggttccccctcgcgccctctcgcagaggctcgcccccttccccgcccaccgtccctgcgagcgcgggcggcggcggtgggcgtgtgcgcgcgtgaaggacgccgcctctctctcgctcctgcgttcgcaggcggcggctggcggccggcttctcgctcgggcagcggcggcggcggcggcggcggcttccggagtcccgctgcgaagatgctcaaagtcacggtgccctcctgctccgcctcgtcctgctcttcggtcaccgccagtgcggccccggggaccgcgagcctcgtcccggattactggatcgacggctccaacagggatgcgctgagcgatttcttcgaggtggagtcggagctgggacggtaaggcgcgggctccggctggggaagcccgcggcgtgcactgggggttgtccctctcgcagcgacggctcggagggtgcgggagcctgccttcgtgcccttcgatttctccctacctagttagtgtcttgagagagagctaaccttcattcagg

SEQ ID NO: 222660 - DNA, 418 bp, Homo sapiens
  chr5:110847625-110848043
  hyper
ttggcatcacctccgcgaagcctggtgggacgcggctgcccctgcgctgtctgtgcacctcctaagaaccaggaagcgcggtgacctccaaagaacaggactgtcccaaatcaagcgggattaccaccgcccctctcccatttaacagctgaggacactgaggtctaatggattccaagtacttaaataggtgagcggcgcgcaggggcgagttgcaagccctgggatccttccagctcgccgcttcccctcccaggggctcaggtttctctttcatctgtgaggtcctctcccgcccggacgccggggcccgccatccccaacgtccaccgcgagctccccagatccatggtctggagcaggtccagaagacgcacctggcaggacgccccgggcgccacagtcgccctccacacgg

SEQ ID NO: 222661 - DNA, 420 bp, Homo sapiens
  chr5:110848066-110848486
  hyper
ccgtggctctccttacctttacctgaggtgaagcaaggacgtggaagcagctacggcgcgctaccaagcacctcacaccgctctcaacagtactgctcagcctcccggcccgccgatgcgcaggcgacagcagccaacttgtaagtcaccgctggtcgcagccaactggaaggcacccagcgcctcagggcaaggcgggccgagcccccagccccgccccctggcccgatcccgggggctccggggagggggggctgagaggaggtggccggaacaacgtgcgcttgttcggattggctggcgcgggagcgtgtggagggctgattggtggccgataaatggaatgattccgcgtgggtgtgggctggcccgagccgcgccagggttccctggatgtctggggttgcctgcaggtttgga

SEQ ID NO: 222662 - DNA, 74 bp, Homo sapiens; identical to SEQ ID NO: 199977
  chr5:111093930-111094004
  hyper

SEQ ID NO: 222663 - DNA, 291 bp, Homo sapiens
  chr5:114506295-114506586
  hyper
cctgactgggcaccgagcagtcatatcccgctttctgcttctatacccccaagtcgcgatgtcaccgcacgttcttgcccagtagcgcggggaccgcctgcagggtggagattcctctcccggatgctggccagggactgaagttaaaaggccgcggcaagggagagaccccccgccacccgggcctacgctttccttcctgagggccaggacagagggtcctgagcggctccggcacccccgcacccccgcggggagtgctgctgaacgttaaggcgcgcgccagctcaa

SEQ ID NO: 222664 - DNA, 163 bp, Homo sapiens
  chr5:114938164-114938327
  hyper
aggggttaatgtggcgggataactctctgcagagggaaggagctcgcaaagaagggtggaggaggggaaaccgcaatggggaactgtcaccgaggctagtggactctccctgcgcttttttttttttttttttttttggcatgtaccccaaaagccagaggtc

SEQ ID NO: 222665 - DNA, 480 bp, Homo sapiens
  chr5:121647564-121648044
  hyper
gagccgggggcgccgcggggagggtcgctgtcagtcaggccgagcggggctcgctggcctgggggcggccgcaggggcgcagcgcagcctgagggcgcggcggccccggcagcctccgcagtggcagtggtggccgcgcccccgtccccggccgggcgcccgcgctgcgttccttgtcccccagcgccggcttcgggccgcggccgcccaggctgcccccgcccgcgcgcgcccgttggggggcccggggagcggcgcccgcggccgggccgcattgtgacgtagcggggccgcggcagcgcctccaccgcccgcctacttcggctgaggctgttctgctcctgccgctgcggtccgtcggtcggtcagtcagtcccttcgcgctcctgagccgccggcgcgccgggcgccccgggtgagtccaggtcccaagcggacgccgcggggaggcgggaggcgggcagccagcggctcagcctt

SEQ ID NO: 222666 - DNA, 180 bp, Homo sapiens
  chr5:121648256-121648436
  hyper
aaaggattgttcttttcatttgcccgcctcatgtggttcttattcttgctgtcacccgggatcttatcgcaggcagggatgggcagttccgcggctcggaaaagctgagataaggaggggcgaagtaatagtaatagcgacagtactaacaacggtaataatagctgtagaaaagggacg

SEQ ID NO: 222667 - DNA, 881 bp, Homo sapiens
  chr5:122425930-122426811
  hyper
ctctctctcctccgcctcgtccacgccggcttcctcttccacctccgcctcctccgcctcctcctgcgctgctgcggccgctgccgccgcgctggctggtctctcggccctgccggtgtcgcagctgccggtgttcgcgcctctagccgccgctgccgtcgccgccgagccgctgccccccaaggaactgtgcctcggcgccacctccggccccgggcccgtcaagtgcggtggtggtggcggcggcggcggggagggtcgcggcgccccgcgcttccgctgcagcgcagaggagctggactattacctgtatggccagcagcgcatggagatcatcccgctcaaccagcacaccagcgaccccaacaaccgtacgtagccgcagcccgcgcgctctctcccggggcgccggcgccggcgccggcgggcgcgggtgcctgtcagggaggcgggtcggataggagtgacacggggccgggtgggtggggagcacctggtcctggccgctggcccgcgcctccccgatctctgtgacaaaagttttctggcgttggagaaggaaagagaacggatgggacggccggtggcactttggggttccctctccctccctctcctcacctgcttcacagtcccaagtgtttggggccggagtctaccgtggacccggcctaacagacctctgccctcccgccggacagtgcccggggccaggcgggtactggcagcgtgtgacagggggtgtctgggtcaggccctgcctggccttagccgggacgagggagggaccctcagcgtctctggggagcacgcagaccagggcttgtttttgctactctccaccccacctctggaggggtcattttcgggccgcggggttg

SEQ ID NO: 222668 - DNA, 298 bp, Homo sapiens
  chr5:123987437-123987735
  hyper
ccgctgcgagcactcgcgtctgattggctgggccgaggcggccgcccggagcacagaggcagcggtcgggtagaggtgagcgtggcggaggcaaagggacgcatcccccacggcgcgctggccgtgcggggctagagggccgcctgcgctgctcggctccctcggtgcacgcgggacacaggctcattcgcactaacgagtccggccgtgcagtgaaagcttcggtctgcgtgaccgtgctgcgctccccgcgccacgcggctccacacaacacgccggcccacgcagaaccctcaga

SEQ ID NO: 222669 - DNA, 169 bp, Homo sapiens
  chr5:124084138-124084307
  hyper
tcatttctatgcataaaactcgcacattcccctgcatgaagtccccgctaagtgctatatagagacacaccacgcaaccgtacttacggtctgtattggatcgagttgaccttttccttctaactgcattgaatgtgtttggttgcagccgctttattttggaaattat

SEQ ID NO: 222670 - DNA, 372 bp, Homo sapiens
  chr5:124084690-124085062
  hyper
ggtgctgtggggggtggttgtggagacaaagcgttttattttccaaccagattggggttgaggaacctcccgcagtaagaaggcaaaaaaatggtgcgcccctttcaattactacatcattcacataaaacacttatttattaaaacaaatctcaaacaggctgcgaggagaggatgtcggtaaatacaagtttgattgtgttatcttgggggaaataatgtatgtgatcgctcggtggcagagagaagccaaacgagccgctagcgcgtagcgaagagaaaagggaggctggctgtgtggaactgactgcgagcattttgccggcttcccttccttgttccaaggacttcgcagcccaactcccaagactg

SEQ ID NO: 222671 - DNA, 360 bp, Homo sapiens
  chr5:127873305-127873665
  hyper
cgaaagcgcgcggccgtagacccgcggagagggagtgatcaaagacaaaatctgcgcgcctcagaaaagagtcagggtctaataagcccttcgtcggctccggggactccctcgggctcgggctccctgctctagctggagacctcgacagagcgccggccccctgactgcccgcgaagcgagacgcggggcgccgggtctagcgcagtgagcggcgaggcgcggcggaggtgcagccggcagccccgagcggtacacgttgcataaccggcctaaagccccgagcgactccaggaccgtcagcgggcgggggaggaaattacaaaagccctggcgtaaaatttcaaaaaatgtgaacct

SEQ ID NO: 222672 - DNA, 300 bp, Homo sapiens
  chr5:127873759-127874059
  hyper
aggcaagcaaacaaaagtcgcccccagaagaagaggagggttccctccgggctcgctcggagtcccacagggcaacgaagcgcgggtagcggctgcggagccgggcggaggtgcgcggggccggggcgtgcggccagcaagagagagggcgggaggctgggcgctggagaagatgcggcggtggagggcgcggcgcgggggttttagaggcccggcggggcgcggggcgggccggcgggcggcggctgtcagtgggggcgcggccgtccacacgtggggctcaacccggactgagaggcc

SEQ ID NO: 222673 - DNA, 600 bp, Homo sapiens
  chr5:128796604-128797204
  hyper
ctctgaaaatgctggggtctgtaatctgatcgcaaggcttctggggttgcagagtttcagggtctagacgggtggtctccattgcattcaacgcgagcgccctgtatctatggactgtgagcttggaaatgtttgtgctactggaaccgcggcactttaagccccgcacttctgtctgccccgcccgcagagctgcagttcgcccccgaccgcgaggagtgggaagtcgtgtttcctgcgctctggcgccgggagccggtggacccggctggcggcagcgggggcagcgcggacccgggctgggtgcgcggcgttgggggcggcggaagcgcccgggcgcaggctgccggcagctcacgcgaggtgcgctctgtggctccggtgcctttggaggagcccgtggagggccgatcagagtcccggctccggcccccgccgccgtcggagggtgaggaggacgaggagctcgagtcgcaggagctgccgcggggatccagcggggctgccgccttgtccccgggcgccccggcctcgtggcagccgccgcctcccccgcagccgcccccgtccccgcccccggcccagcatgccgagccggat

SEQ ID NO: 222674 - DNA, 180 bp, Homo sapiens
  chr5:128797270-128797450
  hyper
ggccgcttcctggcgccgcgcttcgcagtggaacagcggccaaatcccggccccggccccacgggggcagcatccgccccgcaacctcccgcgccaccagacgcaggctgcttctacaccggagctgtgctgcggcaccctggctcgctggcttctttcagcacctgtggaggtggcctg

SEQ ID NO: 222675 - DNA, 128 bp, Homo sapiens
  chr5:129239558-129239686
  hyper
agagagagaaggcgcggagtggcagcggtaagaacaacgtggaaaggacggaaaacgcgaagagtggcgccctggcggacctggggcggggcagagtggtaagggtcacgccaggacgtacccggctg

SEQ ID NO: 222676 - DNA, 1020 bp, Homo sapiens
  chr5:129240272-129241292
  hyper
gggagaagtttcactcccgacccttgctcggagccccggcccagagctgagcgggagcccggcaggcagctgcagcccgcggcagtcgaggcgtccgcggcgcttcgacctccagccggtgtcggcgcctaggcggccggctgcggccgcggctgggggcgcaaaggcggaggaggggcgggtgtgagccggggaaaccgcgtgccgcgccgcgacagcccagcgagcgtccgcgcccgggacagccgcgatggctgtgcgctctcgccgcccgtggatgagcgtggcattagggctggtgctgggcttcaccgccgcgtcctggctcatcgcccccagggtggcggagctgagcgagaggaagagacgtggctccagcctctgctcctactacggtcgctctgctgctggcccccgcgccggcgctcagcagccgctcccccagccccagtcccgaccacggcaggagcagtcgccgccccccgcgcgccaggatctccaggggccaccgctgcccgaggcagcacccgggatcaccagttttcgaagcagcccctggcagcagccacctccgctgcagcagcggcggcgaggacgcgagcctgagggcgcgacggggcttcccggtgctccagcggccgagggggagcccgaggaggaggacgggggcgcggctgggcagcggagagacggccggccggggagtagccacaacggcagcggggacgggggcgctgccgccccgagcgcccgaccccgggacttcctgtacgtgggggtgatgaccgcgcagaagtacctgggcagccgcgcgctggccgcgcagcggacctgggcgcgtttcatcccgggccgcgtggagttcttttccagccagcagccccccaacgccggccagcccccgccacccctgcctgtcatcgcgctaccgggtgtggacgactcctatcctccccagaaaaagtccttcatgatgatcaagtacatgcacgaccactacctggacaagtatgagtggtt

SEQ ID NO: 222677 - DNA, 55 bp, Homo sapiens; identical to SEQ ID NO: 200023
  chr5:130970375-130970430
  hyper

SEQ ID NO: 222678 - DNA, 166 bp, Homo sapiens
  chr5:131133198-131133364
  hyper
gtacccgtggggccgcggccaaggctggactttgagcccaggaccccaggaccgcccttagaaggctgcgccggcccgcgagaggtctgggatctggacagcgcgggggctggctcacagggactggtgaaggaaactgccgggacccctgccacagccatggctc

SEQ ID NO: 222679 - DNA, 161 bp, Homo sapiens
  chr5:131563675-131563836
  hyper
gttcgccgtcctctgcgacccctgggaacgcccaggctacccggcctcgcgggagccggagccggagccggagccggagctggccgcccgcgcccttcatgccgcccgcagcccaccgcacgtactccgcgcccgcctggctttggcgcccccacctgcgg

SEQ ID NO: 222680 - DNA, 140 bp, Homo sapiens
  chr5:131831620-131831760
  hyper
gggaggctcctgggccaggcccagcggccgcgacctggagcggggcttgatgggatcagcactctcctcccccgcgccaatgggtgctgcagaacggcccacgcccactgccgttcgcccggggcgcccctggcaggctt

SEQ ID NO: 222681 - DNA, 420 bp, Homo sapiens
  chr5:132387246-132387666
  hyper
caacctgccccgaaaagagcagaaggcaccctgcgggatctgcagatcagcttgcgtctcattctggggcaccgacacggtggaatgcaagacaccccactaccggaagtttctttgatgttaagaaaaacggcggaagtaggccgcagcgcttcctcagtatagtgcctcgagctggctcgcctactttctacggtaaagggaggtgctccacatctctatgcagctgtgcagcgccgcaggttccatgcgcaggctcggttggctaaatgcgctttccagccatctttcagccacccagtcctttcccaggttctcgagccaggacgtgacgtattcagacgtactgggggcggggcctcaaggggaaaagcgcctgagccgggatatcgcgagaacatcccgttctttcgtagctct

SEQ ID NO: 222682 - DNA, 278 bp, Homo sapiens
  chr5:133450702-133450980
  hyper
aagagccgcgacagcgccgccggtcccgagcgcgacctggccgagctcaagtcgtcgctcgtgaacgagtccgagggcgcggccggcggcgcagggatcccgggggtcccgggggccggcgccggggcccgcggcgaggccgaggtgagcccccgccggcgccggctcctcccccgcggtcgccgcgccgcgccgccccagttgcgcgcggccctcggggtctccagcgcgcagagcgtccctgccccggcgtcggccccgacccccgcggtcccacc

SEQ ID NO: 222683 - DNA, 104 bp, Homo sapiens
  chr5:133451147-133451251
  hyper
aaggaccgcggggagccgggtgcctcccccaccgcagctcaggaggcggcagaacccaggggtggagagtggggggcgggcttcccgggcgccgccgggtcgag

SEQ ID NO: 222684 - DNA, 240 bp, Homo sapiens
  chr5:133862724-133862964
  hyper
taccaggaagatgccggcttgtggcggaccccgtttgggacgcacacacctgactctcaaatgagtgacattgcagcccccgcccccacctagcgctgctgcagtccctttgccggatccccggccccgccccgcccccggcagtggcatcttcccggcctcacctccttcctccctctccctcccttcttcccacccactcgcctgcgcctgcggagcggcgcccgcccgcctcctccc

SEQ ID NO: 222685 - DNA, 240 bp, Homo sapiens
  chr5:133863255-133863495
  hyper
acctcccggcgccgcccccggtcgaacagcctcttgcccttccttcgcctgggccggagccccccgcagcctcctccggctcctcctcccggctccggcggtcggaatcacgccggcgcgcctccagcctgcggtcccgcggactgcctccaggggcgggctggaggcgcgcgcaactcccctcccaatcccctcagccactgccgctggcctgggcacttttttaccagcttggctgct

SEQ ID NO: 222686 - DNA, 276 bp, Homo sapiens
  chr5:134370268-134370544
  hyper
aaatgacttgtttcgcctagaatcaactcccgtctcggccgcctcgaagtccccagccctggcgagaacagcccaggatgagtgaatgtttgccgaacaggatcgcaccgagcgggcgccttcgagccagcgccggggcgggggcagagcccggggcccgttccggcagctcccagcggtgtcctcgtcgaggggccgcctgcccctccttctccagcctcttctcccgggaactcagcccggctgagtgacagcagcctgcgctctaatgggccc

SEQ ID NO: 222687 - DNA, 216 bp, Homo sapiens
  chr5:134463608-134463824
  hyper
tgaatggcttttcgggccagcctgtgaggagtcctgcctgccctgactgttgactcatcctgggtggaattatgtacagaaattagtcaacagaggccattcccgggaccacaggcagctggctgcaggcattgcgcaggcgccgtgcctgctgggagtgtcttttcggacacagagcatgggcttcgtgggtgcgcttccagggctgggatttct

SEQ ID NO: 222688 - DNA, 217 bp, Homo sapiens
  chr5:135468349-135468566
  hyper
cgacgcgaaggcctccagctgatcggaagtcggcgttggccggcgcggagcccggcgcggaggcttctttcagccgcccgggcaagacacccctccctcggtcccgcagcggtcactccgcctctggcgcgcatgcgccgaccccagcgggcgtcctcccgggctccctctccctccctccctcatccgggtcctgggcgagcgggcgccgtgcgcg

SEQ ID NO: 222689 - DNA, 324 bp, Homo sapiens
  chr5:135527798-135528122
  hyper
gggccagcgatccccggtgtcgtgccctccctaccaggctcaagctggctgctcttggctaggtcgggacggggcgcccggcggccgtggctcagtcccaagctacaccggccgcgtcttccagggcgcgcgggcgtcgcgcagcgagcggtcgtggggcagcgcggcgaaggccgaatggcgcagctggcaaccgatgaagaggacgacgagcgccaccgagagcagcagcaggaagaagagcagcaggtaggtgggcaggtcgggctttgtggccgcgccgtccctcataccgcgcgcagtggccagctccagcggcaaagc

SEQ ID NO: 222690 - DNA, 180 bp, Homo sapiens
  chr5:136834348-136834528
  hyper
gcggcgggcacgggcagcgctcgcgcacctggggcgcctgtcgcgcctctagacccagggacccctctcacgaatgggggactcatctacgaacgaggaggctgcgtcacgaatccgaggctgccgtccaactacaggggacccgtctcgtctattctccgagtgccccacagatgccgc

SEQ ID NO: 222691 - DNA, 514 bp, Homo sapiens
  chr5:136834652-136835166
  hyper
gcacccgagctccggcaagcggggtgggggctgccagcagctgggggtccccggcgacagctaagggaaaggtctcccttgagcgccctgaggtctcgggggtaagaaaggcgcgcggaggtaaccccaggccctgaccctgccagccccctaggcggccgcggggaggtcccaactactccaagttggggcgcggggttcctctgggcacgtaccttgggggccggcccgggtcccctagtccgagttgctcgagctcccgcggcacggtcgccgggaaggctgatcgccggctcgcgcccctgcgctcctgccacacgccgccgccgagcgtctggccgctttgtgagcccgcagcgatgtgctctgctcgctcgctggctcgggcgcggcgtccgcgggcggaggaggccgagcgcgcgagccaaggctctggcgccccctggtggccgcgcgctgcctgcccgacagcccggccgccccagcccggaacgtggtcattcacatctttttt

SEQ ID NO: 222692 - DNA, 135 bp, Homo sapiens
  chr5:137774519-137774654
  hyper
taaccatggagacctccacgacaacagcctagggcttgaaacccaagaaagatgaacaagcgattcgaggaaggcagggcactgagggtcggaggcgcatgcccggccacagcaggtgccggggcgggggcgcgc

SEQ ID NO: 222693 - DNA, 192 bp, Homo sapiens
  chr5:137774864-137775056
  hyper
gggtccccgccccgcgccgcgcccggccccgccatggtgtcctggatcatctctcgcctggtggtgtgagtgcggcggcggcggggggtgatgcgggctgtgatggagggcgggggtgttaaagcccgggtggacttctccgaagcttcgtgcagcagagtcacctaaaggcgctgcgtccttatttggggc

SEQ ID NO: 222694 - DNA, 95 bp, Homo sapiens
  chr5:137801267-137801362
  hyper
gccgcggcgcgtccacgcccgcccgcgcccagggcgagtcggggtcgccgcctgcacgcttctcagtgttccccgcgccccgcatgtaacccggc

SEQ ID NO: 222695 - DNA, 81 bp, Homo sapiens; identical to SEQ ID NO: 200054
  chr5:138088596-138088677
  hyper

SEQ ID NO: 222696 - DNA, 252 bp, Homo sapiens
  chr5:138089667-138089919
  hyper
aggcgttcctgccccctcccccttcccggccgctgagacttcccgatggggcggcggggacgcgggctcggcgaaccgggaggctggagcccgggcttctcccatacagcttcgccgtaggtgggccacacccgtgtggacttttggcgtgaccgtccacttggactcggggattactcagctttcctgggtttcttgtcggttggacgcacttagctttcagccctagttttcaggagtggcattagagag

SEQ ID NO: 222697 - DNA, 780 bp, Homo sapiens
  chr5:139016945-139017725
  hyper
ccccctcagccgctgtgcccctttgcgggtcagtgtgttgtttgacctcggccgcgggtgcccccacccctgccggccccgccgcccctcccccgcaccgtccgcccgcgccgcgcggcgatcgatcgccattgattgtccctgacgagctgctccactttccagccaatgtcaggaggggggatctccgccgccctggcggtgtcatttccacacactccctgggctgccgccagcgcgggcgcctcgaagagccggcctggatcgcccggagctcgggctggaccgcccacaccgcgcgaggaagcccccgatggcgtggcccgaccccagtctgccggcctgcccgccctaggcctctgcacccaagcccccttcccagcgctggtggatgttgtcaccacaggagtttaagctgggccgggtatggggagggacgctgtgtcgggtgcgccctgcgcttgccctggtgggggcgcggggctgtttccggcgggcggaggcgccagcaggccaactttgccgcggcccaaacagatgctaatgattttccgggaggcgccggttatctctggccccagccggccggtgtgctgggactgggctcccggcacagacaccacctcgccccccaccctcaccctcctgagccccacctaataaccacttgtccccgagtggacgggttgggggggcgtcggggggagtccgcaggctgccccgggtgtcctggaactgttgctgtgtgggattatttgcgcctcctccacccaggatgct

SEQ ID NO: 222698 - DNA, 64 bp, Homo sapiens; identical to SEQ ID NO: 200058
  chr5:139039951-139040015
  hyper

SEQ ID NO: 222699 - DNA, 498 bp, Homo sapiens
  chr5:139088832-139089330
  hyper
tgggaaggtcctcccggcggggcctcctcttcccctccccggggaggcaggtggagctgcgtcctcatctttgttcccatctggagcgcgtttggcgcggcgtggcgggggcggggctgcgcccccgcggtgcccggagagactggcccgcccgcttatctgatctgcggctaattgaaactccctgctcgcgaaggtcagctcggtcccctgacagctgccgagccgagccgggccggatggaaaacccgggctgtgcagggcccggcggggcgctgaggggaggggttgtggggggctgcctctgcggcaaagtagacaaaggcggcccctccctccctgtgcgcgctgctgggggtcgccagaggtagcggccttcgccctcaccctgcagggtgttccagccggggtcacatggcctaaggctacagaggaggggggcgcccttaatccctacgtgcccgcccaccccgctcccacgccggggccctgtctggg

SEQ ID NO: 222700 - DNA, 205 bp, Homo sapiens
  chr5:139089534-139089739
  hyper
cagaagccgccatccggtgggtcaggtgcggcctcagcctaggagggcgggcgggcaggcctgttgctaatggtgctgggacgggcgtgggggggcggggggatggtagcgggggagcctctgggagccccgtttccagggttccgggtgcggacgtggcgagctctggagactgcaaccccgcccgccgcgccccaggctggcc

SEQ ID NO: 222701 - DNA, 393 bp, Homo sapiens
  chr5:139143822-139144215
  hyper
cccgtgtgacttgtcgccgccacaaccgcagtggccagctcgcgcctggcactgagaccgtaagcaaatgtttgctgaattaatgagtgggggctgcagggagggcttgggctgcagttccgcctgggctgctgcagctggggcgcgtacgtacatccgtgtgcccctgggagtgtgagtgaggggcgcctgtgggtgggggagccatatccgtgtcccgggggtctggcggcgccgtgggcagcctggcgcgcccgctccctggggtccccgccgagcgcctgcctggctgcgggaccccgttgccaggagcagtcaggatgcggcagcgtctccatggcaacgcggcatctcgagccgcgcgccgccctcccccggcgccccgcagtgggc

SEQ ID NO: 222702 - DNA, 171 bp, Homo sapiens
  chr5:139283459-139283630
  hyper
aagcccgagggctccgatctctccgaggaagggaaggcagtgacagctcccggagcgctcggcggccaggccgggcccagcgtctgatcagccgccgcctttctgtcggtatccgcggctccatccccgctcgctcagggctgctcgcctgcaggccggtaccggcgtgca

SEQ ID NO: 222703 - DNA, 360 bp, Homo sapiens
  chr5:139283738-139284098
  hyper
ccgctcgcacgcaggcacgcgcgccctcggtgcctgtcaccgcggcggccgctagcgcagcctagactcacccgcgctgcgctgggggcgggtgagcgggcggcaggtttctcccagggaaaccgggtttctgggcgcgcggaggtgccctacctttctccccgggatcgggctccctctcccgcttcctcccctctgggtgcttcttgccgcggccgcggcccctcctcctggactccgacattctgcacggggtcccaggcggtgggacggcctcagctctccgctgccgcgctgcgcccccgccgcctgcagcctcagtgcccgagcgcggcgcctttcttataggcggtcacaccc

SEQ ID NO: 222704 - DNA, 420 bp, Homo sapiens
  chr5:139284138-139284558
  hyper
cgcgccctccaccctcgccccccctccaccggctcgggccgcgggggcgtgtgggcggccggtctgggccctaggccccctccctgggcccaccgaggtaggcaagaccggcgcctaaacagggcgccacagacctcctcgccgaagagggggcttgagctgggctgggggcctgagcatgattggggagggcggagtagagatcccccagcgagggccaggctaaggacagcatgggggtggggagacagcgaggaaagggcccaggaagggaccaaaatgaagcccgctagccagcccagcggggtagcgagcacccttggctcttgcggtgggtctccacaacctcgaggcacccccggccgtacaggcgggttgcctgtgcctctcatgcctgcaggtctggcctcagccccgtgg

SEQ ID NO: 222705 - DNA, 290 bp, Homo sapiens
  chr5:139554293-139554583
  hyper
ctcagccccattccgctcaggtacagctcgggaagtaagcccccaaccctagttgggtctggaccaacaagacacgaggaggcagcagcccacagccgacccctcatgccacgcactgagcagggttccgcatggacgctggtcttgcctcccaggcgcctgaactagcggagttggggtatcgggtggagtctcggagaaccaatccaatctgagggggacgcctgtgggagtcctaagtatccagcgcagctgggaggcccacgttgggaagtcggagaccgaccccg

SEQ ID NO: 222706 - DNA, 63 bp, Homo sapiens
  chr5:139725675-139725738
  hyper
gcgagaggccaggccgcatcagacacccgcccagacccctgaccaacacgcaccgatgccgac

SEQ ID NO: 222707 - DNA, 151 bp, Homo sapiens; identical to SEQ ID NO: 200068
  chr5:139725997-139726148
  hyper

SEQ ID NO: 222708 - DNA, 105 bp, Homo sapiens
  chr5:139726430-139726535
  hyper
caggtggcggagagcggttcctacctttccccaaacgcctgtcactctgcagccttgtgactgactgctgagctgagttctgttccgggcctggcctcttgcttc

SEQ ID NO: 222709 - DNA, 180 bp, Homo sapiens
  chr5:141030758-141030938
  hyper
ggcggggccgggggggtgctgagctctttcctctgttacttctggtttggggtctgaccccttccgacttcccgtctcctaccacaagtcggatgcccccttagctccctccgttcccccagcccgccaggagtccccattcagggccaagctcacttttcggggcggcggctgcatctc

SEQ ID NO: 222710 - DNA, 264 bp, Homo sapiens
  chr5:141030966-141031230
  hyper
ctccggaactggaggaagccccgcccactatggagccccgccccaggccaggtcaggccccgccctctgcccgcccacgacttgtccggcgacgtcgcagggcgcggaagcgagagggggccaccgagaaactaaacctgttactgctgcgaatacgccggcagggtccgggtggcggggcgggcggggcggacgcagcgtccgctgggcggtgggaagaaccccaggcatctgagtcaagacgcctaagttctatttgtagtg

SEQ ID NO: 222711 - DNA, 136 bp, Homo sapiens
  chr5:141257894-141258030
  hyper
ccggctccggctccggctggctctgggcgcagcagcccggcggctttgcgtccgcgccgcgctcccgctccccgagtgtgtgaggcggcggcggcggcggcggcggcggcggcggcggcggcggagccagcagaga

SEQ ID NO: 222712 - DNA, 265 bp, Homo sapiens; identical to SEQ ID NO: 200082
  chr5:141704448-141704713
  hyper

SEQ ID NO: 222713 - DNA, 341 bp, Homo sapiens; identical to SEQ ID NO: 200084
  chr5:141736299-141736640
  hyper

SEQ ID NO: 222714 - DNA, 1338 bp, Homo sapiens
  chr5:142781865-142783203
  hyper
ttatcccccagtttaagttgcaaataacccagccacattaattggccctaatgaaccatgccagagggtcttaagtggtattacaaggttgcaattatcaagtctgcaaccccaaacgtcaaactagcacttgtaaaaatcgcagcacaaaaccattacggttacagggggtctttttctaaaaggggccacttagaaacctcaggcgcgaattaacaacaaacgctaaagagcaagcccttgcggggcgggggtggagaagagaaaaaagtgcgaggttaaaagagaagtacgtccagacctgttgagttctctctccgacacgcccacttctaacagataacgccggccccggccgcagtctccaagttgcgggctgtcagccccccgcgtgtgcaccctcacgcgccccgcacgccctcctcaagccaggcgccgccggggcctccccggagcccgggctcgcgctcgggcgcgccggggtggcgtgcaaatattcgggcgagtaaaattcagacgcggcttagcgttcaccacgaaaacgggtgtcgggcgacccccttggagggaaaggggacactagggggagaaaagaggccaggattcccgcgaggaatgagaggctcgaagcccccggcagttcgacagggctccgctcgccgtccgaggtcaggttcctccccctcggcccggccaggggacgcctgcggagggagaggaagaggccagcgctgtcacccgcgcgctgccctttcgtcaccgtcgcccggcccttgccagccccccacccccactccccgaggctaataaaagtttgtaggctcccgcggcggcccccgagttgtctccggtcccagcggcacctcgggggagcgagcgcgccccggccccctcccgcctcgcttcttacctctggcagaggagccgctcgcccgccaccgtccgcagttcccgccgcagccgagataaacaacttagcttgtgaacgcagaaggagcaggagggaaatatattttttttttctaaaaaaaggaagtaaacagccgcccctttctccatgggtggggggagagcccctatttaagaaagtctcccattgcccagctgacaagccagccctccgccccgcgccgggctccgcgggtcgaggttccgggcgcgcgtgccccgtcccggtcccagctgcttcggccgctccggctgcggcgtctccttccacccacagaatccgtccccgacgggcaggcggtgactcgggctcccgtcacagacacgagctcgcaaaatggaggaggcggcggcggagggaagagagcgcggacacgcgaaagggcagcc

SEQ ID NO: 222715 - DNA, 180 bp, Homo sapiens
  chr5:142783939-142784119
  hyper
ctttgggcccggggggagtcgcgtgccggcaggtcccccaccaccgcatcatctgggcggccgggtcttcagctgccgccgccgcgctctcgcactgggagagaagttgcaaagcagaacccaccctcccccgcgccccgaccgtcccccaccctcttccccgagtctgcgaggcggcgg

SEQ ID NO: 222716 - DNA, 660 bp, Homo sapiens
  chr5:142784474-142785134
  hyper
cctgcccctacaaataaaacaaaatacaggcagctttaaaatgccagcgttcaactccctacagatgttcctgttaggagcttccccctcagtccaaggggaagggaactcgtggtccgtcctgagaaaggagagggccgtggggcgaggggtgcccgtgcgggaagcccccgccccagctcccttccccagctcgccgcgtcgggaaggcttggacgatgccgggaccgagcctcctaccttgtgcggcacagattatgatttttgtgactctgggaaaggttgtgctgtgtgggtttagggtttggggaggtaacttttgcgcccccacaggtgacatcgcttgccagctcctgacacgggcgggggctgccgcagctccacctaatcctgctcgggcgctcggccacagccactctctcacctcccgccgcgctcagactgacggcggctccccctgctctgacatcttgaagacgattggggaagcgcgtcccggaagccgcccgccgccatcttggtagggtacagtgtcgccagcccgtccccgcggccaccatcttggcaaaggttcgcgatcgcgggtagcctaagccgtccttccttggttctcaagggtaaacggttccctgtgcattgtctgatgtgaaaggaaagaag

SEQ ID NO: 222717 - DNA, 180 bp, Homo sapiens
  chr5:145717909-145718089
  hyper
accccggagcgcggttgagggaggtggggcaggggtcacctgggcctcgttctggcagcccctcaccctctccagggcccgtctgggcgcttggaggcgcctcctcgctgcgccgcgggaccggactctggtggacagcttgggcgtgaggccaggagcgccctggaaatgggcagtttg

SEQ ID NO: 222718 - DNA, 300 bp, Homo sapiens
  chr5:145718291-145718591
  hyper
aagaagaaagaatcggaaaggtctggcgggttggagccagcggggcggggcggactgggagaggccaggccaggcccgggtataaaggctgtggagggggcggccgccgcgggcgcagaaaggcgcgccgctagctgctgtctctcctcacctcccgggccgcccctgcgagtccccggcgcgtgagcacgcctgcgcgcgcccgggcccttcctggcaggctgcttgtaagatgagtgaagaagcaggtgggggagaggggaggcagcgagcgagagggcgaggggagcgcgggcgctg

SEQ ID NO: 222719 - DNA, 600 bp, Homo sapiens
  chr5:145725257-145725857
  hyper
tgagtccgatttggcaccagattaggcagcgcgagcagaggaggtggtgggagccgagaacgcccgctgtcctcgccgggcttcggagcctccacgcctttgtgtcccgcgcgccactcgcgtctcccgtcctgtctgtgtgcgtctgttcgcgtgtctctcactcagcccctcttagcttccctccagcctcgcgggcgcgaaactctggcccccatgtgccggagcgagggggcccgcgtccccgggcgcgcgcagagtcgccttcccctctttcctctcttccgcagagcggcgggagcccccgcggtaaccccgccccggcgggcagacggagccagcgaggaccccggcggacaaattagtctccccttcgatcgctcttttccgatcaagtcaggtttcccctgttcccccgacggcgcttccgcactagcgcgactcccagggctccccggctgggtcagggttcgcccgctcctcccggcgcctccggataggggcttcccttcggctgcgtcccggcctgaggagtcccctggaccgcgggaggggcgattgccgggtccgcgcggctcagaatcctccccacgcgttgct

SEQ ID NO: 222720 - DNA, 394 bp, Homo sapiens
  chr5:148206080-148206474
  hyper
cttcgcggctgccggcgtgccattggccgaaagttcccgtacgtcacggcgagggcagttcccctaaagtcctgtgcacataacgggcagaacgcactgcgaagcggcttcttcagagcacgggctggaactggcaggcaccgcgagcccctagcacccgacaagctgagtgtgcaggacgagtccccaccacacccacaccacagccgctgaatgaggcttccaggcgtccgctcgcggcccgcagagccccgccgtgggtccgcccgctgaggcgcccccagccagtgcgctcacctgccagactgcgcgccatggggcaacccgggaacggcagcgccttcttgctggcacccaatggaagccatgcgccggaccacgacgtcacgcagga

SEQ ID NO: 222721 - DNA, 398 bp, Homo sapiens
  chr5:148650951-148651349
  hyper
gaaggtgctcaagaaagacccgcggcgaatggagaagacaagcccaaagccaggaaatgggtggcggctgcagggaagggggttttgattccctaggataaaaacgcgctccaacagtctccgcattccggcatggagccggctgaggggtgcggtggtaagaccccatcgctagcggagtgcaagcaaagccgcacacctcctgggtccgggctggggcaggccgcgcgggcgcgggaacgaacgcgtgcggacggggaaaagggtcctccaagcccaagtgggagcgccgcggagggcgagcgagcggcagggcgcggcggggcgtgtgcggcaccacgggacagcgggctgcggcccagggggcgaggcgtgctcgggtctattccgggagcggc

SEQ ID NO: 222722 - DNA, 480 bp, Homo sapiens
  chr5:148651373-148651853
  hyper
gcggggcgggggctgccggcgagcatcctgtctgggggaggggaccgcagagagcgccggccgctgggctggcctgagagcgcagcgcgccggccgctaccagccgcgccggagcccctgcgccctgcggcccgctccccggggaccgggccggcgccatggaccgaggccagggtaagaggggccgcgacgcccgcacttgttgcggcgccgggcgggaaagggagactggacgatctgaagccggagaggaggagggagagaggcgggcggtggggcgggggctgaggaacgctcggaggggactgggagacgcggcgcttatgcaaaggtgccttcggctgccgggacaacccggtgcgtgtcaacgcccgtgtcctggggccaactcgcctctcgtgtgtgaaatcagagttttcataggctaacgatttgtaacttcataaaagatccccctctagtttccggaggacagcgagc

SEQ ID NO: 222723 - DNA, 180 bp, Homo sapiens
  chr5:148651918-148652098
  hyper
gctgtgggcagcccctagggagaagctctaggggaccgaagtttgcagctgcctagggcattgcgagaaggaggagcgccgtgagcaggcgcgcgtgtgcatgcatgtgtgcgccagggagggaggaggcgggggtggttctatcccgcaccagctgtgtcctcggcccagcccttctct

SEQ ID NO: 222724 - DNA, 105 bp, Homo sapiens
  chr5:148724798-148724903
  hyper
aagtaagctccatgcgggcacagctatgatctgctttctttgctgccgaccctgcgcccagcacggagactgtagttactactaggacctcgcctacccgcggaa

SEQ ID NO: 222725 - DNA, 626 bp, Homo sapiens
  chr5:151150205-151150831
  hyper
ggctccccagaggccgaggccggcgcccgtgctccttcagctcggcctctctcccccgacataggcgctccacatgcttcatttccaaaattctcagcaaaactccgcgggagaccctggtcacatgcctggaacgagaacaaaccggggcgtgtctgtgccggacggctgggaaccaaagctatttccatagaaatagggccggccagccttgagttgtagccccgccagtgcctgaaacgccaggaggaggggacgagttgccttttaaaggcgtagcgacgagaataagcccccacccgcggcaattcgaggctgaacaatagtggtgcagctcgggacgtggtgcgagggcccacactccactggagcacgcgcggaccaccgtgcctcagctgccacaaagggagcctcgccacacgcccgcggccgcctcgcagcgcccgccaagaagcgcctggcggaagggcgcactctcaggccttccaccggcgaccttccggcgggagcctgcgggcggcgcaggaacgaccctccttcctctgccccgcagcagtgctgagtaatggtgagagcagcaaggcccttggccgccgcacgtaagaaaaaagttgtaataaaaagaa

SEQ ID NO: 222726 - DNA, 39 bp, Homo sapiens
  chr5:153569200-153569239
  hyper
ctggctggcatcaccgtcggagtccggctccacggccct

SEQ ID NO: 222727 - DNA, 720 bp, Homo sapiens
  chr5:153857135-153857855
  hyper
aggcgatgtagctggtggctaggcgcagagtcttgatcttggagagcttggtgtcggccggcacgttggggatgcactcgcgcaactccgcgaatgcgctgttaatgctctcagtgcgtctccgctccttcttgggtcctgagcctttccgccggccaagacggccgccaagcgcctccagccgcccggggctctgcccaggcctggcgtcaggaccataggcggtggcggctgcagcggccgcgggcggcggcccgcccgcagggaagtccggggcagcgtcagccgggctcagcagccagctctggaagtagggcctttcctgatgacagcgcgaggccggaccgaagaggaagggttcgtggagcatggggtgcgcagggtgcgggtggtgatggtggtgatggtgtgcgtagctgcccacgaggttcatgttggagcggctactggcctgcgccgccagccctattaacgccgctccatgcgccccagagactgccgggggccacctgtgggctctggagccactactgggcgccggctttgggagagtccgggcaaggctgaaaatgagacgcgcagcccactgtcttcttaccggtttctgccgcgggcgaggtcgccgaagcccaaagacctgtttaacccttctgcggactcccctgcggatctggcttatataagaccgcggctttgatgtcaacctctcccgggagccaa

SEQ ID NO: 222728 - DNA, 489 bp, Homo sapiens
  chr5:156887016-156887505
  hyper
tcttgcccctagcacggggcggtgactccagagctgggagcctggcagcgtcctcaccccaggaaggcatgcgcccctctgcgggcggccccagccctgggccccctgcccccggaattgcccaagatgccgggtgactcctccccggggactctcccactctgggacgcgtcactctccccacccctgggtccggaccccggcggcttctcgcgcgcgagccacgcgggggacaagtcgcggccacctgctccggagctggggagcccgggcgccgtccgcccgcgcgtcggttcgtgtgccccgggccccatggagctgcgggtcagcaacaccagctgcgagaacggtgcgtacggcagggctggggaccaggcgggctccgcgcttcgcgccctcccctccttgccaccgctctccctcgcatcctctcctcccaggggggccaaagctggggaggggcagggccagcacgaggtggctcccacc

SEQ ID NO: 222729 - DNA, 300 bp, Homo sapiens
  chr5:157002546-157002846
  hyper
ccgcaaggctactcccaggtctccgggccacccagcctccatccccccgcgcctggccacttacttgtccatccaggctcccgcgccgcccgcggccggaggggctgcagggcaaacgccagcaagcagagccgggcggcgcctgcgccccctggcatggtggcggcggcccttagcgctcggcgctcacacgccctcagccatacctgcccactgcccggcggtggaggcgcgtctggaaccccccggctcgccccgcgcctccccacccggctcccagccctctgccgagacgctccg

SEQ ID NO: 222730 - DNA, 222 bp, Homo sapiens
  chr5:158526150-158526372
  hyper
cagctccaggtcctccggccgcaggcgacgaaggcagagcggctggagagcgcggagccccggcggagagcggagcgcagcggctgcggactcaccccgccgcccggccccgcggcagcagctgccgctgccgctgccgcctccgcctcccggctctcccgctcgcggctcacctcggccgcggtccccgcgcagtacccacctctgcgccgccgtgttggc

SEQ ID NO: 222731 - DNA, 642 bp, Homo sapiens
  chr5:158527354-158527996
  hyper
ctaaccccaaagggaggaggcggggcccgcgcatcgaggccccgccccttcatttgcataacgtcatctttccgcccaccgcagccaatcgcggcccgggagccggctcgctggcggcgccaggccacgctctctcattaacatcccgctcccggtggcgcaggggagccggccaaagttcctcgcaaagtggcgagcgaaggagcgctgagcactgacgtctgggctggggaggagcgggtccgagcgaggacggagaggggacagagggaaagggaggcgggtgtcttcctcaggaatttgagctggggatctgcatcctggccattgcagtcctttagcatcctcgccgcgccctgagcgcgctggaggctcgcaggctgcgccctcccagggctgatgccgcgtcctgctccgccgttctgggacgtcggggacaaaagtggaggagacgggagagcccgggcagaaaaagcaggacgcgcgtcccaggtgcccacctcttcgctttgaggcgggggcggtgggatggaatatgggtgcgcgaggtcggggctggtaactctcggaggggcacggcctccacgctgggagggatgaatggacgctgggccccggcaaatgaggcgctgtgggtcccca

SEQ ID NO: 222732 - DNA, 420 bp, Homo sapiens
  chr5:158635122-158635542
  hyper
ccccgcacctcctcccacaacgcctgcagatctcagatgcgtttgaactacagtaaccccaacccagctcgcggcaagcaggcagcgcagcagcagtagcagcagcaaccgggccgccgccgccgcggggctaagagattacgttcagcaaaaactcttccaggaaagaggctcgagagctcccctcctatctcgccaagggtgctgactctgtcgcgccacgccacgtaccaaaaggctcgcgaagaaaaacgcgggcgaagttcagcatccccgaacagaaagggaactcattccagaaagggggttcacgggtctgagggtccttgggtggggaaagcagtattggagggagaagacagaagggatggcaagacagaggaaaccacggggacaaaaaggaagggatgaggagccctc

SEQ ID NO: 222733 - DNA, 105 bp, Homo sapiens
  chr5:158635907-158636012
  hyper
aggaagggatgggagggcggggaggcagccgaggcccgggagctggaacagagggggctttgcgcggggcccaggaggggagagcagggtcggagggaggcgacc

SEQ ID NO: 222734 - DNA, 523 bp, Homo sapiens
  chr5:159343216-159343739
  hyper
ggaagagtgactagcggggaaaataaccccagcgggccgcctaggggtgggtgacccgcgatctccacgcccaggtcccgccctcgcggcccctgcccccgccccgccccccgcagagggcgcgccctgggagcggcgggggacgcggctggcttcccggcttgcggggtggcggcgtcggggctgcgggcgccttggctggacccgcattgccccctagtgccgcgcggagtcagggcgccgggctcccccgcctgatgtcaccgccgtgcagtcagcccagaagcggctcattgaaagcagaccctcttcggcgctcgctgggcggaggacgcgccgcggtccgcagacccgagcgagctgggcaccgccgggcgcccccggccctgccgccccctcctccccgccgctcccccgcgagcccggccaggcgcgcctgacgtggaccattaaacttggagctgccgcctcgtcccctctcctcctcctcctccctctgacaggcgagcgagcgactcggtgc

SEQ ID NO: 222735 - DNA, 173 bp, Homo sapiens; identical to SEQ ID NO: 200134
  chr5:159826416-159826589
  hyper

SEQ ID NO: 222736 - DNA, 180 bp, Homo sapiens
  chr5:160974611-160974791
  hyper
ctgtctctccaggtttcggtctgattctgcagtgggaattattagtgggcagggtggggtttgcatgagggggagatgggacgtggaggcgtgagggatgcgggtgacgggcgccctagcgcaggtgcgggggactggagggcgtgggcgaccgcacagagcaggaagggcaggtggccg

SEQ ID NO: 222737 - DNA, 360 bp, Homo sapiens
  chr5:160974834-160975194
  hyper
cgcgcacccgcgcgcacacacgtgcaggcgcactccccacccgccgccatccctccttacctcgcaggcccgcgctcgccgcccactcccgcggcgtgcggagctggcgcccccggcccctcgtccgggacaggggacggggactcccggctgttcaggggctgtacctctggatacaagaagccggagcggtccctagaaggcaggcaaaatgaggaagagcccctcacctccggaggcactgtgttctcccgcggtctccgcgccacctcgtcctcttcttcccttccccgcgcccaggggactcgcacacccagaggctgcctcttcccttcctcctgaagctcaggccgcctcgcc

SEQ ID NO: 222738 - DNA, 160 bp, Homo sapiens
  chr5:160975237-160975397
  hyper
aaattgggggagggagatactcaattcacaaaagaagtcttccctccgctccagggaaagagaggagccacgggcggcgtgaggtgctacgagtctggggacacaaggccgtccgaaggaaccggagtccacaccagcggctctccgggtactcctgagt

SEQ ID NO: 222739 - DNA, 223 bp, Homo sapiens; identical to SEQ ID NO: 200143
  chr5:167718508-167718731
  hyper

SEQ ID NO: 222740 - DNA, 236 bp, Homo sapiens
  chr5:167718952-167719188
  hyper
cgggcggcgccgggtcggggctgcagggccgcatggacagcggcgccaccccggccggcccctactagggccccccatctgcgggcgccaccccccggatcatggtgcctcggcggccgcccgggctaagagcggccggctggagccgctgagcccccgctgcggccgggagctgcatgggggagcgccggcagcgcttgggaagatgccccggccggagctgcccctgccggagg

SEQ ID NO: 222741 - DNA, 180 bp, Homo sapiens
  chr5:169064108-169064288
  hyper
tttgcgtgaagtggggtggggtggcgtgtcttagcctacggggcaccagccttctagtgtgcccctgcccaacgggagggaggagggagcggggagccccggcgagggaggagagggcgggccctgagaggagtttgaaaagaggaaggaagtggggccctgcggcgcccagccaccccc

SEQ ID NO: 222742 - DNA, 420 bp, Homo sapiens
  chr5:169064334-169064754
  hyper
ccccctggcgcaaagctgacaaggagcggcacggcgtgggtaggtgcgggccccagggcgcggcagggagcgggacaggtggcgggagagccgcgagcaggaggatgctgcggggccggcggcgcggggtgggcagggcgcgctgcctgcaggtcagagggcgcagcctgcggcggggcctcggggcgggaaagccgaggctcggggagaggacggcgggaccccaccccgcaggctaagcacagccctcgccctctcgcctgctgagggaaccttagacatttccgagatagggtcaagacctgcgcttgacaactcagttcttcgcgccaaactcggcgtccccaggagtgccccagctcgccgcgtgggagacttggccttgtagagggagctccactctcccctggctcagccttg

SEQ ID NO: 222743 - DNA, 505 bp, Homo sapiens
  chr5:169931015-169931520
  hyper
gccgctccgactctcgccccgagcgctggcagcaggcagcaggcagcaggcgggcgcgctgtggctccgcgccgcgcggtccgggctctgttcattcatgattggtactcggccctccgagacccagcccgagcgcagggaggggagccgagtgtgcggcaggaggggcgggcggacggcggctcccgcaccgcacgcggcgctggctcggcagcctcggccgggcggccgctctggccccgtgtccagtgccaggcaggcttcagggcaccgtcctcggccctgggcgagggaaccgccgggccgggtcctcgcgcggggaagcggttccgaaggctcgcggggagcggctagccctgagtccctgcatgtgcggggctgaagaaggaagccagaagcctcctagcctcgcctccacgcttgctgaataccaagctgcaggcgagctgccgggcgcttttctctcctccaattcagagtagacaaaccacggggatttctttcc

SEQ ID NO: 222744 - DNA, 477 bp, Homo sapiens
  chr5:170171109-170171586
  hyper
tgggccgggggaaacgcgggcaggagaagggaagtctcgctcaggggagtggtgtgcatggggcagaggctgccagggacgctgaaggctgatagccgggttggcgcggaaatgggacgccgcagggtgggacaggcgggagggatgggatgggcagggtgtgatgccggacgaaggaaacgggcctgcccggcaggtggcagagagccacagaagagctccgagggggtggtgcgtgagatggcgctgcaggctggaaaggggctgcaggcagggtgcctccagagaccgcaagagaacagcttgcgagggaccgtgggaacttcaaggaaccgcaccgccctcctggaccacccgagaaaacaggggaagtgggcgaatgagtagaccaaagtactcatgacagggcaggagcaagtgagagaccctggaggaccatggagagaacgtggtaaccgatggagagggatgaaaacc

SEQ ID NO: 222745 - DNA, 122 bp, Homo sapiens
  chr5:170171693-170171815
  hyper
gggatccgtcgcgtggatgtcaggtccgggccagggagccaaagcggcggctccgcggggaccctccacagttccggactccagcccagcgccggcttcagggcgtgcgaccctgagcttgg

SEQ ID NO: 222746 - DNA, 85 bp, Homo sapiens; identical to SEQ ID NO: 200154
  chr5:171541758-171541843
  hyper

SEQ ID NO: 222747 - DNA, 443 bp, Homo sapiens
  chr5:172385502-172385945
  hyper
accttgcatagaataaaccccgtcggttcttaacccgaagagagtcgagacccagagcccttttccttccctgccgccacggtgcccacggagggggcgtggttgatctccctcacagctccgtcgggaccagagacccggggaccttttacacccagggtccgcgcaaagtgtcggcctagccagtggttgggtggcgcccgggcctccaggcagtcttccaggggtcggcgaacgaaacgcggagctcgggagcgacccggcggggccaggcacgggcagaagggccaagagggccacaggtgggcgcggagcggccggagtgggcggggactggatgagaggggcggggtctaggagagaggggcggggcggcggccacaaacccgcaggcacgccgccggccgccgtttagtcccagagatagaaaaaagtagaggtag

SEQ ID NO: 222748 - DNA, 142 bp, Homo sapiens
  chr5:172386283-172386425
  hyper
tgtactcactggcatcgccctcccggggccgccaggaatgaggcactgagatcccaccccaagccgctgggggcgccattcgacttcgctcctacggaaatggggcttcgatgtctttctgcgcttgcgcggcacggaaact

SEQ ID NO: 222749 - DNA, 92 bp, Homo sapiens
  chr5:172444179-172444271
  hyper
gaaatttaaagtcctgaaagcgtgaaaggagactgctgtagtgatatatccacttacccttagaaagtgattccctgctgggcgtggtggct

SEQ ID NO: 222750 - DNA, 180 bp, Homo sapiens
  chr5:172659571-172659751
  hyper
ctaccaggctcggataccatgcagcgtggacactcccgagttgctctgcggaatcccggggctctgaaccgcattcaagtccccgacgccgaagttcacgaagttgttgttggcggcggcagtggccggctgcgctggggaaggcccggcggggtaagcggcagtgcagctgtagccagg

SEQ ID NO: 222751 - DNA, 300 bp, Homo sapiens
  chr5:172659852-172660152
  hyper
ctaggcatggcttgccatcgcgcaccagcactggcaccgcgatcctgcgggcaggcggcggcggcggcgggggcagccccaccagctccagagtctggtcctgccgctgccgcttgcacttgtagcgccggttctggaaccagatcttgacctgcgtggacgtgagtttcagcacgctggccagctggtcgcgttcgggggccgacaggtaccgctgctgcttgaagcgccgctccagctcatagacctgcgcctgcgagaagagcacgcgcggcttcctccgccgtcgcgcccggggcc

SEQ ID NO: 222752 - DNA, 768 bp, Homo sapiens
  chr5:172665286-172666054
  hyper
atccaaattccagggtggctcgagcgcattctccgtgaataaattattattaattgaaaagcgatcggcgcagccggagccggcccccctttcgtgcaatcagcagggctggtcgcaaaaggtatatatgattaattgaaagataagctggaactatcaccgggaatgtcattaatgcgctggggagacgtccattggagacaggcggcgttatccgcggctttatcttcaacaacgcctcgctctcggcccgcgcgggggaaacagatgggagtttctgtctgggacgctcgccccatgtttatattttgggaagaatcgcaactcgtgggagtccccggctggccccctgataaatgaacattagcactttttcggactactgtatcaacaaaggggctgcggcgctgcaataattggcgagaaagcaaacagagggccgagagcgcgactctgctcttcgtccggctgatggatgagcagctccggctgcgcgccggactcccggcctcggcctccgcctccgcctccgcctccgcctccgcgctgggcccctccgccgcccggcttccttcctggccgggagttgggggcggggggcgactctgagggccgccgacctcgcccttggctccggaagagtccaggcggcctccgcggcaccggatttttcctgcctcgggactcgcctcattcaggtggctcagctggcaccaaatccttctcatttccacgcttgttcagtgcccacggggtgtgccaggcgct

SEQ ID NO: 222753 - DNA, 268 bp, Homo sapiens
  chr5:174220728-174220996
  hyper
ttgaagtggggcggcggctcctcctcgcagaaaccctccgcagtcccctaccccagaaaggtttcccttccctccccttcccgcaggcccggggctggtttggggctccagtctgagcgcctcctccgcgacgcgccacatggctggcaccggcgcgcccccgcgcggccgcctgcgagaagctcactctccgcggaggcgaaatctggttttgattcaattagattaagttcaggggcagggagggaggcttagtcccgggccctgc

SEQ ID NO: 222754 - DNA, 900 bp, Homo sapiens
  chr5:175084737-175085637
  hyper
atctgcggggcggggagagggaaggagccagggagaaaagggagagaaagagggggcagtgtggcagaaaggaagaggaaggggcaagtgtcagagtcggcgagatgaggagggagggtgtaggagaaaggaaaatagaaagtgggtgagaccgtgggagagggagactgggggagaaaatgtgggcgtgtgcgcgctgagagagagagagagagagagagacttggagagggaaggaagggaaggagcgttgagagcaaggaggagcgagttgggggcggagacgaggaagtgggtgcgaggcgcggggcgcaggccgtgcgcgcgccgcccgctgcatccctgcccggagcgcagccggcgcgggcgcgggaccgaggcgaaccgggtgcggagccaatacccgcggcagcagcaccaggtaacgcggccgccgcctccccgcggggcctcggctcggggtggggtcccaggcgggcttggggacccggcgtgggctggcggagccgcccgaggggctgctcgggatccccggcggccgtcgtggccccgaacccgggttcgagcctcggccccaccgctccctggctgtgcctgaccttgggcaggtgcctccgcctggcctgcgagcctcagtttccttgtctgtgaccgcgggggtcgtgccttccccaagggggcgttgagagctcgggatgcagccccggtgcacagcagtgctcgggacgcgggtcggctttatatcccctttgcccgcgaagggtggatttggaaagtgcacttgcgccgaaacagtccccgttttgtctccgggtctgggtggtggcattttctcgcggcgatgtgtctgtcggagcatggagcaactttctgctaaagggaagccagcggagagcgggg

SEQ ID NO: 222755 - DNA, 900 bp, Homo sapiens
  chr5:175298906-175299806
  hyper
ctgaaaggacagctccttgcgaggggccgcgagcaggcagctagctgcgaactaagaggaagcgtgggccctagccggagactccgggcagagcccgaacggccggggtcccggagccaggaccgccccggctgcggcggagactcaagtctgaacccagagaacaactttgagctcgcgggagtgggggacgtcgatctaagctacttctggctgtgcttaacccgaagcccgccggagcacgcttcgccccggaggagggagtcgcccccaggggtacagtgcgcactcccggagtgagtcagagggcggcggcaggggggcggacagaccgcaggtggaggggaggagaacgtagacattgacaggggatgggggaccaaggggactatttgtccctttccgggaggagccgccgcttggacagcgcacgcccgccgcctggagtcttcgggaacgaccccttctgtgctctcgttctcgtcggcctcaatctgcccccttccccagcaaagtttgaaaccgggccgggtcttggggttggagctatgtgtgttgggggaaggggcgctctccgtggcccaccgggagatccaggacagagctgctgggggtgtgggtctccgcgggggtccgggagaggggcgccggggttcctgtcctctcttctggccgggaaacgggaacccccggccacttccgcttttcagccggagtcggctccctacctcctcccatcctccgctgcccctcccctcccccatgcgtctcccatcccgggccacggggtggggacggggcggggggagggggtggagtgacatcccctgtctctgccactgcctttggcgtagtcccctgccagaagcaaatgagtgttgaattgagttgcggtgaata

SEQ ID NO: 222756 - DNA, 360 bp, Homo sapiens
  chr5:175299904-175300264
  hyper
aaacctctaggggctcagatggtcgagcctgagtcggtgcttgggctgggacgggctcggagggagtcggagaggggaaggaagctgaaggcgcgccctgggtccccggcgcactgaaggtacggaaacctggtgctacgacggcatccctcgccgcccccggcctcccctcccccagcgcagcatcccccacccacccccactcccacccacccccaccctcaccccccttcccgcgcagggatagaccaaggcttcccgcagaatcgctaaggagcgcctcctggcggcctggcccaaatcctcaactgccggcaacctgctggacctcagcactcccgcaggcatatggcaaaacat

SEQ ID NO: 222757 - DNA, 143 bp, Homo sapiens
  chr5:175792171-175792314
  hyper
gatgcggcgttgggcgggttacttaactcctgggcctcggttttcccttctgcgtggtatcattgtaaggggtaacggagaaaagccgtgagctaacccctggtggatgctagcaagcaccgccgtctcccgtcctccccagg

SEQ ID NO: 222758 - DNA, 688 bp, Homo sapiens
  chr5:175792468-175793156
  hyper
gtgggtgggcgcggccgcagcagtcgcagcggggccatcttcggcgggcgagtgggctcggcctgtgcaacccgcacctgcgtccctcgcccggcccgatggcgccgcggccgctgggccccttggtgctggcgctgggcggcgccgcggcggtgctgggctcggtgctcttcatcctctggaagacctacttcggccgcggccgagagcggcgctgggaccggggagaggcctggtggggcgcggaggctgcccgcctccccgagtgggacgagtgggacgtgagtgccgggccgaggcctgcggaagggcgggcaggctgggctgcgactccgcgcatgtggccaaggggtgtgaccacggaacggccctgctggtgccgggagcttggggggtcgagggcttggcagccgcagcgcacaggccccgcgcgggtgggcggtcagagcccgggaaccgaggaacgggtgggtgtgcttgggtgcgtgcggcgccttggcgccacgccgtcgctccacgccatgaggctcgggtgttccagcgggggccggagtttggagggcgcggctcgggagcatcccggggcccagccgggtcggctcgcgcccctccggcgcctgcgcagtgcaccccgcccgggggtggggatgtcgggagaaaccccatcccctcccgcctgcggtcggga

SEQ ID NO: 222759 - DNA, 1280 bp, Homo sapiens
  chr5:176056554-176057834
  hyper
ttggtcttctccgccgcctcggtgaccccctgcttggttttctccgcggctgccacaacgccctccttggccatggacaggcccttcatgaacacgtccatcctggcggcctggggagggcgatacacgggcaccggtgcactggccccgcactctcaccccagcccctcccgcgggacgcagatgcccccctactcccgagaccgcggcgcccttctggaccctgagccccctcccgctttccccccatcccaccccactccccagtgcgaagcctcagggccgcggagagtcctagcgtccttgaaacctggggacgcgggaggggccactgcctcggttatccgggccctgcaaactgcagccccgtcgaaccggagtgctgggttcggcgcgaatatccaggacccgcctgtacacgcacggcacagtcacacggtcatgcacacaaacatacaccacggacaagctcacgtgcacacacaggacacgcagacgctccaacgcgcacgaataccccgacccacatgggcgcggacacacgtccccacagccgcccgggcagctgcaaacaccggagcatactcacatactccggggtgcacactgacgcgcatcccccgggtctccctccattttccatccccttccccagctccctcctgtcgccccagtcccctctccatcctcatcccgttccccatccccggcgcgcggccgcctcacctggatgcggggccggggctggggatggagcggcggctgcggcgggcggacgcgggggctccgctaggccaggccggggtggaccaggggccggaggggggatagggccgggatcaggcgctcgggtcgcgggtcctgagcaggagcgcagcagtgcccgggtctcgggtgcgtagccagccaccgctcgttcctcgcgccctgcgagctcgcgcgctccggctccggctccggctccggcgctgcggcagctctgagctcagcgcccccgctggcggccgcgccgccccttcggcctgactgacagggggcggggagggtgacagcgcgtagccgatgagcctcccggggcgggcccgggacgcgcccctgggggccccggccgtaagactcgcgtagtctgttgggagttgagggagggggacaacgcggcgtgtgaagagtggggaagaaatcacgcgactggatttggagttctgctgggctcgaatctcagctgtgctttttattaaccgtgggaccttgagctactcggctctcctttctgaatgaca

SEQ ID NO: 222760 - DNA, 619 bp, Homo sapiens
  chr5:176559986-176560605
  hyper
cagggaggcagacccgagctgctgcctccattttgtttcctgctcagcttggtctgtggtggtggtggtggtggtggtgtgggtttggggtgcggccgggtagggggttcgcctgcggccgcgtctgctcggggcctgaggcctcgaagaccccagcccaagcccccaggtgagccctgcggcaggaggggggttgccttggcctcgggccgaacccagcgggctgagggcaggtgcccagtggatggggagcctgggctgtaacctaagatggaggccgggactgacgcgggcccgagcagggctggcgggacgatcggacaggcctcagccgcgccaggtgccgcctgggttggggttcgagacgcgtagggtgcgggagccgtgtgcggcccgaggccagcgccgtgccccgaggtaggtgaggggatcggaatgccacccacgacgcccgcaggccccgacactccaaggaggcgcgcgaggcccctggggagcccgcctcaggccccgcccgggcagccgggccggcccgtaggccccggccgcgagcgggcgcgcagggggaggggagggggcggcagcggcagctccgctgattgggcggcgctctcacaag

SEQ ID NO: 222761 - DNA, 90 bp, Homo sapiens
  chr5:176827093-176827183
  hyper
ggaggagccagccgcgcccaggtcacagtttatttggcccgcgctaccagtgggcggcctggctggccggctaggcgccctgcatgcgca

SEQ ID NO: 222762 - DNA, 288 bp, Homo sapiens
  chr5:176830417-176830705
  hyper
gcgtgaggcggggacgccggggccccaagctctcttcccgtccccgcggggcgcccccacgcacccaggtcgtgctggtagctgacgggcgagaaggcctcgtgcaagcggtaggagcgcacggccaacgtctggcacggctcacagctgtggttacggcgttcctggccgagcaccaccgtcagatcctcgggtgcgggcctgcggggggggtaggggagaggcagcgctctcagacctggccacaagcgttctggggaagccccctgctcccgaaccccaatcccg

SEQ ID NO: 222763 - DNA, 147 bp, Homo sapiens
  chr5:176830933-176831080
  hyper
ccagtacagcgcggcgatgtaggggtgcgccccgcgtagcgccaccagcccgccaacgacgcgggtcatcgaagacagactcttgcggagccgctgcccgcagctcagtgggccgttcctggtcagggaaggcggctgctcccgctt

SEQ ID NO: 222764 - DNA, 105 bp, Homo sapiens
  chr5:178003711-178003816
  hyper
ctccccgggccccgcgcgccaggccctgcgaaaagccccaacgggtcccccggcgaccgccgcgccggcctctcggtcctgtcctccgaggcgccaggcctccgc

SEQ ID NO: 222765 - DNA, 462 bp, Homo sapiens
  chr5:178287138-178287600
  hyper
tggctggctgtgccgggaggaggcggcgcctggcgccagggcgacctgaggccgcggggctccgagggcctctgtgggcgcgggggggcacccccgcgtctgtcaccggcccccgcgccaggacttggactctcgcccctcacgggccgctccggtgccgctgccgacgcccctgcctctggctcgcgccgcccgccgtgaacgcggggccaggcgtttcctcccgggcccaccctgcgcgcgccgtgtgggcctcgcggactcggggcgccgggaccccgagcgcagggcagaggcagccgggcccggtttctgagtcagtccccaggacggccactcctcctgcctcgggacacccagcgctttcctcttcaaagccgttttccgtggagtcgggagacgattcgttggcgggagagagaggaaccggctgggaaaggcttgaggcggagggaagtcgtc

SEQ ID NO: 222766 - DNA, 214 bp, Homo sapiens; identical to SEQ ID NO: 200197
  chr5:178423619-178423833
  hyper

SEQ ID NO: 222767 - DNA, 591 bp, Homo sapiens
  chr5:178450571-178451162
  hyper
tacgaatacaatgggtggtttagcggagggagagtagttggagcccaagctgagggactcggcttcagccttctcgaactccacagcccgaccgcgttctccgctctcggcgctgtggttctctctcggacaccgtaagtggtggtgccgcagcgacgtctgggaaatgaagtccggagggacaaacgctgcggttcagccagggaaacccgtcggctctccggcgcgcaggcgcagttgcgcccggcagcgacgggaaacgtctctgaattaggtgttccgctcgcctcttgtgcggtgtggagctgcgcgccccccgccgaggcgggcccaggtacaggctgccggtgagggcgggcccggggcgtgcggctgccgcggcgggaccaggacgagggctggcctctgcgcgtgtctgccgagtccccggctccgggcgtccgagccggggcggcctcggcaggtgaacccggccccggagggggcgtggcctgggaagggcctggcggaggccgggagggcgcttcgacgccgctggactcctgggccgcagcctgggccggactccgggggaaacggctccagaacaga

SEQ ID NO: 222768 - DNA, 596 bp, Homo sapiens
  chr5:178594073-178594669
  hyper
aggaagtcaccgtccgcaaggagcgccccgctaggctcaggcttggcacacgacacctcgcttccacttcattttcctaccttccggatgacgaactgcgtctcagacaactgaaaggactcgcctgagtcccacagccggaaagaggtcggggtgctgccccccgcgcggggcgggcagaggaagggccgggcccgagcggccaccaggtggcgctgctgccgcgagaacagcggcccgggccggggacgcacccggcgcccagactccgcggccgcacccgggctcccggggccccagcggccccaagacagcctctgggcctcaccctaaatacatcaattatgacctgagcaaaaagttctgttccaatcgttgctctccgacatttccattgtttgctctggaaggagctgaattatctatgctcttccctccttcagtcaaggagacgtgggaggaaaccgggatggggatcagcagcctggaggccgcctccgctggaaccgcgcccgccccgccaggaggctctgcctgctgggcaaggcgcactcagccagccccgcaggccgccacgcgaccgaggctcaccaagt

SEQ ID NO: 222769 - DNA, 1740 bp, Homo sapiens
  chr5:178770731-178772471
  hyper
agcggagagaaaggagctagagaagtgcgtactcaccagcccatcgcagttgctgagcgccacagaggaggcttcggctaggccggccacgtctccgacgtagagacagctcccgagcaggggctccacgcgggtggtgcccttctcgccctgccactccatagtggccccgggcgccacgaggcgggcgttgggccgcagccgcaggtgcaggtctcggccaaagaccgtgacattgtagaagaggtgactgccaggctcctcctcgttgcctccggggaagctcggggtccggaccggggcggccctgcgggctcgtacccctgctctggacgtagctgccgacaccacgtgggacaccaagcggccctgggcgtcagtgcgcacgggcaccgccaggatgcgctccgctccgtgccccaggggcccgcctgcaacgggaaggggcgttagatcggcggagaccacggagccccagtgcctcagagacccgccggcaagccacgcccccccagaccccgccccactgcgaagggaaggggcattccgccaggcgaccccagaagccagcctgcacctccccggctttcctgcaaccgggaaggggcgttaacagggccaccactccggggctccgccactccccagccgttccctcctccggagaccttgcctgccaagagctctgccccctgccccgttcagggttggggctcggtgggaacctccccgtgcccgaagggacgaccccgtcagagagtcccccgacccttgcacctaccgtccttggcaggacgtggagctgctcggaagccattccgggttggcccccttacccgtgtgccacgacccctcggcgggcccctgccgcccgagtgccctcaccgccagcctccggagcggcggagtctcggcttccccgagcacgagcggcctgtcctgcctgtccagctcccgctcagcccgctgccggccccgtctccccgagcgcccgaggactgggaggggtggaacagggtccctccgatctccggggattccctgcggggcgccccaaccaatccttagggcccaaggctacgcgctcggcagccggctcctccggagcgtccccggacgcgagccccggcgccgcctcgccctggctcccccctcggacccgctggggctgactctgcgctcttggccgcggggcttttcccggccctccgtccccaccctccgcgactcaggagccgccagtgctccgaggctcccccggcccaaggcgctcgggggcggtgcggggcgccccctgcgcgaccaacccggccccgaagttggccaacttggccccgggcggggcgcgcggagtttgcccaagtcaggctggacgacgcctggggagggggcggcggggcacgcgggacagggccaggccggcgggggtcccggggagtaggggccgggccgcacctacctggggggtcggcggcggcggcgagcctggcgttcgcgggcggcggcggcggcggcaggagcggcggcggcagcagcagcagcagcagcagcagcgcggggcagagcaggcggcgagcggctcccgccggcggatccatggcagccggactgcagccggggccccgcactcgcagccggcgcgaaagttccccgcgagccgcccagcccacatctgggggcagctggagccgcccgcagctgcagcaccgcagggcgcggggcggaggaggcgaggcgcgg

SEQ ID NO: 222770 - DNA, 282 bp, Homo sapiens
  chr5:178772526-178772808
  hyper
cgagggaggcaggcgggagggagggaggcgagcgagggggagggcggggacggcgggcgcctcagcctgcggtgacccggcgcatcttggcgcggccgccgccgccgcccgcttccctcttcgcgccgccgtcgccgcggtgccgggctcgcagcgaagcagagacaccccgaggcggcggcagagaagcgccgcgggccgggccgggggagccccgccgccagccaccccaggggcacaacctccgaggagcggcgccggccgaacgtccccacctagaga

SEQ ID NO: 222771 - DNA, 281 bp, Homo sapiens
  chr5:179223442-179223723
  hyper
tccagctgccccggggaggggcgctcgcttccgcatcctagtctctatcattaaagttctagtgaccgagacccgggctgcgttctctgggtccgcgggggtggcgcaccgcgggctacggagcctggaggggcccagcccgagtccgggcagcccggggcgggcttcctagtggcggcgtgagagtggctgcgaaggaacgagccctccccctggggcgggactggatccggtcttcacctcctaccccactccctactcagcctcggggtcacaaggcc

SEQ ID NO: 222772 - DNA, 147 bp, Homo sapiens
  chr5:179234473-179234620
  hyper
tgaccagcccagaaccgtaccggcttcccggggcaggggcggcccgagagcgccgctaacgggagcaacgggccctgcccccggtggtgtaggggccacctcgccccgcccagcccagcccgatattgatgggggcccacgccttca

SEQ ID NO: 222773 - DNA, 197 bp, Homo sapiens
  chr5:179246392-179246589
  hyper
aaatggcgagaaagcaaaggagctccttcttgggggtgagtggggcgccttgagcgcttcctcaaagctatgttcccagagccacaggccttccttgtgtccctcaccctgctcagaccgggccatagccgggggctggggcaggaaagccggccctcggcgggggccacgtggctctcaggcgcctgggctgctga

SEQ ID NO: 222774 - DNA, 403 bp, Homo sapiens
  chr5:179498002-179498405
  hyper
taagaaaaacggcacgtttttatattagaaaagggccgcatccttccagatctagcgcagccttaagtccgtgatttgaggaacctgccgcttccaaaatacaggctgagacgtcctccccatgaagtagttttgcgctcttgcaccacctcctttgtctacgctgtccctgcaaactcctagctcaatgccctccagcaaacgagctgcctgaacgcaaagatgaccgttccaagtcttttttaaaagaagggaaaaacccagtcacgctcctggagcctggttcccacgggagcaggccgggctgtccacgacggaagcctcgaccctggctggggctgtcggccgggcagcgcgggagagccagggccagagccggggccgggaaccctagtcccgccgc

SEQ ID NO: 222775 - DNA, 300 bp, Homo sapiens
  chr5:179780025-179780325
  hyper
tcggggaacgcgggtgaggggcagccaggcccggccgacgacagcccctcggtaggggcccggggcagatcggcgcccccagccaggtcctcggcgcctgcttgcgggcggaggcgcggagaggctgcggcgccgggacccgcggacggcgtggaggaggcggctcgggcgggcgcggcactcaccgcacatcgtggctgcttctcgggctccttcgcggctcgagggggtctgcccgttcggacgctggggctcctccgtgggctcctccgtgggctccgtgggctccgtgggctccgc

SEQ ID NO: 222776 - DNA, 780 bp, Homo sapiens
  chr5:179780486-179781266
  hyper
ggaggggggccgaggggcggctcccaggcgcgggtcgggcgtgtaaggctggggcgccgggcgccagatcccggagcggggcttagggcaaccaacggcccgagttcagaccccgactcaaccagagtaggcgtggaagccgggcagggcccgatcgcgctgtgcctccgctttcccgtctgtgaaacggggctacccagggaagctccctcccacggggtgctgagaagtcagacgggccgcgtaaggggcagagcgaggggtccggcatcactcgcgcgctccggaaacccgcgtgagccgctgttcctgccgcgctcccatctgagtgacaggcttgtttcagagctccgcagacctctaagcctggccctcaccctgcgtggagagaacgcccgggcttggcggagagacgagaaaaccgaggctcccggaggcagacaaggactctgccaaaaccggacgccgcggcggtggcagaattcgaccctgggatttgccgcggagcccgagcttgaaggcgagggttccgcaggttgtgaacgaagctggaggcgccccaggaagccccgaccccacccgcgccgagctgccccctccccagatctgcctcgcgctgcaggcccgcgagggacccgggggttcctacgcctggggtcggaatccgaccccccagtgaggcaccaaggcccgcgtttctccgccctggttcccggccgtccctcccgttccccctgcactctgggcccctcgtctcccgaggaaggtcacgagaaccgg

SEQ ID NO: 222777 - DNA, 180 bp, Homo sapiens
  chr5:180017814-180017994
  hyper
ccgagcccactaagaaagcagcagctgcaagcgaacagggaggggtcaccgcctgcgcgccggggtccccagaaggcaggtccaggacgcgcccccgcgggaggcgcccaggaaccgtcgcgccctgcccggctccccgaccgcccctccctcctgcgccgaggcctgccaggtgcgagc

SEQ ID NO: 222778 - DNA, 770 bp, Homo sapiens
  chr5:180018050-180018820
  hyper
accggagtggcctgagggtggcggaaggaccggtgaactctgtgcagggtccgggacaggcccccaagggaggggacactcgcgctgcgccttgcaggatgaggagccggtctccagacggggggcagacgggtgtccccaggccaggggcggcctccatcccggcacgaggctggagacagccctgagagggggaggccgcgggctgcaggcgcggggccccggggtggcggagccctctgggcgccgggcgaggctggaaggacctgggatccacgatcggcgcaggcagcggcgggggcgcagcgggcgccgaggcctcaggccccaccgtgcgcgccaggagcccggggcgctcaccggagctgcaggacagggccacgcagagccccaggagggcggcgagcttcatggcgcgggggctcggggcgcgcggggaacctgcggctgcccgggcaaggccacgaggcttcttatacccggtcctcgcccctccagcgccggcctcgcccgcgctcctgagaaagccctgcccgctccgctcacggccgtgccctggccaacttcctgctgcggccggcgggccctgggaagcccgtgcccccttccctgcccgggcctcgaggacttcctcttggcaggcgctggggccctctgagagcaggcaggcccggcctttgtctccgcgaggcccaccccggcccgcaccttcgctttgcggtctgaccccacgcgcccccctgcagggctgggcccgggtgaggggagct

SEQ ID NO: 222779 - DNA, 341 bp, Homo sapiens
  chr5:180046791-180047132
  hyper
gcaggtgagctgtacggggtgagcgtggagacaggtgggcggcgggggagccccgtgcagaggtccaggaggacaggcctggcagcaggaggagcgtggggagccacagcgggaagacaaggagaggtggacaggaggccgcgcatcctcccgggtaggtgtgacagatacaccctgctcagggtggcagcaggtgacctcagggagcctgggaactggggaccctggctgaggttctaggtacccacgcccacagggacaggtcaggccaggcggaacttcctggtgcaagttttgaaaatggagggattcaggcactccggcctgcagcaggtgggtcg

SEQ ID NO: 222780 - DNA, 565 bp, Homo sapiens
  chr5:180075844-180076409
  hyper
ttccgccccttctgcggcgctgacagcccgcgattcgcctcctcaagattcgtctcaagtgccagcgtgcacctgcacccgtccgcctcgggcgcgcggtggtccccggcccctgtccccgccgtcgccggccacggggagggggaagcccgcctcgagcgccctctgggggaccgaccgcgagcggaggcgctgggcgtcgggaagtgcgcacccaagtccggggcccggccgggatggatctccggcgcgcgtgggtcgggacggcgcggcgcggggaccccgcggggaagcgagtaagggcgcgaaggatccgggctcagcgcgcagcccggcagggcccggctccgaggacgcggagccaccgacggagacgcggattcaggggccgggagagctacccctgcgccgaggcgcggcccggccgccctggccctgacccggctgcggtccccgcccgccccttcctcatcccgaggtcccgcgccccaagcgccgtgctcccctcaggcgtccgcgcaccagggccaccgtgtcccccgcccgtacccggcggagcggtctc

SEQ ID NO: 222781 - DNA, 639 bp, Homo sapiens
  chr5:180076434-180077073
  hyper
cccctccccggccagccccacgctcgggcgggtggcccgttcgccgcgctcaccgtccaggagtcccaggcagagccacagtcgcaggcacagcgcggcgccccgctgcatctccggccgctgcgcgtgggtccgacccgagcggccgcggctcggggctgaaagtgtccgcgcgggcgccggctggcctggggcggggcggggcggggcgggggccggaggcgggcccgggattcaggccgctccccgcgcccccctccccccgtccctcccagcccgccgcggggcgtccggtgcacccgagcagtgcgcgctccgcaccacagggtccgggccccctcctgggcggctccgggcgcggggacgcgggtaacgcagacggtctcgcgatgcgctccggaggtgatggagcctggtgggcaaaggggagcaaaatgcggcacgcgctcttttccgtcctttctttccatcggtaaaatctagactaaacaagaaagcaatccttgtaaaaatagtatgttacatctttgaaaatagtggcaccagccggcgtaacatagggagacccagtctcaaaaataaacaagcaaataaataaaataatacgccgagcttggttgtgcgcgcctgtaatcccag

SEQ ID NO: 222782 - DNA, 363 bp, Homo sapiens
  chr5:180100915-180101278
  hyper
tgcgcgatgtggctgcgggtggggagcgggcggcgggcccgggacaccgcggccactgttctagccccgcctgggccgcctgaccgcggctccgctgcgccgcagccccgcgcccctctggctcctgttcccgggcgcggggagaaggcggcggggcgcgcctgggcccgcgcgggtgcgaacgcgaggtctttcctgggtgctcccaggtcggaggattcccagggcgggggccatcagggtggcgaggaaccggcagggaccagcctccgctaggaccgcgctcgtggagcggggaggctcctggatcacgtcatctcctgctcctcacagatgcgggaggaaaaacggaggctcccaggg

SEQ ID NO: 222783 - DNA, 683 bp, Homo sapiens
  chr5:180479642-180480325
  hyper
gtcggcgctgcccccggccacgtcctgcctgcgggcgggtcctccctggggagccgggagggacgtgggagctgcgaggccgcgcgcacgtggttcggttctcacttcttccaaaagcgtggtaagaaccgagggagaagccggatgtttgcaaacaagcgaggagacgacttgcggaccagacggcgcgggtgcgagcaggagctccccggacatccgccgccagccaagcccctgggaccctcccgcctgcggacgcggggcgagggcgggaagacgcggggcgagggcggcgctgcggccgcagaagcctcgagccgggctggggcgcggttccctcccgcacgccccgcggcgcgcccccgccccctccgccgcgcgcgcccccgccccctccgccgcgcgcgctcccgctccacgcccgtttcccaggcggctgcggtggcgcccggagaaggtcccgcgggaggtttcccggcacgcggcgggcaggccggtctcgcctctcggtgctcagcggcgcctggaccgacacggcccccgcgggtgttttccagacgtgttcgtacccggagcctctgcgtggaagagcgcgttcgtcgcgaccctgccgctgctgttggtcctcgcggcgctggcgctgggcgtcctccggaagcagcggagaagccgaggtaccggcg

SEQ ID NO: 222784 - DNA, 180 bp, Homo sapiens
  chr5:180480417-180480597
  hyper
ggaaggggcgggggcgcgcactcagccctctccgctcccgtttcccttcagaaaagctgaggaagcaggcggagaagagacaaggtgagcggggacagggcgttctgcacgcacctgcccaagtgccaaaacccgccgtcatctaaaggctgtgggtcccgttacgagggtttattccag

SEQ ID NO: 222785 - DNA, 300 bp, Homo sapiens
  chr5:180480641-180480941
  hyper
ccggtggggaagggggaagatcgttcatatggacaaaagcggaggtgcggaacggctgcattttccacggaggctagtgcacagatgtcagggttgaccggctgctgtcgttacgccctcggagcttcacatcacactgtacagagggagcggtgaccagggtctctgctgccagcgccacctcgtccaggttttcatagcgcacagggagtcgggcggatgcgcaacatctccgcacagggtcaggaagcggcggtcaggcaccgagaaaacagcccagttacgtgaggcagtgtccgg

SEQ ID NO: 222786 - DNA, 354 bp, Homo sapiens
  chr5:180527466-180527820
  hyper
ttcctgcagcccgccgagctgttgctgtcgccctgggagcagggcacgctcttgaccatccactcgcagatctgcgacagcgcgagccgcttctccgccgagctctcgtcggccctggtgctgaggtcggcgtgggacaggctgcgcgacgcggtgcgacgggacgagctgcccctgcgctgctgcccggcggaggcggggtcccgggtgggtgctgcggcgcggcgtcccggcgtccgcaaaagtcctcgctgtcctgcagcaggctcgggttgctcatgaagtcggcgctgacgggcgggactggaggtggccgcgtgggacccgcgactggaaatccgggtgcacctccgc

SEQ ID NO: 222787 - DNA, 326 bp, Homo sapiens
  chr5:180673932-180674258
  hyper
gctgtgccctgtcctcgcccagctcccggcataggcatgcgctctgggccggggccggggccccccgcctccccgggaggaatcgctgggttgactctgggtcagcaaagggagcccggccctttctagcggggggacgtcctgcagccgctggaggaggctgagtcacgcttttcccaccagaagtctacctgtgcctgcgcccgccggacctgccggcctcttccttctcatccagggggcctcttctccagcctcacggaggtgggaagcttgctggaggcccctacctgccttttggggaagaccccgaggctggcccacgc

SEQ ID NO: 222788 - DNA, 300 bp, Homo sapiens
  chr6:391517-391817
  hyper
cgggcgcggcgcgcggagggtcgccaagggcgcgggaaccccaccccggccgcggcagcccccagccttcacgccggccctgaggctcgcccgcccggccggccccggctctcggcttgcaaagtccctctccccagtccaacccccggcccccacaggcctcggcgccccgccccgccccaggccccgccccagagagttctataaagttcctctttcccacctcgcactctcagtttcaccgctcgatcttgggacccaccgctgccctcagctccgagtccagggcgaggtaagggc

SEQ ID NO: 222789 - DNA, 1920 bp, Homo sapiens
  chr6:391867-393787
  hyper
agcgcgaaccagaggttcgacctccagggcagcgcagggtaccccggcttcggagcgggaagggagcgcgccccgtcctggagctccgactcccaccccatctgcgctgagccggaggcgctggtttgggctccaaggcccgcctccttggctctgcccgagcctccccgcctgccctccgcgctcctgcgacggggtcgccacaagctggacgggatgagctaaccggactgtcggggccccaggagtggctgaggcggggccgtccaaggcacccacacaagacggcacaactgcctgcgagaaacaggcccggccctgtggaccccaatccgaggctccttcccctgctcttcgttcctaaggggcccaagctcacggcggcctccggcgcggtgctcacccgctggcgcaggaggaggaggagctccacatttgggtcgctccgagccttgcgtgcggtggcctagccggcctggcgcggtccctgcctcccaggctccgcagctgtcgtcgccctctcccgcgccctccccgcctccgctctcccgggcctgctccggggtccggcggacgctctgcgcgcggaatcccccgtactggggctgcagcccccgcgtctgcgccacttgtcgtttgcagagcccacttagtgcgcgctagctgggcagggataggggtcctattcggggcgaagggtctggatgcgagcagagaaagcggagggtggaggaacccggggctgcgcccctggaacgcccggccgcaggcgaggtcctccgcgcgtggaggccgccaggggagtggaaactgacagagtcgcggggaaggggcgagaagcgggttgggagtgagcgaaggcaagcgagagctgcgagtgagtgcggaaggagggccaggaggggtggcggctgggtggggagagagggtgcaagacgagcggcgcgtgtcgggagcctttgggctgcgggtgcgttacaggagagcaggcgggtaggagccttcgcgggggccgagctcggaaggcggacggctgtgcccgcccaggggatgcgcccgggccggccgcgaaggtgccttcttccgggggcccggacgaccctgacacggcacgcgcgcgcttcgcagcctcaaagactccggggcctcgtggtcactggcgcaggggatcggggcggggtgcccggagtgcggtgcctcgtggctgaagggcagctcttctccccgcagtgcagagcagagcgggcggaggaccccgggcgcgggcgcggacggcacgcggggcatgaacctggagggcggcggccgaggcggagagttcggcatgagcgcggtgagctgcggcaacgggaagctccgccagtggctgatcgaccagatcgacagcggcaagtaccccgggctggtgtgggagaacgaggagaagagcatcttccgcatcccctggaagcacgcgggcaagcaggactacaaccgcgaggaggacgccgcgctcttcaaggtctccggcctcgggagccggcgggggcgcgccggggagggcccagagacagagcccggggtccccggcgccgcctccgaggcgagcccaggggaccgcgcggggcggacgggcgggcggcggaggcatcaggtggcgtcgccggagccgcaggaggaggaaaggaggcctcggctctcagcgggaccgcgggggccgggagccgggtcctgggcgcgtggaggctgcagggaaaccgctgaaggcccggccgggcccggggaagggcggccaaaggcttgaggggttttgcgcgttcgtccgtgcgttctcgtttccacgcaagcctcccgcccttcctccgggctcccgtctgccgcctccgtccgtgggtccccctcgccctctccgtgcgtccgcgcctgtgccggcggctgttt

SEQ ID NO: 222790 - DNA, 240 bp, Homo sapiens
  chr6:711022-711262
  hyper
cgggacgcggcctggtgcagggacgctcacttccagtggcatttcccgtcttacacgatgagcttcatccacgttctccataaccccctccccgccacgggaagcgtcagccacctggaacagccctattctgctcggttgtaaaaagcgtcaggcgcttttgatttgaaaagcgttaggcctgggaatcgctgttgctccctcggtgggcacgccctgctgacacgccctagcccaccg

SEQ ID NO: 222791 - DNA, 180 bp, Homo sapiens
  chr6:1379291-1379471
  hyper
aggggcgcgccggcccacgcgggaccgagttcagaggactctgcaccgtcagtttcagggccgacgtttatagagcgcttcccacgtgccgcacgcggttctaagagcttggcttgtattaattcgtttaatcctcccagcaacactgttaggcattataatgatcccaatcgtagaagt

SEQ ID NO: 222792 - DNA, 360 bp, Homo sapiens
  chr6:1379630-1379990
  hyper
tttcagagccaggctgcgagcctacagggtagagtaggggtgccgggccccctggtgtcctggcgtactcggggggaagacagtcgccggccgccgggctcctgccacgctgtggcgcgcgtggaaggtgagggtcctccgctgtcccgccgcctcccacagggcggcccagagcctgcatcttttgcaaagggaacataggatggagagaaagaaagtcccgcctgaaataagcaaacgcggtggcggctttgcggtcggccacgtccgctaggaacccgcgaggcgcccttgcgagctgcgcagtcgagttttctttccactgcactttcacgttctgccggatgggatttcgggggc

SEQ ID NO: 222793 - DNA, 480 bp, Homo sapiens
  chr6:1390692-1391172
  hyper
ggccactactggaccatcgacccggccagcgagttcatgttcgaggagggctcgttccgccgccggccgcgcggcttcaggcggaagtgccaggcgctcaagcccatgtaccaccgcgtggtgagcggcttgggcttcggggcgtcgctgctgccccagggcttcgacttccaggcgcccccgtcggcgccgctcggctgccacagccagggcggctacggcggcctcgacatgatgcccgcgggctacgacgccggcgcgggcgcccccagccacgcgcaccctcaccaccaccaccaccaccacgtcccgcacatgtcgcccaacccgggttccacctacatggccagctgcccggtgcccgcgggacccgggggcgtcggtgcggccgggggcggcggcggcggcgactacgggccggacagcagcagcagcccggtaccctcgtccccggccatggcgagcgccatcgaatgccac

SEQ ID NO: 222794 - DNA, 180 bp, Homo sapiens
  chr6:1391248-1391428
  hyper
cgcccagcagcaaccccgccgcctcggcaggcctgcactccagcatgtcctcctactcgctggagcagagctacttgcaccagaacgctcgcgaggacctctcaggtaacgcagcacgctccagcccagccagctgggcgcaccgcttctaggcctccagggctggcggccactgccact

SEQ ID NO: 222795 - DNA, 285 bp, Homo sapiens
  chr6:1393800-1394085
  hyper
ggcccctgagcagccgcctcgctccggcattgcggggacacggcggggctgaggccacgagagcagggcccgagcccggcgggccgtggttacggttttcttgcactgaaaaactgaatccggcccgaagcgacgtgcactttatggtccccacaccactcggttaactaagaaaagacccgggcgaatggacctaacgcagcccggtgccgagagggcccggtccagcagcctctggggcccagtgcgcagggcactgcgggccgattgcgccccggggccagg

SEQ ID NO: 222796 - DNA, 618 bp, Homo sapiens
  chr6:1604913-1605531
  hyper
tttctgctgacgctcgcggggaagcggcgggaagcctgtgaggggcggcctgggagcagacggaccaccaggtcaccggcgcgcgctgccaggcgccgacccactcgcgaggaccagcggttcccggaggcgtcggccctcaggtcctcgggggaggccggctgcaccgagccgggtgtcggccttgtccctgtcctgagaggtgcaaacaccggccccggcccaggcccccggggctcctgcccagaaggctcagagctgggggccgaccgcgccttacccgcaggaggcccggcggtgcgtccgcgttggtgccactccccggccggggtgagggacgtcggaaggaaggtcccagggcgcagggttccgcgaagggagcactcggaaggaaggctggctgcggccccggcgcctgggtccgctgcggcgccgggccggagacctgggaacagccagccacctgcaaggttgcagcccacctcaccccgccggcggctccggggctgtctgtgggtctgtctcacggggcaaagcctttcttcccacacccacagccaaggcgcgtccgtgcaggggcacacgccttctgctccagccccaggaaggcgctttcgc

SEQ ID NO: 222797 - DNA, 1140 bp, Homo sapiens
  chr6:1610664-1611804
  hyper
gcggcgagcgggggccatgcaggcgcgctactccgtgtccagccccaactccctgggagtggtgccctacctcggcggcgagcagagctactaccgcgcggcggccgcggcggccgggggcggctacaccgccatgccggcccccatgagcgtgtactcgcaccctgcgcacgccgagcagtacccgggcggcatggcccgcgcctacgggccctacacgccgcagccgcagcccaaggacatggtgaagccgccctatagctacatcgcgctcatcaccatggccatccagaacgccccggacaagaagatcaccctgaacggcatctaccagttcatcatggaccgcttccccttctaccgggacaacaagcagggctggcagaacagcatccgccacaacctctcgctcaacgagtgcttcgtcaaggtgccgcgcgacgacaagaagccgggcaagggcagctactggacgctggacccggactcctacaacatgttcgagaacggcagcttcctgcggcggcggcggcgcttcaagaagaaggacgcggtgaaggacaaggaggagaaggacaggctgcacctcaaggagccgcccccgcccggccgccagcccccgcccgcgccgccggagcaggccgacggcaacgcgcccggtccgcagccgccgcccgtgcgcatccaggacatcaagaccgagaacggtacgtgcccctcgccgccccagcccctgtccccggccgccgccctgggcagcggcagcgccgccgcggtgcccaagatcgagagccccgacagcagcagcagcagcctgtccagcgggagcagccccccgggcagcctgccgtcggcgcggccgctcagcctggacggtgcggattccgcgccgccgccgcccgcgccctccgccccgccgccgcaccatagccagggcttcagcgtggacaacatcatgacgtcgctgcgggggtcgccgcagagcgcggccgcggagctcagctccggccttctggcctcggcggccgcgtcctcgcgcgcggggatcgcacccccgctggcgctcggcgcctactcgcccggccagagctccctctacagctccccctgcagccagacctccagcgcgggcagctcggg

SEQ ID NO: 222798 - DNA, 480 bp, Homo sapiens
  chr6:1611823-1612303
  hyper
ggggccgcggggggcgcgggcggcgccgggacctaccactgcaacctgcaagccatgagcctgtacgcggccggcgagcgcgggggccacttgcagggcgcgcccgggggcgcgggcggctcggccgtggacgaccccctgcccgactactctctgcctccggtcaccagcagcagctcgtcgtccctgagtcacggcggcggcggcggcggcggcgggggaggccaggaggccggccaccaccctgcggcccaccaaggccgcctcacctcgtggtacctgaaccaggcgggcggagacctgggccacttggcgagcgcggcggcggcggcggcggccgcaggctacccgggccagcagcagaacttccactcggtgcgggagatgttcgagtcacagaggatcggcttgaacaactctccagtgaacgggaatagtagctgtcaaatggccttcccttccagccagtctctgtaccgc

SEQ ID NO: 222799 - DNA, 209 bp, Homo sapiens
  chr6:2999193-2999402
  hyper
tggaaaaagtcggcccaaactgttcaccagcaccgccccccataactccccaccggctctggtttcaagactttccgttttctaggtatttccttggccttaaaccattttcctttaaacgaactttttctgtgaagccatccggtttcccccgatagtggcatctcacaaaggacaatccagtatcccaacagcgtgttgcgttccgc

SEQ ID NO: 222800 - DNA, 254 bp, Homo sapiens; identical to SEQ ID NO: 200241
  chr6:3162842-3163096
  hyper

SEQ ID NO: 222801 - DNA, 600 bp, Homo sapiens
  chr6:3456661-3457261
  hyper
ggggcccgcgcgtcccccgaggggcgccgaggccgccgcgtccccgggcggcagggagccgttctcctcggccggggccggctgccgcccaggcccgccgcccgccgcctcgcgccgccggtctatggccatggcccgggcccgcggctcccgcagaggcgcatagagcgcggcggaggctccgcgggcgccccgggcacagcgcgccgggccaggcgcctgcagccgctgccgccgaggagggcccgcggctcgagagagagcgctcggcggctccgggtgcgtcaggccgcccccatgtcacccgccggaccccgcgccccgggcgctgcggccccgctcgggcgccgggcagaggcgggcagaggccggccgggccctcagccgccgcggctcatcagttccgcggcccgggcgccggctgccgagcccgccgctctccgctgctccgcgccggacgcggcaggaggaggagccggcgccgcgcccggcccgcgcccttgccggcggttcagggccctgcgggcggcggtgcgggcaaaggctgctgctcccggggtggccgcgctgtatttctccgacttcgggcgcctcccggaa

SEQ ID NO: 222802 - DNA, 706 bp, Homo sapiens; identical to SEQ ID NO: 200247
  chr6:3457537-3458243
  hyper

SEQ ID NO: 222803 - DNA, 715 bp, Homo sapiens
  chr6:3750700-3751415
  hyper
cccgcaattcttcccgtctcaattccagtccctctctcttgcgtcctcccggcttccaccccctcagcctggcctccaaaagaaagatcgggcagagcggtaggaaaagggaagccaccgcggtttctgaaaacaagaattcccgcgagccaggacggtcacgaggccggggaggaggcggcgcagctgatcaaacgcgaatggggaccagccctggcgggggtgcgggggggccctggctgtccgcggcagccgcgggcggggcggccgctccgaggagggacggaagggctgcgtggcacctcgcgctcgaagaccaggggcgcgccctccgcggggagaactcggggcggcggccagacccgacgcgacccccggctcggaccctgcagttaactgctcccagacgctttcccagtgcgcccgcccgccggccctcgggaggtaccgggcagggggctagggccgggccgaccctgtgagccgctcagccccgggcgcccccgccctcctcggaagtgactcgtcctcagggagagtccggcgcccgccctgccggcctcggcccctttcccgccccatttggctcctccgccgggggcgcccccaggctgggcaggctggctccccgtccccctaaccccgccgcccgggcacccctcgtctgcgggcgcggggtccaagtgtcccctgtccagggcgggcagaaaggaga

SEQ ID NO: 222804 - DNA, 180 bp, Homo sapiens
  chr6:4775348-4775528
  hyper
ggttaggaactggagcgagatggagcacggaggagtgaggcggcccgaaggatgcccggggagacatggaggaactggcgagggcttcccgatgcagggcctgggggagagggtgaactaatgcctctgcagtgccccgtggggaagttccgcatactcggccagagtgatcggagttgg

SEQ ID NO: 222805 - DNA, 660 bp, Homo sapiens
  chr6:4775604-4776264
  hyper
gccctggcagtagatcttccctgggaagtggagcgcgggccagccctcgctgttctgagcgagggcctgtcgtgtagtccacaccgttccgcgaaaggaaccaccattgacagcctcgttcgattagaacccggacctccctggaatccagactcggtcccttcccagctgcgcttcggaggaggcggacgctccgagaggaacccagaggcctggcgtggggggagctgcgggcagagcggaggcagccgcgccctcgcgccgccctccgccgcgcccggctcccgccccccggatcccacccccggcctgccgcggagccagcgtgccagccggagctcgccgggccaccccgcggggcgcgcggcccgggctccgggtcttggcggcggccggtggggcgggcatggggtggggtgggtgctccacctggccacgccgccggcccttcgcgggctggcccggccccggacgggcgggcgcacggaggccgcctcttgggctcctcctggagggaggcgcgcggtagacggcgcggccgctgccgtcggggcggtgggctccagacgcgggccggctcgctcgcatggttccctgccccatctcgggtccgtcgctgcccgtcctggtgtgcacaaccgcgctgcgcctcgaacctcg

SEQ ID NO: 222806 - DNA, 54 bp, Homo sapiens
  chr6:4949428-4949482
  hyper
ggatggcacggtctgacgcccacaggctcccacgtggaaatcttgcacctctca

SEQ ID NO: 222807 - DNA, 797 bp, Homo sapiens
  chr6:5085648-5086445
  hyper
ggcccgaggagttagttaagtctccagaggggcccggttcggcccgagcaagtccaggggcgaacggcgtcatggagcccataggggcgcggctaagtttggaggcgccgggaccagcgcccttccgagaggccccgccggccgaggagctgcccgccccggtggtcccctgtgtgcagggtggcggcgacggcggtggcgcttcggagaccccgagtcctgacgctcagctaggggataggcccctgtccccgaaggaagaggccgccccccaggagcaggaggagctgctggaatgccgccgccgctgccgcgcgcgctccttttccttgcccgccgaccccatcttgcaggcggccaagttcctgcagcagcagcagcaacaggcggtggcactgggcggcgagggggcggaggacgcacagctcggcccgggcggctgctgcgccaagtgcaagaagcgggtgcagttcgcggacacgctggggctaagcctggccagcgtgaagcacttcagcgaggcggaggagccgcaggtgccgcccgccgtgctctcgcgcctgcgaagcttccctatgcgtgccgaggacctggagcagctcggggggctgctggccgcggcggcagtggccgcgcccctttcagcgccgccttcccggctccggccgctcttccagctcccggggccgagcgccgcggccgagcgtctgcagcggcagcgcgtgtgcctggagcgcgtgcagtgctcgacggcctcgggcgctgaggtgaagggctccggccgggtgctcagctgc

SEQ ID NO: 222808 - DNA, 501 bp, Homo sapiens
  chr6:5999559-6000060
  hyper
taccttctcttcaccgccctggcgcctggcctgcgcgaggtcgggactcgcgggacctccgcctaccccagaagcggctgtctaaagcgggggtgggggggcgccccctcctgtctggttttcccttccagttgccgggagaggactaggcagccgggagccgggccgtgcacccgctgtggcgcgctggcacctcggcctccgcaaacagattgctcgccctcctcggggaaagctaggaaaacagtgctaagcctcgcaagctgccgcccattaatgcctcttagcttgcaagatgggttactagctctgagcacggccctcccctcggggcttcttacattctcctccccctcgccccttctgtctccctccttctccacgccgcggtactctcgccttcgccctcattctctccctccacctactacctcttccttttgttttccgttctcctgaatttccctttctttctttttccgttccgtctgctttcctctc

SEQ ID NO: 222809 - DNA, 245 bp, Homo sapiens
  chr6:6009408-6009653
  hyper
ccaacccctcccctgtaactctgagcgtggggcgctggggatgtggagtaggcagggctgagggcctcaatgaagcgggtgaacccacgcgcgtgcgcacagccgcccgcgccgcgccccgggccgatccggttcttgcccttgggacgtggctgcgcctcaccgccctaccccgggagggaacccccgctgactttttcctctcttcattttcctccccaggcgtcccaacctccctcataggc

SEQ ID NO: 222810 - DNA, 678 bp, Homo sapiens
  chr6:6546387-6547065
  hyper
gcccctggcacagtcgggtccttaacagctcccgccccagaagctgccttcggatgaacagccgggtgaatcgccatgaaaaattaatcagcctccgcctgtccgcggcctagatgggcgcaaagcagatgacctggcaggaaccagccgcagtgaagccaccgcaaccgcagccgcagccgcggaggggaggccgtgcacccgcccgccgggagagccgcgcgcctgagccgggcgcacgtgggaagtgggccacgagactggagtccaccgagatggaggccccggcactcgggctcaggcctttgtgcttagcacgtactgttggaatccagcacgccctgctccggcgggcgcctccgatcctgaagcgcgcacctgggaactcacgcaccgcccagccgcgaggggcttggcctggctgaaagccacattattctcgaaaacaaccgtgggaagcacacgctgagctcccggggcccctagagtatgcaaagaggccggccctgcgagactaaataagtctctccccctaggacctagtcccttgccaccggctcccgcggccaccgcgcagccagagtgcaccgtccctagggctttggcggtggccagagccagcaagtgcggcggcctggagctggggtggtgagggcggatggcaggttggagaaatgc

SEQ ID NO: 222811 - DNA, 180 bp, Homo sapiens
  chr6:6547096-6547276
  hyper
agcccctgccatctgggcactgcacagacagacgctgcgtgagacctggagctcgccacctccatgcggcgctgccagccactccgctgcgggtgcaggagcgttccatgtcggggactgagggaccagcgccggctccccagtttctctgcattgtgaagtcattttcttaaactcggg

SEQ ID NO: 222812 - DNA, 1010 bp, Homo sapiens
  chr6:7051650-7052660
  hyper
gcctctccaggcggcgtcccccgagggcggctgcggcgcggagccgggcggtagggcagcagccctgcggcggctcgggaagaacaacttgtgcgaactgggccgcgcttcccccgggcgctgcatccgccttccgagatgctggcagcccgggacggcctagcgcggccctctccttatttatccaccgagcacagtttccatggttccgccgccatccttccgcccccttcctcgcgcggagcccagcggcagtcgagggcctggctggtgtggggctgcggggtgcgtgcgcggcgcggggcccgggcgtatttttcaagcctcggggcgcgtgggtgcgccccccaactcctgtcccccgagaggctgtgccacttccgcagccccagcccagtcccttccccactgggccgcacctccagtctgcccgcaaggcgccgcgcagcccccggcccggcccggtggcgcgggggaggggcgcgccgggcaggcaaagttgctgagttgctctgcacgctcagaagttgcagctgcgacggcagcttccctcccccttcctgcactgggctacccggaacgcacacccacccgtcaccacccgctacctgccctcgcccctgcggccccggccgggactccacagcatccccaccctgcgcccgcgaggagcccaggtttccagcggagttgggctgggggcgggcgcaccccatctccccgctccgcctcgggggaggcgggtgatgcgtggagggggtggttaggatcccctctaccgagtcgccgcttgcctgcggcgcttttgcactttcctaagctgagcagctgtgcaggcgtcgcccgccggcccctgcgccctcctagcaaagcggggtttgcagaacgggaactgggcggtcttcccattccctcccgcaaggaattttgctgtgagggtggagagggggcggcggggggctcggcttggggctgaggttgccaacaggtgctcgcgggtccatgtgacc

SEQ ID NO: 222813 - DNA, 240 bp, Homo sapiens
  chr6:7541551-7541791
  hyper
gccacgcattcccagcccgagaggccccagcgcagagcgcagcagcccccgcgagcgcaggtcctccccgcggtggcttcgcccagggcgcttgggtctcggggaccccgcccccgccccgcccggtgttactcaggcctcggtggcgcagggcggagtcgcgggcggcgggcgcaggtggggaggggcggccggagcgcgtcggtgacacccgcgggggggcggggaaggcgcggcggc

SEQ ID NO: 222814 - DNA, 1200 bp, Homo sapiens
  chr6:7726874-7728074
  hyper
cagtgcagcccggactcagacgcacctggcctggaccgcgcgcctctagagacctgcgcgaggctgtgaggctccccttcctcccctccaagcggttctcctggtgatcgccccttcgccacctctctagcctgggcaactgggggcgccccggacgaccatgagagataaggactgagggccaggaaggggaagcgagcccgccgagaggtggcggggactgctcacgccaagggccacagcggccgcgctccggcctcgctccgccgctccacgcctcgcgggatccgcgggggcagcccggccgggcggggatgccggggctggggcggagggcgcagtggctgtgctggtggtgggggctgctgtgcagctgctgcgggcccccgccgctgcggccgcccttgcccgctgccgcggccgccgccgccggggggcagctgctgggggacggcgggagccccggccgcacggagcagccgccgccgtcgccgcagtcctcctcgggcttcctgtaccggcggctcaagacgcaggagaagcgggagatgcagaaggagatcttgtcggtgctggggctcccgcaccggccccggcccctgcacggcctccaacagccgcagcccccggcgctccggcagcaggaggagcagcagcagcagcagcagctgcctcgcggagagccccctcccgggcgactgaagtccgcgcccctcttcatgctggatctgtacaacgccctgtccgccgacaacgacgaggacggggcgtcggagggggagaggcagcagtcctggccccacgaagcagccagctcgtcccagcgtcggcagccgcccccgggcgccgcgcacccgctcaaccgcaagagccttctggcccccggatctggcagcggcggcgcgtccccactgaccagcgcgcaggacagcgccttcctcaacgacgcggacatggtcatgagctttgtgaacctgggtaaggatttggggtaacgtaatgacgagaacatttcccccttttcagtgtcccgggcccaggggatggagtgagggggtggaggagctcccggcgcgcgggtcccgcctggtgcgccagagaacgcggggacaggcaggctgtgctcccgccacctgcgcggcggtgggcggcacatgcgctcccccgcgccgcgggcagggctgcgcgccgaggccccca

SEQ ID NO: 222815 - DNA, 1222 bp, Homo sapiens
  chr6:11043633-11044855
  hyper
gtgaacacacacacacacacacacacacacacagcttactgtcaggcagttcatcggacacgggtgaacacacacacacacacacacagcttactgccgaggagaaagaagcgttactaatccagagtggaggactggcctgggaaatcgggcagagagaggagttgtcggaaagaacacaccagaagcccctccgagcccagacactgatagaaacccagccgcttcccaagccaatctgcaaacccaggaggcacccacgagtgcacagacacacccccggggtgcaggcgcggtgaagggaggagaggggcaagagcttgaccgttagggcccgaaccccagaactcccgaggcagggtgtgtgccgcgcgcgggaaacgccgttctccgctccaggcgtcggcgggcggtggcgagagcaggttcgggggtccggagggtcggagggtgggctgcgcgcgggaatggccgccgcgaaggaggggcggcttcctcgggcatcccgggcgcccggccccgtgcatgcaacaggggactgggcgcgagcgggcgcctcgaggtgccggggcgggaccggggagaggggaccgagacaaagttcccgagacccgcgggcctcgggccgacccgcgcgcccccggcccaaacgctcagctcccgctccccaggcccgcgcggacccggcccctccgagggtagcgggttccagcggcgaacccgcagcgcccgcgccggcgcccgctcggccctttcccgcccggtgcgtgggtccaggagagaaagaaagcgcggcggtgtcggtggcggcgcgcggccccactcaccatgatccgcagcggctgtggcgcggcgacccgggcgggcggcgatgcgctgtccagggtagccgggtccctctgcccggcgctatctcggcgcccgcgccggttacccccacccacacccacgcccggcgcgcgcacacccgcccgcgcctccccgccccctcgggctcgcgccgccgccgcgcggcgctccgagcctcggggccgtttcgtccccgccccctctcccacaggggcctcgccggccgccgcgccaggagggcgcgcgggggaggggcgcagggcaagtgaggcggcgccccccgcccctgcggcctcgcgcgccccctcctgggcgaccgacctcgccctcgcgtccgcggcgtcccctgccggccgggcggcgatttgcaggt

SEQ ID NO: 222816 - DNA, 326 bp, Homo sapiens
  chr6:11538581-11538907
  hyper
cgggacggtgctgaggaacctcacgggtaattgacgcgcctgggctggggacggggatgcggtccgcccctctcctgtcttctccttcctcgggaggggacacgctcctcgccgccccacccccgtgcgcgccccgctcggagctccaggtcccggcgaggaaggtgttaatcggagccactctgcgcgtgtcccgggggcgccggctcccgccacccccttccctgagtcgccaggggagcatcagcgacccccgctcctgccccgcacggggagagctcccggtggcggcccggcctctgtagtacgcgcggagtagctttagt

SEQ ID NO: 222817 - DNA, 180 bp, Homo sapiens
  chr6:13488394-13488574
  hyper
agggacttgcgcaaggtgacatatataagcaacaggcctgcgattggaatccaggccccagagtctgggcacggaaccgcagacttctacggtctccttccaagctagcctgctccaatcgcgcgcccccgctccggccgcgcacgcacggttcagccgccttcttccaagacagtccag

SEQ ID NO: 222818 - DNA, 146 bp, Homo sapiens; identical to SEQ ID NO: 200285
  chr6:13574018-13574164
  hyper

SEQ ID NO: 222819 - DNA, 142 bp, Homo sapiens
  chr6:14117536-14117678
  hyper
tcccaaggacaggctgggcttctgaggaagttgcccaccctctcggaatctggtttggcctccgtaaaatgggcagatcccgctcggatggcccggttcccggcttccttttgcgggtcaacggcagcgtcacgcgcgcgag

SEQ ID NO: 222820 - DNA, 128 bp, Homo sapiens; identical to SEQ ID NO: 200288
  chr6:14211103-14211231
  hyper

SEQ ID NO: 222821 - DNA, 576 bp, Homo sapiens
  chr6:17281020-17281596
  hyper
cagccctaccccatcgccggctacagagcgggagccccgagccccagcgccgcgccgcgcggggagagaagcagctgttcccaacagctggggggcggcggcgcccggcgccccaggtgctgccgcggccaatcgcaggcgtccggcccgcccccctccccagccgggcgtcgacccccggcccgcgggggaagggagcagagaggtggagagctgtcctcggcactcgtcttccagatcccacggcgggagggacagaccagagccgaagctgcgcggagttcctcgcccctggccccgccgccgcgccccccgcccgcttcggcgctcggacgctcttcccgcggaccctccccacaccccacccaaggcacctgattcctaaggaagaaaaatctacctctaaagcacccgcttcttcgcttgagaactaccctctcttttcatttttggcctccccgccgggtgagtggaaaccgcttgcacattctatagaacccgattctaatccagacgatccggagaatttgtacggtgaccggcagggggggcgggaggagagagcgaagtcaagtc

SEQ ID NO: 222822 - DNA, 156 bp, Homo sapiens
  chr6:18263766-18263922
  hyper
tccaagacctacaaacttcccgtcaaatgatgaaatgttaacgaacgtttagagcggacgagaagtcggctgcactccaatacatctctaccacgctaacaaatactttaaaaaccggaatacacaaagtcaattctacgccatcgctcaaaacaa

SEQ ID NO: 222823 - DNA, 1239 bp, Homo sapiens
  chr6:18264001-18265240
  hyper
tgtttcctgggtgaaaaatacaaaaaaacttcggtctgaaaaattcatcagttgggatgcgactccccccacctttttcctcctcctcctcctcctcgtcgtcctcgtcctcttcctcctcgctctcctctctgggaccgggcatttcgggttctttctcggacgcgggctgggtgggggttccctccccctccgcagcaggggccgaggcggacatgctgtgaacctgcatgcgggaagaaagccggacgtctcggtcctcctactcccgcaggcaggaccgggcggccaccctgaatgatgctacccttcccgcgggacacctgccctgaaagttgcctcctcccatagccgggaccgcagcgctcagtccccaggggcggcttccctcccgctccgccgccgccgtccagggattcccgaggcgggaaaccgcgcccgctgccccgcgtgcgcgcgcgcccgcccggcctgcgctgttcccggcccggcccgagctgccggccctccacgtcccctcccccgccccaggccgccgtccaaatggccgcgtccctcccccgtcggccgcggcaggggcgaccgggcctccggcgtcccgaagcagcccttaccgcggatttcggccgccgcgggcctggcacgcgagggcacgaggaggttctgggaggcggcggcggccgacgccgaggagaaggcgcgcgggccgctgtctggcgtgacgctcgcgccgcgcgctcggctccccagaatcaacaagattttcaaaatggcggttcgggaaggagagcgggaatgcggcgaccaatcagggccgcgagctgggagttggcgggcgcggggcgggggaggcggggcggccgggtgcctccgcgggaagctcgggcgggcgggaccgcgaggggtcgcctcggccgcgggcggagggatgcgcgcgcggggctctccccggctgcgcctggagtgtggtcggcgctcgggccccggagtgcgggcgggctgtgtcccgcggggcgggcgggagcgggaggcgaggcggcctggcagcgcggaacggaaggacgctagggggcctgcgtgtttattgtttccacggtcgcttcctggaaaagatgatgagcagtcccgggccgcggaggggcgcggcgggcgcggtaaagaagtttagagatctccgaagtcgctatcgacagtgttactctgaggcggaggagaattaatcagcggtctcatcaatgc

SEQ ID NO: 222824 - DNA, 647 bp, Homo sapiens
  chr6:18277435-18278082
  hyper
cctaaagagggtgcgtttgtggggaaggtgagtgcgcgcgcgcggagggagggccggccgcggagaggggccaaaactcttcggaatcagcagccagagaggctctgagggcgcccgcggggcggaggggagcggggcagagggccgccggggcgagggccgaggaggggtccgagacgcgccaaggggctggtagctaggcgacctgaatgtcttccatacctgaacccgcagcctgaagaagctgatagcggaccccgagcgcgcgcgcgccttggcgggagccctgcgcctcccggggtctccctgctccttacttggacctcgggcgcaaggtaaggaggggcacggggtgcagcgttcgccctcgagctgcctggagcctctgcgaggggccagttcggcctccccgaggctgtcaccgcctccccttctgctccttccctttctccgtccccaggtcccctccgcgcagagctgaagccgcggcgggcggcccacgggggatcagaccctcgggcatccgcgtttcccctccgccgtccgccggacccccacctcttctccaagctccactcccgacttttcttccccgcccccgggaagctctggaaacccgcacccccggctctgaggtcagggctggc

SEQ ID NO: 222825 - DNA, 600 bp, Homo sapiens
  chr6:20212384-20212984
  hyper
caggagctcgctgagcgggtgcaggtaggtggagcccgtggtgcggtaggaaaggctggacggctgcggctctgctgccatcctgcatcttcgggaggtggctgcccctgtcccagcccgcaacaccccctgctcggcgtcctcccgcccgggtgctcttgggtggttgccccgagaggcgcacggccgcctggttcgcgggggagcgaacgggaggccggggaatgcgaaccggcgcaaactctcgaggcgcaaactctcgaggcgcaaacttggctttggcgctggcgctgcagccacgggcgccgtaggagggccgggcccaaggcgccccgcttcccgctcccttcctctccgcgcccattggcccggccgctcgggacggccccgagaggagggaaggagggaggaaaagtggggactccgagcccggcccccaagcgccgcccggcccgcccagcctggcctgcaccgaggccgaccgggagagggaaagcgacgccagcgggcgccgccgcctggccctgcagctggaggcgggacgcgcctttcctcctcccgggctgaccgtcctagccccccgccagacaaaacgacctc

SEQ ID NO: 222826 - DNA, 1131 bp, Homo sapiens; identical to SEQ ID NO: 200308
  chr6:21594475-21595606
  hyper

SEQ ID NO: 222827 - DNA, 263 bp, Homo sapiens; identical to SEQ ID NO: 200314
  chr6:22146853-22147116
  hyper

SEQ ID NO: 222828 - DNA, 105 bp, Homo sapiens
  chr6:26027558-26027663
  hyper
tattgagaactgaaagcgggagcgaggataaggaggcgttgctgcctcactttttgctccgcccctcgaggggcagtgacctaaggactgcgagggagaacacaa

SEQ ID NO: 222829 - DNA, 316 bp, Homo sapiens
  chr6:26189135-26189451
  hyper
cgcgagtttcctcataaatgaggccagaaatacgcttgacgccgccgcggcgagccaggcggcggatagcgggcttggtgattccttggatattgtcacgcaataccttacggtgacgcttggcgccacccttacctagaccctttccgcccttaccgcggccagacatcttgaaaccacagctgttaaatctgtaacgcaatacgtctggcagagccacgcagcacttttataatagcatgacggacctgtttgaaaacctcatgagaaggggcgggaaccacagtcagttcccgcccttctgtgcaattctccc

SEQ ID NO: 222830 - DNA, 102 bp, Homo sapiens
  chr6:26189980-26190082
  hyper
ccataaggtgctttcaaagtattttaagtaactcatatctttattgtctctgagattatttttattgatttatgcattcctagttaaccaagcagggctctt

SEQ ID NO: 222831 - DNA, 600 bp, Homo sapiens
  chr6:26199088-26199688
  hyper
ttggccttgtggtgactctcagtcttcttggggagcagtacagcctggatgttgggcagaacaccgccctgagcaattgtgactttacccagcaacttgtttagctcctcgtcgttgcggatggccagctgcaggtgtcgggggatgatgcgggtcttcttgttgtcgcgggcggcgttgcccgccagctccaggatctcggcggtcaggtactccaacaccgccgccagatacactggcgcgccggccccgactcgctcggagtagttgcccttgcggagcaagcggtgtacgcggcccacagggaactggagtccggcccgcgaagagcgggtcttagccttagctcgggcctttccgccttgcttgccgcgtccggacattttgaattcttaaaaacgatgttaagcaatgaagacaaaaatgtaaaagtgaattttgttagcaagtgagaaactattatacttggaggtcgaattgtaaataacgctatttgattggctagaacaaccaaccaattgcaaagaaacgctagaatcacctaatttgcataccacagggcacacagagacaattcatccaatcaatgtgtaagctttt

SEQ ID NO: 222832 - DNA, 155 bp, Homo sapiens
  chr6:26199717-26199872
  hyper
aatattaccagctgcagagtgaggacacttgcatttctctttaggttgtggacgaagtgtttatttatcatgcctgaacctgctaagtccgctcctgctccaaaaaagggctccaaaaaggcggtgaccaaggcgcagaagaaggatggtaagaa

SEQ ID NO: 222833 - DNA, 180 bp, Homo sapiens
  chr6:26241165-26241345
  hyper
cattagaaacttgttcaggtatttcgatcgcaaacattcacaggaaaagatggtggaaatggtttgggaataccagcagccttttatgacgtatgtgatgtgttttattcccacgtttctgaaatttactcctatgttaggtggctgggacttaactacactagcattacatgtttagtt

SEQ ID NO: 222834 - DNA, 391 bp, Homo sapiens
  chr6:27219436-27219827
  hyper
aagtggggaacccaaggaggacgcaggtcctgggtagggaaagccgaggcccagcctaagtcttggcggacatcgcctcttgcttcccacagtgccgggcggcggtgtccgtcgccttcgctgaagtggagcggcggctgcgctcgggtggggcggctcaagcagcattgcggacggagctgagcgcttgcgggcccctgggccgcgctgaaaaccaggcggagctgttgggggcgctgcaggcactggtgggaggtgtagtgcagtatgatgggcagacgggagcgccgctaagcgtgcgacagctctgcggacttctcctcgggggcgggggcaaccgcagccactccacgccctactgcgggcttcgtcgggcggtgcaggtgagcac

SEQ ID NO: 222835 - DNA, 556 bp, Homo sapiens
  chr6:27279796-27280352
  hyper
tggggcagggtgggcgcggtggacgaactgaacccgatgaacttggtgaaggggctgaggtggccggcgtttcgtgggcctctcgggcaagtcggtgcgcacctgggctggggacgagggcgaaagttccagtttgctcaggaaactgcccatgaggagagatgaggcgcgggcagtgagttcaagcacggttttggcttccgaggtttcggacgtctgcagaatcggacagagtcgaagagcgcagtgttcggttgacggttgggattcacgcgctaggaaagcgcgagtctcagggtgcttagcactctccaggcccggcacccgcgggaacgggggacacgcgggacttcggcagtcccagtaacttgctttgctgttctgagacctcagcggggcggtcagacctctgctgtctccgcagcgagttgcagtacttggcgcggggagaggaactcgagaggaagctcactgcgcctcgcccctggcgtcggcagcggctgtctgggaccctgtggtccggattcaccaagtggcgcagagctggaatcgagtg

SEQ ID NO: 222836 - DNA, 180 bp, Homo sapiens
  chr6:27280457-27280637
  hyper
gagtggggagcactatccgcaccccgtagagtgagtgcgggcggctttcgcaggtgctcaggactggagatctggaccggtggctgtgccgcccggatggcatttgtggcactagcagtcgggaaagcagctgattgaggatttccgcgtttctctttttttgcagatcgtgacgccgcc

SEQ ID NO: 222837 - DNA, 120 bp, Homo sapiens
  chr6:27440466-27440586
  hyper
tgactcacacccctgcgagctcggataacacgaagacacacctgttgcagagcgttaaagctggaaggtggacaaacagggcggggcccggcacccgacttccccttaggccagaacaaa

SEQ ID NO: 222838 - DNA, 157 bp, Homo sapiens
  chr6:27447416-27447573
  hyper
acagggatttcctaagagctccattttcacgtcaattcctcgttagtatagtggtgagtatccccgcctgtcacgcgggagaccggggttcgattccccgacggggaggaggcttaaacttttttttagaaaagcacacttccggtaaacacagtct

SEQ ID NO: 222839 - DNA, 540 bp, Homo sapiens
  chr6:27805765-27806305
  hyper
gcagcagcacggcctggatattgggcaggacaccaccctgggcgatggtcactttaccaagcagcttgttgagctcctcgtcgttgcggatggccagctgcaagtggcgcgggatgatgcgggtcttcttgttgtcgcgggccgcgttgccagccagttccaggatctcggcggttaggtactccaacaccgccgccaggtacaccggcgctccggcaccgacccgctcagcgtagttgcccttgcggagcagtcggtgcactcggcccactgggaactgaagacccgcccttgaagaacgggtcttagccttggcgcgagctttgccgccctgcttgccacgtcccgacatgacgtaaaaaattcaatcagtaacgttcctgagactgacgtaacgctaaagctccgctacttatagtcaacagaggcacgaaaactaagctgtgctattggctaacattacagtttcgctttaaccaatgggattgcggttttgaaaaacacttattttgattggacaaagttaatatacgtttccag

SEQ ID NO: 222840 - DNA, 251 bp, Homo sapiens
  chr6:28414855-28415106
  hyper
ttaggccagagtggagtgggacaggaggtgcccagagacgactgtggtggcttgagacatggaagcgctgcagcctttgagcccagtatccagcattgcagccgccgcggcggtctaagagctcaaaccctttcaggcgcgcgcaggaggaggagcggcgggggcggcggaacaagacgaccctcacttaacgtggccgctgtcgccgtgggcatgctgggggcgtcctacgctgccgttcccctttatcg

SEQ ID NO: 222841 - DNA, 480 bp, Homo sapiens
  chr6:34112086-34112566
  hyper
tgcgagcgccggggaagaccgaccccggagcggggacccccagcacacacgcgcgtacacacatgcacacacagagaccactgccggtccgctcgcccggcggccgcgtagacgcgcaggttcatcacggtcccggggagggacggtcccgagtgtccggagagagcctgaccctgaagtcctggggctgcagggagaccccagaccctagagacccccacaacctgccgaggccacgggcaagcggttgccgggctccggccgctggcgaaggcggcgctggggcgggcacgggagctggacgcggtgcctgggaaaggagccgaggcgcgcgaggctgggtgccctcccgccgggagactgccgggaagaggtgcaaataatgccccgcgcccccgcctgtcccgcctctccgcagaccgggatgcgctaatgccgccgcccccacctgaaagctggcacgaccctccatccggtgga

SEQ ID NO: 222842 - DNA, 300 bp, Homo sapiens
  chr6:34112610-34112910
  hyper
aagcctctgccccattccctccctcaggggcacccggaaagcctgccttagccccgaggggagaccctctagttcagatcccgcgccctccggcccctagggctccgggggcgccagctctcctcggagcactccaagcgcgggagctcgccggaggccacctccccgagccccgatgtccccgccgcagccctcgccccaggaggccggagggcacggtcccctctgtcggtccccctcgggccacaactcaccgcgcgccagcaaggtttaagccgcggcgaggggtcggctgcgtgc

SEQ ID NO: 222843 - DNA, 215 bp, Homo sapiens
  chr6:34359521-34359736
  hyper
accccacccccacccctcagctttgggctcacagacatataatccctcggcaaaccccaaacctgccaatgaagtgcactatttctctgccacaaaggccggcccgcgcctcgtgcacgccggcctccgcacacatgtgcctggctgacaactgcggagcggcccttccaggatcaaagccgttggcctggaccgaaagccgcactcttcccagc

SEQ ID NO: 222844 - DNA, 1093 bp, Homo sapiens
  chr6:35655680-35656773
  hyper
cactctgcaccctgacgctcgtagtgtctttttggtaatactggtttttgactcttatactgtgaccggtgcacctttttggacgaccaataaggcggaagacgttttcacgtcccagaacagaagagcataaggagccctggcacagcgttcagccgcttcggtatggcctgggagtgacgcggatcacctgttagacggcgctgcgcggactcctccacaagcggccgacagcggcgatgcggttccccaacgcttgtcccgaggcggcaggtgaaggcggggaccgcccgtccacacccggagcgcggccaccccgccaccatccccttcacagccccgccaggtgggcgaatccgccccgcgcccgcggcgtcccggcgctcggctcgccctggggtccggttgtcccggcgcccggacccgaaagcgaagtttggctcccgcccgcagcggtgccggctgagggtccggccgcctgtccggggagagccgggggccagagaccggaggcggagcgggacctgtcatcccgggcgggaaacaaaagcccagtgaggacgggcgggcgcgacccgcctcgcctctgccgggagaggccggcgggggcggagagcggcgcccgcggtcactagtctccgcgcctcccgcggggagcaccggccccgcggcccctggggcgcggcgaggggcgccgcagtggggccgaggcctcccgcgcgctcccctcgaggcttccggaccccgctcccccgcgacacgcggctcctgggctgcgaagccgcgtgggggtgggagctgaggcagcgagtgcgaccgcggcgggacctggaaggagggcgttcggctcccggggcgccgcggccggccgccccatctccgtggccatggcgccggtacctgtcgccgcgggggctcgccgactccgtcactctccgccttgcccgtgctccgctaacccttcagcccgcccagcaggccgcccgcgcgccggacaccgccgcccgagactggcagcgcccgcgagccggcccgaatccccggggcagcgcccggcgccgtcccgccccagccggccgcaggacccgccttc

SEQ ID NO: 222845 - DNA, 157 bp, Homo sapiens
  chr6:37138570-37138727
  hyper
gtcgcagtaccaggtgggcccgctactgggcagcggcggcttcggctcggtctactcaggcatccgcgtctccgacaacttgccggtgagtgggcgccccgcggtggggagggcgcgccgggcggggggcgcacgggcgtgctttagcccggacgag

SEQ ID NO: 222846 - DNA, 180 bp, Homo sapiens
  chr6:37138876-37139056
  hyper
aacgcggccccctcgcccctgcagcctaatggcactcgagtgcccatggaagtggtcctgctgaagaaggtgagctcgggtttctccggcgtcattaggctcctggactggttcgagaggcccgacagtttcgtcctgatcctggagaggcccgagccggtgcaagatctcttcgacttc

SEQ ID NO: 222847 - DNA, 660 bp, Homo sapiens
  chr6:37664811-37665471
  hyper
cagccccgggtgcctcggcgcgcccggcacagcagccagcgccccgacccgaggagcccggccgccgagccgccccgggtacccagggccgtccgcgcgggatgctaggcgccggggacctctcggcggcggaggcggcgcttcgatccaacaggccacggacgactgacaaacttgtcgtttccccgcactggggccgcccctcagcggagcggagtcggggaggccggggctccgctcgagttaatcaatctgctgtttccagtcctgcggccgctgccgtgggctcagcggcccgactccagggggccgggctgaaagcactcgcggcggcgaagcagccccgggcccggccctcctgatccggggagcagcgcgggctgggttcggccgagggacgagcgccgcgggtccccgggtccgtgaagttagccgagccgccgataaacccgggggaagaatagcagcccggcgccccgcgggaatctggagagcaattccaggcaagaagggccccagaaaacggggaaaggaggaaagtttgagtcttttgaaaaatattcgcgctctcgcccaggccggggctgcggcgcgggcgccgctcgccgcctccgctcgccgcgctcctctcccgccgtctggccgcggccgtagccctcc

SEQ ID NO: 222848 - DNA, 105 bp, Homo sapiens
  chr6:37665602-37665707
  hyper
cgctcggctccgggccgcgggagcgctccgctcgctcagcaacttgggctttgctgtgctgctttttcgcccctccgagcttttcattccgcgctcctcccgcct

SEQ ID NO: 222849 - DNA, 512 bp, Homo sapiens
  chr6:37666575-37667087
  hyper
cagctggcggagaggtcgcgctgagagctcctgcccttgccgcggcccacaggttgccaacaggtttgctcgcacgacccctccgccagagcttccctaagtcaccccacattttcctcggctagccactcttcccatcttgcctcccctcgggacctcaggcgcccccaagcgccccgggggcacacctccttccggctgccgaacccgagccccgctccagcggcgggagtccggcactcgggtctcagccgcctcgaaggggccctcgcggagcaggagtgcggagaacgctcctcccaaacgcccgcggggaggggcgtaggctggcaagcgaggctggtggcctcccccgcgcctccgatcccgccccgcgcccaacccgggtcctgctaatctcacctgctccacctgtcgccgttatttatctcagcgtgtgcgcaagaattgttttaggtcggcccgtgggagcgcagacaatcgcagcagctaacaagcggggagactacgaa

SEQ ID NO: 222850 - DNA, 394 bp, Homo sapiens
  chr6:39281096-39281490
  hyper
gggcagccgcgcggcggcggcgcgcccagtccttgtgtccgaagactcggagtaaagcgggttcagccagagagcggccctgcgtccgccctcctctcgaacccgggtctgcgcacgtcgagccccctctctgcgttgagggtggccccgaccagcacgcctcgggcccaatccacccaccctccgggacaaacgcgccttcccccaggctcctacggccgcgccctcgctcctgcgcatccttagacccggcgcccctgccgtcccagctcccagttcgcaaacgtgcgcccgggttccccctctggaagcggccaggtgtggcgtttagctctttgccacgggtgcgggtgcgaccaacccccaagcaggctcaaacgcgccctttcccggg

SEQ ID NO: 222851 - DNA, 113 bp, Homo sapiens
  chr6:39692723-39692836
  hyper
aacatgcactagtctgcccccgcgtgaacacgtgtgcctgggtgcaaaaaaaatggctctctgccgggtctgcgctgtgccaggtaggagtggcctggctgtcggtcgcgtag

SEQ ID NO: 222852 - DNA, 462 bp, Homo sapiens
  chr6:39901937-39902399
  hyper
tcaagcagataggccgggagctactgggggaaaagggcagtgtgccggggccactcctgccccgggaagctgtggacgcaggcggggtgggctcacctccgaggcagctcgcgcggactccccggggcagggctgggtcaccggagcccctgagctgcagctccgggcgctggacctcagaagccgccgcagcatccgggacagtggccgcgccgccatgaagcctgatacgagcggaaccgcagcccgcttcgggagcacactggccgggcactcgcccccggggtcatcccagcaagggcggggaggggcagggggagggcgggacccgcgcagccaataggcgaggacgcagtcccgcgtggccttgtgggagctgtagtacgctccctgtgcccactttcctgggccggggtagcgctctagggcagaagggtaaactcaggtaaggaacggggttct

SEQ ID NO: 222853 - DNA, 873 bp, Homo sapiens
  chr6:40554350-40555223
  hyper
cctgctgttttcaacggttccatccacccgtggctccccgtctctccatccggctctccagtctcacatggacccggctctccccgctccccgccagagtttcacccccactgtaggaaataaagactaaagaaaggaaaggaaatctctcgcgataaggatgggcgaaaagagaagggggtgtccgcatgagcacctaggatgcggggagtcttcaagagaaaaagaaagggatgcaaagttcccggttccctcgggtgcgttcagccccgcgccgagctcccgcggacacccgggatcgcaaagacgcagcgccggcgaccactcacctgggcgaggcagcatctacccccggctgggtggcaccgaggccggctccgcggggcgcccgggctccccggctcggccacgcatccttccccgcccgagacagactcgagctaaaccctccggcggctccggcgaatgcaggcagatggtggcctcggacgtccacgcggggaaagccctgagccgcttattcagttatatccatggcatttagcaagaagaaggggggaaaagcacaacttgttctcttctcttccagattaaagaaaaataataataataatccctccctaggaggatgccggtaggattttccggatcgaagaaccccaggcattcccaggaacctcgggcatcttggaatgtggggtgtcttcaagttcagacgagcctgccgggttgtgtatgtgtgagtgtatgtgtgtctcagcgagagggagccaggcactcacacccacacgcacacacaaacacactcccccgtactccccgcatgcacactgccccccacgcgcgcgcgcatacgcgcgtacccggtttctc

SEQ ID NO: 222854 - DNA, 1080 bp, Homo sapiens
  chr6:41339160-41340240
  hyper
gctgggtagttagaccgacatccctctccctctctcaccctgggctctgggacgctggccctgcttccccagagagcgatcgccccggacttgtgcctgtgttccggcctagggcagccggaacctcccgatatccccagaggagtctcaggacagcgcacagggaagtactggcttggagctgcgtgttccttgggcggccggcggagggcgaagagcaggaagagcccgggggacgacggtagcagagtgttggggaggccacagacgcggactgcgtggagaaagcacgcacccgggccgcagtagccgggcagggggacggcggaaagcagccctctctggaacattttattctgatccccgcaggactcccccgcgagccccggcttgagcagtcgtgtaacaagtgtgcgattgcgcgtgcgactggtgtgtgcgcgtgggcacttacacgttcccggggaggctgggggcaggagcttcactgttcacacaaagagcgcttagaggaggaacatttaagtttgggggcaaagaaagaaaaaagagttaaaggtttaggagatgggggaggaggatggggcttaaggacgcggtgttgccgcggctcagccatcggggcgggaagctcggggagggagagcgcctgggcccgcttctcgcctattctacgcagaacttttctctcctccttcttccctcgctctgcctctctcggggcggtctccggggactgtctctcacatccattctcctctcctccttgatttatgctgcagagtggaacgaccttccctgacctcattttcatgtcggcgcgagcacacccggagccggctacgcacattccggaggaggcgcgcgctgacacgcacacacacacacacacacactcgagacactgcagggccctgcccatcctcgagttcacaccagccccgccactattatgggcactgccggggctgtggacgctcaaagaatagatcctcattagcatcttgctttgaatatcatttgcattttattcatttcatgtcaaaacgctcagaactctccccagcccgcaccttcccc

SEQ ID NO: 222855 - DNA, 600 bp, Homo sapiens
  chr6:41340475-41341075
  hyper
tcacaaaggtgacttgaccaaggtcgtggagctaaaaaccgaggaggagaaactgaaacccaaggcgaccaaacaccaaacccaaagagcttaaccgcttcgctgccccggctcaggcaaggtcaaagctaaggtatgataactctggcaggagaaagtctgttttcctacgtggtagaaagtccttgggcccgccacgacccttcccccatcccggccgctggggcaccggggcacattcccagtgcgggcgctcgcagcaccacctcgcctggccgcccccagtcctgacccctttctagcgctggatcggccgggtccggcctccgtgctcgcggggtcgtccgtcggcgctggctagttaagaaaaataaacaacgttccaaatgaaggcgattcctttcaacccaagctccgccgcctgccagagaaatgcaaacagcggggtacggccggagtccgccccagcccccgcgccggagctgcgggtggcagggtcgggccgcggtaacccgagccgccgcgccggctccccgcgcgctgccctccgcctgccccttcgcccctgaccccgcagtcggcgcgctgggcctgcgcccg

SEQ ID NO: 222856 - DNA, 420 bp, Homo sapiens
  chr6:42072215-42072635
  hyper
gcgaagccgtagtcggcgctgccgggcgctttgtgcttggcctccgcggcgccccgggcggcgccctccagggacagcctcggcgcgtgcaggcctccggggggcgcgcgacccgccgagttcacgcgccgcatctcggggcctccgggctgcggcccgaagcagttgggagagctcaggctgcggccggtgccaccgtggggtagccctgggcctcggtgcggctccccgacgtacaggcgcttctttatgagcgagcggccccctcccgagaagcgctccaggcccccagccccggcgtagcgcgcgcccgcgggaaagcgcgagaagccgagagccgggggcgccccggggccagcgttcgggagctgcctcaagtctgagtagttgttccggggaggggagctctggcggcccaga

SEQ ID NO: 222857 - DNA, 125 bp, Homo sapiens
  chr6:43081636-43081761
  hyper
tatatatagagcctccgcccctctctttaactccctctggccttccaccaacagacaagctgtaaccttcagaatctagtgttaccctgagcagccccggggcctgtggccggggactcagtctg

SEQ ID NO: 222858 - DNA, 92 bp, Homo sapiens
  chr6:43477369-43477461
  hyper
gggcccggcagatgcggccaaagtcgcggtcgcagaggcggcagccgcgcagtgagagcaggcgcacggcgttgtcgcgaaggccgcggcag

SEQ ID NO: 222859 - DNA, 98 bp, Homo sapiens; identical to SEQ ID NO: 200449
  chr6:43596713-43596811
  hyper

SEQ ID NO: 222860 - DNA, 300 bp, Homo sapiens
  chr6:44044264-44044564
  hyper
aagggggcccgaggacagagcccctgccgggccccagggggagtgtcgtcggctcctttgcgtcgccggccggcggcgtggcggggactctggccggcagcctcccgcgccgtccggagcagctgacccgctggcggtgggccaggtcgcggcggggcctggaggcagcaacgtgcggcgcggcatgtcgcgggcgccgcggcagggaaatgtgggggcgggccggcgcgccccctcccccccgcctacgctggcccattcataaaacctgcaggcgctgcccggcctggcagccttggt

SEQ ID NO: 222861 - DNA, 270 bp, Homo sapiens; identical to SEQ ID NO: 200451
  chr6:44095871-44096141
  hyper

SEQ ID NO: 222862 - DNA, 600 bp, Homo sapiens
  chr6:45390776-45391376
  hyper
cccggacgtcctccaagacctcctgccttggcggctctaaccccagaaacccccggccgggcctccctccggatgccctggcgggctcggggctcagtccctccgcgcaaatccctccctctcccacctgtgcccgctgccaccccgacttcagccctagtccccctgacccgttcagcactcctcatgcctcctgcctggccttgattctcactcactccttcgcgccgtctccctttcccccaggatccccaaagtacccactcttgcactgcgagcggacttgctccaccccgcccctttcccgggggcgaggatccccggcattgtcccctggggctcccgcgtccttccgggacatcccggcctggccgcattgcgggctgcccgcgcagcctctctttggggctccgcgcgctctcacccgcttccctcacagccaaacgcctctcctcaggtctcggcgtccccttccccgacccgcagagttcagcggtcctggtccctcccgggctcccgtgccgggattcgtggggtgccggtgccgggcattagtgcccggggctgggcgtggggtgctgactgaggcgcgcgggctgc

SEQ ID NO: 222863 - DNA, 526 bp, Homo sapiens
  chr6:45631099-45631625
  hyper
gccccgcgtctggtcgactggctccccggttgcccttcgaccatctctcccagcacacgcggggatgacaaggagcggccgccgcccgtcctggcaccggccgagggcccggaaaggagccgcgccccgcgccccagcactgcgggcagggaggagggcaccgtggacgcgggtacatccccgccgccccgagcccggcccgccgctgcggcgagcttggaggcccacgtcggggacatcctggtggagctgcggaccatgaacggccacctggacagcatagcgcgggccctcaccaaactggcttcgtccctggggccccagcctgagcccctgccagatgtttcggatgccaactaatggagctcggcgaggctgggccgccccggggccgagggatcgcttgcaccaggcatccctgcctgtccctccccagcagcgaagcgcgcccagcggaggagcggttgctctgcgcagctgcctagcggaaagcacggccctagcgtttcagcgtgaaacagacccg

SEQ ID NO: 222864 - DNA, 980 bp, Homo sapiens
  chr6:46097249-46098229
  hyper
ccggtaaaggtgctcgcttatccagtaagacggacagacgtctatggtagatccacgtttcatttatcccaactcactggaactggctgaagcttctccagacttgtgccggaccttggtgcagccaaagttgctttctccgcggccacctaagctgccaggtgcacattaactaagtggcagaaggccatcggcttggcaattgcctgaggcctttccgggactcgctggtttttaggttccatgaagggcatccagatctaggatgatacgaaaagtgcgtggtgggagagtggaatcaacctctactcttaggtccgatacaacccctccaagcacctgtctaaccaatcggaaagaaagttacattcaacgctggttctagcatccaatccaaggacgtgtttcagactctgctgcccggtcccagccagccctgagctggcgccttagacgctcgcctggcagctgcgcacactcggagcgccccgagcggcgcagatagggacgttggggctgtgccccgcggcgcggcgcctgccactgcgcaggcgcctcaggaagagctcggcatcgcccctcttcctccaggtcccccttccccgcaacttcccacgagtgccaggtgccgcgagcgccgagttccgcgcattggaaagaagcgaccgcggcggctggtgagtacgcgcctcgcgcgctcggcgttctggggggcaatgtcaccccctctccagtcccctaggggctttgaaaatagagatggtgagaccagaccctatgacccactctcccccactacacgcacatcccctggggcgcggcggggacgtccacgaagggactcaaagagccagggaggtggcgggccgaggcggaggccaggaagggaagaggaaagaaaaattagcaggtgctggggaaggcaacctgtggtgttaagtgtgaagggagggaagtcagccgaacggtagtggaggaac

SEQ ID NO: 222865 - DNA, 87 bp, Homo sapiens; identical to SEQ ID NO: 200463
  chr6:46816765-46816852
  hyper

SEQ ID NO: 222866 - DNA, 45 bp, Homo sapiens
  chr6:52156896-52156941
  hyper
tttcaaaactttggcgccgggcgcggtggctgacgcctgtaatcc

SEQ ID NO: 222867 - DNA, 722 bp, Homo sapiens
  chr6:52226692-52227414
  hyper
gagggcggttaaggcgtctctgtctcaaactctccggattttttgcagctaccagggactgcgagggtctgcgtcctgggtggaaggaagcggcgtcagtcaacttcctcgcagcggcggcagcggcgcgggctgcagcggagcgcgcgggtctgcgcatcccgcccccgggtcgggaaggggcggagctgggcgtcacccgcccccggcggtctcctcctcccggccgctcccccgagccgagcccgccgcggtcacagccacccgcgggaagctcgtggccgggaccccgaggcgggagcgcgggctgggccgggctgggctacgcgcacgggctcggccgccgcccctgccggtgagtcccgccgcgggaggcgcggaacgggtcgagttgggtattgggaccgcgaggtcggggagccccggggcccgagctcgggaggcggggacgtcaggatcgcggcgttggggagtcctcgcaccccgagctcagaggggaggtccagagtcgcagcgttgggaacctgaggccaggggccggagtttagggccccgatgttgagtctccgaatccaagcccggaaggggggacgacgggttaggatgctggggagccctggagctctgaacggctgtagtggggtggccaggactgcgatgctggggagtcatggagcctgagcctggagagctggcgggggtgtggggaccgcgatgttggg

SEQ ID NO: 222868 - DNA, 140 bp, Homo sapiens
  chr6:52859558-52859698
  hyper
aaatgtgcgtccaccgtcacgcatgcggtggctgcgccccccgggtcccgcgtgtccaccacccctacagggagatgagcccccggccttgtaaaacgagccgggggccagggcttggccatctgagatcgcactctccc

SEQ ID NO: 222869 - DNA, 360 bp, Homo sapiens
  chr6:53212498-53212858
  hyper
gattcttccgaaagagaccccccgcccccgaccccgccacctccgccactttgcataactggccaaatgcattctccaaatttgcaatcaaggagcttaattcacaattgtggatggggcggggggaaccgccaagtgcaagaacacggaacggttgcaagacgcagttcagcaagaacaactcttgctctaggcattgctccgtcgacccgaggtggtggggtgggagagtcttaccggcgtggaaacagtaaaaaggcacttttccttacaactcgcaagacaacacacactctagctcccccggcgcagagcacaaccgcccccccgccgcgcgcctccctcgcagccaaccgctcc

SEQ ID NO: 222870 - DNA, 1080 bp, Homo sapiens
  chr6:53212887-53213967
  hyper
gggccgccccggtcgcccccgagtccccgccctctcgctttcccaccagcctcatccctccctgagtaccaagggctgccgttgtctggtttcaataaaaactgaagcggtcccgagctagcaggcttccctccgaggggcggacggaaggtccgcagggttaacggaagcggagagaacaggacaaaaaggaaaggccggagagtccccccagcggcgcccggtgcccgcagaccctcgcacaggctcttcgaactcacccgggtttcgccgactccaaagaaagcgcgctccctccgagagcgctcccccggctctcccgccgcgcgctccggcccgcagggcgggaggacccaggcggacagatccatccctccgcgtctggtgtgggcacggtgtcgtgccccgcggcgcctgtcagcgcgcacaggtgggaccgcagcacagagaacgctcccgagcgccctgcctcagcctcggcgtggggcgagccgcccgcgcccgcacccgcacccctttccccgcgcccgaggagccgggctgtaccccggagccggcggagctggaggccgcgggcggagcgcgggttgccccggcagctctttctcggcaccaggtccgagacctaacggcagttctctctgaccgcttcccggccgcgcgctcgcgcgggtgtcatggccgagcggcggcccccgacgaagtttcccggagctgacggctttaccttttagcccaaggggcggcagcagctttgagcagcagcaaggcggcggcggcggagggagcgcgggtggcagccggcgcagaggcggatgtagaaggagacaccggtggctaggacccgcgcgatgggaagaggaaggcgccggctatctacaatcagaacgtgggctgaccgtgacgtcacaatggcgcggccagccaatcgggacccgaaggatgaatcaagcgctatgatgtcatgcggcccgggagccaatcgcgggacaatagaactttcgtgatcgtaaattccagaatccgatgcggtggagagcctaggccggggttggcccctcggttccacgtgtctctggg

SEQ ID NO: 222871 - DNA, 282 bp, Homo sapiens
  chr6:53409809-53410091
  hyper
tctggtgcactggcttcttcctacttgtgaccaaaacctgcgccgccgcggagcatgcccagtctttgcgtccgctagctcgccgctcctgggcgcgatcctgcgctccaggttttatagactacgggcgaaggcggggagaggaggcggtgcagcggcggaggcgtggcctgaagcccggtgggaaccgcgggggctcaggaggcgtgtgcaagggtgattgggtcgcagttgaggggagcagctcgcgagaagggggcgtgcggtcggcctcgctttacg

SEQ ID NO: 222872 - DNA, 518 bp, Homo sapiens
  chr6:53660452-53660970
  hyper
attggagaagcgttctggactgttaagtaacttagatccatgctaggtactgacacctggcacttgtgcccggtcaggtgagaagccgggtgattcgggctgtttccatctggaagctacagagcactgcatcctccccccctccactccccggggtcgttcccccaccaagggccgggcgcgcctctcctttagtcaaggcatgtcccggaggaccttgtgacctgggcagcgctcaagcgggccgcactatctcggcatcttgggaggaatgaggaatgtgctccgtgctttatcgcgggtgggcttggccggctggcctgcggtggctgcgggggtggacgcgagatgggcgcaggggagagctgggcctggagcgctaggggcaggtgcccagatgccggccgcccgggccttgcctacgtggacctgttgcgtggtgggagctgcggtgaacgtcagcggaggctctgcccgcgggccagccttgcagccgcctttcccggagcgggcacagt

SEQ ID NO: 222873 - DNA, 1525 bp, Homo sapiens
  chr6:56818890-56820415
  hyper
cgtgaaggcgaggctggcgcagccccggactacgctcaaattacccttaaggctttagcaaactgactaaaaatttgagttctttcctcccctccctgccctcggcatcgccgtggttattcaaacctgggagactggagggcggaggtgacggcaaaaagggcaaggggcgttaaagaaacgcactcagcctggggagtgggcaatgatggggctaggggcagccgaggagaagggagcgagccgcgcttcactctccaaatcggcttaattgttcctggtagcccgcagaaacccgtcgcggcgtgtcttacctcggcttcttgaacgacccgagaagaccgatttcatcggatgcctccctttctggagcttgcggtgccagcagcagaagaagacgatggtggcgatggtgcccagcagaagcaacaagaggaagagggcacattggatgctgtagggtctcagcaagacgaggaaagccgcggcgatcatggtgcgggcgaggcgagggcgactcgacggcggggctggagggcggcggcacaggcacccgcgctgggcgcacgccgggacggcgggcacgggtgagcgcggctcagcgcgtcatgcctggcgctcgcggccccgcgcccagcccaatggctgcgcaccccgcgccagccgcgctacgcgagtgatccagggctgcggggagcgcttgccatgactcagcagacagcgacgaggctgcgactcggcggctgggatcctctcccctccctccccaggcgcccccgcccccgtccgtgcgcagcccccgggcgcagccccgccggggacgcggcgagtggggaggagcagcgccgccgccgcggccgcccgggccccgcgcatcgtcctgcggccgccgccgacctcagcatcccagaagccgggcgcacgtgggtcggggcggggacgcggcgctcaggctgcagccgcggcagcctgcggggggcgggaatggggcgccgcggcgggggctcggctgatgacatcacggccaggctgcggcagcgcgggcgcgcggacatggctgcggcggtttcggcggcgtccgcgggctgcacccgggcctgagagcccagcgccctcccgcggggccgcccgccagtccgcgccgtccgcgggtgcattggccgggtgcctctagcttcccggacacccggagcttccgcctatccagcctccctcggccaaattgctgcggagcccgtcgtcagggggcgccaaggagccagggggaaaaccgagaggcgctgacaggagcctcccggcggtgctaccctccacctcccacctccctgcgccccgccccgaggttggggctttgaagaatgcagccgggtgagctattgcttgtgggggtttcctcgcactctgaagcgcgagcgccgggaagggccttccctgggaattgggatactccaggaacgggaggcccactcctctccaagcctctctaaactaggagcgctccggggtagtacgctctggtcggcag

SEQ ID NO: 222874 - DNA, 600 bp, Homo sapiens
  chr6:62995519-62996119
  hyper
catcgccactgccattagatctccgtagctttggtcttctccaaattaagacgtggagaaggagcactgctgtccgccccaagaacggggtctgtccgcccgagctctaaggcgagcatcttcagggggacagtttctgcgaaggcggggagaggagtccctccccaacttcactcccctaatcaagccgcgggtgagataggcagccggcggtttgtgcccatctgtgggggcaagtcctaccttctgccaaaaggcgcgacgcatgcacaaaagatggatccaggctatctttctctgccatcagctcaggcaaatatttctcctcttccatagcgcggacttcggattgtccccgggcgaagcgcgaggttccgctcgctcggacgcaggcagggtcttggggcagcgcctggctcccgcgctgctcctcctccgcgcggcgagggatctctgtgcgtcctcactggcccatgcacccagcacctgcgactcccgccgtcgggctgcgtggccccgcgcccacacctgcccgtcccttccgtcgtccctcgctcgcgcagagccccggctcacaccagcggccttaactggagaggc

SEQ ID NO: 222875 - DNA, 52 bp, Homo sapiens; identical to SEQ ID NO: 200489
  chr6:64283088-64283140
  hyper

SEQ ID NO: 222876 - DNA, 840 bp, Homo sapiens
  chr6:69344727-69345567
  hyper
ttggtcgccgccagccccagcggtgggaactgaggatgcaaaaacctcccagacgcagaaaataccgctttcgggacgtgcttgggtttgagtagccgtgacgtgcaggcgaaccgcggccctggctggagctccgtggagcccccctcccgccagcctctcccccgccctcccgccgggactccctcctctcccaccccgcggctcccttcgccttctctctcacacacccgcccgcgcccccggcaggcagaactccaggaagtcgcagcggccgcgccgcgcgagccgagcctctggcgggcggcggggcgcaccgcagctgtgcataagaagggcgcgcggcacccgggacgcgcgcgcacacgagcacgcgggaggccgccgcgcggacgcgctcccgggacacgcgcaccccccgcgcgcgcgcccaagggagagcgagcactgcgcgccggcgcgcacacccgagacagagctttactatctcgctccctctcgcgcctccctcctcgctgggcattcaaacagctttccgacatcaccagccaaggatttttttccccgctctccttagtcgccgtccgtccatcagtacctgcaggggggaggaggaggagggaggaaagcggaaagaggaaaaagcataagcttgagccttccgatccgaccacgaatactcctgtaataaacccaccgccccaacaaatctgccatagcagccgccgccgccgccggtcacttctcgtctcagcgctttctttgcttcttggtttgttgggggtagcttttatgaaacaaatctttgctattaagccacttacattttggggggttcct

SEQ ID NO: 222877 - DNA, 152 bp, Homo sapiens
  chr6:71123138-71123290
  hyper
cggggacctgttgatcgcaggtatagccggctggcccgggctccctcgggactggggcgactgcgcatgctcgctggccgcgctgggccagtagccgagccgcggtgacgaaccggctccgcggttgcggtgtttgcggttgctgtgatggc

SEQ ID NO: 222878 - DNA, 240 bp, Homo sapiens
  chr6:71123551-71123791
  hyper
ggtcggagcctggccccggccccgttgaaggtcggtggggacggcggtgcggagcgctctgagggaggcgaggggccgcggcgcgctgctctcccggtgcccgcggccgcccctgcccctgcgcgcgtccctcgacccgttcttcctgaacctcgcgcctagcgtgtttgcccttcacccctgctccatcttcgtcgctctgtccctcctttacccgctttcgtggttctgctttttcat

SEQ ID NO: 222879 - DNA, 240 bp, Homo sapiens
  chr6:71665917-71666157
  hyper
tgcggccgagactggttgcgcttttgggtcccgtgagccgggccgcccctgcggagcgggagtcgggcgcccccgcggcccaccgcgtagggagagaagtaggggcgcggggtgagcgggggcactggcctgcgcgtgtccacgtcgagcatgatgatgacaattaggatccagggcaggaggataaagaagcgggtgaaaagcgcggacttcatggtgcacgctccctggcctctcgga

SEQ ID NO: 222880 - DNA, 637 bp, Homo sapiens
  chr6:72129568-72130205
  hyper
gcccttggtcgcgccggcacccgaagagttcccacggatacggttcccaagtcagtggcatgtcagtgcccttcaagctaccgcaattttatttgttctccccgccagctccataaagtattaaaggctctctccacgacttcttcccaagcccaggtgccctaaaccacttgagcccacggcgcctaaagccgactcacccgcagcccgaggtgcgggagccctcggacggactccggcccgccccgcagtccccaccggccgcgctgcggccccggctgacgacgagtcgagaaagtcacccgcgatgaccgcggacgcgaggggcgggccgcgtcgcgccgccccgcggaggcgccgcaaacttttcccggttcgcaagttgccgggatctgcggccgcggaccgacttccttcgccggccaccggagggagggggcgcccctaccccgggagggggctgggcgagccgggagacggtcaagttggggtcgggggagcgcgggcgctccgcactctggggcacgcggggacgagcccggccgcattgtctgcgcggcctcggaacaagcacggccggcggtggcaccggcgggcgcggggaggagttgccgtcccctttcgccgccgccgccca

SEQ ID NO: 222881 - DNA, 1080 bp, Homo sapiens
  chr6:73330809-73331889
  hyper
accccatcctccaggtgttctttcccagacactgggtcctcgccgccgctgctgaacttctcaatcatatgactttctcggacttaaatggaaatttcttgacggagggaactgggtttgttctcccaggcttcgcgctgcagtcaggcagagccccggggcagctcgctcaccgcggaggagccactttggagttttacgccctttccacaccccacccatggactggaaaggatgttcagttactcgcgagcttgtctgatactgggatggaaagtcacagtccgcaggctggagtgaggcgcgggaagatgcctggtccttgcctcgcggacttggcagccgcgtcctgcgggtctgtccactgaactgctgaggactcgcccgtgtgcggggacccgagtgccacttcccggagcgttaccttgcgctccagcctccaggctagataatacctggaaggcagggcagggctgttcccgctctcaccccttgcggaaggatggcaggatccggcgcagcgacgtagcagcgggagggcacagcgacctgcatctccagtttctcctcaggacacaaggctgacttcaccttccggacagctgcaaagcccctgccagaaccaaaccgaactcgcgcctcggagaggggcttctggggccgtttcgctgcagggcgtggggagtggagagagggaaggggaagcctggggctgggtgtgcgcgcgtgggagcgcgcctcggagcgccccgcactcccccactctatccccgggggcagtttgggaaggagggagtggtagtcgcgggaatgagggagcaagagaaaccctctcaaagtgacgccccaaacaggtccggatttagaattcgaagctaaaggctgttagaaattgggactcctcggcctcctctgcagcccctcctttcccgccccgaagcccgggcggtttgctggctgcctgcttccccgcccccggctcagaggtctctggctggcgggcgccccgtcggccgccggcttcctccttgaaacccgccggcgcacatgaggccgctgcccccgccgcaggcgctggcg

SEQ ID NO: 222882 - DNA, 780 bp, Homo sapiens
  chr6:73331929-73332709
  hyper
cacgcgggaggagaggagggcggcgccgccgggctctgggtgaagagcggcgcagcggcggcggcggcgggcggggggcgcttgggcagcggcatgaaggatgtggagtccggccggggcagggtgctgctgaactcggcagccgccaggggcgacggcctgctactgctgggcacccgcgcggccacgctcggtggcggcggcggtggcctgagggagagccgccggggcaagcagggggcccggatgagcctgctggggaagccgctctcttacacgagtagccagagctgccggcgcaacgtcaagtaccggcgggtgcagaactacctgtacaacgtgctggagagaccccgcggctgggcgttcatctaccacgctttcgtgtgagtacccgcgccccctgctatgcccgctgcaggggaccactgtccctggccccctggggcgtgctccgcgctcgcgcccttgggcccccgcgcgcgtgcacacgtggtggcttttatttcttcgcacgtgttcgtggtcttccttctggagcctctcccctcccccagccccacttctctcatctctacagcttgaaccttttccccgaggacacccaatgaactgcccggtagcttcaggctcccggggcgagagccaggcagacgcgggacttaggctgcgcggataattgggagcaattaggtcccaagatacgtaaacttcaaccgaacggggcgcccgggagctagggaatgcaaagggaggacaggcgcccgtgtgaggcttgag

SEQ ID NO: 222883 - DNA, 384 bp, Homo sapiens
  chr6:73332737-73333121
  hyper
gcggggtaggacggggagaagtgagggggcatcgagggctaggtcctcagtcctaggggcggagtaggggaagctgctacttggagagagctgctaggttttaagcgcgcccggaaacacgcctcgccaccacccagccaccaccaacggaaaatctgtcagtgcatgtagcccttcctgccacggagaaggtggccaaggtctagaggaggccagcaggccaggcgaagcaacgctcccgcgctgcagggggcggggaggcagcggggaacctggggcgcaggaacgcgggcggaggtgcgatagcagaagcgcaaatgggtcgcctctgacagagatcgggcagtgggttaagtccccgtttgtggcgcggagtcaaagagt

SEQ ID NO: 222884 - DNA, 240 bp, Homo sapiens
  chr6:73972771-73973011
  hyper
ggcggcggcggcggcggcggcagcggcggcagcggctgcaggcctggccgattgtgaggagacagcggtacctcctgggccgcgcacccgacccttccaggggtcccggctcgcgccgcggccgcgcgaggcgcgctcgagcggaagtggcggcgaccccgccggaagcgcgcggctgcggcgcgggaagcaacccagagccctcctcccgcctgctctgtgtaggagacagcctgcgga

SEQ ID NO: 222885 - DNA, 820 bp, Homo sapiens
  chr6:74019390-74020210
  hyper
tcaatcacaaataagactcggaacagcctctggaaggccgacagcatttcgcgtttctggcctgggaaagtaagggtgcgctaaggcacgagtagtacagctcctcccgccaccgcagagcccgccggcgggaagagaccagacaccgacggagaagcgaagttcaggacgcgaaggaaagggccacttcgggtcggggtcaacccagactggaccaatgcacagtctaggtggattaacgcgccaccgcgagaagtgggcacgggaccacatgcggctggcaagacgtcccagggctcaagctccaggctcggtcaccaaacaacggtgataacatccacaacgccacgtaaaccatctttgggccttgatcgttttccaataaccgactgaactgagggcgtgaccaaacgacaagaaccggaggagaggacccggagaacggagcagcatcccgccgcccgcctccaggaaagcccgaggcactgtagcaggagggtctgggctccgcgccttaattacaccgccctggacccgcctcttccgccgctcgctcctctgaccggcacccgaaggtgctgtcccgcccacggactcgctcacactccgtttcttcgatcctttagacgactttttaccgttcagggatgctctccgttaccgcctctgccatttggttgccctccctgcggtccaagggcctggaacactccccagggctgccaggccagcgctttccaggggctccagcctacagcgccgccacctggggctggagccagaaacgcaggggccgggggctcaccggctgccaagtaga

SEQ ID NO: 222886 - DNA, 801 bp, Homo sapiens
  chr6:74161264-74162065
  hyper
agctcccggtgttcagcagcccgacgcctctgaacgcggagtcgcacttcagtctgagcagcaggtggtccacaacccctttcaccatccccgccgccgtggagatatcatcgcggctgagcttcaacttctccaaaaccgcccggagcttcgaggccccaggcgccgcatccctccgtacgagaatgggggccgagaccggcaggccggggctgggcacgtcccagggcccgggcggaggtcttggcttcgtggagcagcgcgcgcccctctggcggcaagaaccagccctggaaagagccggctcccgagccgcaggaggctccagcccctctgccccaggggcgctggtggcgtcagacggctgcgtgtcctgggcgcgctgaggggcctttttggcgcgggccccagttgcgcggacgggcggcctctcctgggtgtccggggcgctctttttctgccgggatcccgacttcctggcggggccgaactttcccgccttaggcagggcggcctcgggggcagccggagactcggtgggatccatcggggcgcccctggcattccgtgcggaagccttgggggcagtggctccggcctcggaagctctctgcatggcctttccgtgccaaggctgcatggctggcgctttctgttccccgaaagaagaatccgtttcaggaaaaggccgcaagaggaagagccagcagcagctgttggaaaccaagcactactggcgggcacacaagagtctgcgacccgaaggggaaccccaggctgggaagtcgctgggagccacgc

SEQ ID NO: 222887 - DNA, 588 bp, Homo sapiens
  chr6:74405594-74406182
  hyper
ggaacccggtgggccggggaagtgggcgcgctctgttctccgcggccagctgggacgccgggccaggtggggccgcctgcgtttagcaactgctttctcaccccctggatttgcgatgtttgccacagcagcgagaagcgccattgtaatggggatgggaggggtggagcctccaagtcctgtctcaatttagatctctcactctgctgttaggcgcgcccatttcagattactaaactcgaattaagagggaaaaaaaatcagggaggaggtggcaagccacaccccacggtgcccgcgaacttccccggcagcggactgtagcccaggcagacgccgtcgagatgcagggcccaccgctcctgaccgccgcccacctcctctgcgtgtgcaccgccgcgctggccgtggctcccgggtaggaacgtgggcgcgcggggggcgcgcgggcgcgcgggcctgggccgctctgcggctctgggccagggcttcggggaggtggcggctgctgtgcagcagcgggtgggaaatgccctcgcggctgcagtccccagcctggtactggcctggaggtttgaccatatgtag

SEQ ID NO: 222888 - DNA, 86 bp, Homo sapiens; identical to SEQ ID NO: 200513
  chr6:76458864-76458950
  hyper

SEQ ID NO: 222889 - DNA, 1020 bp, Homo sapiens
  chr6:80656656-80657676
  hyper
gagagatggagggagctcagaagaaaaccctgcgagtgtcgggggaggggaggccttaacattcggatcagattaaccagtgctcaaccgcagtgcccgcgccggcccctccgctgatccgcagcatccgaaagccgcagggcgcgggggcctgtggggccgggcccgggagctgcgagaccaggggccggtgaccccccgcgggggaccgagcgaggatggggaagtcagcggctttacctgcgatggaccaggtccagcggtagaactctaccgtgtcgttgagtgccgtggacactacgtttaggacactacccggctccgagtccaggagccccatcgcggcgatgagcgggcgctggcggcaggagaaagcggagacccagagagagggctgaccccggaggcggtggcggccgacggggcgagcggcggccgggaacccctctaacggcggcggcccggctgcgtcttctcctgctcctcaaggcgccgcggcggcggggatgcggcagaaggcagggccaagcggaaggcgtcgtcaaggttcccgggagaaagacgaggaggtggaggaggcccagccgccagcacagtgcgctgcaccagtctgcagcctcgcgcagccgcccctccaatctcctcagccggcgtcacgtggccgcgcgcgggggcggggggccggccgcccctcctccctccctccctccctagtattgggactcgctggcgtagggatgctgcgctcaagggtgcgacgccaactgggctcgcgcaggcgcgcgccgtcgagcgggagcgggacacctgggctcctccttggcccctccccgcacaagtcgcctcattagccttccccgcccctgtcccgggcatcggcccctgcggaggagttcaccgcctccccacgggtgatttcttatccgccccggatacgtcctgggaaacaggacacgggaagaatgggtgttctgtgggcaaagatgaggtaggcgtggtgctttggtccttacctgacac

SEQ ID NO: 222890 - DNA, 300 bp, Homo sapiens
  chr6:84418036-84418336
  hyper
ggggttattccctgggcgccgcacccaccggtgcccatctcccacctcagcagactttcctcctagcagcccgcaggcttcggggaatgcatcggatacccaagccctggctgcctccctcctcctcctcgcgctgctgcagcaaagggctcgtcctccctcagtcgcgaaggagattatcctagcgttgcgccatgttatgccctcgcctccccttccttcctcgccgccggctccaaagcctcgccgaggcccatcgcccgggccccttccccccggttccaaatccctgccgcaggg

SEQ ID NO: 222891 - DNA, 540 bp, Homo sapiens
  chr6:84418378-84418918
  hyper
ctcacccttcctggctttggagaggagccgggctgacagcgaagcccagtcccccgcccgccctggagcgctccgcggagctgtcactcggccgctgcccttctccgcaccctgggattatcctctgcggatccccgcgagaccctggcgcggggagggggccgagtacggccgcgggtactcaccccgcccctgagcggcgccgcccgccgcaggatgagcggagcccgggccgccgagggaagccgcgccggtggatgtgtgcgaccgcgcgtagccccggtgcccccgggcgcaaagtctccagccctggccgggccccgctcctcagctccgcggtcccggcgcccaccgcccctggcccctggccccagaagccagtacccgcccgccgccgcctcttctgccagcgccgccgcgtctctctagcgctccgagctgcgtccccatccccgcccccacctcagctgtggctcctccgacgagtcaggtgacggcggcggacaaacccggacgagccctcggcggagcgcctcgcgg

SEQ ID NO: 222892 - DNA, 145 bp, Homo sapiens
  chr6:87832386-87832531
  hyper
ctgcggccaccgcgcgccatcgtccagaggagagggcgtccgggagggaggcgccgagtgagcgacaacagcggtagctcgggaatggggtctcgcagcgcggcggcggcggcggcgggcctggggccggcgcggaggaagggac

SEQ ID NO: 222893 - DNA, 1560 bp, Homo sapiens
  chr6:88875443-88877003
  hyper
ttggggaccacactggtcgtacccgagggggcgggaggcggaaaaagtatttccaaacgcaactctgccaggtcttacccttcgcatcccctggtcctcgggacagaagctcccttggcacctctcgcccagctcaggggctggttgtccgctagaacgaaatatcccccactgactacggagagctctgcagggagccgaggcccccgcccgggccaagggaaggcgctggcgccgcgggagacaagaagaggcggaggcggaaaagaagtggagaaggaaggggtggcagagggagtagcgtgcgggaggcggcgccggcgccgggctgctggcgaggcggggtggggtggagtggggtgtgcctccggcgggcggtcagcaagtcagtccgtccgagcgccggcgtcccggtctccagcgcccgcccgcgacagcgaccgggactggcgccccgctgctccgaccgccggcgagcctcgccccttcccaggctcttcactgggtcctcccgcgagccccgcctggcccggcgtggggccgcccgtctccgccagcccgggcgcccgtcgcctcgtcccgctcgcgcagtccctgccgctccctccgctcgcgctgtctctggctccctctcgctccagtcccatttatgaagcgcggtcccatcacgtgttaatgagcctttgtcctgccctggcagcggcggcggcacagaccccgccgagggaactgcgcggggagggacctgagcgcagcgcccgtagccccaaactttgcttggggcgggggacccgccgcggcgccagccctggggccagaggggacaagcctcttcggcccgcgtcacctacttctcctcttcctcctcctcctccgccgccgcgctcccggaggcccccgctgccatgacctcgctgtgctcccggataccctcacaccctgaccaggccaagaaggggctggtgcatgcgccgcccacgacctcggggccattaatcacacgctcccgggcagcgcgcatcgccaacaccttccgcgggggtcacgtctggggcagcgggctgagccggaaggggaaggggagcgggagcccagaggccgaggcgcgccgggcccgggggtgcggtctcgcgccccctccctccgcgcaaggccgctcccgtggcaggcggcagcgagctgggcccggggccgggctgagctttgggaccgcgctgcgcagcccccgagccgttcgctacctggctgcggtcgcgcggccacctgtcctccgccctcggggcgccgcccagcttcgcgccaggcgccttctccagcgcccgccgccctttcccggcgagaccactcgggcgcgccccgcccgccggtccccgatgcaaacagttgggctccgtaggcggctggctccgcgcctcccggcccggcgcgccccctccccggccacccggggccccgctcctcgcaccttttcgctggaggaggacgccccactccagggccggactgggggctctgggactcgggggcggcagcggcgggcgcctggggagccgcggtgtg

SEQ ID NO: 222894 - DNA, 337 bp, Homo sapiens
  chr6:89827121-89827458
  hyper
ggagggttggatgcgcgcgattttatcggggcacggcgacaaaggagctgaaacgcgggcactcgctggagcgcaaaccctcccgactcccggcggggagcgacctgagctcgggagaggggcgccccgtgtcccacggcccgccggctgcggtgctgaaccgcggaaagcgacgcgggcccgggacacgatgtgcgcggcgccggggctgaaagctggccgggagggcggaggcgcgagttccgccctgggccgcggagtagtccgagggctcacacctccccaagtggcgcagcctgggcccgcggggaggctccgcgcagctcccccgagcctc

SEQ ID NO: 222895 - DNA, 420 bp, Homo sapiens
  chr6:89827528-89827948
  hyper
cgcggccgttcacctggtggcgtccgcgacgttcctgatgaacagggaggtgttggggggcctcgtgtagcgagacatgaccgcttcctccgttccctccgggtctgcccgcggccgctggactcgctccgtctcccgctaccgctgctaccaccacaggagctccgccggcccccggcgcgacccccacccctcggcctcagccccgccagcgcgcagccgcagaggccggcgcagagggggcgcagcgcggcgccagcctggacgcacgggccgggggcgggggcggcgccggcgcggcccaggggccgcgggaattccgaagacaggagcgcggccgttcccaggccctatgggatccgggtatggggggtcctggagtgcgacgggatttggggagggggcggcgagggccagtgt

SEQ ID NO: 222896 - DNA, 319 bp, Homo sapiens
  chr6:90062632-90062951
  hyper
cccgccctcgtccgggatttgtgaagttgccctgacgtggcagtagcttcgtggcggtcggtcactacccagccgccgcccgcccggcgaagccggcttggggaggtgcaggagcgagcggcgtcctcgtcctctcgtcccggccctgcccgctgtaggcgaggtccgggacccccgggccctcgagagctcggagggggcgccgggctccggctgcaaagctgtccgcagccggctgcccgcgcgcggtcccgcagggtctgggaaaggctttgtttttagattcagttgctgttgcgaggggcgggggttaagtgag

SEQ ID NO: 222897 - DNA, 180 bp, Homo sapiens
  chr6:90121327-90121507
  hyper
tccctccttccccttttccaccgatcctggttgcccctccgccaccagcaccgcgctccctcatttggcagctcgaggtcgggcttttggcgtccctccccaccccaaaccctcaactggacccgctcccctggaccccctccaagtcggtggctcgcgcacggccgggctgggggcggg

SEQ ID NO: 222898 - DNA, 105 bp, Homo sapiens
  chr6:90142635-90142740
  hyper
tggcaacccccacgcggaaaacctcaccctactataggcccccttcctcccactcttcagaaggcggtggccccacccaggagagggctgcagatcggggccagc

SEQ ID NO: 222899 - DNA, 780 bp, Homo sapiens
  chr6:90142835-90143615
  hyper
ccggcaggggtggggcggggccggcgggacggggcagagggccctgcggcggcggacgcggcgggctcggccacaggtaacccgcaggagccgagagcgctgcctggcgcgcgggcggctggaggcacggcgctgggcggcgccgaggccctggggccgccggagccagcgggagccagtccccgtcttcgcccctcgccccccaccgtgtcgccggccttggtccctgcggcgcggacgtccggcgcgggagagaaaggtaccaggcgacctcgccggctccctgggacccccgcttacaccggggtgggcgcctcaggtcggggaggacgctgtcgggggaagggggcgctgctccctcggcaccccaggatcgccgactgcccgcggaggagacccggacaccgcgcctcgccccctggcctgcggcctccgaaaacgcccggcgcgagggggtccccccggggcgcctccctcttcgcctggcatcagttgcctccctggaatatggaacttcgggcgagggaggtggagaactttcttctggggctcgtccctcgttctcctgctcgcttgcagtttgaaggaagggcggtgggggcgggggtccgagtaccccgcggtctgcggcgcgtaggagggtaggtccctggcctgcggccgcctccgaatgaccccgtccctccccgccctggacgacagcactagggtgcagtcgcaggagaggggccgatacccctcaggagccccatcggcgaagcctcagcaagtggcatctcc

SEQ ID NO: 222900 - DNA, 1155 bp, Homo sapiens
  chr6:91004756-91005911
  hyper
gagactgcagcactagacagcgaaggtgaaaaccaggaacgccgcgtctcgccgcccgcgggcccgccgggagactgcgggtccgtctcgcgggtggggcgccccggtccctctcgtttcctggaggccacaggtcacggcgacggcggtgaccgggagagcaggctgcgaggcgcgcctcatcgggccacagacaaaccaccccggcagcggccgcgccggaacttccctcaagttaccaaactcgcctacgcgcgggagagtgctggggatgccccatgcgcccgcgaccccagaagccaggagtgtgccaccccttcacacactcactcccggccctgcacgcttcccctcacggtccgagttcctgcaaatgcttggccagaccgaggtcgccgagatgctcgctccagtctctcccctcgtgggcacctagggtagcccgtgagcgccgcccgccgccgtctccagcggcgccgggctcccgaacacccgccgggtgagcgaagcacagcggggccacggagcgcctcgacgcggggacggggagggcagtgtccccttcataaaccagtctcctgggtgaagcttctggggcttggagactggagtgtagggtgtgtgtgtgtgtgtgtgtgtgtgtgtgttgcaccttgacttcatggaggatctgtgggagaggaggtgcaaggtttccctctcagaagcctggcgcccttaggtcttagctacgcgggacgctttccgacaacccgatctttcgctaggagagattcgatccaggtctgcgccgcgaggcccccagctcgcctcttcctgcgaccctaaacttgggctttgattccccgccggtcgcggtggtccgggccacccggcggcggctgacagctgagcgcaaaggcgccgcggccaaggtcctcgcggagcagcccgggatgcgcacgccgagggttaaggaggaggccgcccggcctggagctgggatcgcaggctgggggccgggacacccgggcctcgccgggccgggggcagggccgcgggtctgacagctgctgcggctcgcgcggacgcgcgcctcctgcagcccgccctccccatgcctgacttattactctctgctcctcctccctctgctgttccaaaacacccttcgac

SEQ ID NO: 222901 - DNA, 780 bp, Homo sapiens
  chr6:91320348-91321128
  hyper
aggcctgggtctatggagtggaaaccaatctttgatgaatttggtcacaataacgaacacgggagaaaaaggagaattgaaaggaaatggattctgcgagagactggggagacaaaaccaagaggaaaaacacagaatcaaaaacgacaggaaacactagagaagagtaggcagaaaatagagaagaggaagaaacgagtcggacggagacggggccgggcactgggagcttgaggctgggtctccatccttcctttcatcctctcgggagcccgcagagacggcggcttcagtctcgctttacgggtgggaaagcagcgaccttgagaggttaggtgactgctcaaggtcaccgagctaagtgccagagccaggattctcaccgctcctcaccccagatcggggctccggccagaccacgctggccgccgggggagaggacgcgcggggcgggcagagcgcggccgggggccgggaaggagccggcgccaggcgcgcgcggaggaggcggccgggcggggagccatttcctccccaagcaacggcgcttttcaggggcgcgaccgggaagcctctcttggcgtcccttccccagccgcagtttgggcaggggagcgagggccgggaggcgtctaggctgtggcgaggggagaagcatcccccatccctccgctccccgtctcgctcaagctcttcctgcgccacgggcaggtctcccagcctcgccatcgcggggcgtccccgtcccggcccacacctctttcctctccagccacaccg

SEQ ID NO: 222902 - DNA, 66 bp, Homo sapiens; identical to SEQ ID NO: 200588
  chr6:99962859-99962925
  hyper

SEQ ID NO: 222903 - DNA, 394 bp, Homo sapiens
  chr6:100054672-100055066
  hyper
ctctgcagctgcttcgcagcgcaactctctcaccaaactccgcgcccttgcgctagcggtgccaaaaggctcccgccccgattgaaaaggcgcagtgcatgcccgcccgcgtcactccgcgggcggaggacgcacgtcggggcgcggctctctggctagcgcgcagctccagctctgtcactcgcgcccttccaaggacctggagcacccgagcgcctgcctggtggcggcggcaacaatgcacggagccgccagagcgccagccaccagcgtgagtgccgactgctgcatcccggccggcttgcgcctcggaccggtgcctggtaccttcaagctgggcaagtacctgtcagaccgcagggagcccgggcctaagaaaaaggtattgaccatt

SEQ ID NO: 222904 - DNA, 1577 bp, Homo sapiens
  chr6:100061166-100062743
  hyper
aggcctgcggtgcgcgggagggcatcaagcgcgaggcctcttccgcgccctcggccacctcgccgaccccaggcaagtgggggcagcccaagaagggcaaggagcagctggaccgtgccctggacatgagcggagccgcccgaggacaagggcacttcctcggcatcgtgggcggctcctcggcgggggtcggcagcctggctttctaccccggcgtgcgctcagctttcaagcccgccggcctagcgagggcggcggcggccgctcacggcgacccctaccgggaggagagcagcagcaagcaaggagccggcctcgctttgggcaggctgctgggcgggggccgggcgtgcgggcgccccgggagcggggagaactcggcggcgggcggcgcgggtcaccaccatcaccaccacgcgcaccaccaccaccatcccaagtgcctgctcgctggggacccgccgccgccgccgccgcctggcctgccctgctctggggccctgcgcggcttccctctgctctccgtccccccggaagaggcgtccgccttcaagcacgtggagcgcgccccgcccgcagccgccgcgctgccaggagcgcgttatgcgcagctgccccctgcgccggggttgcccctcgagcgctgcgcgctgccgcccctcgacccgggcggtctcaaagcctatccgggtggtgagtgcagccacctgcccgccgtcatgccggcctttacagtctacaacggggagctgctctacggctcaccggccaccaccgcttattacccgctcaaattgcacttcggcgggctgctgaagtatccggagtccatctcctacttcagcgggcctgcagcggccgccctaagccccgccgagctggggtcgctggccagcatcgaccgagagatcgccatgcacaatcagcagctgtccgagatggctgccgggaagggtcgcggacgcctggactcggggacgttgccaccggccgtcgcggcggcgggaggcaccgggggcggcggcagcggaggcagcggcgcaggtaagcccaagaccggccacctgtgcctctactgtggcaagctgtactcgcgcaagtatgggctcaagatccacatgcggacgcacacgggctacaagccactcaagtgcaaagtctgtctgcggcccttcggcgaccccagcaatctcaacaagcacatccggctgcacgccgagggcaatacgccctaccgctgcgagttctgcggcaaggtacttgtgcgccgccgggacctggagcgacatgtcaagtcccgccaccctggccagagtctgctcgccaaagcgggcgacggcccgggtgccgagcccggctatcccccggagcctggggatcccaagagcgacgacagtgacgtggacgtctgcttcacagacgaccagagcgaccccgaggttgggggcggcggggagcgcgacttgtaacgagtcttcccgggaaggggcggggtgaggacagagaggagtcgagggtttattctcgcagtagaggaactcctggtggtgggaagagggacccaatggacaaaaccg

SEQ ID NO: 222905 - DNA, 780 bp, Homo sapiens
  chr6:101841367-101842147
  hyper
agggacaccaggaattctctcgctctagctcctgtggtccaggggtgggagatgcccccgagtggccgcggcggccaggagcgtgcaggggccacggggaaaggagcgcggcgcctttaaagcaagaggcgaggaacccccgccaggaggcgtgtctgtctctgccgccgccgccgccgctgctgctcctcggtcaccgtcttcgccgctgccgtcactcgcgctcggcgccggcggctgcgctggtcggtctggtagctggggacttttccgcccgacctcctccggctgctcctccccgaggaccaccccaccccctccccgcccacctcacccctagctccaggtaaggactccccggctgtgggctgcactccgggctccttcacgaggtgtttgttttcaagaggacgggagggactgcgggtgggcgaggggcattttccacctggagagaaggaagaaggcgaacagtagcgctgcggacgtccgtgcgctcggggcgcccgctggacggattcactgcgagtctttgtcgggcttatctcagccaattcccgtcaagcatgcaagtggctctgttggctgcagtcgcctatgttctccacataaaatgatttaagaagtggacgtgtcaggaagtggcctcagctacggggactcacgcgaggcgaagagaatgagacagatggcaagaagctgtgtggctgccggcgggtctgacgaactccccatccctccttctgcccacccatccttccattaaccctactccttagt

SEQ ID NO: 222906 - DNA, 59 bp, Homo sapiens
  chr6:105307082-105307141
  hyper
ctgttaaatgacccgcaattatgatgttttctgactccgggtctcgggcctccggctgg

SEQ ID NO: 222907 - DNA, 1031 bp, Homo sapiens
  chr6:105584128-105585159
  hyper
gacttgtctggccaacaacccgttcccaaaggctcggggaaggaggttgcgggtgggtggcgcggacctcgggtccccagccatcggcgctctcccggggccctctgacctcgctccttaaaggaggagggtccgtggcaacggtcctcctcggccaggcgctctcgggacgcgggggtgaggagtgagcgccgtggcccaccctactctccgagcggggacggagtgggcgacaccgcgcgcccggctgcacgcaggctctgcgcggctcgaggcggccctacagggggcgaggaggaaccccggagactcggcggagagagcagagacggagctcaccaaggggcttgccgccgcagagcgcgggagccggcactcggtggggccgagggcccggggacgctggggctgcctgacctgagcggcggccgctgaccgttgagggtctctgtggccgcagcgcccagacccggggagaagggcggcctccaagggccgggagcccctcgagggcgcggccagcgaggagggacagagggcggcgcccccggctgcccgggcgcgtagaacaagcagctgccgccagggccgacaaagttgctccccgaggggctgagatccaactttcgcttcccgatttagccaggggagcgcgaggccgcacacaacccggcgcggggggaaagccggctgcagctgcgcctcccatccttacccggctggtccctggcggggagcctgggcagcgccgaccaaagttcggagcggcagcttcggggcgcgggacgcggggcacacgggctcagctgctcgacgggagcccgacgcgcgctcctcggcgggtcggcgggtccggaagctccgctgcccgggccgggtccccaagcccgcagccgctttgactaaaataggcatcgcgacggcggcggcaggcggcggcagccagggctggggccgcaccgcgcacgcgcatgcgcccgccgccccgcgccccccggcgggcggagcccggcgccgcggccaggatttcc

SEQ ID NO: 222908 - DNA, 660 bp, Homo sapiens
  chr6:105627462-105628122
  hyper
gacctccgagctgtgagcggcgacacagccgggaccccagaccccggaccccagggcgcggagttgaccggagccgggaagggagcggcgcgggcagcgcggggcagcgagacgcaagcgctcgcaggggtcggcggcccagcagaagccgcgcccgctaagttgcccgaagcggccgcgaggtgcgagggtgcggacagcaccggaaggcggcggacgcagcgcccccgggctcaccttcttacctttccttcccagccctgcccggagcttcagcccggcgcccgcagaagtttcccggcggagcgcgcttgacccgggtggcccgcgcggaagccctcagcgtccccctcgtgagtgcctcgccgcccaccctgcggcgccgggcgcagcgtgaccgcagcgggctccggagcggcgcggcggcgcgggcgggtgccgggcacgggcgcgcgccccggggcgcagccgggtgggcgggcgcggcggctgcgtctgggccggggcaggcggttcggccaccggggtgcggggctgcggagaatcctagcggccgctacggaccgaagtttccaaagatgcggttccccgagtgtacaccgctcccggttgtaacatacacctagtattcacagtcacactaggcaggagcgatgggct

SEQ ID NO: 222909 - DNA, 352 bp, Homo sapiens
  chr6:106533694-106534046
  hyper
gttagcaggagaaacggaatgttacaacttttggggcggggggcggggaaacgtgcgttacatacacaacagcttgaggaccagacagctccactgtattacactagctgcaaaaacaatttaacttgctcttttgaagtaagatttgtgtcttttgtacctggggatttgagctgagaaatcagaaactgtgtaggtaaattttaagtttccttaatttaaggaacgtgcgccccctaattctgccgcgccaggaaggagggcgatctggagtgtttagaatacaatagagcccaagtaagcgttgaggttaagtgccttcaaagggaagtaagaagattccaagtcaatg

SEQ ID NO: 222910 - DNA, 738 bp, Homo sapiens
  chr6:106960441-106961179
  hyper
ccagagtccaagcccagccccggtaccaaagggcagctccgaggggagtcggaccggagcaaacagccacccccggcttcgtcccccacgaagaggaagggcaggagccgtgccctcgaggccgtgcccgccccgcccgccagcggcccccgggctcccgccaaggagtccccacccaagagggtgcccgatcccagcccagtcaccaagggcactgcggccgagagcggggaggaggcggcgcgggccatcccccgcgagctcccggtcaagagcagctcgctgctgccggagatcaagcccgagcacaagaggggcccgctccccaaccacttcaacggccgggcagagggaggtcgaagcagagagctgggcagagcggccggagcgcctggagcttctgacgccgacggcttgaagcccaggaaccatttcggcgtgggcaggtcgacagtgaccactaaagtgaccctgtaagtagccgcgcaagtcccggccgagttgctgtccgcacacgtgctgggggtccgctctgagaggctcggggtatctgcattgtggaagaaacgtctggtcactgaactttcccctccatgctgaacttaagatagtgaagggccagtttacacagtcaagatttaagatgacacctgtggcagcctcctcagttaattccctttttaacacaagatttaagtttaacgaatgtaaaaataggatatccgttgaagctcaacg

SEQ ID NO: 222911 - DNA, 340 bp, Homo sapiens
  chr6:107810018-107810358
  hyper
aacaatggacacccccatatcgcattgtgtcaggtaattatgaagtgtcgaggcgcgggaaggagaagccgggaacgtcaatgtgtcctctgcaacgtgtgggagcgctcagagccgcgcgtatcacagaaacatcatccagtcgtcacccccaatgcctcaacccagggacagggacagactcaatcagacctcggccccaggcgtggcaggagagggccaaagaggggacttgtgagcgcagagggagcgagcaccgctccatggagggcaggcgctagctgggaagtcgggaggagaaagtgcaaccaggcggggaggggaggatcccaccggggcg

SEQ ID NO: 222912 - DNA, 180 bp, Homo sapiens
  chr6:107810488-107810668
  hyper
gtaaagctgttactttgaagcagggcataagtgagagagagataaagagagaaggaccaaggggaaaaagaaatgaaggggctgaaggccgagatgtcctacttctaagtagttctttgagaggcaaaagcttcattgccattgcagtccgaggcagcgccgcgtggaggaccggccggg

SEQ ID NO: 222913 - DNA, 178 bp, Homo sapiens
  chr6:108455183-108455361
  hyper
caggcgcagcttcccccagaggccggcgctattaactcccggggcctcctgcggcggcgaggcggtggcacggctcctcccgctccctcggcctccaggttcaataaggattacatcatggagcaagtatgcggggcagcctgagaatcaaagccgtcagcaccggcggctggttaac

SEQ ID NO: 222914 - DNA, 183 bp, Homo sapiens; identical to SEQ ID NO: 200616
  chr6:108882164-108882347
  hyper

SEQ ID NO: 222915 - DNA, 373 bp, Homo sapiens
  chr6:109777233-109777606
  hyper
ggacaccccgttccgctctggggcctctgggtgggtctggcctgttgggggctgaggagctcgagggtcagggcgcccagtgctggaccgcgcaccctcggcctgggctccttgccggtgcttgcgcgtgcaaggctagctctttccccgccgcaaggcgaggaccacccgcccccgccgcggtcccaggtccgctggcagcctcccagcgccgggccgagagggcgctcaggctcctcaagaggtttggaaaagccggcgggtccgagggtggcgccggaacgtctgcgctctcctccggtctcccacctggagatccacggcccgggcgccccaggatggatccaagcgcagagtgcgcctcctgtgacag

SEQ ID NO: 222916 - DNA, 938 bp, Homo sapiens
  chr6:111408934-111409872
  hyper
ctgaggggcccgcctcgggccatggtgctctcccaggaggagccggactccgcgcggggcacgagcgaggcgcagccgctcggccccgcgcccacgggggccgctccgccgcccggcccgggaccctcggacagccccgaggcggctgtcgagaaggtggaggtggagctggcggggccggcgaccgcggagccccatgagccccccgaaccccccgagggcggctggggctggctggtgatgctggcggccatgtggtgcaacgggtcggtgttcggcatccagaacgcttgcggggtgctcttcgtgtccatgctggaaaccttcggctccaaagacgatgacaagatggtctttaagacaggtgaggcgcggcgcccgccgaggccagcctgggcgacccgcgtggggcccccgagcgcatcccgcgtgtgggctgtgtctgcctccgagtgtgcatgtcggtgggtccctgtgccagagggtgcgagcaggggggtctttcgagttgcagacagagcctgccgcttctggggcctcggggtgcccgtctttatatggaatccagctgcagagctgtgtgtttgcaagcaggtcgcagaacttacttgccgagatcgtcctcctttcccctcagcagagcagacgctaacagtccacaggagcccttccttttattgtttgaaaacaaacagaaccccagaaccttcaaccccagtcatcgccctgtcatttttgtggtctctttcgtgactatgccagttatgtagttcttcacctgcctccctgggccgcagaggggtgtgcgtatgttggcggggcggggggtggagtttggaggaatgaaagagatttgtacgaaggtcactggagttccaaagggggccctgcaagagtcacggttccgtgcgttcccgtccccccgcctttttttgccc

SEQ ID NO: 222917 - DNA, 480 bp, Homo sapiens
  chr6:117591884-117592364
  hyper
acggagccctggcaccacgcgcacccgcaccacgcgcacccgcatcacccctacgccctgggcggcgccctcggcgcccaggccgccccctacccgcgccccgccgccgtgcacgaagtctacgcgccgcacttcgacccgcgctatgggccgctgctgatgccagccgcctcggggcgcccggcccgcctcgcaaccgccccggcgcccgcgcccggcagtcctccctgcgagctctccggcaaaggcgagccggcgggcgccgcgtgggccgggcccgggggacccttcgcgagcccctcgggggacgtggcccagggtctgggcctcagcgtggactcaggtaagcagaggaagaagtttggtctccgcggagccgctcggccccgtacccgaccctgggctgtgcctagaccccttaatcctccttggagaccttgaattctgtggcccaaggatctgcatgccacggtcgtgttt

SEQ ID NO: 222918 - DNA, 703 bp, Homo sapiens
  chr6:117803613-117804316
  hyper
aaggcaaggaaggagcgcagcagggcgcgccagatacgtggaggggagcgcgggcggcgcctcgctcgcctccggcttcgccgtcggtcactgcctgggaacgcgacttcctcctctaggggccgacgtgcggggcggggcggggccgggcgggagacgcccccgcagggctgggctgaaagccgccccaatgggattcggtgcggggcagcgactgcgccccgtcccggcgccgcgctcgtccgcagaggaggcggcccggcccgggcagctgcggctcgggatccgtcgaggggaggccgagcttgccaagctggcgcccagcggggtcatggtgcccggcgcccgcggcggcggcgcactggcgcgggctgccgggcggggcctcctggctttgctgctcgcggtctccgccccgctccggctgcaggcggaggagctgggtgagtggagcgcgtccggctggcggcgggacccgaggcgccaggggcgggctgagggctgcggggcgggccgggccgggccgagggctacggggcgggccgggcctggggggacggagcgcgggaggaagtcgggctcgccgcctgccatccgcggagtccggctctacccgcggggctgggggtgaagtaggttactgcattccttgtcgctcccccaccaaactccttccttcccccaaaaccagagaattaacctg

SEQ ID NO: 222919 - DNA, 1500 bp, Homo sapiens
  chr6:118228006-118229506
  hyper
atggcgaatgtagtaggagcaacatctaggattctccgtttgggtttctaatccggggccggcacctgtctcggcgtcctgccgctgtcccaggccggtggtgctggattccgcggcgcttgggcagaaacgaggaatccccgccaactccacagggaggatctattcccagcccccttatccccctaaaaaacacccaaaccaaaacaatcaccacaacctagaccgtgggcctctgcggacggggcagtagagggtcgggggcaacaaggcacctcggcagcgccctctggcgagaggagagcgcgcaggtcccccgcccgcgccccgctctgccgccgccgccgccgccgccgccgccgccgccggcgcccccgcccggctctccgggttcaccctcggtctctcactccgtgagacacagacggtagctttccgaccgagcggggcacaggctgaggcggcgccagcacaactgccgccgcgcgccccgaggagacccgggcacgaggaaacaaggagaaatcaggactccttccccggaaccgaccggcagctccgcgcccccgcgcgacacccttcgcagccacttcgcggggcgggccaggacttggggacgcggctcgggaagagccggggcgggcggcggcggcggcggcacgggcgcgagggtgcgcgcactgggactggagaggagtgagtggcgggctgggcggcggcggccgtagccgcgggtgcctccccgcctcaccgcttcgcaggcagcaccgcctcccgggccgcggccgcccggccgggtcctctgcgcgttcccgggcccggaaccggcacacgatgcacccggctgcgttctgatcgccgccgcgcctcagcctctgccgcgatgatcccccctgagcagccgcagcagcagctgcagccgccgtcgccagccccgccgaaccatgtggtgaccaccatcgagaacctgccggccgagggcagcggcggcggcgggagcctgtccgcctcctcccgggctggcgtgcgccagaggatccgcaaagtgctgaacaggtgagcggcggcgccgggcgagggcgcggggggcgggggctgcgggcgcccggctccgggtcccctccgtccctggggcggcccacgggtcctttgggacggggttgcggccggaggagactgaggagatcgggcgacgacgcgctccgcgggcgcagagaggccgcggcagctttgtcccggcgcagggagccctggagtggtggagctgcagctggtccgaggcgggagttcggggagaggcggggtttttcgtacctagccaccctgtatgtgtgtccgcactcacaccctccatacgcgtgccgcctcacttccctttccctctcgcaccccggctttgcgatcgggggtcggggggacgcggggacccggccagggctgaggagggaggcgcggggctgcagagatggcgtggaagtcctgggcctcgtgctgtcctcc

SEQ ID NO: 222920 - DNA, 55 bp, Homo sapiens
  chr6:118971584-118971639
  hyper
atgaaatggctgtccgatacaaacagaccccttcagatacggaatgcagcaaacc

SEQ ID NO: 222921 - DNA, 40 bp, Homo sapiens
  chr6:119762016-119762056
  hyper
cccttgctcgctctcggcgcctcctcggccttggcgccca

SEQ ID NO: 222922 - DNA, 105 bp, Homo sapiens
  chr6:123110275-123110380
  hyper
ggccaaacactgacgctaagaaatacgagaacagatcatcgctaaacagcagctgaaggtcaggcgaactgactcgctgcggaatctgcctttgcacgtgatcag

SEQ ID NO: 222923 - DNA, 420 bp, Homo sapiens
  chr6:123110438-123110858
  hyper
ccgagtggagctgcgggacagcccgaacctccaggtcagccccgcggccctccatggcgctggtgcgcgcactcgtctgctgcctgctgactgcctggcactgccgctccggcctcgggctgcccgtggcgcccgcaggcggcaggaatcctcctccggcgataggtgagttgtccgcgacccttctcttcccagccggcaaagagcgcggagcggcggcgcctgcgcacagcaggagaaagtgcgtgggggcagctgcccccggcagaggctcgggctagcggggcccctgacgcgtccggcgttgaccacggctggtgggcgcggggagggcgaccaagggactacagcgttagggcgtccagccgggaggccggggctgggcgggggaaatgccctcgccggtgggggcgctccaag

SEQ ID NO: 222924 - DNA, 540 bp, Homo sapiens
  chr6:124124157-124124697
  hyper
tccccttccccaagcagggtcggctccgtagctctccgcgctccgacccttcagatcctcgggagcccaggggagccaggtgctgggcggtgcgtccggtgccgccgcgccccttctcgccacctctggcctctccgccactcgggctttccggccgctctggatgcctcggttgcacccctgttccatgaccccagcttccttccctaaccctcctcttggtcccttctcccccgagcgcgcgcgcacacacacactcggttcgctcccgcggagtggctctgggagcacgaccgacttcagctcagcaaaccgcggtcatgccgcccagactcctcgccccgaggccccggtccccgccgccgccgctttcgcgccgctcctttccgcctagacaccgccgcctgcggccgcctgggcggcagcccctgcggtcctcaaagttggccccctgggagggggcggcagggagcaggatgaaggatttgttgtaggaggaggattcacacatctgggcgaagggaggggcagcgccgctgc

SEQ ID NO: 222925 - DNA, 900 bp, Homo sapiens
  chr6:125283035-125283935
  hyper
ccactcagggtgtgcgtgtgtgtgtgcgcgggtgcctgcgcgcgtgtgtacgtgtggggaggtgtgcgccaaaggggtggggtgaggggcggcgaggagggctgtaggtgaagcgcggggagagggaggtcgcccgctccggcctctcccccaggggccctgcggctggccagcgctccggctgcacctcctggtgcgcgccgcggcggcgccacaggcccctcgaccctttgaccaccgccctcgggccgcgcgtccggcagccgggaccggtgatggcgcgggactgacggccgtctcctcccagacccctctgtcccgcctggggctcgctggggctgcggcgccgccccgagctgcatgtggggcgggcgcgcccgagcccagagcgagcggccctcggcgcccccgaggcggtgccccgccgcgccagagtacgaggaggagcggcgggccgggccaggctccccacgcgccgcagcctcggagcacgggctccccggaggggacttggggcgtcccagcccaggaggaaggacccggaagcagaagcggagccgcgagtcgagccgagccactgcccccgctgcccgcgggcgccgggtgggggtcccggcggctggatgggcagcggcggcgcgggccgcgggcggcgatgggcgaggagcagagcacggtgagcggcggcggcgggccccaggagtcgcagaccctggccagtggcactgcgggccaccctgagcccccgaggcctcagggggacagcgcccgggcgcccccgctgcgcgccgcctccgcggagccgagcggcggtggctgcggaagcgactggggctgcgcggacaccagcgccccagagcccgcgaggagcctggggcccccgggctggagtaagagccg

SEQ ID NO: 222926 - DNA, 418 bp, Homo sapiens
  chr6:125420731-125421149
  hyper
cactgatggctccgcgccgctcagttgatcccttcccactgcacggagcgggagactaaaggcccactgcccatggctgcgaaaaccttccttcgggaacgcggagctagtgcacgggggcatgttcttcccccgcagccctggcaagcagaggccggcggcctgtggcgcggggcagttgtgctggctgccgggcggggctgctctgggtctgggtgcacggagaggagcgcggagtgaagcgcacggtgcacactgcggggcgctgcttgtcacctccctgcccctccctctgccctcccccgctgtccggagcacagtcccgggagggcggatgtcccctgggaagatgcgcgaggagagcgactgggaggcagctagcagcacctgcgtgtgggcaacacgacccgaggctgtc

SEQ ID NO: 222927 - DNA, 840 bp, Homo sapiens
  chr6:127440313-127441153
  hyper
gaagggaagcattactgggttactatgcacttgcgactgatttcttggctttttatcattttgaactttatggaatacatcggcagccaaaacgcctcccggggaaggcgccagcgaagaagtaagtgcagggttttttacgcgtttgctccctcccgccgcgttcacctgtcgggtcgctttgcctgtccggagccggctcccaactgcagcggtcctcccgccctgcgcctcgcagaggagatgcaggttcgggctttgggggtatggacggcgtctttcacccttgcctctcggcgcccctgccttccgcagcatcctagccggtgcgaggggcgggcggacgcggcgctaaggtggctcccgccccatggtaacttcaggttcgcgggaaagttcggtcctgggttagactcgcacccgggatttgtgctttccttttgaggatcggacaggggcacccagccgaaggcacttgggactcccagacgcaggatgcctctgaccgctgagtaaatgacaagggaggcgcggccgcggtacccgctcacctagcgcaaccgcctcgcgcggggagacctcggctgggcccttaggctggactccggtagccgaacgcccgctacccggccaggaagccagggagcgagcgcctgcgcggccgcatccccgacacgcaccagcggagccaaagggcgcgcgaggcgatggggttcgcgtgtctgcgcgtttgcagagctgccggacgtcccccgcccgagggttgaagacagcaaaaccccagctgtggggagccggaggtgcggagtttccaggttctctcttgtcacatgtgagcgt

SEQ ID NO: 222928 - DNA, 420 bp, Homo sapiens
  chr6:127441295-127441715
  hyper
cctagctggaattaagcggacaccaccacggcagcctcaacctgggttggtctgtctgaaaggtagaatcttcccaagatgaagggacagatgcgaaggtgtcacctctcctcgctccagggtagcctggcgccctcgctgctctagtgtctgtgttcccatggggagtcctttcgcagatctcagagcaggggcgaccctggctctatggttgggggcgctggtggagagagggaggaggaaacttctcctggagctcgcgaggggcaggaagcgatgctgctgctctgggctctcgcacctccgcggcgtgcagcccaggcccagcggccccacctggtttcccaaggggatccctctcccagcgtcccgcccgggaagcctttcggggcagacgtcggggcagcgcggaggacacaa

SEQ ID NO: 222929 - DNA, 1173 bp, Homo sapiens
  chr6:127836628-127837801
  hyper
cccccagccgggtccccccaccctcctcaccttgagagtctcgttttcctctcgcagcttctccatctcctcttgcatttcttcctgctcttggagctgctgcgggtgcggctgcgacgaagggggcgctgccgcctgcatgcccccgccgctcgcgctgccctctgcgctctgctgggggccctccgccgccgccgccattggggaggcggaggcgacggccagggtctcgcaaacggcaggggggccagacaccggggagctgcggctactgctgccgccgccgttcttagcgtgcatctgagccgcggccgccgccgctgccgcccgctccttcttgagatggaactggatgagctcagactgcagacatccttctttccagtagctccctccaccaccgctgccgccccccgcaacgccgcttccggagtttctgctgccggttcctggggttttgcccgcagaagaggaggatggagaaggggaggccccctccccgccgctgccgcccctctgctgagcgcgtacgcctttccctcgccagcccctgggcggcggcggctgcggagcgcccccctccctttccccggagccgccgccggctcctcctccttccccgccccctcctcccccttctccgagcggagggggttccccgagtttcgagggcacggactctagctcccgaggcggctcctcgggcggtccgggcctcctgccgcccaaagcggccagggtcgcggcgggggccgcttcagcaccagccacaggctggacagctcccggagcggcccctttgggcgccaggggcgtcgccttctcggccccacctccgcctcctcggatgctggcgggcggccccgtgcggctcccggtcttgttaccctgctgttgctgctgctgcagctgctgctgccgaacagaattgagtttagtgccggcccccactggggaccgggtggccgcgattgtctgtcgcagcgaactgtccctcggtctagcgggtgactgagctcgctgctgctttctgctgctgccctccgggtgcagacgagcctcagtggctgcagcggcgggagaagctgctgctgtggcaggggcagcgcccccgattggtggctgactcatggctatgaacctaccagatgcgatttggaagagcccattact

SEQ ID NO: 222930 - DNA, 1080 bp, Homo sapiens
  chr6:130686372-130687452
  hyper
gaggagtaacctgaacctctcgttggctttgatgtttggagtcgaacatccgcactgctcatcgaagacccccgtgcttcagttccctctgtcttccatttcccccgcccatggttctcgcccccccaagccgttctccggaaccccttgccgggccggcgggaagcgtggaccgagcgggccttggccgcgtcttttccggccaggtttggtttagctcgcgcagcgcccgcgcagcccgccagggggaccccggcccgccgggcggcatctgaggagaaagcgtccgaggggcgtggagccagggtcctgcggtgcctgctccgggaatactgcgagtcggctggagctccccagccgctccggagaactgggggagccgggtccctggctcggtaaccggtggtcccgcggtagctagaggcgggccccacgggtgggtgtgtccgtttccgcacgccagccttccagcccgggaagagcgcctgcaagcgggtactttgttcccaaagatgggttttgtctgcgggtgatttgggctctcgaagtgcaactttgtggccgggacgcggatcggccggcctgggctcctgcagagcagatcctgtctgcgtcctccaggaggagtgggtggcaggactggggtttcccacaggttttggggcggcggcgagattggcacggtccggggtcgcaggcgcgcagccacgcccctggaagtccgccccggcccccgcccccaacccgcctcttcggggctttatggcgtgaggtttggggctgggatccatctggagccgagcagaaaacttttcccctcccgttcccggtcccttttgtctttcttggacgcggtggcggcgccgcctgagcggcgactccctctcccctgcccggcttgctgcgcccggtgccctccgagggcaggcgcgcctggactctgcgcccggatggcggcggccctctgtgagcaccggcagcggcgcatcccctgccccgaggcctccggtgcccccccggcgcgggcataggggcgcccccaccctccgtccgcttgcaccccttgccacccgccccctc

SEQ ID NO: 222931 - DNA, 271 bp, Homo sapiens
  chr6:130687478-130687749
  hyper
gcccgagccctgggatggggagggagaccgcggctgcccgcggcggccgagattcccgctgacgcccccgaccctgccgccttcttcgtccgcctccagaggcgcccgacgtcccgacagctcctggagtgagaccaggactgagaacagggagaggcgacccgacccccagggcccggtgctcaggacaggtgaggggaaggaaagggtgctgacgggagtggggaggtgggtgggcggccaccgcagccgaaaccgggcacttcttcag

SEQ ID NO: 222932 - DNA, 380 bp, Homo sapiens; identical to SEQ ID NO: 43472
  chr6:131383361-131383741
  hyper

SEQ ID NO: 222933 - DNA, 193 bp, Homo sapiens
  chr6:133146628-133146821
  hyper
cagtaaaaataaaaccgataagaagtgagctggtcttcaaataaacttctatattgcagtaaaactgcgaaggtgtttctcctgtcatagcaatgggcaacaacacgaccttttgtgagtcagaaacctgcctggccaatgaatccaatacatcccagtacgggacacttttaaagtccgtgttcaaagttta

SEQ ID NO: 222934 - DNA, 1560 bp, Homo sapiens
  chr6:133561747-133563307
  hyper
cctttgggcgtctgggacggatgcctatacctgcacccagcagcactggaaggggcccaggcccttcgcagcacagcctatccccagaccgcttagtccttcataacatatatctccacggaaaagggtatttcctcccgtcagaaaaagcgccccagtctggtctgggttggtttttatttcacgttgttgcaagtaggcgaagtcccttctgtctcctcccttggggtaagtggaaaggagtccggcagggggcccgcagtggcctgcacaggggaactgggtagcgagagagttccaggcaattccgggggctgccccacagaagcaggtggggatcgacagtggctctccggcccagggaggagagcgcggtcgcgggtccctcccctcagcctggaggctgcagccgctcgagtcggcccgggtgggggcggggtgggggcggcgcggagggcacggagattacggcggcgccacccgggacatccagggccccgaggccctgggcggtccccacgcgagatcgcaaaccatgacaataggcagtcacccgaggtcaaataaaaacggagtgggtcccccgcgcgccgccgccccccgcgtccctggcggcctcccccgaggcccccggcggcctcacgagcccgcagtagccggtggcgacgtcgcccccgccccacctccctgcgcaagtgcgaggctgccggcagcgcggcgcacgctccggccgttcccggcttccgcgcaaaacttccatcctgtccacgtgaagttgtcgctgccttagagagggggaaagagctgcgggaaaagccggggagtgacgactgcggcggctgggcgcgctctctcattttcttttcttctcctttcccccctgtcgcagtccggagttttggctcctctcctttcctcctccccctcggagccggcttctccctccgccccgcttctcccccgcttgtgtacgctatttgttgtggggtggccgaaggggatgtcctgttttcaccagaggcacagcgcgaaggggaaacttcgacactggaaggaacgagaataaatacttaattacggacgcactgaaccgcggctgggacagacacttcgggaacccgaggcggaccgggcgacgaggtgagtgaccccttcttccaacccccgccccagggctcccgggggagcctgagttgagagaacccccaaactttccgggaaagtgcgcgaggctccgccggggacgccgagcgctgggtactgaggacgcgcagctggacggtgcgtgggcgcctgcgtccccggggggcgcttggaggccgggtgccccacgcctgagggcccgggccgctcggaccgcagcggtgctctctgccctagaagacgtccccaagccccaagggtcccttccgagcctgcctgtcccttccggggtcggcgcggagcctgcgcgtaacggagttcatccagcagtccagcgcgcggcttctacctgcaccccgcctccacctggcagaggcgcgagcatcggggtctcccccacatctttcttatgacgtg

SEQ ID NO: 222935 - DNA, 288 bp, Homo sapiens
  chr6:134212294-134212582
  hyper
ctagaagctgtagtcaaagccggtgtttgcgatggaagaaacgaaagtcggactagggaaatagatggtgatgaaaggcgatgaaagcgacagggccctgaaacccgaccaccgcctcagaaggaggccaggagggcgcttcgccccgaactcggtgcccagtaggcacaaggtcgttctgggcttcccggctcagactgccaaagcgtctgcctccaggcagtgccacagcaccacccactctcccactctcggcttgcccggggcttcctgcattgagtctcacaa

SEQ ID NO: 222936 - DNA, 44 bp, Homo sapiens; identical to SEQ ID NO: 200662
  chr6:135503608-135503652
  hyper

SEQ ID NO: 222937 - DNA, 535 bp, Homo sapiens
  chr6:136870742-136871277
  hyper
ctgaccaccaaatcccgggctgcagagccaacaatcctcctttgggctcctgcacagactaaaaacaaaaaactctgagaactccgacaagtcaacgaaagtctgatcccgtcaagcccgcactcgcaaacccccaccgtgctgcactgggccccggccctcccgagctcggtcccctcggacgacggtcgtcgccactgcgggcaccagattggggggcgggccgctcaccccgcggtcctgccccacaccgaccccgctgaggagcccccggcacccggggcgaccagggaaggcgggaggaggtgcccagaaactgctcgtcctgccagtcgcacctggccgacgactctctggccactggtttggtctgggggatacgatttcccattcaactgaattagacccgaggccgcggcggggagggcagcggccggggtctctccgtttcctcccccggctcgcctccacctgttgcgggaaagtcgcggtggagcgcccgagggcggccgcaaccccggccggggccgagccg

SEQ ID NO: 222938 - DNA, 1440 bp, Homo sapiens
  chr6:137242908-137244348
  hyper
tcccgccgctgcaccgggagggacagtgggtggaaaaagccgctgcagcgccggggcgagggggctgggggcgccgtcacttgttgcgaccaataaacggcgctcgatcctgatgcgctgtttctaaaatctttagctgtgtcccgatccctccaacccaagcccctcggccaggaggaaggggcaagcgagagccgctggctctgtggggggagaggggcgccgcgccccaagagcccccgtcccgccctgcggcagccgccccggggcgcccagccgcccgcttccctccgcagagcgtcttccctgacggtgaaaccgcgcgggacacaacccaccgcggctcatcacccacttacaaatagctgtcgctaggattcccgccactcctctcagaccggcccccccgccacctctgccacttttcggagtcccccgccctcgtcactgcctccccggagctgcggggcagtcggacgcagagctgcctaaccgcaagaacgcctggccggagctgccctctgcagccgagccggcgccccctgcccttcgccgccgcgctgggcgggcgcccccgccgccctcactccgctgctcccggctcctcgcgcgcaggtcgcggagctccgccaccgctgggtgcggcgaggccggcgcgatgcggcagctgtgccggggccgcgtgctgggcatctcggtggccatcgcgcacggggtcttctcgggctccctcaacatcttgctcaagttcctcatcagccgctaccagttctccttcctgaccctggtgcagtgcctgaccagctccaccgcggcgctgagcctggagctgctgcggcgcctcgggctcatcgccgtgccccccttcggtctgagcctggcgcgctccttcgcgggggtcgcggtgctctccacgctgcagtccagcctcacgctctggtccctgcgcggcctcagcctgcccatgtacgtggtcttcaagcgctgcctgcccctggtcaccatgctcatcggcgtcctggtgctcaagaacggcgcgccctcgccaggggtgctggcggcggtgctcatcaccacctgcggcgccgccctggcaggtgagcgggcccccgcgccgacccccagccgaccccacccaccccgctccgtcgggcagagaccgcggggatcactgagttcaacgacctcacttccagatggggagactgaggcagagagagccggagagctttgagagtggtcgctcagctcgcaaaagggacttccgagacccagagagctccccagcgccccaccaagtccccctgccccctaatgtcctggcttccgaccctcgcccatgcttcacccggcatcgcccttcctgtcgccccctctcctggtcttcccctgtcaccccattctccgggagaggtgggagggccgcctgagcctgggagc

SEQ ID NO: 222939 - DNA, 141 bp, Homo sapiens
  chr6:138428449-138428590
  hyper
gctcgcaggccaggccgcagcggatcatgttgacgggcggcgcggggccgagcggagcggagcggagcgggtcggaggagcgcgcgggacgggcgacagcagagagtggcctgcgagcgcgggcgccgccacaaaagcgaa

SEQ ID NO: 222940 - DNA, 138 bp, Homo sapiens
  chr6:138724644-138724782
  hyper
ctgcctctgcggcggtcacgtcgccccggagagcctcggagctctggctgcccacgatgggagtcctctggggggcgccggagccgtgccgggtccccgccgcaggggacagtaacgcggagtcggcctggccggcgg

SEQ ID NO: 222941 - DNA, 240 bp, Homo sapiens
  chr6:139013523-139013763
  hyper
ccgacccagggccgccagggggcgggcgggagcagctctccgggtgcctcccccgccggttcccctcccccggcccgccggccactcacggattttcactcggcggtggtccaggcgcgcagcggcggcttgcagggcgtcgaggcggcggtgcagcgcggcggtgcggtggcccagcgcggccgcctggccctcgagctcgccgaagatgtccccggcgcagcgcgacaggtcggccag

SEQ ID NO: 222942 - DNA, 240 bp, Homo sapiens
  chr6:139695068-139695308
  hyper
tatggtctgccatttccagtcctggaagtgaaaagggcagataatgagacccgcgccacacgtgtcgcccaccacagcgcaccccacttttgctcgcctctgccccccaggattcccgggcgcacgtcggctgcgaaccaccacccccaagatcccactaacagcctgtgcacccgggctagccaccacggaagagctaccactcataacacagccggacgctgcacaaacagccccttc

SEQ ID NO: 222943 - DNA, 313 bp, Homo sapiens
  chr6:142622578-142622891
  hyper
cagcccgggagcgtggcggggggacccgcgcggggactcgggtaggctgcaaacgctggggagatgccacaggagcgcctgccttcccagcttctcctttctctcgccgagggtctctggggttcagcgctcccggcgtttcggcgacctccgggtccgccctgtcccctcccagctggggagctgagcccggctctgcgcccatcgccgaccccggccactctcccttcgctgctcgctccaaaagcgcctgtcccgccccgcggggcgacttctccctttcggccctggggttgaagatcctgtgtggggc

SEQ ID NO: 222944 - DNA, 180 bp, Homo sapiens
  chr6:142623163-142623343
  hyper
cccacgcacaccctacttcctcagcttctcgccctcaccctgccaacttccctgcgaggagggacctgccgccagcctgcttcctcgtccgcaggccctgcgctgaacgctgccgcgcccagggttcaccttgcgccgtcgggaaagcccatgaactctccagaaacggcgtaaaggagg

SEQ ID NO: 222945 - DNA, 105 bp, Homo sapiens
  chr6:143266117-143266222
  hyper
aatgcccagagccagcgccttcgctgcgctcgctcggccgcaggccggcggcccgggcctcgcgccgccagcccgcccggccgcctgcgccgcgcgccgcggccc

SEQ ID NO: 222946 - DNA, 713 bp, Homo sapiens
  chr6:143998943-143999656
  hyper
agggggtgcgggtgcggcggggccggctgggggcttcccccaccccctgctcctgcgccctccccccgcttccccctcctcccctccctatcgccctcaccccccttcttcccccgtgacccctgaccccagctaatctgcatagaggaatgacaggcatccgctgggcaggatccgccgcgccggctgcggccggccgggctgggagacccgcgcggggtagaaggtgaggggacccggcgggccgctcggcacaggccgggacatgaacgcctggaagtctggctgggagcggacccatgatcgaaggaccaaaggagccgcttgatcgctggacctggccctgcgaccccagtcatgggccagacctcggtgtccacgctgtccccgcagcccggcagcggtgagtccggggcgcacgcgatgcgctcccgccgcgcgggcgcagggctggcggcggggccccggggcaggcagggttagtcgtctggtcgggttccgctcggacccgccaagtccctcggagaaaccccagaggtagcgctcgccaaactctttgtcgtgaaagaggaatgccttttgggatccagccgattttaccttaaaggcacaggctccatttttctgtgcgcgatgcctcgctgtggttttttatccaaattatttcggagccagaaacttacgggaaacgccatttgcgtattacagtgttt

SEQ ID NO: 222947 - DNA, 46 bp, Homo sapiens; identical to SEQ ID NO: 200686
  chr6:144537939-144537985
  hyper

SEQ ID NO: 222948 - DNA, 225 bp, Homo sapiens
  chr6:144606893-144607118
  hyper
agcccttggccagctcggggtgcggcggtggcgaccggcaggcgaggaggcccgcgggcagcaggtaagcccatgcattattgaagcctcgggctggtaatgtgactacagcccccgagggaatggggcgggggccgggaggaggatggctctttctgtggttcttccgcctgggatcggcgtcccgagctgcttcccaagtcccagagtcgaagatgggagtaa

SEQ ID NO: 222949 - DNA, 209 bp, Homo sapiens
  chr6:146136028-146136237
  hyper
ctgaccccgcagcgtcgtggctagagtagggtctggagagagctcccactgtggcgagtcctgtcgttggattcccgcggcgccccgtaaggctccgccccggcggtgctaccaaaccctgttcgattttagaatcgtacattcccagagggaatcctagacccctcattttacagttgaggaaacaggcccaagtagcatgacttgtt

SEQ ID NO: 222950 - DNA, 221 bp, Homo sapiens
  chr6:146136589-146136810
  hyper
tgaagccgcttttgcagtgtaccttacatatgactggggagtaaagaaatcccacagggctgtatcaaagaatggatggatgtccacgcccccgctaccaccaccaagccttggtctacggccgagggacagtgattccgagctctgggtgttgggagccgctcacccgcccccacccctctgtcggggactcctgcccaccccgtcgcaagagaattaca

SEQ ID NO: 222951 - DNA, 800 bp, Homo sapiens
  chr6:146864477-146865277
  hyper
ggcccggaccccacgccgaccccggccccggggggggctcagcgacctcggcgcctcctcaggcccccagtgaacctccggggcccataaaggctccaggccggctccccggaggcccaccagcgggcgtctgggcctccctccgcgccgcgaccgccaggaggcgccgcccgggagaggaagtccagctgggcccggccgggcttcggaggcgccgcccgggagaggaagtccagttgggcccggccgggcttcagaggcgcagggcgggagccgcctcgcgcagggtcctccccaagccggcgccaggccctgccctcgtccggccctgccctcgtctggccccgcccgggccgcgagcactggcgggttctgggtcctgtgaccggtcaggcggcgtcagcgggcgcggcggagggctggccggcctcgggggagtttccgcggccgccgggggcgcggcggcagagcgcgaggccgggcagggggccagactcggagtcgaggcgcgcccgacagccgcagcgctcatggcgggcggaggagccggggaccccggcctgggggcggccgccgccccagcgcccgagacccgcgagcacctcttcaaggtgctggtgatcggcgagcttggcgtgggcaagaccagcatcatcaagcgctacgtccaccagctcttctcccagcactaccgggccaccatcggggtggacttcgccctcaaggtcctcaactgggacagcaggactctggtgcgcctgcagctgtgggacatcgcgggtaagcgcggccgcgagttt

SEQ ID NO: 222952 - DNA, 512 bp, Homo sapiens
  chr6:149771949-149772461
  hyper
gcgcgatgcgagcccgggcgcgcgcgtccccctcgtcgtcctcggtcgcgtacactgaaagtcccccagtggcgccgtcgccccaggccggctccgcccagacggagcgcccagggaagcggtcggagcggggtggacgggcccacgggtcgtcgggtggcctgcgcggggaaagcaagtcgccgtgcaggtccctagggcggtgttcgccccgcggctggagctgcaggccgggcggaggcgggaggtcgcccggggagaactggctctccgggctagggaggctgagcgggcctggcacccggccgcccgcggacacccagtcgggcccgcccagtcggggcgtgaggctgcaggcggggaccgggagaggcggccccaggggccccaggtcgtcgctgaaggccagccgagagaagctccctcgcagggcggccaggtccggggacccccgcgccggcgggaggctgtgcgcaaatggttcccggggggccgcccgggctcctgcggag

SEQ ID NO: 222953 - DNA, 195 bp, Homo sapiens
  chr6:150185446-150185641
  hyper
gcgacgagtcggcctcggcgttgatcagcaccaggtgtgtgcgaacagtggccgcggcggggtggagccttggtgagccccgcccccccgcgcggccccgcccccgcgcgtctcgcgccggctcctccagggctgggagagcaggccccggggagggcagcctcagaacaactttgctcccgcgccgctgcccag

SEQ ID NO: 222954 - DNA, 220 bp, Homo sapiens
  chr6:150921277-150921497
  hyper
cgccggccccctgcgcgcccctccgcagtggggacggagggccttggggggcgccgagcggtggggacagagggcgccgggggcaccgcgcggtggggacggagggcgctggggggcgccgcgtctcgggggtcggagtcgggtcggggatgctgcccgccgccgccccgcttggggttccgcgcccccaagttcccggtgctcccgcccctcgccccag

SEQ ID NO: 222955 - DNA, 1409 bp, Homo sapiens
  chr6:151561222-151562631
  hyper
aatccagtgtccccggcaggctttttgctcccctgctctcttgccttctgaggccctgggtcgtccccgcagctctagtcgccctgttagaaacgggaggcgcccgagggccgggtgggcggctgcctggacctgggctggcgcgtcgcagcgcctctggtcccggcagcctgggggcagatgctgctgcagggcgtgtctggggctgtgctcatgtgatgaagcgagggaaaaaccggggggaggggggcggaggctaagaggtggcctttttttttttttccttttcttttaaggagtttgccgcgagcgcgtctccttcattcgcaggctgggcgcgttcgcagtcggctggcggcgaaggaaggcgctctcgggacctcgcgggcgcgcgtcttttggctcttgcccctgtccctgcggcttggggaaggcgtaacccggcggctaggcgcgggagaagtgcggaggagccatgggcgccgggagctccaccgagcagcgcagcccggagcagccgcccgaggggagctccacgccggctgagcccgagcccagcggcggcggcccctcggccgaggcggcgccagacaccaccgcggaccccgccatcgctgcctcggaccccgccaccaaggtacgggcgtgccgggccacctgcgccgggaggcgcgggtctttgggggtgggggtgggggtgggggggtccctccgatttccgccgagagaacttcccagcccatccagccgcatctgcaaactcaggagtgcgaacccctctttggaggcttttcagggtctttcgcgccggggcggggccagagcagcggcgagcgcggcggggggcttgcatctttgtcgcgggtctccaggggaggcgactgcgccatgcgcaataataaaacccgcgccctgcccacggcggctgagcctttctgcgcactcttccggtgggagccatgcagcccgaggcggaggagctgcgcggagggggatccgtggagaatggaccccgggccgggcctccggagctccgagatgcggaaagtcagctgtgaggccaggactcgtggtggagcccgccggggagcccagccaccctcgggttccccgtcgcgtaccgccctggatgccagcggtgcctggagcgagcgggtttggtacccagtcctcctgcggcagcggcccgagcaggcaccgccttcccgaggcagagaaagcctggggtgtagctcgctcagagccaggaaaaacctgggcaggcgctgcgtttccagaaggaatgacaggtttcgcaaaccagccagcgccctcgcgttcgctcagcgctttgcctgcagactcagttggccaaacacacgctagagtggctagaagttctcaaaggatggggtcagtgtaacgagcat

SEQ ID NO: 222956 - DNA, 406 bp, Homo sapiens
  chr6:152623124-152623530
  hyper
atcgtcagcatcttgcacttggaattcaaagaagcgatctgctcctggtagcccttaattttctgcgccagctcctgaggaaacatttcccccaccggggtgtcagagcagcatcaaaaggaaacagaagtagtagcgttcatcttcctgcagggcgagccaatgagcgcgcagagccgcgcgggcccgggaggcaggatgtgtaggcggcgagtcctcctgcatctcgctaccgagccagaccgcaggctgcgcggcgcggcgcaggcacagccaaagtgcccgagcccgcgtccccgcgtcggtacaaaaggagaaatgaggggatgaggccgaatgagtggtttctaatcgcgagaggccccatatggaatcatgaacttccgcaacattaggaactgacaac

SEQ ID NO: 222957 - DNA, 960 bp, Homo sapiens
  chr6:152957540-152958500
  hyper
acatctacgtacgagatgcaaagaggctccccaacctcctagtctccttatctatgagtatcgcacacgtacacacatcactgccaccaccccctcccatcaagcacgcagagccccagcgtgcaggcacaaacttgctgacaatttgtctgcaatgtgttcgtcttgcacctctctctcctctccctgtctctgtctctccctgtctcccagtctctgtctttccttttaccttctctctcggcctcgttcagtttcccagcagcaaggcgaagcgagcgaacgcttcctcccggctctctgcgcccaggctcggcgggaccccggggatgcgcggctgtccgcccgccctgtcgccgggatcgggcgcggtctgcaggactgcgggagcccagccgccctggtgacagaggacaacaatctcagcccgctgcggccggcggccgcggcccggcgcccgcgctcaccctggctggctcgcccacactcactcccgcgccgggctgctcagccgcgctccccgccctccgcgaccggttcctcctcccggctgctcgctggggggtgaggcctcccccttcgccctcccccacgcatctactgctcctgtcgggaaggaaggtcgcccaggccggttcagcctctgggcagggtccctgcaccgccctggcccgccacaccccctccccggctccgtgccccgcgccccgcgcccggctccgggatgcgccggtgcctggaagagctgggggcggggacccggaggctcgcaggcttccctacctcctggagatgcacggccttgggcgtttctccgcagctgcaaagctgtgctgtgacccacccgctcagcgagcctttataccgggaccacctcccgggggtcgaggtgggaaggaaatgtccctgagagccgggacgcgctgcctccgctgcctggaggagctgcgctgtcctgcc

SEQ ID NO: 222958 - DNA, 240 bp, Homo sapiens
  chr6:154831367-154831607
  hyper
ccgtcaagactgcatggccgcggtcagccagtcgtcccagcgcggctccgccaggggagcccggccctctccctccagctgccacagtccagctgcagctcctccttcccccgccgccgccgggatcccgggcacagctgctgctcccgagcgacggcagctgcaggcacgccgggctgcgaccccagacccctggcctcggctcggcacgggagcctcccggcccgcgaccacttcctc

SEQ ID NO: 222959 - DNA, 540 bp, Homo sapiens
  chr6:154831653-154832193
  hyper
ctgctggctctccggggtccccgctccgcgtgcgctggcgtcccggagccttcccggcgcaggtcccacctcctgcgccgccctcccgtgccgccctggcagggccgagcgcagagcgtgcgcgctcgggttgcaaagtttcagctccggttgctgcaaaccgaataaaagagagggcggggccgagggtctagggaaactcgtgggagggggcgggtccgcccgaagcggcggactcgggttactttccctctctaagccggtccggctcacacccgcagcgtcccgggccccgctttccttttcaaggggcgggttgtagatcgcgcgcgcaccctggagagcccgctggtttgtgtgaggccctggccctgtgggtagcagaacactctgtctcgctgtgagcaacaatacactaaaaaaaaaagaaaagaaaaaaaaaagtaagatctgcatgttctgttcattttaaatgctttatatcgtaatactactctgccattaagccgtcattttaggtttcttaaagtagaacaattt

SEQ ID NO: 222960 - DNA, 1128 bp, Homo sapiens
  chr6:155316128-155317256
  hyper
tgcgtgcctttcctcggtgggacccgggaagagccgtctttaaattccttggggaagggacggggtcgcactggcgcatcgcatccccggtagcgggcagagcccccagctcacagtgagcgcgtgctcgatgtttcttgaattgttttatttgtgttgttccaaagaaagcgcgagggacatggtccgggaccagccgggagctggcgcgggggtcctgggcctgacgctgggcggggctggggcgtgtccggggcggggcggggcgggaggtgcggtcgcggctcgggcctggcaggcgctgcgcgcggggctggggcagcggtaaccgtaactgtggccgcggccgccgcaggcgcacagcgcgcgtccaagtggagaacaaagtgacccccagaacttctccaactcctcccggcgttcccgcgagggccacgcgccgagggtagcggagggcggcgcgcgaccggccccaccgagcccggcgcgcgacccgaggtaaggggcgcccgggtgagggcgcaggagggcgacgacccgcgctggttggcggcggctccaggtcccctgcgggcggggcggcgcgcggccggcggtcccctcccttcccctttgttggccgcccctctctgcccccgctttcctgggagtcccgcggaaggtcgcggctgcggggcgcggcctggcaccctctccccggagggcggcagcgtccgggcacagcctggcacgggggacgaagcactttccagaaggctctgaaactaggtcccctggtcccctcgcgctgcgcgacacgccaggacccactttcagccccggtcccatcccggatgggaggaggcggcgccccggcctcctgataccgaggttctcgcccaaagccgagccgtgggtgcccggaggggagcgcccgctgcgcccacgcccgcccggcgacctcggagcctcagaaaggcgctgcggcgaagcaggatcccaggcggtcggctcagcgagtgtagaccgtgcggtccctgctcagcccctccggcctttccgagcgcgggagccatcccggacgggcgcggctcctgggggggctgaggtgccaagtttctgtgaaagccgacacgttgtgcccctaat

SEQ ID NO: 222961 - DNA, 59 bp, Homo sapiens; identical to SEQ ID NO: 200718
  chr6:157802884-157802943
  hyper

SEQ ID NO: 222962 - DNA, 168 bp, Homo sapiens
  chr6:157803299-157803467
  hyper
taagtggtggcgaccgctcccccgacgccgcactcccctggtctcccctgtcccccgcccctcctcgggctgctttcgttttctagaagtcttatctactgtaaattgttatataatgccagtctgcgctccctcttttttcttttaaaggtctgattgcttttgggc

SEQ ID NO: 222963 - DNA, 512 bp, Homo sapiens
  chr6:158244130-158244642
  hyper
aggaggcgaggaggccgggccgcggccgagggcccagggcgcgcttccggcgggcgtcgcgcgcgccgcggtaaatgggaggctcggccgacaggggcgggggccgcgcagccggggactttcaggaactgcaggagcgtgcggcgcgggagtagccgagcgcccagcggctgggcctgagcgtcgagactcggggccgaggcggaggagcggccgccgcgccggggcccagccggagccgccgccctcgcccttgcctttgcctgcgcggctcagaatcaccatccgcggcgcgggagacgagccggccgtcccgggccgggggacccgcccgccatggccaccaaggtgaggggcgcgcggcgcaggccgggccggtcgctcaggcccggggcggcgcggagagggtcggggccggggccgcggggagggtcggggccaggggtggtcgaggggccactccgcttcctcggtggagtccccgggcgggtccgcggcccagccagtccctt

SEQ ID NO: 222964 - DNA, 519 bp, Homo sapiens; identical to SEQ ID NO: 200720
  chr6:158402115-158402634
  hyper

SEQ ID NO: 222965 - DNA, 1318 bp, Homo sapiens
  chr6:158957207-158958525
  hyper
agaagccagaagtcgcccgcgggagctgtccgcggtgctgaacgcggtagccggcttcagcctttgacctccccagcaggaaagggccttcggtccgcccccaagcaccattttccttcgtgctcccacctccagtgtcttcccttcccagcgctgccaatggcgagggcggcactgagatttttgtcctgggcggcagacgaccttgtgttgcacttcctcccccgccttctgcctctcccggggcggcggcggatgggcgcggaggcggatgggcgcggctccctcccccactcaggcctcttcacggggcggggggccgggtcccccagcccccacccgcgccgtgtccagctcctcgcgtgctcgcggcggagccctgagcgcactgggtccgagtcctgcgcgccccctcaccacctcccccgcacctgctcctcctcctcggtcccgcccagcgcgccagcagcccgatccccagtgctgggagaagagagggggcgcaggcggcgacacaaagggtggagcggcgggaccgggacccgggaggctgcgcggcatggacgccgagtaccctgcctttgagcccccgctctgcagcgagctcaagcacctgtgccggcggctgcgggaagcgtaccgcgagctcaaggaggacctcacgcccttcaaggatgaccgctactacaggtgggcgcggcgcgggcagcggcggggcggccggaggcttccgggccgcagtcccctccgggaccccggcgcgccccggccttggcctggtcccgccgacggccgcctccgccggccgggcgcggagcctacggatggggacggggtcggggcggggatctgggagggaccaggaaggggacggggagcagggatactggcagcggcgggcaggttcctggattcagggcagcccggcgcccccgggcgaagggccgatttccgttcagctgaaacccaagccgaggctcccgcctccccggaaaggagctgcgggttgtggctcctccctgcgccccgcgtcgttctccccccgcgcccgcctcgccgcccccgctcgggcctcacgcggcgcagtctggggaggcgaccgcgcgcgctgcggcgtcgggaggagggtcttggccgcagctctgagcgccctaggctttgcaggacgcctcggaggcgggggcgccgccaagggctgggggcggatgggcgcggcggggaagacgcggcggggcgccatgcggggacacggcgcctgggagcggctgtgtggaacttgtttgcgttcatctctgtctccctcttcagcggcctaggg

SEQ ID NO: 222966 - DNA, 479 bp, Homo sapiens
  chr6:159290684-159291163
  hyper
cgccccgccgcccccggatccgcgcggctgccagaagctcccctcccccagatcttggcccctccctgaggcgcgcgagcgtgtcgtcgcccgctcccggccaatcagggcgcgcgaccaaaatagcgccatataaaagctggatggcgggcgcggccggtgcagagcctcgcgctggggtggggttgcgcgcgcaggtgaggggggcggggccggcgcgaccggcggggcggggcggacactcccaccgcgcacctgcttctgcctgacgtgtacccggaaggtcgtcagctcaggctccaaatatgtaacagtgagtttctaagtgagtcacacggacgcggttggtttccagtgaggcataactcatcgcttcactcttctcaacggttccctcttcggaaggaagcgcagtccgcagcgtcgtccgagggcgtgatcgcctgcgtcgcacccgcgtctccagtggccaccccttg

SEQ ID NO: 222967 - DNA, 360 bp, Homo sapiens
  chr6:159589986-159590346
  hyper
aaaacccctgacgtgggcgcgccgggtgcgggtagggacgtggaaggactgggctagccacaggaactacagcgctgcggaccgggtgaggggtcccggcccgagtccccacttggggcgcagaggtgtttctgtaaggggacaaagggcactcctcggcgcgatgggcgacttccccagccagaaaatgagagggttagacgaggggaggaacttcctcagccacttggcccggcacagcgaccgccccaagttcagaaccgctaagtcagtccggggcgctccggccccttcgtcccgcgccccgcccgcctccagcccgggccccgccgcccccgtcgcccctgtcgcccgggtcgc

SEQ ID NO: 222968 - DNA, 907 bp, Homo sapiens
  chr6:159590432-159591339
  hyper
gtggcggagcgcggctgccggtgtgcggccgggagcgatcgccgcggggcaggggcgcggcgggcaccgcgcagagcgcgcagaacagacggacggcggcggggacccgacggcggcgcctcggcactccccagactccggccagcgcccccctgccagccgcaagcacccagccccggcccaccccgggctctcgatggcccccgaggccggggcgaccctgcgcgcgccgcgccggctgtcctgggcggcgctgctgctcttggccgcgctgctccccgtcgcctcctcggcggcggcctcaggtacgcgccgcgcccgggcccccggcgctcctcagctccccgcgcaccctcctgcgctcgggccccgtcgtcccgctcagtgctggctacgggtcgtgtcactagcctgtgcgtcctcgtcactcgcgggtcggggcacttggcgccctgtgtgggtggcgggagcggggacgcctcggtgcccggggaccgcagcgcgctggcgtttaactttgccgtcgcccgccttggagtcgggaggctccagccgtctaagtgtcccgggagattcaggcacagcggggaaaaaaggaaaagaaaggcgactttcagcgtgcggactggggtaatgcctttctttgcccagaatttctcgggagcgtaggtggtcatcctactttctccgcgttcacctctcgcgaggcaggatgacgggcgcactcgggagaccggagggaggcagagcagggctgttctagaaggtcgtgggggaaaggctgcgagctgccgcagggcgtcgggtgcctctgcgctccagaggagaagcgctccagtgccagctcggctccaggcggcaggaggcccgcgcgcccggggggaacgttcaagctgggagaaaatgt

SEQ ID NO: 222969 - DNA, 240 bp, Homo sapiens
  chr6:160389724-160389964
  hyper
ctaggctgtgcgaaggcatttacctccctggcactttgatccaagttccctattttcccctactggtcgatcgaggttgggaacagttgctctaacctgggaagcacccgccacgatccagcagggcgcggtgggaggggaaactgaggcccggctaggcacccccgccgcgcccagcccgccgagaggctcaggccccgggaggcacctggagcctgcgccccgcccgcgccgcttcct

SEQ ID NO: 222970 - DNA, 240 bp, Homo sapiens
  chr6:163836402-163836642
  hyper
cccgccggggcggcccctttccccgcttgggatggtggggagggcgggaaggtcacggccgggcgggaccgagcgccggggggactgggaggccaggagggcgcacaaaggaggtgccgggccgggcttgcggcgggcgggcgggccggggtggacccgccggtgccggacgccccctgcccggccgggaccccgcgccgctggcgtccaagttggcgcgttgcggagggctgcggggtg

SEQ ID NO: 222971 - DNA, 180 bp, Homo sapiens
  chr6:163837345-163837525
  hyper
cagtacctgaagtattaatttctagtagctgtgggtttctgtggacgcctagagaaaaaaaagaccacaaaaaaagtctgtttcgaaaatcgactggccaggagtttgtttgtttttttttcctgcttagaggcaccaccggaggactgtgtaaaggaaactgaaaactacaggttgaag

SEQ ID NO: 222972 - DNA, 780 bp, Homo sapiens
  chr6:166401982-166402762
  hyper
cctggagggaggctggggtgcggggaagcagggagtgcaaacagacattggttctctttcctcttcccattcatacatttctgttggagtcctagggccgccgcgccgggagtcgcaatgaatggatggatgcccgcgcgctgggaccaccaggtccgcagagatgtcgccggcgctaggggcgctcctcccgcgtggggacaggcgccctcgcctaggcgcagtgtggggggaccccaaaagacccttaagaggccaaaggcctgctctccccgttctccccaacacacaccaggggtcttttctgccccggagaagttgggacgcaaaacgtagggaactgcgctcagtctccgcaccacgaagagtcgagatggggaccgagaccagcacggacggtagcaacagagaggggagcgcccaagtggcgcaacgttgtggctgaagccaagcctgtcgcctccccctgagtaccgctggcggcccaggaccgtgcgctctcccttcctgagcacccagggatgcactgcgcagggaaggagggcacggcgggagggtgcttgcaggggactgctgcgcggattccccatccgcacccggctcgcggggaatccgtgggcttgcactcgccagaaagagctgctgcaggagcagccggatggtgaggcccgttcccgaccctgggtgggaggaacttaaagggctgagttctgaggcgccaggcacagggcgcagcttcataaatgcacccaaaagcttccatggacagacggcacagat

SEQ ID NO: 222973 - DNA, 420 bp, Homo sapiens
  chr6:166581096-166581516
  hyper
ctccccgccgtccccgaagcccagactcgctacctgagatccaccttccctgctcttggccgccgcccttccgagaaaaggggccccttggaccgagacctgcgacggctcccgggtcccgggtcccggcacagacccgggaggagggcgcggaccaagacttggggggaggggacgggggcagaggggtggggagaagttattccacttgaactccccaaggctctactagtgtaggtctctggggaccgaaattcagtgccctccccataaatagagccgcggcggcagcgctggggtgctcggcggattgggccgcgcacgctttgaagtgccgggcagcctcccattggccgagagcggccatatcagacccagccgggcgggtctgggaggccgggggccaacaatgggctcccg

SEQ ID NO: 222974 - DNA, 660 bp, Homo sapiens
  chr6:166581656-166582316
  hyper
cctgccccagcccgccccagcccgccccagcccgcacttccgcgaggggctgcccggcagcctgcgatgctccctgattcccgcgcggggtcctcctcgctttcccagcgcgcccggatcccgcagccgcgccaggctggaacgttcgcgcggcctcacctgtccccgctccaggcgcgcctccctcccctcccagggacgagcgcatttggccgggctttgggatgcgccgcgctcgtctcgccgcagtagtagtgctgttctcgcgcctccgatgcctcaactctccagtctggcagtttccggtgcacctgtccccacacgtccctcgcccacggagccccaggcggcgttacgcacacccaggatcgtggatcagcctgccccggcgtcgggtgtccccgcggctctcaccatctggaaaaggaaggtccgcgcgcagagagggaaatggacggaaataagcaaaagcaaaacaaccccttctgagaagtgtcctcctcgctctcttataaaaacaggacttgttgccgaggtcagcgcgcgcatcgagtgtgccaggcgtgtgcgtggtttctgctgtgtcattgctttcacggaaggtgggagaaggtcggggctggcggggtggtccggactagtgggactcggggcgctttc

SEQ ID NO: 222975 - DNA, 507 bp, Homo sapiens
  chr6:166666751-166667258
  hyper
aaagaaaaccagaacgagaaagtgcggccagcccgggctcaggagctgggtgggaaacaaagccgccagaaaatgacaagtaaacacgcagccgcgggaagccactgggcggagcgggcgctaatgagcgcgcagcggggccgccacgcccgcgcggacacggagcagcggcgcctttccctgcgactggctgtgtcgcctggagcccggcggccgccaccccagggagaaagctccggtgaggggagcagacgctgggacccgtggtctcgccctctgctctttcctggctggggacgggggtagctcccaggcaaaggccctccggggtctccgcccggggggccccacctgccttgtgacggctgagatgtgcgcgtcccacccactttccaaggcgcctttgaagtcgtttctcattaaaaaacaagctttttgaataaccaaatgttcctttggcgccctccaattttattttactgtaatctattgagttgtatttgtttt

SEQ ID NO: 222976 - DNA, 263 bp, Homo sapiens
  chr6:166667369-166667632
  hyper
ccgtctaaacttctgaagacacctgacagctcgttttaactctgcaaacgacagttcatcctccggggtgtggattcgggctcccacggctgccgcctggggcaagtgcgtctccccgggcgcctacgcggccccgcgcgctcctggcagcgtcgcccccaagccagccccgcctacccagagagggccagtcctgttccgggtcccgagggccttgggaaccccacaggttccttcctcccggggtttcccagcagaccaca

SEQ ID NO: 222977 - DNA, 355 bp, Homo sapiens
  chr6:167275700-167276055
  hyper
aaaggaaataaacagaggctcggaccggcacagggggacggccagacgggatgtcggaagccaagggacgcagaggccggcgggtggcggcgatggagaggacagatccggctcccagaggaggtcgtgagcgcggggcctgcgccggccggaggagggacccggggggctgcaatatggctgctcgggcgccgtcccctccctgccaagccagggctctggggagctgctgccgcttcccgctcgggctggggcgaggaaaggaggggacggcgctgcggcttcggaatctgtactgcgactttggcagagtaaacgctgcacttgcagcttcgaattgaatttcctgcctctc

SEQ ID NO: 222978 - DNA, 105 bp, Homo sapiens
  chr6:167276260-167276365
  hyper
ccgccgcgcctccccggagacccacaccgccacctcccgccgcagaacgggagggacaggaacacggacggagggaccgggacgaggggagggctccacgcagca

SEQ ID NO: 222979 - DNA, 154 bp, Homo sapiens
  chr6:168227314-168227468
  hyper
agcgcgcgtccgaaccgaacctagcaccgctggtcgggaaggaacccggtaccgccggttgggacccaccaccgccagtccagacggaaccctagcaccgcgcggggcccgccctccgacacctccctccctggcggccgcggcagcagcacct

SEQ ID NO: 222980 - DNA, 33 bp, Homo sapiens; identical to SEQ ID NO: 200752
  chr6:168227910-168227943
  hyper

SEQ ID NO: 222981 - DNA, 84 bp, Homo sapiens; identical to SEQ ID NO: 200753
  chr6:168228222-168228306
  hyper

SEQ ID NO: 222982 - DNA, 577 bp, Homo sapiens
  chr6:168720070-168720647
  hyper
ctgctcctgcagcgcggccagcgccgcctccagctgctgctcggggccgtggaggccgtgggggccgcagggcgcggcgggcgcgggcgggggctgcagggccagggcgccccgtacccgctcctgctgcgtggctcgcagcccctgcagctcctgcagccccgcgaacgccgcgcgcaacctcgcgcccaacctacggcggtcccagcccgcggaccccgggggtccgcccggcgtccacatctcccgggcagggtcccggcctcccgaaccccacgagcggcgccggaggcccagcgcgcgcggatcccgagctgtgtcgcgggtcctcctgcgcctcctctctccgcccccggctccgcaggtcgccaaggtgggctggaatctgtggccaggcgcggagggcggggtctgcacgcgccccgaggtcaccgcggcctcccccggacccgccccgccgaccccccagggcccctcgccggctgcgggcagggcgggcgcacccagaccccggggccagctgagcgcctccgtgacttcagcggggagggccagccgggaggaggagcccggggga

SEQ ID NO: 222983 - DNA, 318 bp, Homo sapiens
  chr6:170124883-170125201
  hyper
cgccgctcctctcccgcctttgttctcgggtcgcccctctcgctggtggcgctccgagagagcagcggagccacctgcccaggccacgcttccccgagcatccgcagctgcacccgggggctgtcggcgcccgccccggagcgtgcgggaggcacagcgggaagaagtcgctgagattcggccctcgtggctttgcgtgcccgcgtggttgatgcctccgccgagaacgcggtcggccgggagccggggaggagcgtggacgccggcctggcaggtacccccgcgagaacgtgggagccggtgtatttcagctgcatt

SEQ ID NO: 222984 - DNA, 650 bp, Homo sapiens
  chr6:170605422-170606072
  hyper
ggaggtggtggcggcgccaggcagcattacgaggggcaccagtgcaaggcccaaagcgcgagggcacaggcggcgcggccgtgcggcgggtcatccctgggccactgcgagggcggagggcggcgccagggccctcccggtggaccccagtcgccgtcgtgacggccccacgcagcctcgcgcccggccgccgcctcgtgcgggactcgtgcccgcattcccacctcaccgggtgcagccggcccggccccgggctgtgcgaggcgacggcgcacacctcggagccctgggggccggggtcggcgggcggggccggggcgcgccctttgtgcgctcttagcggaaaccgcgcgttcccagaggagcgcggcccgccgagaccccggatcccgacgccaggaggtgctgcaggagcccgcgcggggtgggggtctccggcccaggcccctcggtacgggccccctgcggccgccaccctccgcctccgcgcggcggctcctttccggctgcatccggggggtcgaggcgtcgcacctggaaatcgcagcctgtgactttgtaaaaaagtgaatggggaagaaaaggcgctgagaggggcgatgggcggacgggccgtgcccaccacagggaggtcgcggcacctgtcgctc

SEQ ID NO: 222985 - DNA, 789 bp, Homo sapiens
  chr7:149020-149809
  hyper
taggcgggagaacacggtcaggcccgcaggagacgccgcggcacctgccagaaagagagccgcaggccaagaccaggagacgcgagagaggtgggcagggctgcccgagagacccaggcggccattgcccgccctgcgtctgcgcctgcgccggagcctcctccacactgcgccagcgccgagtccggccgcctcctcattgcgccggcgccggggcttcctccacaccgcgcctgcgccgatgacaacccgcctctacaggacgcctgcgcaacgccatagtcacctcatcagctccgtgcacttacgagtctctctctgatcgaccacgtgttcctgtcggctcacagaggccgcctcagggtcctcccccattgtcttcctcgcaccctccactgttcccggcccttcactctgcgcttgcgcaggagtcgctcgctcctctctgcgcctgcgcagaggccacctcctccccgcccgtccgctcccttggcgtcgtcttgggccgcgccccgaccccttctgtttacgcatgcgcaggagccgccctgcgcgggtggggggctgagcccctgtggcttcaggtttaaaggcgcgagcgccacccacgcaggcacaagggctcctagtcgttttatttttagcgtaaggttttcctctttaacaaggaagtaaaaaaaaaagttgtgcaataaatattaatcgtccttatatgtactcgggaacgttcgtcctttaggttttctcctggcgcatgggcgccgccaatcatttcggggcttattttgg

SEQ ID NO: 222986 - DNA, 1817 bp, Homo sapiens
  chr7:191992-193809
  hyper
acgggaccggtgccgggagctccgctgccctggcgtcccctgggtccaggcccagtcgctccttgggcctctctcgcggggccgcctccgcctcctccttgccgagacgggcgtggggcacggggtcgccgcccggcggggagctcatccggcggcgcagacgccccgcggctccggggagggacttggcctgggccccggccccgcgctcctctggggaggagccgagaggctgcagctggcggcggcggccccgggcgggagggggtcccaggaagcggccaggccggagccccccactcggccgcagctgctggcctggccagaaccgagcgcgccctcccggtctccgccgcttccctctgcaaaccgcgggcaggaggagccctctccttagcgggcccggagctcagaggcgtcgcggggcgcggccgaggggaggaggaaggagagcgggagcgcagccggcccgggcccagccgtgactcgtggggcggcggctccgccaatctgtgggcgctgacgcggggggcggctccgcggcgctcgatatctgcccgcccgggacgcggggcgccgagaggctcggccaggcgggagctgcgctcggggcggccgctgcacctgcccgggaccccgccggccgctccccgcgcccaccccttccgcccttcgccccccccttccccccagccccggtctcccgggcgcggcgtgagagcagagcccggcccggaggagccgccccttccccgcccgcccgcccggcgcctggagaggagcgcgctgaggatcgggacgcctgcggccgccgccaccgcccaggcccgtcgcgccccggccgggatggacccacacgcccgatgagccccgcgccggcggctgcgagcgccgagcctccccctgctgcggccccagccgccccccgcgcgcccggctccgcggaccaggacccctgggctccccggctgagggcgcggccgctccggagaggccgagcggggacgggcccgagatggcgcggggacccagcgctccggcggcgggcgccctgcacgcggcccgggcccggggacagccccggagctggtagccgcccggcaccgatggaccttgacccgcgaggcggcgccgcgctcgtgcccagctgcagctagaggggcgcgcgggcagaacgcgctccaggcccgggccggcccgcgcggccatgaagatgatgctggtgcgccggttccgcgtgctcatcctgatggtgttcctggtggcctgcgcgctgcacatcgccctggacctgctgcccaggctggagcgacgcggcgcgcggccctcgggggagcccggctgttcgtgcgcgcagcccgccgccgaggtggccgcgcccggctgggcccaggttcggggccgccccggggagcccccggccgcctcctccgccgccggcgacgcgggctggcccaacaagcacacgctccgcatcctgcaggacttcagctccgacccctcctccaacctctcgtcccactcgctggagaaactgccgcccgcggccgagccggccgagcgcgccttgcgggggcgggatcccggcgccctaagaccccacgaccccgcgcaccggccgctgctgcgagaccccggcccgcgtcggtccgagtcgccccccggccccggcggagacgcctccctcctggccaggctgttcgagcacccgctttaccgggtggcggttccgccgctcacggaggaggacgtcctgttcaatgtgaacagcgacaccaggctcagccccaaagcggcggagaacccggactggtgag

SEQ ID NO: 222987 - DNA, 229 bp, Homo sapiens
  chr7:329606-329835
  hyper
cccggggatcccggcgcccggaaagcaccaccgagtctcaggcgcgcccagggcgcacgggaccggggctcacggcaccggggcgctccgaggagacttccgccagtgcagggagcctgcgaggacaccccaagctgcctccagggacggggacggagcgagccctgccctgagcgccccaggaagggagccgggtagggggggccgccccgcccgtcggaccacccag

SEQ ID NO: 222988 - DNA, 138 bp, Homo sapiens
  chr7:557874-558012
  hyper
ggagagtcgggggtcgctggggagcctgaagcactaagttcccacgacgggggctgtggaaagtcattcatcacagcaaagctcccggggatggggatggggatggggatgggggggcggggacgccgcggtgggagg

SEQ ID NO: 222989 - DNA, 36 bp, Homo sapiens
  chr7:558727-558763
  hyper
catcccttagggagcgcggcccggaggagggtggcg

SEQ ID NO: 222990 - DNA, 505 bp, Homo sapiens
  chr7:558986-559491
  hyper
ctggcttcaggagcgacccggccggtaattctgcatatttgcggacatcagccccaagaagaactccggagggagtctggggccgccgccgccgccgccgccacaccgatcacctgcctggacgcctggcccggccccggctgcgagctgcgagccgccctgcgcgcccaccgccggccccgcgctcgcctccggcctcctcttgcagccgccgcccggccgggcacagcgcggcccagcaccccctccgcggcgcgccctcggctccggcgccgcgctccgccctccgctcgccggggccgggcagcgcccgcggccgagccgcctggcagccaccacccgccgcccggggcctcgctgcgccgcccgcgcgggcctgagggcgggcgcaaggccgagtcggcgcctccgccgcagccgccgccgggagaggaggaggaggagtaggcgcaggcccggctcgccggagttgggcgggctccgcagggcgcgcgtgtggagccgg

SEQ ID NO: 222991 - DNA, 138 bp, Homo sapiens
  chr7:822392-822530
  hyper
actcgatcttcctggcgtggccgcctcccgtcacgcagcgtcagaaactcggtcttcctgccatggccacctcccatccggcggcatcagaaactcggaccttcctggcgtggccgcgtcccctcacacaacgtcaga

SEQ ID NO: 222992 - DNA, 104 bp, Homo sapiens
  chr7:889532-889636
  hyper
actcactgcctgtcaccacacctgcaggcgacgactgtaagggcaagaggcacctcgacgcgcacacagccgcccactcgcagtcgccacggctgcccggtcgg

SEQ ID NO: 222993 - DNA, 236 bp, Homo sapiens
  chr7:932819-933055
  hyper
tgttgggcgcgggcgcggtggtgtgtgcaggtgagtgttgggcgtgggcgtggtggtgtgtgcaggtgagtgttgggcgcgggcgcggtggtgtgtgcaggtgagtgttgggcgcgggcgcggtggtgtgtgcaggtgagtgttgggcgcgggcgtggtggtggttgcaggtgagtgttgggtgtgggcgtggtgtgtgcaggtgagtgttgggcgtgggcgcggtggtgtgtgca

SEQ ID NO: 222994 - DNA, 289 bp, Homo sapiens
  chr7:1001818-1002107
  hyper
cctgcgatgtgggccgcgaccgtcccggcccgtgcaggaccactgtgggcgaggggctgtgaccgtcccggcccgtgaaggatcaatgtgggcgaggggccgtgaccgtcacggcccgtgcaggatcaatgtgggcgaggggccgtgaccgtcccggcccatgcaggatcaatgtgggcaaggggccgtgaccgtcccggcccgttcaggacagtggcctataacctctgacatggggtcacaggagaatgcggcttctgccttgcccctcgcccctgccccgcctcca

SEQ ID NO: 222995 - DNA, 478 bp, Homo sapiens
  chr7:1007682-1008160
  hyper
actcagaggcctgacagagagcagacacgggacagtgacagctgcagccgaatcaggtggtagaacccatgggtgcagggacacagggttgggcgggcccagccgcaataggtactcagttctgtgaggaggggagggacatgtttaaccacgaaagggccaccactgcaggacagaaacagagggcctttgctgcagagaactggagatgggctgagaagcctcagccacccacaggcagagggacgagggcagcctgtttcccagagcctgaggtcggccagattggtggccccacctgccagggcttggagacagccactgccagggtcgccagagaggacgtgacctggacctccccaccccgtctcctgccaccatcctccactgaccagacaggagccagcccctttccgacagtgcctgggaaggagacaggtctggctgaggccccagatgtgcaggcacctgcgttcca

SEQ ID NO: 222996 - DNA, 274 bp, Homo sapiens
  chr7:1069695-1069969
  hyper
tttcatgggagggactcaattctgggccttctgagccccagtggccttgtgtgctgactccccagtgtgtccccagcatgaatgcgccagcccacacagtcacctgcctccatgaacgcgccaactccgcgcatccacctgtcttcccgaacgcaacgacccacgcatccacccacctccataaacgcgccaatcctgctcatatgccgtcttcaccaacgcaccaactcgcacagccacccgcctccacacctgagcccggggaccaggtttc

SEQ ID NO: 222997 - DNA, 317 bp, Homo sapiens
  chr7:1083917-1084234
  hyper
gcactaagagaattctcaaaaactcccagagccctgggtgtgtgtcctcccacagggaatctcgcacgagttcgtcaaatggctggtctcaggttacacaaccagcactgcctccaccgccaccgccccccaacctcactggtccgagcggttccccgcggtctagccgcgagggcggggccggggggcggaggccagggcgggaccaaggctgggggcggggccaggcatggctgccgctcgccggccgggggcggggccgacggtcacgtgtgtacacagggcccgggcggcgtgcgcgccgtgagccccgccgc

SEQ ID NO: 222998 - DNA, 610 bp, Homo sapiens
  chr7:1269167-1269777
  hyper
gccccggggctggcgggccagagggggaggcgctccggccgcccccgacccggacccggactccgggcccccagctgggcccaagcgcaggaggccggtcctcacggtgcgcccgggaagggaagggccgagcggcctggagctgccagaggccgcggcccgggcgggggaaggggcaggcggaaggcgggccccggaggtctccggctgggccgggcgcgcgcgcctgggccctttgtctcgcgcggccgtcgggcccggggccccagccctgtgcgctcggggcgaggaggttcccggccggccgcagccccgagccgaggcgggcgcggaggatgagggggggtttaggatgcggccccgcgacccccgtccccctggaccgcgggctggaccgggccggggcgcgtccggcagcgctgagaccccccaccccgaatcaaagtagcggcggctgcgggggcggcgggtgggtgggggggagccgaggaacacggcgaggcgagcggcgtcctgaatgcgagtcgtgtgcgtcttattatcaagttaattaaagctagcatctgacaatgtcactcggctgtagaaaaagggatttaaatgcagcgtc

SEQ ID NO: 222999 - DNA, 448 bp, Homo sapiens
  chr7:1408443-1408891
  hyper
tccccaggacacccagccgggctctcagccaaccagctgaaccccgggctgcgctctccccgcccctgcctggcgagtgcagattcccgcctattttccgacacccgcctgcagaggagtcgggcgccagatgggatcgaacccagcaaggtgagaaatccgggcggggtggcagatggggaggccttccccggggaactccaggagaggggaggacagcgagggccccgggcgcggcctctcgtgtgcccccagccgcggggcgcaggcccgcagccccccaggggcgccgcagctgtcactccgcggtgagtggcgccatccggatcggagatgggcgcggctgcatcgccccagggtaggaagctcatcttcggagaccgcgcggctccgagcgaccaggaacgccccctgcgggctgcgggcgggagcgcggaccccggcccat

SEQ ID NO: 223000 - DNA, 151 bp, Homo sapiens
  chr7:1409130-1409281
  hyper
ccgcagattctgcccgacccagcccacctaggaccttggcccaccacggaccctgcccatcccggacccagcccactgtaagctccgcctatctcggaccccagcccatcccaattgccgcccacttcatggtctccagccaccgcggacc

SEQ ID NO: 223001 - DNA, 928 bp, Homo sapiens
  chr7:1498585-1499513
  hyper
cacgtctgactcagccggcgggcgggggatgccatggctctggcccagctgcattcggtgtccgggcacactgaggccactgaggacagcctcggggggctgcacggtgggctgtgcctgcccagtcccacgcctcggctccccatcccccagccgcccgggcctcagtttccccgcccgtgtcagcgcgcagccgaacagcagaagaatcaaagggcgccaggcaggacttacatgaggtcgggccggtggcggtgcaggatggcgcagaaagccaggccgtcgcggaacgacgtggtcatgttgcagatattcacgtcgcggtagccctcgcactgctgccggcaccactgttgcagcgccctgatggccgccatgtgggcggcgcgcccgccgcgcggcggaaccgccctccgacaccttcccgcggctgtgccgcgaccgcccggccggcgggacagacgctgggaccgctacggaaccgccagacccacggcgcccagccccagctgagccggactgagggcgacgagtgccgggtccctaagagaagccgagcccggccccgcccccgccggccccgcctccttgtaggccccgcccccagccgccaagtcctgcctccggataggccccgtcctcacacctcccagccccggcataggctcccgcccaggcaggccccacctcccgacaggccccgcccccagccgccgggtcctgcctcctgataggccccgttcccacgcctcctggccccggcacaggctcccgctccaggcaggccccgactccggacaggccccgcccccagcctccaggttttgcctcccgagaggccccgccccacgccgcccggccccagtacgggctcgcgccctaggcacgtcccgcctcctggtaagtcccgcccccacgctgtcaggtc

SEQ ID NO: 223002 - DNA, 180 bp, Homo sapiens
  chr7:1704013-1704193
  hyper
tgccccggcctcaatcacggtctcagtccccccaaccccgtcctgcaggaacaagtgtggtagaggctcggggtcggagggcgggcggccgtcccgcgggctggacggagtttctgggctgcggagaggccgttggacccacgtccggacaggagccccgcgcgcccatccccggcccgg

SEQ ID NO: 223003 - DNA, 3000 bp, Homo sapiens
  chr7:1704336-1707336
  hyper
tggggctccccggccggaggggcgcggcgctggcagcggggtccagagtgtcgcgcccagcgcgcgctgggggtcccgggctccgcagctccgcacgcggccggtttgtgaagcggcgcgcgggggcttagccgggcgagggcgctcttgagcctggtttggaatttttagcccacacgaaagccgcaggctggggaaggggcgggtgggagcgggagacgccctgggaagccgtgagaccgctcggcgagggctcgggaccaccagggagcgacgggggacccctcggctcagagcccgagggcgcgatttcggatccgctgggattccggaggcacatgaagggagagggaaatccgctaaaccgaaccttccgggaatcggaaggcgccgggccgctcccacgcctccccctcctcccggccgaaaggcggggggcgacgcgcaacggggagggaagggagggaggggtcggcgaccttaggggagggcgagtctctggggacgcggggccgccaggggcccgacgaccctctcgctccacctccccgcccccaagtgccccgctctccccccgccccgcaaacgcgcgtcctgcgggctgtgctttggccctcgcggacgcgcgcgctcacagagggtctgacttggggtcaacttccacgaggttgccgggcgcctgtgagcacagccgtgtccccacccaggggcccacctcccagcgccaccagggtcccgacccccagaccttcggacgcttctcttccaaaccgaagcctgggagcctctgggtggcctggggcgggggcagggggcgagcggggcgggccaggaggagggggcgaggccgccactcggcttcccacgccgcccccgcggctggctccaacttcccctccggagcccccctccggccaccccccagcccaccgacgtgcgggcagcgaccccgccccccgcccctccggtcgcccccgccgcggcccccgccccctccccatccctccccgcgcgctctcccacatgaaaccttccatcacgctcagaaagaatgtgctacaacctcggcgctgccgcggccgccaccactgcgcccgcgcccgagcccgagtcggagccggagccgccgctcccccgcctgcccggccagccccgggctccgagcgcgcggtccccgccgccgccgccccgcgctcgccccgcgcttgacgcagtgagcgccgcagcctggctcccgccggctccgctgggctccgggtcgcaggccgagtccagccgggcgggctccgggaggggccggcagggcgggagggggaggagggctgtctggagccagcgagcccggaggaggaagaggaggaggaaggaggggaagccgccgccgccgccgccgcgctcggggaaccggggtgcgcgcgctctgctcgcccgcgacagtgcctccagcccggggcccgcaccccggcccaggtaagaaggggcctgaggggcagggggctgtccggggccgggggacccctctgtcgccgctgcgggatcggagggtccccgcccctaggggaggcagggaagaggatgctctctggggggggcggcggggggcagcgcagggtccccagcggctctcgcagcccgggccaccccatccctggtgccctgacctcggcgtccgcgccagggccgagtctccccgcccgcggggctctggatgcggcgctcggggcccgcggctcccgggcgtccccatccacccacccaggttcggaggcgggcgcacccgaagttagcggccgccgagcctgggccggacaaacttccctccccgacgccgcggctggaagggccaggactccggacccctagggctagggaggcgccgcggggaccccgaaactttccggagcgcgctgagagcaaaaagccggctgggcagaaagagggggagggggctgggcgcgccttcgagtgcgctggggtagccgcggcgccccaagttgaaccacagacgaacccctcttcatctgaaacctggtctcggagtcggaggtggggagggagtgggctgtgggtgcctcgacttcgcaaagccggcgtgggggggcgcagcgccccgccccgcgccgcttgaacctccggagggggtgttacgggacccccgcccccaccccagccggtggctgggctctgccgaccgctgcggagctcccgggaaggacccgctcgcggctattaataggcgtcggtgaccctagcctctcccggtccgggaagctggcgcggcggggctgggctgggctgggctgccgagtggggcgggaccccggggcccagagcggacccccagctctcctggtccctcttccgccgctcttccctccctgccgcctgctttcctcccattttccctcttcgatctcggggtgtcggcccccccccgaactttttctcttcccaaactgcacggtggccacccggtcacggccctgggccgtacccgcgcaatctcagcaccattcccgaccgagtcctccgccgcgggctgagcgcgagtccccggggccaggctgcccagggaggagcagggacttcctacaatccgcgcccttcctcccaacccacggcgagcgcaacacattcgcccgcccctgcggccccatctgagggcggggagaggtcgctgggggcagcttcgggggttgtggagggcaggggggacccgcgaagctcctggagcgtttagggatgcagctcgggcggcgtgtgcagggaggaagcagcgtcccggcgtccccccttcagcgtcgccttcgcgcgcctcgagggcccaggagggttcggtctcccccaccccacctggacactcaggtctgagcctgagtggatttgaggatctgggggacggggaatacggagtccttcttcctgcctcggtgtctgcagagcccagccctcaggcagcgtggggatctttgtccccagggccagcgccggccccgcccc

SEQ ID NO: 223004 - DNA, 613 bp, Homo sapiens
  chr7:1708906-1709519
  hyper
ctgctggcggcgagcggagagcgtgccgggggtactgaggccgggaaccagaggcgggcgggggacaggaagcggggagggggcgccggcggggacgcgcgggctgcgcggggactggagagggtccccaggcgccggccgttctgcgaacgcgggcttgtccaggcaccgccggggcctgcccggcccgagcgtggagtcccgaggctcctgccgggggtccaggctgcccctggggctctgccttcgacgcgctgtgtagggccagattctgggcctctcttgactcagtttcccttcctgtaacatgcggacgggggcttccgcacaggcaggttgtcagggtgaaactgagccgaagagtgctccagaaccccctgaagtcctcacagaggttggggtgaatgaaggaaggaagcggggccagggctgggcagaggaggcccggcctgcgccctgcgttctccgcccctaggtccctgccctcccggataaggggcggaccgacgggaggacctgagaacgccttggctttgcttgaggtggtgggagtcgcgggtagcttgttcagccaacagctgtcgcccccactccccccacccacccacccacc

SEQ ID NO: 223005 - DNA, 104 bp, Homo sapiens
  chr7:1709560-1709664
  hyper
accgcgaggacgccccctgcgctttctaggacctcccctccttccccagcccctgcgcgtcgccgggagagggaaggagcgggttgccgcggggagccgaggag

SEQ ID NO: 223006 - DNA, 570 bp, Homo sapiens
  chr7:1709872-1710442
  hyper
cgcgcgcgcagatcgatgggcgaagctggggaggaatttcaatcccgggagcgaagttagagcttgaaggacggcggcggctgcgggcgcagccccggaaccgaggccgggcgggcaggtaagcggcgagcgcggccgggcgctgaacctgggggacttgggacccggaccacccccggggagcggcgcggccaagccccccgccacctcgaaccccgggcgtccccgagtgcgcagcgtgcgcccccagcccctgctgcgcccccaggcctggcgcgcgatccgagcgcagcgggcaaagttggaggaacttggcggcggcggagcgggcgcaggctcagcccgacaaagcccgggggcccgggtcggggtcgctgccgcagcccgcacgctgccccgtgcctccgagaggtcccttccccagcgcctctctcccttccgtcccccttcgccgtccgcaccctgcccggcgccccccagacgcggccccctgcccttcccttcccggaaattagggggctgtcctcacctcctggccgagtcgctgacccctccccaggctcgcatcgc

SEQ ID NO: 223007 - DNA, 900 bp, Homo sapiens
  chr7:1786090-1786990
  hyper
tcggccacagcctgcagcggcaccacagcgtggaggccgccgggccccctcgtgccagcacctcgtccagcggctccgtgcgcagcccccgcgccttccgagccgaggccgtcggggtgcacaaggccgcggccgccgaggccaagtacatcgagaagggctcccccgcggccgacgccatcctcactgtgacacccgcggccgccgtgctgcgggccgaggccgagaagggtcgccagtacggcgagcaccggcactcgtaccccggctcccacccggccgagccacctgcgccccccgggccaccgccgccgcctccgcacgagggcctggggcgcaaggcgtccatcctggagccactcacccggccgcggccccgcgacctcgcctactcgcagctgtccccgcagtaccacagcctgagctactcctccagccccgagtacacctgccgggcctcccagagcatctgggagcgcttcagactgagccgccggcggcacaaggaggaagaggagttcatggccgcgggccatgccctgcgcaagaaggttcagttcgccaaagacgaggatctgcacgacatcctggactactggaagggcgtgtcggcccagcacaagtcctgagccccccaagaccggcgatgcccactggaccaaaaaggatgcaggatccacccagagactcagcaccaaacccaacacacgcacgccaccacagcaactgtgacagcggggggccctgcagaggcgaggggggagcgagtggggacagacaagggggacacgtcccgagctcctgtggccggtcctgggatgcgcttgtcgccccgggtggcacgtgtccacacacacacacacacacacacacacacacacgagggacttcggaaaactg

SEQ ID NO: 223008 - DNA, 105 bp, Homo sapiens
  chr7:2018616-2018721
  hyper
cgctggaggaacatcgaatctagaaggcatcatagctgccatgtgcagagcacttcctgggccggggccacactaaaggcagcccttttcctgctttactctcgg

SEQ ID NO: 223009 - DNA, 202 bp, Homo sapiens; identical to SEQ ID NO: 200791
  chr7:2195725-2195927
  hyper

SEQ ID NO: 223010 - DNA, 77 bp, Homo sapiens
  chr7:2555344-2555421
  hyper
tacagagtcaagtaacgtcccaagacccacagaagggcactggcccaagaccacacagtgggcgaggggtctgggca

SEQ ID NO: 223011 - DNA, 423 bp, Homo sapiens
  chr7:2727879-2728302
  hyper
ctcggtgcccggcgcggcctctgccggctccggcgggcgcgggactgcgaggtaggggggcgcgcggggaagactcgggggcgcagggaccgagagggacctccgtgccggggcgggtgggtaggggcagctccgggtccagcccggcccgcgcaccaagtcccgagggcgcccgggcggcggcggctacgggcgcgcggggaccgcggagacgcgaagggcgcacttggcgagggtttggtgcagcgccgcgccggggtccgcacagccccggcaggtcctgcagagggaaggccgggccagggaagggccacgcgccccctccccgccatcctctcccaggccagggcgacctgcgcgcttcccgatgggagcaaactggggacgggtcgggaatccagggccaagcgcccgaaagaaggc

SEQ ID NO: 223012 - DNA, 501 bp, Homo sapiens
  chr7:3083199-3083700
  hyper
tcactgatgccccccatctcctccccgtgccctcttctcttcccccaactccccgcctcgtgctccccctccgccagctcccccatccccgctgcgcctacctggggcgctcatgctccgccagccagctgcgcggggcgcctcctccacgcaggcctccggcttcctccaggcgaccaggccctccgtccccccgggcccggagccgtcctccgaggggcgccgcccgcccaggggctgcagggccgggagggggctgcgggcggcgcgggcaggagtccgaaggccagaggaggcaggagagaaaaaaggagagaaagtatgtcataggctgggaggggcgggggagggaaatgcaaaacccgacaggaaatgagactaaaaaatgcgaaaggttagaaaaagataaggaagagagggagggggcggagtcggtgcttcgggaggagggcggcaaggaggtgggggtgggagtggggacagggccgggggtgggggtgc

SEQ ID NO: 223013 - DNA, 1380 bp, Homo sapiens
  chr7:3340265-3341645
  hyper
tggacgcttctacaatgccatatccactcctctgaacaggaggcgagtttgcacccagtggtgcctttggttgctagaaattaaaaacccgattgcgcgtgtttgcaattacggtaacttggcgcgtcacccccaagcactgagctagctggtggtagccgggcgcctctcggggcgcgccctattccgccctcggccctgggctgccgcacgatctgcgcgtcctgctgcacctgagcccttcccactcgggcgcccgcaccgctgcggggccgggcgaggatgcaccacccccgcccgcgagcccgccacgggagcgcgtgccgaatcgacgccgcctgcagtccccactacgggtccctagggggcgcagccggcgcgggaagccgcccgagccaggcgccgcggccggcacaaaattgcaggcgggcgggcgccgcgactttgaaaacaagcgagggcctggggggcgggccctgggagcgggcgccgcctccctcggccaatcaacggcgggcggcgggcggcgggcgcgggcggcgcgtgcggccgggctgtgaatggggagcggcggccgcggcagctgagggcgagcgcgaccgcgacgtgcgggcgggcgcactttcttctcagcgccgggcgggggcggcggcggcggcggctcctccgcgcccggcggacccctcggagctagcgcggcgggctcgggactgcgtgagcgccggacgcgaatttcccccgttgacaacttcttctcgcccggctcgtccccggcccgcgccgcgcccctcacgcggggacccaggacgccgcccctcagcgctgggcggccgctcacctcgggccggggggcgccgcgcctcccgcggagtggccgcgcccgctcggagccgtcccgcctgtcctgcccgcccgtccgtccggcgcggcgctcggggtggcggctgctcggcatggcccggggcgcccggccctcggcggccggtggcggcggcggcggcgcggagccccctgagcgcgcgggccccgggcggccgcggggatccccgcccggccgcgcccgcccctcgctggcgccgcgccccggcccggagccctcgcgaccccgggcggcgcccgagacctccggcggggacacggcgggcgcggggcggtgcggcgggcggcgggcggcaaagttggggccgggccgccgcggctggtgggcgctgctggcgctgcagctgcacttgctccgggcgctggcgcaaggtaggtgcgcgcggggtcgcgggccgggggcgtcgcctcggggcgcggaggcgcgaacttgagcagcgagagtgtgtccggggtccccccgcttcccggcccgggtcgggatgcgccttgctgggggct

SEQ ID NO: 223014 - DNA, 50 bp, Homo sapiens; identical to SEQ ID NO: 200795
  chr7:4770079-4770129
  hyper

SEQ ID NO: 223015 - DNA, 71 bp, Homo sapiens; identical to SEQ ID NO: 200796
  chr7:4770153-4770224
  hyper

SEQ ID NO: 223016 - DNA, 300 bp, Homo sapiens
  chr7:4998444-4998744
  hyper
ctgcctgggtcctggttttctcgggcgggggtcaggggtccgccgatcccctctagcgctccgggcggcggggcccgagaaccaaggtggcctccgcggcccccgccgccgcgcgcccctccctccctccccgcggacctccgcggccgccgctcacctcgcgtatttcgtcttctggaaatccagcagccggggggcgaacatcgcggcgcttccatgggaatctggccccgggctcagagcgcgggtagctggcagagcctggggggcgcggcggcggcagcagcaggttggagggcg

SEQ ID NO: 223017 - DNA, 156 bp, Homo sapiens
  chr7:5462155-5462311
  hyper
ctgtctgcagcagctcacattcctgattccgggaggcctgggctctcttaagagaagccgatcacgccaaagccaccggctcccgggtgcccgcccggcgccctgcactccgcgcccagccccccgagcaggagaccccctcggctgcaaaacccc

SEQ ID NO: 223018 - DNA, 593 bp, Homo sapiens
  chr7:5594638-5595231
  hyper
tctcagcttggggtgcgggggccgactctgcccgggctgggtggatagttgttatcgggagctcccaggcccgcgcggctcacgtgggccgcagctcgcggcgcctcccgcgtcccagggccgcgaggcgctccgggagataagccaggccccgtgcgagtccagcgcggacccggccggcccccagcccgcccctcaccggcccccaccccgcccctcggccggcccggcccacttggcccgagttcctctccataaaaggcgaggtttgggagcgcccggggagggggcgttgggtccacgggccgcccccgcccaccgtgttcccctccctcactgcgagccctcgccggcccgggggtgcagcccagcccccctgccgcgacccccacgccgggcccgtagaccacgaccctgaccccagtccccactccggatcgggcccacagcaccccccgccggtccccgcgagtcccgcgctctgtccccattttgcgattgaagaaattgaggcccgcagcgtgcgtagcccggctggggccacggggttggggactgaacggccggaaacgccacacgtgcctccaggtggc

SEQ ID NO: 223019 - DNA, 919 bp, Homo sapiens
  chr7:5632266-5633185
  hyper
tgcggcgaggacaccggtggggtgagagcaccggcggggcagcagcgggggccgcagcgccgggtccctcggcccggggcccctcccgcgcggagccaggggcgggacaggggggcgtggcctggtggcgctgacgtcacctcgcctataaaatgtccggggcgccgctagctgggctttgtggagcgctgcggagggtgcgtgcgggccgcggcagccgaacaaaggagcaggggcgccgccgcagggacccgccacccacctcccggggccgcgcagcggcctctcgtctactgccaccatgaccgccaacggcacagccgaggcggtgcagatccagttcggcctcatcaactgcggcaacaagtacctgacggccgaggcgttcgggttcaaggtgaacgcgtccgccagcagcctgaagaagaagcagatctggacgctggagcagccccctgacgaggcgggcagcgcggccgtgtgcctgcgcagccacctgggccgctacctggcggcggacaaggacggcaacgtgacctgcgagcgcgaggtgcccggtcccgactgccgtttcctcatcgtggcgcacgacgacggtcgctggtcgctgcagtccgaggcgcaccggcgctacttcggcggcaccgaggaccgcctgtcctgcttcgcgcagacggtgtcccccgccgagaagtggagcgtgcacatcgccatgcaccctcaggtcaacatctacagcgtcacccgtaagcgctacgcgcacctgagcgcgcggccggccgacgagatcgccgtggaccgcgacgtgccctggggcgtcgactcgctcatcaccctcgccttccaggaccagcgctacagcgtgcagaccgccgaccaccgcttcctgcgccacgacgggcgcctggtggcgcgcccc

SEQ ID NO: 223020 - DNA, 180 bp, Homo sapiens
  chr7:5633400-5633580
  hyper
tgagtggggacgctgcccccgcctctcctggtccgtgcacaaagcgcaccccacccgcgcccctccagcctcccgccctttctcgctcgcggcgccgctgcggtccggagcactgcccattgcgcccccgctaggcacgcgggctaccccgcctggagggggcgaggagtggggctttgc

SEQ ID NO: 223021 - DNA, 826 bp, Homo sapiens
  chr7:6570379-6571205
  hyper
ctgtcctgtcccctcgaccagcccaattgtaggaaggaaagtgggctttcaatcccagccttttatcccaacaccgactctttagggccacgcacgggttctgagcgcccaacgcttagacctcgccgccccggtacccaccgagtttatttccaacctccctgggcctcgggctccgcccaggctcggagggtgcccacccagggcagggaagcccctccacgctccagccccacccgctttcagaccagcccgaggcggatccgtggcgcagagggcgcacggttcccggaggcgcgggacgcgatggggaagctaccgaaagtgccgagagaagccctggtccttccccatctggagccggggaccgcggcgcggcaggtgccgaagggcagggggtagccgagcccaggaatggagcgagcgcgccgcgactccacgcacctctgccctgcgagcgcgcgcggcccctcccgagccgtcccggcccgcagccccgccctggccccttttggtggccccgccccctccaggtagccccgcctctgccctgctgggacccttttggtcgctctggggtgcagcggaaactggcggcggtttgaagccgccgcgctcactccccttggctctctccgttattcccttcccaggatcctcgcctgcgtcctctccagctactgcgccccggacccccacacagtggcgagtccccgcagttcagaggaagccccgacggcctttggtagaacatgcaatattttccggaggggatgccctttacgctgggcctccagggctcagcaggagtcggccggctagaaga

SEQ ID NO: 223022 - DNA, 133 bp, Homo sapiens
  chr7:6575941-6576074
  hyper
acagcagaggctgccgtttcaagctgcggggactgggcatccccaggtgtccagggctcccgctgcccaggctctaaatcgagcgcgcccaagggggttccccctcccgcgccctgcccgacccgctgccgca

SEQ ID NO: 223023 - DNA, 325 bp, Homo sapiens
  chr7:6654778-6655103
  hyper
ctcgggccgggcccggatggcgcctactccctctccgagtgccatcgaattgtgtgctaattagccacaatttgcaccgcggcaggggcgccccgaggccacgcctgccctctagggggtggcagggatcgggttgggtaccccccacccagacacccaggcagtgacagtcgccaaccccgtggcgcgaggacacgcgcagcagggatgcggcacagcgcgcgctgcgctcggcaccggccagcccgggacgccccaggggccgccgcatcgtgtcccccgggccgggtgagtggccgggccgggaatggttaagcccaccgag

SEQ ID NO: 223024 - DNA, 665 bp, Homo sapiens
  chr7:6655356-6656021
  hyper
cggcccaggccgcccgcaggctccgggcacctgtagcccccgaggacccgcgtcgcctggccgccgccgaccccaggcggggccaccccgtggtgccgaccccgggcgccggcctggatcccgctgcccgcgatggtcccggggggccggccctgagccccgcgcgggattcggggccctgcctcccgccccagcccccgccggagagtctccaccaacttctgctcggccgctcctctcagccccttcccttggcccagggcgacctcggcagcccagagggcgtggaccctccggagtgcccagaaagcccccggggtggccctgcgcctcctggctctttctggatggaggcgcctccggaaggagccggctgcacgccgtggccttcacctcgcagcctctgctgaccacacctccctagcgcagaggctgcccgggagcaggaaatgctccaccaggtgaggcccagggggtcgttggcgctgggcaaccggggacgcgtcccttgagagagtttggactggatggcacgagtcggcctgtttaggggagaggggccagctctgcacgggccagggtggactctcaggagcgcctgggcacagggccaggccgtgggtgacagtgctctggacacctgccttgcccgggagctggggtgg

SEQ ID NO: 223025 - DNA, 104 bp, Homo sapiens
  chr7:6966951-6967055
  hyper
cgatgtgtcaaacagcgtcgcttctcccagtgagatggttctcctttgcctccgtctctttccccgattgatttttccaaatggggagtcgtggcttggtcctg

SEQ ID NO: 223026 - DNA, 111 bp, Homo sapiens
  chr7:7605673-7605784
  hyper
gccagactccgtctcaaaaaaaacaaaacaaaacaaaaaactgatcataccacttgcctgattaaaaactttcgatgactctaacattgcctttaggtaaatgccatccaa

SEQ ID NO: 223027 - DNA, 240 bp, Homo sapiens
  chr7:8483584-8483824
  hyper
cctgggggctgtctgcacgccctagagcagacactgcggtcacttaaagtgcgcccagttcctccaccgcagcggtcacaccgttgatttgatccagaaataagacggatagtaccgagcgttggcgctaggggttgtctatgtcaaaggcgaaggttggctgggaagttctgtccgtttctcttgccttagcataggagtcaatccttttcttgtcacccgattctgcaaattctcgct

SEQ ID NO: 223028 - DNA, 505 bp, Homo sapiens
  chr7:16793057-16793562
  hyper
tcaaaatggtgccacgtcatctgccagggccaagaatccagaggtgctgtcatatttctccttgccagcgtggatctcctccgagccccgccctccctcctcacctgctcctggggaaactacaccaaggccgccgctctggcctggggctccctcccacacggccttggccctctccccctcgccccgggaccgctccgcccctcccggatcccggtcggcggagcgcatttatttgcatatttctacctttgttccctgccagcggccaatcagcgcgcggggcgagacgaaggggctgggcggggctcgggctcctgctccggctcagctgcggcggccgcaggttccaaagcgggtccgagccgccgccgcgcgcgcgccgcgcactgcagccccaggccccggccccccacccacgtctgcgttgctgccccgcctgggccaggccccaaaggcaaggacaaagcagctgtcagggaacctccgccggagtcgaatttac

SEQ ID NO: 223029 - DNA, 1038 bp, Homo sapiens; identical to SEQ ID NO: 200834
  chr7:17338062-17339100
  hyper

SEQ ID NO: 223030 - DNA, 840 bp, Homo sapiens
  chr7:18125886-18126726
  hyper
acaatgctacctcctctttaaaagaagtcgttcagctggggcgggctggcgctgcgtggcgcgcacctgagcggccggggctccccgagccacggggggcgcgagagggcgaggcagcggcctggcttctccccagcaccgttctctgtcacggccgccgcctgaccatcaccccgcgcctcgcgtgggcatgtctcgcttcagaaatcccaagtcgtcttaggttccctggtccttcccctgggggggaaaaaaaacgctggtgcagcccagagcccttttccgctccaccccgggatgtcctcgctgccctcccgcctcccgcgcgtccttcccagcgcgtcggccgcgcgcccaggtgttcccgcgtccgtaatcccctccggcccgcgcctcccggcccgccctgcgggtctccagcgcctgggcccgcgctctcgccgcgggtccttcctcctatccccacccagccccgcccagcctccgcggcgctggggctcccggccgagcctctcctcccacctccgtcccctacttccctccccaagaagtgctatttttagcaaattctccgcgcgccgccgcccgctcagctcgcagctcgcagccgcccgctgccgccctcccgagccccccccgcgcggcggcggcggcggcggcggcggcggcgcgtcccgcacatcgcgcagcgcgcaccgagccggccgcgccgcgcccgccgctctcgccgctttcgccgcggtctcctcctctagcgcccgccgcggccggtaaatctcggctggaggagcagcggcggcccccgagtcaactttcattccctttttgcttctgcctcac

SEQ ID NO: 223031 - DNA, 1080 bp, Homo sapiens
  chr7:19156377-19157457
  hyper
gaccgagaaggcgtagctgagccgctcgtgagccacatagctgcagcttgccatcttggagtccagctcgtcgctctggaggacctggtagaggaagtcgatgtacctggccgccagcttgagggtctgaatcttgctcagcttgtccgagggcagcgtggggatgatcttccgcagcgcggcgaacgcctcgttcagcgactgggtgcgctggcgctcccgcacgttggccatgacccgctgcgtctgcagctcctcgtaagactgcggactcccgccgccgctgctgctgccgccgccgccgcccgcgccgccgccgccgccacagcccgcagacttcttgccgcgcttgccctgggccgggctgcccggctcgtcgccgcctccgacgcccccacccgcggctccgccgggccccgcgccgccgcccgcgctgcgcctgctgctgcgccgcttgcgtcccccgcgcttgccgctcggcggctgctgccggtctggctcttcctcgctgttgctcaggctgtcgtcggccggcgagactggcgagctggacacgtcctgcatcatctctcgagcggcgacgcgtggcctcgcgggcccggggcagaggagaagagcggggcgcctcagcccgccagcttcccccgcgcgcggcgccggcccgggcgatgcggcccgcggaggagagagcaggaggacggacgggagggacctccgcggggagggcgcgcgggggaggcggggagggaggcgggagggggaggggacggtgtggatggccccgaggtccaaaaagaaagcgcccaacggctggacgcacaccccgccaggcctcctggaaacggtgccggtgctgcagagcccgcgaggtgtctgggagttgggcgagagctgcagacttggaggctcttatacctccgtgcaggcggaaagtttgggggcagcagtgtcattggcctgacgtgaggaggagggacttttcgaagttttataggaaagtttccgctttccagtccccctcccccgtcccacctcccttcctcggggtctaacaattcgtcctcccaaaccattcaaaaa

SEQ ID NO: 223032 - DNA, 480 bp, Homo sapiens
  chr7:20817351-20817831
  hyper
tttggccaagaaaagagcacaggaggtgaagaaaggcaggcagtcgtgggccaggacagagagaaagctgaacaagttcaggaagaagaatctgagtctgtccacgccgcagcagcctccggtggcacgggcagaaagatcaagcgcggcaccccgtgacaggatgggacagattccccgggctccgaggccctaggatggcgcagggcagcgggctggtgcgggaaaactacagagcaagcgagggagggaagcgaaggcaggggaatccctcaccccgtccggcccgagtgtcttttgagagcccacaggcgagcggggcggggggaggctccccgcgcattcccaccgtgggtttgcccaaggtcagaggcccgggactggcggggcgggtctggccggcattgcccgcgctgagcgcgctgcagaacgggagcagggcacagggtggcgctcgctgtccgtgcagcgggcggaggc

SEQ ID NO: 223033 - DNA, 180 bp, Homo sapiens
  chr7:20826049-20826229
  hyper
ggaagaatctgcactttgcccagaaggaaaaacttgctctctttacccccgaaatcggtgcctgtaaaatgggctggacgcaggtctcccgggcagggagcagcgaggcgctgcgcggtggcttgtctaaatgcccttcgaaccttttcctgcgctgaaaaaaagtgactctgccccctt

SEQ ID NO: 223034 - DNA, 180 bp, Homo sapiens
  chr7:20826537-20826717
  hyper
ctccctctccggctttgaagtgccgcggaggcgcggccagccaatctgcggcctcgccgggccgcgcggcgcgcgcgccgtgaggtcatcggcgccgccgcctgccgccgtggtggaagggggagtgggagcggagggggcgggggcggctgcgtgtgttacaaagcgcaaagcgcgcgc

SEQ ID NO: 223035 - DNA, 275 bp, Homo sapiens
  chr7:20837557-20837832
  hyper
cgagagacagcctgccgtcccaggtccagcccgcgcctctgcgcacctcccggcacccggcgcaggtcgccggccagggcacacacgcgtccccgcctgctcgccggcccgcaaggcccgggctgcggcggccgcgggcgcgggaggcggaggcgcaggcgccgggctccgtggcagcccggcccagccccgccccgccccaccctccggccctcccctccgcttagccgtgctctcccgccgagctccgccgccagctccgtgctctgcccggc

SEQ ID NO: 223036 - DNA, 911 bp, Homo sapiens
  chr7:21984988-21985899
  hyper
aaattacaactttcttaagcttcctgatctctgtgccaattcccggagaaagtgtggggagtgcacaaaaaaagcccctcccccgtctcacgagggctgcaaacgcaggcgctgcgccccgctagctccccgcctgcacccccggcggccacccgagactgagcagagcgccaggctgagcgcggttgtgtgctggggcgaccggcctctgtggtccgcgtagcacaaacgtgacccactgcgcacacctgcagggcgcgcccactccggcactcaaccggctgggcgcgccagatccccagtgccgcagccaagggccacgtttccagcccaaggccagcaggaccgggtggcaaagggaagtcaaactgtgggtgcgtccggacggcggcgggcggccggaccctcacctggtagcgagtcgccaactccattcttcctaaccgggctccagtctcctcccagcacgcggccacgggagcccggactcaccacggcccggcgcaccaagaacgccccgcgcccgagcagctagcgcgctccgcccggagcacaggcgggccccgggaggggcgcacttgacgccctggacagggggagcgcgttgcgctgccccctcggtgccgcctcactgggcctcgtggctccgatcacgttccaacttcgcggccactgaccttgtcttcgcaggcggcgcgagagggggctgcagttgggcgcggcaagagcaattaccagtgttagggcgccgggctcccccctgcagcagagggagggagtggagccgtccggcggggtttagcgcgggagaaatgagggggctgtcccggcgcagcctccagctggcacgcgcgctggatacttggcagggtttattccaggtcatgccctggggcgcgagcttctgctgc

SEQ ID NO: 223037 - DNA, 133 bp, Homo sapiens
  chr7:22143409-22143542
  hyper
cagagcggttaggcttagtcagtattctctgaatgaaaattttgccgatgaacctttttctgcagagcggaagtggctgggcacccttgcgagatgagaaccaccagatggcgctgaatcctcaataagaaaa

SEQ ID NO: 223038 - DNA, 1244 bp, Homo sapiens
  chr7:22893423-22894667
  hyper
ttcacatcctttaacgggagccagtcttctgctacgtaattagacgagtcttgaaagaagcacccaggggcgtggctgaagactttaagaaacaccaggcaagggaggggagtgggtaccagagacacctaacattatttgagtggcaggagcttcctctgaccttcaacgaggtaaagagacatcacagccagcgagagtttggggcagactccccagactcggaggccggggcaaagtgggagccggggccaagtgggagccggggccgtgtggggtgggggggggggcccaaggcggggaaggcccgggccgccgacagggggcgcgcgagggcctccgggccccgcgggcggggcgggtgctggacccggaggggccttccggcaactttttggttggtgccgccccgcccaggccccttttaaacttgatctccgcagtgccctcccttttcggccgcggcgcgtgactgggtaagtgggctcggaccttctggacgcaggagccgaccacgtggctccggggctaccccgtgcgcttcctaggcgcgcctctcgctgcccccacgccgaggcctcggctcggcgccgcggggaagcctccgttagggcccctcgggggtgggggcgtcctcgtggcgcttgggcccttcgtcccgggttaggacggcccgtgtccttgtgcgcttgaaggggccgccccctttcctcgaggatcccacccccactcagcagaagccgccaggcgcccgtcacctcccgtgcctgagtccctgccgtccacgcattcggcctacaggcagcttttagtcctttttcaattaaatgattgcattttgaggatcaaattccaaccgcaggcggaggcgccgagccccggacggtctctgggttcttggtgcactcggggctcctgcctgcccaggggctgtgaccgcgcggacggaagcctatttgggaagcgagtgagatctgatgtctgaagcgctttaagtttctaagcggggcagtataatagcggggttagcaaacacacggaggtcatttcactcgcgcagccatcccccaccgccaccagtgccgttcatttgctactggcccgcagtcagataatttaaaggcttggagggacgagtcttgctggagccgacgcctacagtaagttgagcggagtgctgtgagccctaataagggagcctgctttcctcccgaagattcgcttttttgggagtggccagagcg

SEQ ID NO: 223039 - DNA, 1264 bp, Homo sapiens
  chr7:23052815-23054079
  hyper
ccccgaggattcccgagtatgttaaaatgagcctcaggagaggaataactcatagaaagaaggggcaagggctcaagaagagatcttcagcgaaataaccaaggaaggaagcgtggctgctgtctgaacctctccgccctgcaggggaccaaagaccgactcgggccaacgctgctctccagggggcgagggcggggggtcgacagtgaccattgtggccaccagaccggacggacagtggcggcctcgccgaagtagagggcgcgagtgggagaggaggcagaggccagagcatccgccgcggcagggaggggacggggggctcccgccccaggcccacccggcagaggggcggccggtggggccgaggcggcggcacccgggtcacagcaggaggctggactgctcctcgccgggaaggaaagacccgagtcgcgcgcacaaagctgccgccctccaggcagcgggcaggctgcgcccaacttcggggcgagcagcgccggccgcagcccacccgcccgccagccgcccccagcgccccgcgccgcctcgcacccacccatggcgcctcgcgcgggagccgttacccccagtggagccgcggccccagggacaaagtcccggtcctgtcctcgccgccgcctcgccccggctcctccctgacaaaaaaaagttatccgttgccggacgccctgggggcccggcgtgggtctctcggctggactcaccagggcggctgccggagctccacctgcaggacctcgactcgtgaggctctcagcgacagcgacggaggctgctctgcttcctcccgagtagcagcaccacctgctccccttcttcctagcagaacgggtcccggtgagccatcttccccctcctctcactgactgacaacccagccgggagagccaccactgccgccagcctctctgacaggcacgaccagggacccgtcctcaagcagccaaccaccaccgccccacgccagttcagcctatcgccgtcctccggggcgggatcagaacaacttctccaccaatgagaatcttcttctgctgggcctggggcggagccatgaggcgccttgagtgggcgtggtctgagcaatgggcgtgatccgggcgtccgagggaagttgattgactgtaaggtttgcggtggccgctaggcgatgacaatcagcgaaggtctcttagattctgagccgttagggcttatggccttctcagaaaaaaataaaccttaccggatgatgtgaagg

SEQ ID NO: 223040 - DNA, 1080 bp, Homo sapiens
  chr7:23508678-23509758
  hyper
gcgcagctcggcacaggctgaaccaggcgcgaaggacggcgaggcgcccgcaccacgtctgaattgattaaaagggaagccgaaaggcacggggctcccatggggaccccaacgcagccttccccctgggcgtcctgctccgcccggcaccgtccctcgccctggcggagccatacccggaggccgcagccccgcgccagggcccggagagcggcgggcggccggtgcgtggcggcgactcccttccaggcgaccagccgcccccgcccacctgcccctatcgctcgtcggaccaggggaggtggaacggggaaaccgggcacacactctctcctcccacagggtggggaggaagcgcggggccgcctgtgcgaggcaccagcctcgcggtctcactcggcagcacggtcgaggccactttccgttctccacggccgggggtttcggggcgcagcacagacagcgccgtaaataacgaccgaggaaagcaggaaggaacgaggcacaggcgggcattctagctcggcccccgaggcccagcgtgccggggcctggagcacgcgcctgggcccgggcggggcgccgggggagcgcgcctcccccagccccgcgccccccttagccagcgccggggctttcttgacagcgcgttcgccctcacccagcaaaccccggccggggaagcagagccgcgggccggagtgggagccggagctgaggagagccccggcccccacgcgcgtgggtgtgggcgctcaggcctcacccccgctcccccagcgcgccgggcctggggcccgcggagccacccggtgggcctgggcgggcggtgcagggctggggcgagagcccgggtggggccaggcccgggcccacctgaaagcgcctcgatggccttgagggcccagctctcgtccgggcagtccacgaacgcgtagccagtcttcaccaggaagggtcccgacaccgggatcttggcgtccttgaagatactttctaggtccgagggggcggcgttctcgctgaggtttccgatatacagtttgttcattgtgaagagtggttgtttaaaaaaaaata

SEQ ID NO: 223041 - DNA, 335 bp, Homo sapiens
  chr7:23510689-23511024
  hyper
agccgcaggcacgtttctaaggctggcatggacggaaatgctgcgaggaggggtgggggagtgggtgaggggggcagggggtgggggcaagacaggcgggcgacgcgccccaccccgtgcgcccttctcgggccctgggcaccgcgcgagtgggggcggcccggccccggagtggtgggggatgggatcccgcagcgtcctgggcgggtgtctgggcgacacctcctccgcctccgcctgcgctcgcggtggctctcggcttcgcgtttgccattggttgcgcgattcagaaaaggctccaggataaatgaggccgggggcgggcttggccactg

SEQ ID NO: 223042 - DNA, 1054 bp, Homo sapiens
  chr7:23513226-23514280
  hyper
ggggctgccacccctcctcacgcccggcttgggaccagcctggagtctcaagccgaaacccctcacgcgggtgggcacacaatgcccggcgtgtcgcctgggcctcctcggaggtgctttaacaggctcttgcgcttttgaacggccctcctggactctgatctgtttaaactagaggcgttaataagtgataacctggatctgccctccttggaagctgcctgcctatattttattgtttaaaataaataaaaatggtgccccgggagagaagatggggttgtttcctttttcctctggctctgccccgagaaagagggcgggatcctcacggctcacagtggggagggtctttcgtcggccgccggctcgcctcggagggcctggaccactggaccgcccttccccggggccctgccgcgggaccgcgggcttctggctcctcctggggctgcgtccgtatgcgcggagcgtgtggccgggccgtcgccgcgccaccccacctgagtccgccggccagcgcggggacgcaccgggcagcgtgtgtttggcgaccctcccgcacctctggtctcagttgcgtgtgtgcacgaggggttccatagggcccagggatgcttggtacccacgggggagaatccctcgccgaaccctgcgggtctgcggggcgggccgcgagactggcgcgcaaaagcggctccaaggcggggctcccgcgctccccggggccggcttgccgagtccaagttgagcaaccggcgtcgagagagacaccgcccctgctgcgggcgggggcctctcctcgcttccgattggctgacggggggaacctatcgccgtcggccgcctccgccagagcggtttgctggttttcattcattggccccggagccgcccctggatttccatcttttgtggcgcgaaaataaccctttgctccctcgttggttttgttgaggttgaggggtgggactgtgttcccctctgctcgctctcgtttttcctgccctttaacagctcgcccccagccccaacccccaaggaagaaagaggg

SEQ ID NO: 223043 - DNA, 249 bp, Homo sapiens
  chr7:23570143-23570392
  hyper
tctacacaacagcccggaacgtgttgcatggggcttttgttttctttccagggtttcacacgaactcacttctactaactcacttctacaattccctatgtagggtaaactttggaaatgaaactcactgacaaacgttccagtacatttaagctggggatatcgtattctttgtgatgtttgtatttctccgaccccaaatatattaataaaaacttttttctgagccctcttcggtgggggatagag

SEQ ID NO: 223044 - DNA, 180 bp, Homo sapiens
  chr7:24323228-24323408
  hyper
ccctctagccggagacttccggcagctgcctccgacttgttctaagtacaggaaaaatctgtgcgcccagttgcctcactccaacagcgcgcagttgtgcccggcgaggatgccgcgctagtcgtggagatgccccaccacaaagaggattcaggtgcttcctactccggcacccagtgg

SEQ ID NO: 223045 - DNA, 180 bp, Homo sapiens
  chr7:24323482-24323662
  hyper
aaggaaagaaggaaagaaggaaagcagggatcgggcactgcccgagggcagatacttgggctttggtgttgtccagcgcgctcggagtgcgctgcctcgctcacgcggtcccaggccccgcttcttcaggcagtgcctggggcgggagggttggggtgtgggtggctccctaagtcgaca

SEQ ID NO: 223046 - DNA, 600 bp, Homo sapiens
  chr7:24323717-24324317
  hyper
cgggtgggagtcacccaagcgtgactgcccgaggcccctcctgccgcggcgaggaagctccataaaagccctgtcgcgacccgctctctgcaccccatccgctggctctcacccctcggagacgctcgcccgacagcatagtacttgccgcccagccacgcccgcgcgccagccaccgtgagtgctacgacccgtctgtctaggggtgggagcgaacggggcgcccgcgaacttgctagagacgcagcctcccgctctgtggagccctggggccctgggatgatcgcgctccactccccagcggactatgccggctccgcgccccgacgcggaccagccctcttggcggctaaattccacttgttcctctgctcccctctgattgtccacggcccttctcccgggcccttcccgctgggcggttcttctgagttaccttttagcagatatggagggagaacccgggaccgctatcccaaggcagctggcggtctccctgcgggtcgccgccttgaggcccaggaagcggtgcgcggtaggaaggtttccccggcagcgccatcgagtgaggaatccctggagctctagagccccgcgccc

SEQ ID NO: 223047 - DNA, 180 bp, Homo sapiens
  chr7:24324535-24324715
  hyper
agaacttccaattcggttttgaatgctaaactggcggggcccccaccttgcactctcgccgcgcgcttcttggtccctgagacttcgaacgaagttgcgcgaagttttcaggtggagcagaggggcaggtcccgaccggacggcgcccggagcccgcaaggtggtgctagccactcctgg

SEQ ID NO: 223048 - DNA, 1084 bp, Homo sapiens
  chr7:24796417-24797501
  hyper
gagagccattccagcgcatgccaggcacaccgagtggggcttggcctcctccccaagctaggagctctctagataccggagcaaagtggagggggacttttttccgtccagagagactgaactccgtatctgttccgcggtccgcctccctgcacacacgcccccgagccgggagagcctccgcagcacccagagaagagaccggaacacaaaggatgaacgaatggggagggggggtttggggggttgggagaacgaaaataccagctgcgcttccaacatccaaggaaggaagtggcagcggggacggggagaggatgggaaggggatgctgactgcgagttggggcgggacgcggtgatgggaggggaccgggccgggaatgcgggaggcgaggggagcgacgggacctgccgttccggcggccgggcagccaatcgattcgtctcccctaggaaggagcgaggggagggtggcccagagagaaagcgccgcgcggcctcggctgcccccggcccgggacacccaaacagaccaaagaggatccggagtggagcccggagcggatcccgcagcccgcgcccgccgcgcacttacccgcgcgcccgctgctgggtccccggcagccgcgccccctgcgctggcggagtcggaggagcctgcgctgggccggcggggggcgggcgcttggggagggcggagagagggcccgcccgccgggacctttgctcggtccgggcgccccagagccgcgggactggccgccggaggctgcgggaggggcccgggccagacctcccagaagccccagagagagccgcttcccctccttcgtgtgactctctgggagccgggttgctgacggcccagcgctcagccggagtccccgcgcgcttttcgggactcacccgggagatgtcggggcctctcgggaagagtgggctgcgcctgccttccgcggccgcctcgcctcttcgctgcgcgggaccgtggggtttgagagcggcgcctcctcgcggggccgaacccgccacccacagtggagtgtggactgacaccgcggcctcacggttcaaccaggaaa

SEQ ID NO: 223049 - DNA, 360 bp, Homo sapiens
  chr7:25019719-25020079
  hyper
tcaagtcccctctcccgggccggctggcgggcgccaccagcacgcggccagttctgagtactttgcccagaacttctcggcgcgcgccgcccggcgattagcccgaggagccgcgcaagggcgggagcgcaggggaggggcctgagaggcccaggggcggggccccgagggggcgggagggcggcagagtgatgcacaatctcaccaatcagaagtcgcctttcgggaaggaggtggggcgatgtcctcggaagaagccagcggattccatgacgcggcgggggaactagggaccccggattccggatgggttgggagggcggagggaggcgagtcctgcggcgaggcactgggtggggc

SEQ ID NO: 223050 - DNA, 200 bp, Homo sapiens
  chr7:25219900-25220100
  hyper
actggcaagaatgcgaagaggaaccgagagtgaacggagtgcgaggcgccgggtcggaggcgagaggggctcttccgccttgcgacccctggccccgcctcccggtcccttgccccgcccctctcggctcaccgccctgcctccagtcggaccccgccttgccccacccgcgccccgcccccaggcgccctctagcggcg

SEQ ID NO: 223051 - DNA, 676 bp, Homo sapiens
  chr7:25891899-25892575
  hyper
gttccaggccccagtgaacccgttacagggtgggactgggtggagcagccttcaggccgccccggcccctcgtgggaatgcgccgcgccccccggactctggagcggcccgaccctgcttcccaggccccgggcaggcgggcgggcgagacacaaagcaggccccgcgggcggtgctccgggtttcgcgagggcggcggtgcgcttgattgatggattcacggcgtttaacccccgccgcctcgccggaggcggccgatccagctgcggccgagggcctagggtggccatgggcccggcccccgcgtcctccgcgcccccgccccggctcgggagggctgccccccgggagtggagaaaggctgatttacagccggccggccgcactcttgcaaaatcactgcggccggggaaacccactcccaggactcagcccggaagaggccctgaaggggagcggagactgggcgctggggtgggggcgggggcgccgagcctcaacttcccgcgtctgctggaagcttgctctgagcgccggctgcggcgttttcccgccttctgcccacgttttcgcccgggagtgggtttcaggagagctggggacagcggcatccctcgccctgggaccgttgcccctgcgcccgccgccctgtgcctgggcctttgcacccggagcg

SEQ ID NO: 223052 - DNA, 360 bp, Homo sapiens
  chr7:25989980-25990340
  hyper
actttttaccttcccatctggaaagctgggggcgggggcgctgcacgaggacgaatattcggagctgaaagagttaaacggtggggaacaaatacaggcccgggaaaagcccctaagatgggacgacccaagaaagacccgctttgcggggcctcccctgagacccccttccccagccattcccagtactctattcccggtcttccagccgcccgcgcccagccccgggaactcgggtcgaagtcgtcccatcccctccgttccacccacccactctttgggattctccctgccccattaggcagtgcttcccgcggaccccgttcgcgcacaaccttgcacacagtccccaagactgct

SEQ ID NO: 223053 - DNA, 300 bp, Homo sapiens
  chr7:25990462-25990762
  hyper
ctggaaagtgctttcccatcttcccccaaacccctcgccaccgttccatcccccgccacccctaagagacaaggccggaggggcagtgggctgcgtcccccgggccggggtgcacgggcggctggcggagtgcggggcgcccagaggctcccggggttgggggcggtggtcgcgctgggccgggacaccttcgcgagtggcccctcgtgcgcccgccgcaggctccccagcctgcccctccagcgccggccgccaggcattcccgggccggctcccccctcgcgctccgctccgctccct

SEQ ID NO: 223054 - DNA, 180 bp, Homo sapiens
  chr7:27135297-27135477
  hyper
agccggctgggggtggcgatggtggtggtggtggtggtggtggggcgaaccgatctgcacccccctgcccactaggaagcggtcgtcgccgccgcaactgttggcgctgaccgcgcacgactggaaagttgtaatcctatggtccgaggggtaggctcgggctgagcaggtccccgagtc

SEQ ID NO: 223055 - DNA, 1320 bp, Homo sapiens
  chr7:27135565-27136885
  hyper
cgtgactgtgccaactttctcacttcctccatggggccggagaagaaaaatgatatgaatgtacagtgcgcaagagggggggcgggagggcggaggacgctggaggaggggcacgtgacggtgtcagccaatggctgagcctcctgcaaaagtttgccggcttccgcagtgatggatcaccgttttagtggcatttaaatccccggcgctccgccgtctaggtgacgcgcagtcgcccccccaggcagcctaggcggcggcagctgctgcggcgactgcaaaggccgatttggagtgctggagcgaagaagagcaaaagctgcgttctgcgcgcgcccgactccgctgcccgccccgccaggcctccgggaggtgggggctgggaggcgtcccccgctcccgccccctccccaccgttcaatgaaagatgaactggcgagaggtgagaagggaagagggctcccggctctctcggggcgggaatcagtgggccagagctcgccgggtggccgcaagtacgccggcccagcccgcagcgcgcccagccggaaggcggggaatccggctgacaccgcgccccgggttcccaggccacctcctctgttctgaggctgggctgggagaccgtggggctgtgaggagcgcatagaaccgtggtggagggcgaggctgggccaccggctcttcaagctcggaatggagggggaagagcgcagagggctggctgggaggaactcgggtgggcgtgaaggagacgagggcaagaaaagaaacttcccttcttccaggagggtcttcgaaaccctctccccacagcccctctcgtcattagcatggcaatgaggagtttctgtaattcgacttggaggggcggatgagccctggaaactcagagctcgccggaaaaggccgggggcggccgggctcttcttccccaccttccctctctcgtcgctctccgcccctttctctttcccactcagttttgcaccgggagccctccgggatgcggagctactcgaccgccggatttttaggggtaggaggcgggggagagagatgacgctggcggacgtggccagcgcgggggccgggcggtgcgctgcaggccatctgccggcgccctgagacccaggagcctccgcgctcccgcgtgggcctcacagggccggtccacagctccaacatagtagctgaactcccttcgttgcgttcctctttttctggaggggaatgttagaagagagagagagcttccttttataaccttcctcattctgctgcacgtctagagtgggtgtgggggctggcaggtgggag

SEQ ID NO: 223056 - DNA, 279 bp, Homo sapiens
  chr7:27146294-27146573
  hyper
cacctgtgcgctcccgctgcgccttgggccgggatgtctttgtttcttccgtgcacagcactcggcagcccctgcgccctcagcctgcctccgcagcagctgggaaccgggcagcccagctggcccgccgcacggcgttaccagagctgccgcagccgcctggagccccagccgccatcctgagaattcgccgagcttccaggcgaatagcctggccaggccccatgctggagccagagggctgctgcgtccggcctgctctgccggctcgcctcggcc

SEQ ID NO: 223057 - DNA, 594 bp, Homo sapiens
  chr7:27191549-27192143
  hyper
ccttttgggcttcacggggtcgctagggaaggggagagagacgacccaagggatgctgccctgtgccttggcgctgtgccacggagggccgaaggaaggcgggcacttactgccaaggcgagccagggaggggagagaaagggagtggtgtgtgtgtgtgtgtgcgtgcgcgcgtgtgtgcctgtgtgtgtgacgtgtgtgggctgtagtgtgtgatgggggcaagtgtgaatgggtgagtatgggtaagggggagtatgcccctcttaaagcctccctgggtgccctctcccaccgctaccgccgccggctgtcgcctcaccacctttgctcctatctcctccccacatgtctcaccttcagacggtggctcccagaagctcctgcccctctgacagctgtcgcttgggcagcccgagagaagaattgtcctctttcctggtgccagaggacgcaggaaattagccaggttgcgagttgcaaagctgctgccgcggcgccgggaacggagcgcgcccaatctccagcgggagccgccaggcctggcctggccggggcttcccttcgctcgccatctccggacaaagcacagcc

SEQ ID NO: 223058 - DNA, 1020 bp, Homo sapiens
  chr7:27212925-27213945
  hyper
ctgtctgcccgcctgactgcagccctctgcagccctgcttacccagggaatccttctccggcgaggctttgctgctctcggaaggggccggggagagctcctccgcggccgaggacgacgcgtgcgcctcctcgtcgccctgcgagcccccgccgctgccgcaagccagcgtggggggcggcggcgaatcgagggctcgctccttccgggccgcatcggccgagccggaggctagcgcgggcgggagatcgaaaccgcgccccgggggctgcgcggggaacgggccagccccgagttgctgcgcgccgccgccgccgctgccatagcccttggcggtgccgtaggcctgagaaaggcggaagtagccaggcactggcaccccgctggaggtgcccagggcgcagccgtcgggcggcgggccccgcgggaagggagccagttcggcggcggtggccgagactttggggcatttgtccgccgagtcgtagaggcagtaggagctctcttctttgatgttctgcgcgaaagagcacgaggtggcctgcggcgctggctggggtggttgcggcgggggcggcggctgctgctggggcggcggcggcggcccgtcaggcggctccatccggcaagaccggggcgcgtctagccacaggtctatgggcgagggcccgtagccgtgcgccccgggacctagacccccgccaccgccaccgctgcccggcgacgctgcctcattgcgcttgccgcccagcgtggggaagagcccgcagctctgcagcccgtagggcaggtcggcggcgggcggcaggtagaccccgccgtgggcgtagtaaccgccaccgccgccgccccccgcgccaccaccaccgccgcctgcctcgcctctgcccgagctgatgagcgagtcgaccaaaaaagagttcgcggcggggctctccgagcatgacattgttgtgggataatttggcgaagggagcagatagccctttctggctgacatttcttgtgcaaaacatgctg

SEQ ID NO: 223059 - DNA, 720 bp, Homo sapiens
  chr7:27223936-27224656
  hyper
aaaggcccttcataaaccttatatgcttataaaacagcatataaaaatttaacagcggtgctgcgctagatttccaactcccctttcataaagcgcagggcgctgcctttatacgtactggagccgccggccttgtcctcagtgtggccggaagacgactcggggctgctgctgctctcggggcgccgccgccgctctttctcctctgctgccgccgccgtctcccggcagccgccgccgccgccgctgtccgaacttgaagttgccggcgcgcccgttgcagccgccgccgccgccgcggaggtcgccgtggccgccgggggccccttctcggcgctcttgtccccggggtagtcggaggaggcgaggttttccggggtgccgtaggctgtctcgaaaaactggtcgaaagcctgtggcaggacgccgttcctgcccacggtgctatagaaattggacgagactgcgggggtggggtggtggtagacgttggccgagctcttggccagcacgtcgccaggcacgccggccgcgctgggcgcctgcaggcagtctctgtgcacgagctcctccgcggagtagcagtgggccagattgccgcgggggtgccatttagtggcgggctcaatggcgtactctctgaaggtcacttcgcgcacgggttggacctggggcaggttggaggagtaggagtatgtcattgggcgcgaagacggggtc

SEQ ID NO: 223060 - DNA, 728 bp, Homo sapiens
  chr7:27278959-27279687
  hyper
acaagccagctcctggcccccggctcaggactcctcgctctctcccttctcggggccctgtcgccgttgaaaggcccgctgcaggctggggagggtgatcggggccgcgggccatctcccccgagccgggcgggcagactgcggaggcaggccccacacgcgccgcttttccgagcccggttttcttcaggagcgaagctgttccagctgacccgcgcgtctgggggcctatgcccggcttccgattccatttaaaacgacccgcgcatcttatctccgtcgcctccccggggttcccacccacccccctccggcccgggccaggccagcccagccccggcggaagccaagctgggagcttttgaagtccggagaatttcaatccgagaggagccggctggaccggagcccgtcgccccagcgggggaagggacggggggcctgccgtgtggcaggtgggggatgggtgtcccccgccgcgagaaatgagaagccgccgggcctggagcggcctccacctcagctgctatcaccccctctccgctgtcatgggattgcccaggcttaatggggttgtgcagggcttcacttgctctcggaatttaccttccttctcgagccgtgccgcgaataaccttcacgacacagtgataacgatgttattaaatactccccccacattcaccgcccaaaaaaccaaaacagtgttcttatccagtcctctcttt

SEQ ID NO: 223061 - DNA, 193 bp, Homo sapiens
  chr7:27701810-27702003
  hyper
gcttgtacagccaccgcttgtgtaataaggccatcccctcggactcaggtggttaaacatcaggccctgctgcccaagtgtgtccccaacccaaggtgcaccctgggggcgctgaaagaccaggggtcgctggggtgagtgcgggttgctcctggagttgggcgctccaaacgtcctcggagtcctaactcca

SEQ ID NO: 223062 - DNA, 389 bp, Homo sapiens
  chr7:29185859-29186248
  hyper
gctccaatttgaactttgactcggccacgaccaccccactccagtctcactctacggtgctttctcccctgttggtgctgagggcttttgagactacctgccccgcgctccctaagtccgagggaccgaggcgaggacctgtcccgctgagctggcacgacccacgcagggcaggcggcacttacgcggcgcagtcggtgctcctccctgagccgcggcgcgcaaggaccccagccggttgtccttgcagcgcttcccaaatcaggcagaagtgaggcagccccacccagtcacgaggaccctgcagaactcgagcctttaagcgctcctctaggctcacatgacccagacccacagggcaaaaagtgcgtcgtcgtgtcccaacctcc

SEQ ID NO: 223063 - DNA, 1072 bp, Homo sapiens
  chr7:29233994-29235066
  hyper
gccgaaccaccccccgagcgaccgcgtctcctcttcttcctttgtgtgtgcgcgagcggagttggggcggagggagaagggggaggtcgctctgtctgtccgtctcccgccgcctctgcccggtctactcgaagtgcggcgggagaggcgggagcccaggagagggtgcgggagctggcggggcggctcggagctgccaggacgccctggtcccagccgcgcacaggggagcgtggacggcagaggggctcggcgggagccgagatccgcccgtcccggctgcccctcggcctccctctgctcccacctaccccctgacacccatagaaaagcgtgcaaaggcgcggagcgggacggaaaccacaaataaatagcggcggcggcagcgcgtcatctggtggagcaggaagtgcaggcagagtccggaggctggtgctttctgcgcgtccccaggactttgccatgggctgggggccgcggaggctgcgagcggccgggcgagggcagcggcggcggcgtccgcaccggggctgagcgagcagcgacgcgaggggcgcgcggagatggcagcgtccagcaactccagcctgtccggctcgtcggtgtcctccggtgagtttcagcccgtcgggcgctgctgccgcgccgggtctcgccccactgccctcgccccgcagcctgggatggacagagcctacctgtggccatcccgcccgctctctcggaatgggggcaggcgtccggggtgatacttgtttggttcgccagcacctcggtgcccagagcacctccgcgcctgacatctgacagcgcagaggtgggagagcggtggtgcccttagtgtgcggacgcgggtgttccggggcttggagtgcagcgagcgaaaagcgaaaggagcgggcaggctcgcactttctggcgcagctggagcgggggctggcggggcggagaaggttggggtgaagcagagcgccccgacctgtttgccgtgccgcgcccgctaccctggacacccaaatccggagcagaggggagcaaaccctcgctcctcgcagacttgattttctttgtt

SEQ ID NO: 223064 - DNA, 369 bp, Homo sapiens; identical to SEQ ID NO: 200920
  chr7:29724332-29724701
  hyper

SEQ ID NO: 223065 - DNA, 54 bp, Homo sapiens; identical to SEQ ID NO: 200921
  chr7:29725077-29725131
  hyper

SEQ ID NO: 223066 - DNA, 938 bp, Homo sapiens
  chr7:30028511-30029449
  hyper
tttctctcggccctcgcgagtgaggtcgccaaatactcgacgcctcaagagcgagccgaggaggcagaggccgaccaagccggcctctcggcagccccgcccggcgccccgcggagaacgcccgggtgcggctcgagggaagttgtgtcaagtcccacgcgcggcccgcggagaacccaggggcggcccgcgcgcgtcggcctagcggggagggctgctccgggacacggtgcggcggccgcgggcgagttggacgcgctggcagagccgggccgaaggcggcgggcgtctccgggcagccatgttcgcggcgcccgcccgcgcagcaggtacggcacctcggggaaggtgcccggctcgccccagaccccagggtggcgaggccaggggcccacaggcacatcccagtgggcagcaggttggctgccaggaaaaggaaacccaggaagagcagcgcggggaacccggctgcggtgcgggagcccggggccggcatccctccactgcacccccgcagtccccgagccgagtcaccccggcttcaggccgaggccacctctcctctgaccgcccccaggctcccagcccgcccgggccagcaccgggaatcggcctggggtaacgctacccgcgggttcggagggacagcgggaggagatgaaacgcaggaggtggcgatggcgggtggggtgaaaccgccgggaaagcagcgctgcaaacgccctgcgctcccagacgcggctcacctggggcggcgggctccgggctccgctctccgctctgcggtgctgaggctgcggccgccgagggtgcgggtgctgccgggtccggattactgcggcgacctcgggggctgcagctgcagtggcggaggcggccgccgggcgcttccccctacccagactcccggcgctggggcccgccgccccccgcagcag

SEQ ID NO: 223067 - DNA, 263 bp, Homo sapiens
  chr7:30029494-30029757
  hyper
ccccggcccccggggccccgccgcaccccgcgcgtctggctgcacgggccgcggcgctgctcaccgtcgagtagggagggggcctgggagctggaggagcggccgagagggcgtatctcgccgcagaaagtggccccctctttgctagatttttatttcttggttgtggctctcaaaagggaaaacccgggcttcaaggagccaggcccagcatccttttggcgcctcttcccgacgtttggttgctacgtccgggcctcggc

SEQ ID NO: 223068 - DNA, 139 bp, Homo sapiens
  chr7:30067885-30068024
  hyper
atttccctgcgggccgttcccgcaaactccgccccgccgccgctgccgcgaaatcccggagtggattttgggaaggggcgcgcgagcggcgccctgggcatgcgcgagcgcgtcccgggcccggcgagtcgagggttca

SEQ ID NO: 223069 - DNA, 240 bp, Homo sapiens
  chr7:30517968-30518208
  hyper
gcacgattgagaacccctgcgttcgaccacagtgggataaacgattccgctgactgtgaagttcatccctctcaactttcgctacatgcttcaaactcgcgggtttctccgcttggttccacccagagctcctccagagccgcgctgcgttccgcccgcacgcaaatcccgcctccctgcgcctcctcactcgcagcgcccaggacctcagaaagggcctgccccgcgcgaatccccagt

SEQ ID NO: 223070 - DNA, 530 bp, Homo sapiens
  chr7:30721877-30722407
  hyper
ggagcagtgccgcgtccatcgcgtcccgcagccgcgtgcggagagggagtgggagtgcgcgcccggcgtgactgcgagggagtggacgcgagagtgagcggccgagagggcgcggggtcctggcccccgccagcccagccccgatctcccgggcagcctttgggcgccacctccggtcgcccagagctgtcaagtggggaccttcccggagaggagccgccgagtgcacggagctgcgggtacagccgctccgccgcggccaatggctgcgccggggggcggggccgggcggctcctctcggaggggctcagtctccagcccccgggccctccaccctgcccaaagtacggcttctcagttcgcagctctcttccactcgcggcgtccagaggagggcggtgggctggagagcgtgggcctggggtgacggaatgctctgtgcggggatcgcaggcccccgagctgcagggggcagcaaagcgcgcccacctgcccgcctgcccgaggagaacaccgcagctctgctaat

SEQ ID NO: 223071 - DNA, 900 bp, Homo sapiens
  chr7:31091861-31092761
  hyper
attggcctgcagcaccccctccccagcctgtgaagtgagcagggggaggcggtggtcggtcgcctccctccagcgcccagcctggcttcgcggcggaggcggcgcctctcccgcaggacggagccaagctggactgccgcgccgcgcggggcgggcaaagggggcgctgcgctcggccccgggcagggagtgacggcggcggcggcggctccgggcgagcgtggtccccgcgtgcgcacacgcacacgccgccgcgcagggacacacggaccccggccgccagccggccacacaggcgcggagacccggctcggcgcgcgctcctcggcgcacacgctccccatccccgcgccgcgcgggccgcggacttgcaggctgcgcgtcctttgcggagtctgccccggccccacggacaggccccgcagtgagcaggtaagggtcgccccgccgcggctgcccctccacgcctcggccgtcttctccccctccagaaccttcgcccagccgggacctcggatcccctcctctggcttggcggtctccgccagccgcgacctccaccgacggagagcgggcgagggccggcgccaggcaagcctcccagatctgaaatgaagccccctcccgccgctgcgcccttcctgcgcgtcaggctgacaccccccaacccaagtgtctggcgctgcgctcggggcggccgatcgccgcagactgccggggtgggggtcgacctagctatctcacgcccctcctgatgcggagaagggagaccaggggggcaggcaagccatgcggccggagggacccggagggacatgcctccctacccttaggtggacggacgcacctacgcggatcgggaaggcagggctggagggtcccccggggctaggtaccgca

SEQ ID NO: 223072 - DNA, 960 bp, Homo sapiens
  chr7:32337957-32338917
  hyper
tttcccccggcctgccttattaaaatcgcagccaggaaaccgagcagttcggggaggtgtgatgctgaaaaccagcttccgcgcgacgccgggtcggagcccgcgaggggtgccgggggggacagcccagggtgcggcttctgtcccgacccagtcgccgctcccgggggctcccgcccggagagcaccctccggccccagcccgacccctgagctccccctgcccgcttagaaaggaactctgaccgccaccggagagggcgtttgcccgagccaggagtccgagaggggtggaaagttctcacctatggtgaagctgtagccatcgatgctgaaagtggcgctccggcattttttgaagccctccttcctgttgccggcgtccgtcatggctcggccggccgggcaggggcctcgcagcgagaccagcggcgtctgcggtcccccccacggcggagtgagcagcccggggctcggcggcgaatcctcccccggccgcgccgcgctgtcactctcagccccgccgcgcgctggcagctgagcgcctggagacaacagcggggacccaatgtcaacagctaaagcgctaggagctcggcggaggcaggagccgtcgcgactgccccatctccaagccgagttccagaggcggcgagaggagtgtcaggaagggaggacgcgcgcccgagcgcgtggacggggctgaccggtgggcgcggagatccctgcctggccacgctactctctgtcagccgcggatcccgcgcgccacaggaaagtctgttttctacttcaccttctccttccgtctctggtggctggggggatttggggacccaagggaatggctgaattggcgtcgtgcgtcttctagatatgttttctctggcagaccggggagcttccagaaagcacatcaacagatggaaaggcaaacccctcagccatgagatgttgccg

SEQ ID NO: 223073 - DNA, 264 bp, Homo sapiens
  chr7:32768220-32768484
  hyper
gcacgcgcgcgtactcggctcggatctaccttccagtagcagcggagtggccaatgggaccgggaccagggctgggggccggggggccgccgccgcggggaggttcccggctcaggtgcccagcgctcaccagcccagcgcctcgggcggcgccgcggtggccccggcagccccgcgcagctgtttcctggggggcgtggcgtcgggggcccgcgcggcgcagtcctccttcagcatcccgaacagcagcagcggtccgcagga

SEQ ID NO: 223074 - DNA, 660 bp, Homo sapiens
  chr7:32981884-32982544
  hyper
acaaaattccctccaacccggagaaaacaagtccgcctctgttctacctagcagcgccgtggccagtccccgccgcccattctctcttcttccgggcctcgccacaccaacactgcaggacccgtgtcctcgtcccttctccgtagcagaggatgaaaagaacggggtttctccatgtcgcagtggcccagggaactcagaggtggagcgcgggggcagcgtgctcggttgaacttgcctgttcggtccacaaatgccgagcaagcgccaataactcttggcttccccaaaagaggcgacgcccacaccaaagcgggggcgaggagcgcaagccgctgccgcctccccgggccgaggcccccgcccacccgcgccgcggcctccagggcccctccgtggccgggcgggcctcgctccccacccagtgaggactagaagtcccgtcgcaggcactaggttcctcacaggcccgcacccctgcctgggtcctgggggcttggaggacccagcccagcgcccaacacggcgccgggcgcccctgttcccagaaaacgggcggcgcgcggactgcggcccagacggctgctcgagactcacaaggactccaggcgcttgagctgctgcagctgctgggcgtcgtgccgccgccgcttctgctcc

SEQ ID NO: 223075 - DNA, 154 bp, Homo sapiens
  chr7:32996717-32996871
  hyper
ggaaaattggatccacggccacgtaggagcccctcacggcaccaaacccggtgtctccagggacgggcggagaccagcgggtgggcttgggcagtacgcgcttttctcttccgactttgggccaaagccttgtccggagatcacagtgtctcgc

SEQ ID NO: 223076 - DNA, 540 bp, Homo sapiens
  chr7:32997067-32997607
  hyper
tgcagcccgggtagggccaggagacccggtccacgtttgcaaacgcagccgaacgcccaggccgacccgtgccgcccgagcgccgcgctgcgtccgcgccactcttctcgccgccccgatggcgttccggggctggaggcccccgccgccaccgctgctcctgctgctgctctgggtgaccgggcaggcagcgcccgtggcgggcctgggctccgacgcggagctgcagatcgagcggcgcttcgtgcccgacgagtgcccgcgcaccgtgcgcagcggcgacttcgtgcgctaccactacgtggggacgttccccgacggccagaagttcgactccaggtaccgcgcccttggcgcccggcgcggcctcagcggatgcgcgtccctctctccggacaggcctttccctcctgccggacctcccctagctccgccccgtgcagccgcgctcctcccttcttccgctgcccagatcctcccggaccccagaccctccgccgcgggtgagcctcccggccctcacgtgccctaggctgccag

SEQ ID NO: 223077 - DNA, 180 bp, Homo sapiens
  chr7:33944194-33944374
  hyper
tcatccctagtgtcaggacgcgcagacagctaagcacagaacacatctctaaggccacttgcccctctgtccgctcagccccctgagttcgctgtcgcgcccccgccagagggaagcaaagcagggcatgaaaagttgcgggggccctactgccccgggtgtgtcgctccttcccaaagg

SEQ ID NO: 223078 - DNA, 960 bp, Homo sapiens
  chr7:33944400-33945360
  hyper
gtggggcgcccctgcgtcccgtttgctgctccctcgctggattggggcacccgggcctgagcgctagtgctgcggcatccccggggctcccccaagaaagggaggaggagccgcgctcgcccggacagtggagacgcgccttctcggctctggtccgcgccctggggccctggcctccctggaggggctggggaactggaagctgggccgagagagttcccgctgcagctatcgcgcagtccctcctgcgcccgggcgcccccagcgggttccgggaggcgcccggtgagcccacgtctgttgcggcggagcgagcgcgctccgggagggccgagagccggcggggctggcaggaggtgaggagtgcgggagtggaggacgctgcggcagcgacagcgacagcccccgaaacagtagcggcagcccgggcggcggctgagcggcagtgcgcagtcggcagcgccgcagctcctctcagtctatctccggctgccgcaacaccccttcctcctggccccctctccggcgctgaggggctgactgctaagccactgcaagcaactccctcaggaaaaaaaaaaaaaaagccgcatcggaggagcctggccgcaggacccctcctccccgggcgcccccacaccttggtctctccccccgccctccctcacacccccccgccccccagctctcgggcgcccgcctccctccttcgcggacggtctcccgacacgccggctgagagcccttttcgactgtgagctgcggcagctgagcagaggcggcggcgcgggacctgcagtcgccagggattccctccaggtgacgatgctctggttctccggcgtcggggctctggctgagcgttactgccgccgctcgcctgggattacgtgctgcgtcttgctgctactcaattgctcgggggtccccatgtctctggcttcctccttcttgacaggt

SEQ ID NO: 223079 - DNA, 180 bp, Homo sapiens
  chr7:35225498-35225678
  hyper
ggggaggacctcctggcgccccctggcagtttcccgccgcctagggccgacttttccacctccagctcccgggcgggggaggccccgtacggccgcttagacgggctggggcgggaagattgcagcggctttgggtttactccttgtttcttcataatccctagtggagctgggtcaatt

SEQ ID NO: 223080 - DNA, 515 bp, Homo sapiens
  chr7:35225735-35226250
  hyper
cctcaacggacttgtccccgcagccgttgactagccgttgacgagcggacctcccggtcgtcatggcgactgtgaaatgtagggtggagcgcatgcgttcgaagccattcgcgcgggcagtccctgcgtgtccccctgcgtgtccccccacgtgctccccagcgcgcgcagcaccccgcctctgcgcttccccgagcgtgcagcttccggtgagggcagccccacgcacagcccccaacaccctccccagcgcctgcagccttcggtgcgcgcagtccccaagcccacatgcgcagttctcaccttgcgcgcagccccacgtacagcccccaacacgctcccagccccactggcgcagaacccatcaccgcttgcccttcacgcgcttcattgggagtgcagctcccaccccgagcgcgcagctccacgcagcctctccacactctccccagcgcttgcagcaccccccagtgcgcacagctctgccagtagcttcccggcgcgccgcccctgca

SEQ ID NO: 223081 - DNA, 146 bp, Homo sapiens
  chr7:35226470-35226616
  hyper
taggaaagtctctacgatcgctgaggtatcgggcagtcagtgcccgttgccaacgcggagggaacgggcggagactgcgggcaacacgtggcagagccggcgtgagtccggtgggtctgatcccagagcctcaggttgacgccact

SEQ ID NO: 223082 - DNA, 995 bp, Homo sapiens
  chr7:36192297-36193292
  hyper
gcggcaaccatggtccgggggcagctgacttaggacagcctccctgtgacccgccctcgccggcacggcgccggctccgccccttaagccccctaagtcccgcctctgcgctcccggggcctacccccgcgctcatggccccgcccccgcttttcctaccccatcgcgccctggccccgctcccacactctatgaccccgcctctcgcactccaggcccgccccacgcgctccagggttctgctctccacccatttgtgccaggccacgcccccacacccatggctcctcctctcgcacgccagggcctcccctcgcgctctctggttcgttctccaccctcttgagccttgatgccgccccctcttccatggccccgcctctcccactccaggcccgcccttgcgctctcgggttcctctctccacccactggtgccaggcctcgccccgcgccagggcccctcccccacgtgccctcgggagtcccggggaggagttgccgcgcggaggaggcgtggccgcggtgcctgcggaggcgcgagcggcgcggcgcggcgcggccgggactttggctttgacaccgactgcgagcgggagccgtgcggctggtgctgggtctggactggctctggcggatccccgcccgagttgggcgcaggactttttgccggggtaaacgcaactgcggcggcgccgccgcaagccccggtgcagcctcggcggcgggtttcgccgccgctgccgccgcctccgagcagccctgcggcttctattcactctgggagagcgatgctaagtttctcccatagaaagagccgggacacgcagaccgaagcggcgtagtcggcttccagggcctgaccagtgacccacacccgcgcggacgcctaggctggaggcagggggcccgtgctgtcccgggctgggctcaggcttccgagccgcaggtggaagaggaaccggcgccccgcagagcggccgagaggtggggcgc

SEQ ID NO: 223083 - DNA, 102 bp, Homo sapiens
  chr7:37487146-37487248
  hyper
aaatggccccctaggcgggagagggtcactgggcggggagttcctggctgtgcggtcacacacacacacaccgactcacacacacacccacaacaccccccc

SEQ ID NO: 223084 - DNA, 1722 bp, Homo sapiens
  chr7:37487368-37489090
  hyper
tcgcggcacagcaccgacttcccaaccccaaacacacgcgcgcacccccgggacagctgagttctgtatttcctcttcctcaaagcgactccggcgatcgcagtcgccactctccgctccgattcccgggccccctggcatgccgccgcccccttctctgaaggcgcgcccggtgcgtcccctctccgaagccgagatttccacgaagctccacaaagctccccgccgcctctctcggtctcggcggagaccccggtgtgtccccgggaggagagtatttactaaccagaacctcaggggctcccggctgcccagaccgccctctccggccctcctggcccccattcctctggcccatcaccgccccctcccacgagcgcgctcgccgggggattccctcccatccccgagtgcaggagaagacgccgagtctgagccgcagccgcttctctagctctataggaatcttgactccaagatcccagccccacatcccccgtccccagtaaccccgcgccagcgtcgcaaccctcccgcgccccccctcccgcagaccctggtcgaaatgtctcggcgggctcccgggccccgggccctgcgcttcatccgcgggcgccgcacctccagcgccccctccctccgctcccactcccactcccgccatccccggagctcagacttccccaactgcagagcgccccgacgcgcccgcagccctcaccctgccgagcgcggcggccacccccgcccgagccgcggcgcccccagggaggaaacaaaagtgtctccgcggcgcccggagtcccccggagcaggacgcctcctcccggccccagtcccggccccctcccctgccgcgccgaggtcagcgagtcggggcgcggcgccagcccaggaaactttacgaacctgcttggggtcgcaggacagcagcggcaagggttcccggcgatcagagctccggcgacccgccaccattgaaggggaactggaggctctgtcgcccagcgtggggccgcggcggcgtgggtggctctgcctctatcctgtgcccatcctcgcccgctcccgctcgccccagcacacgcacttacactctgggtcggccggctgctgcaccgccggctgccgctgctctcacttcctcttccttcctcctgctggccagagacacattttgcatctgcaaggcatccggagatcagccgcgaactctcctcccgagcggacgctgcggagttgcagccgccgcccccggcacctgcgccaggacactcgtggtctgcgcgttcgccttgcgcccgcaccctgcctggtccctgcccactgcactttgcctagggggatgcccacgactttttgaagtccccctacttaaaagacagaaatgtcaaacaccatgcatgcctcagatctgctataaataatatgtgtgcagagcatgacttcgatgagctcacacacggcgtttggaggcactaattaactccgtcaccctcatagcgccatctccgggaggccaaaagcgagtagcatcttttcacatccttttttaatttttggcaaccggttccggatattaaggggaaacttcggtgggctgtttgaacgctactttaagacgtgtttgttttgacgctgtgcctctacccttggacagagtggcaaaaaaaaaaaaaaaaagtttcctccctctccgtcgacatctatgtatttactaac

SEQ ID NO: 223085 - DNA, 981 bp, Homo sapiens
  chr7:37960166-37961147
  hyper
ccctcttaaaacacgatgcctcccaggatgctagtggcaccactgccactgcatttcctgttggcagcagtgagcagtgaaaaccgaagcggcagaaggcagtggcagcaggcagtggcagcaggcagtggcccaggcagaaatagctcccgcgcgattcactggagccttccccgggccctggtcccggctaccgggactcgcgcgtccggatctcaaaagcggcagaggccaccgaagggacaggaagcactttggtccagaccacactcccggcacagtgcggaaagagccggcgggagccactctgatcccggacgcctcagcgcccccttgggcttgggcttgccctcgggccggggaaggctgaccgcgatgccaggacgcgctcccctccgcaccgtcccgggcgccctgggtgcctggctgctgggcggcctctgggcctggaccctgtgcggcctgtgcagcctgggggcggtgggagccccgcgcccgtgccaggcgccgcagcagtgggaggggcgccaggttatgtaccagcaaagtagcgggcgcaacagccgcgccctgctctcctacgacgggctcaaccagcgcgtgcgggtgctggacgagaggaaggcgctgatcccctgcaagaggtacaggtcatcggcccgcggggcgggagtagggagccgcgcgggcatggggagggcgaggtcgcagaggcctgcgccctgtaactctttccggccccttgcagctcctcccttctcccagagagatctttcgcgaggagggtctcttggggatagcatggtccgggactgggaggggcgctgcgcccaccgagggcggcctgctggcgggggactcagtaacacccagcgaggcggtggcaggtaaagaagggacccatccagggcgggatcaagctgcagagtgccccatgcccaggttcgcccctgttctcacgctgctgagtcaggctctggg

SEQ ID NO: 223086 - DNA, 256 bp, Homo sapiens
  chr7:39453506-39453762
  hyper
ctaaatgtgcgcttcgggaaaataacgagcccctcaagatgccccacaaacgacggtcccctggtccgaggagccgggcagcgccgcgcagccgtctcgcgtgggacccacccgcgggcggagccaggcggcagggctgccccaccgagcttcaccccagcaacccctttaactttcttaaccctgtattccccaaccgaacacttcccagagttcacgctggcagagcccacttcaaaaaatgctgcaggaagcc

SEQ ID NO: 223087 - DNA, 240 bp, Homo sapiens
  chr7:42276671-42276911
  hyper
taccgcgagcggccgggctgggcgcggggtgcgcccgccgcgggcatggtgcggcgcgggcggccgcggggcgcgcggggaaggcgggagagcggcgcgggtgagtgggagcggcgggtgtgcgcgagtgcgagtgtgcgagcgcgccggtggcgctgcccctgcccgctccctcccgctcgtgcagctccggcatcagtttcggggatcgtgtaatccgatcccttctgactcacaagc

SEQ ID NO: 223088 - DNA, 180 bp, Homo sapiens
  chr7:42277034-42277214
  hyper
ctggtgccccgtgctgggtggagaagccccccgccccgacctggcaccgcctgcactactcacggggtggaaaagttgtccctcggctccgcgctcccctcccgcgcgctccctccttcccttctctcctcctcttcctcctcctccccgcgctcctcctcccccaagttttaacagatg

SEQ ID NO: 223089 - DNA, 300 bp, Homo sapiens
  chr7:42277290-42277590
  hyper
actctcgggctcggaggggacgcgctgagcagcaggacgcctgccgccgcagggggcgaagttgggaaaacttggagtgctgctcgccttacttttgctttctcgctccttccaggccgcgccgggagcccccgcttctcccgcccgccgggtccccaagcccggagtgggtcccagctgcgaggcgggcggcggcggctgggaggcggcgcgtcgcgggccggggtcgggggctgggggggagcccgggcgccgcgagccacgcgcgcgctccctccccgccctccgccgccgccgccg

SEQ ID NO: 223090 - DNA, 1320 bp, Homo sapiens
  chr7:43152044-43153364
  hyper
gggccggcggtaacaagaatcgatatatatttaccgcgggggcgggggtgggggtgcgcggaggctgcagggcggggcagcgctaatgagagcaagcccggcttgtggttggttctggagtctggtacccacagaggagcaggcagggagggaggggatgcaagcgggaggataaagcgatgaagtgtgctgcgttaccgcgcatcaggcgctgttgttggagccggaacaccgtgcgactctgaccgaaccggccccctcctcgcgcacacactcgccgagccgcgcgcgcccctccgccgtgacagtggccgtggcctccgctctctcggggcacccggcagccagagcgcagcgagagcgggcggtcgccagggtcccctccccagccagtcccaggcgcccggtgcactatgcggggcacgtgcgccccccagctctaatctgcgcgctgacaggagcatgatctgtgcccaggccagggctgccaaggtaagcgggcgtagcgcggggacactgtctgccgccccttcccccccgcccttctctgggcggcttccccgccgcacgcgaggccccggcagcgccctcccttctcggggccgagatccaccctcctccccaccctctcgcttctcccgcgaggttcaattgtcagcctgggtcgcgccgccgcccggtccgggccggcatccccgggtggcgaccccggcttgggtactgcaggcgcacccggccctcctgcggggtacggagagaaacaaagaagcccccaagcgggttcgcagcgcctcccccgcccctcagcgccctcccagtggcgaggaggtgtcaggggagggggcggagagacctacgtaatcccccttcccagcccacacccaccccttgtgaaccaaagctctggatttgcgcttcgccttgggctcgcttttgaacaattgtgtcccatgcaatgcccgtggttagcccagagagcgcccagagcctccgcacgggctcgccggtgctcgctcgaggggcgcgtggccaggtccggcccttgctcccatggacgggtgcaggaggggaggaggcgctgtgtgggtgctcccccagcgcctccctgttaccggccggctgcgccgctcagccgggcctgccacctgagttttagcgggagcagtcatgtcgcctaccgtattgcgacttgcagacaggcagggagggagctgccggggcggggagggggggggaatgcgtccggtccatttttggctggaggtgcgcttcctgctacccccacgttcccgggcggtgacaatgcagcaaaatccgagg

SEQ ID NO: 223091 - DNA, 1193 bp, Homo sapiens
  chr7:44364449-44365642
  hyper
cggatggggccacgcgcaggagcaggcgcaagcaggtcccgccacccccgccgcctgccgctcgggtgggggtggggacagcgcacccgcgtcggggacgaccctctggggccgcagccgacccctcccggcgctccaggcccgggggccacccccgcgcgcccctcctctctgacctccccgccgccaaatgcgtcacgtctgccgggcgctccggggacacctgctgccgcccccgccgcgccaagtcgcgagcccggagccccggcccggcagccgcgctgggcagagctgggcagggccgcgcgcgctgaggtcaggcagccaggcccggggccgggggctcgcgggtcggggccgcgcggggccgtgcgcttgggcccggagcccagagaagccggcggcgcgcgggcccgcagtgcgcctggagccggcggcgcggagggtcccggaggtcccggccctctggggtccccggcccagcccgcgcgcgccgctgctcttacttgccaatatcctcgtagagctggtactcgtcggtgaagcgggtgcaggtcaccgtggtggccatggcggcggcggacgggctcggcgtgcgctcggctgcgctcgggcggcggcgactccggctcccgctcgcgggcacggcggcgacacgggcgcgggcgcgggagacacctcggctcgcggcgccaggcgggggccgggctgggctgcgccgggcggcgagcgcacgcgagatctgctcgctccgtcctcgccaggagcgcgccgcacacctacgcgcggggaggcgcgggcgccgctgtcaccgccgccgccgccgcgcccgccccgcccgccgccccctgcacgcgccttccccgcgccctgcacacgctgctcctgcacccgcacccgcagggcaccggcgccctgcatctgcacacgcgccctgcacacacacccttgccccgcacccgcaacgcacctgcacctgcacctgcactcacacgcgcgcccgcccccgcccgcccccgcaccccacacacacacccgcgccctgtactgacgccttcatcctctacccgcaccacgcccgcacctcgcgcacgcaggccacttgctgctgccgacccctcgctctcacataacacagaagagtgcacataatgaacgcagcctcctctctctctctcgaaggcccacctagc

SEQ ID NO: 223092 - DNA, 699 bp, Homo sapiens
  chr7:44924079-44924778
  hyper
gcttatccctctgtcgttcctggatttctttcatctcatccgcataccggcaaaaggcgcctccgaacttgccccaggctttgaagggtacggtgatggcattgcggtaggacggcttcacctcgctcactcgcagaaacaccccgtatttgttgcagcccacatcgaagaagaagcgcttggagtccacggtgatggaggtgccctccgggagctctccatacaggccgccccctgggcccccggcgccgcctcccgggccgcctgccagctcgtcgtcctcgcctccgtagtcgtctatgagcttcgccagcgcgtcgcggaactcgatgaggccctgcgcaggcagcgcgatggtctggccgctctgcaagccgcccggcccggggcccgcgccgaagccgccaccgccgcggttgaccgtttggcggatgcgcaggaagcggccgcgctggttctccttgaggtccaggtagtacttgcggttctcacgcaccaagaattcgctcttgagcgcgcgccgcggcccgccgccctcctcggcgccagccgccagctgctcggggctgctagggcccagctgcgcgtagtgttctatgaagtcgcccagcgagtcgcggaactcggcggccaccgccatggacagcgtgaggcggctcttggaaccgcccgcgcccacctcggcgatcttgaggaagc

SEQ ID NO: 223093 - DNA, 623 bp, Homo sapiens
  chr7:45026005-45026628
  hyper
gagaggaagtagcacgtgtagtgaaggcttggtctccaagaatcactggtgcccccactcactgcggcccagcctcccacgccgcccgccactgaacccaatcccccaggacccctacctgggctcaggaatggtcaggcaacacgtggggcccaggatggcggtggatgactagactgccgaagaccgcgccgctgcgactacgaagtacggagtacggagtacaggtctgccagccaagactgacgccgcgcgctgcgccgcgcacctcgacgtcaccgcgtagtcccgccccgaagccgtgcgtggccggggccacagcgtttggggtagatgacgtcacgcggccgcgggcgctcgcttggtagggtgtgctggggcgtagagtttagggtcctgaggctgcgtctgcgtgtcaactcagtggagtctctcgaccgccctttgttaccctcctttagtgaccagaaggctggagttacgtaatctgcccctacagctaaaaggacggaggcctgacggcgtggcctggagggacgcgctgagcccctaatgggtggtgccttcctggtgcggccgcacaggcggggccgggcggaatccaagcacgatgtggacacgga

SEQ ID NO: 223094 - DNA, 220 bp, Homo sapiens
  chr7:45299652-45299872
  hyper
ggagcagaagtacgcggtgagacggtgcatgcgcgcgcaatcagatccgggttagcaggatgcatctttgaggtccccaaaccaagccacctgcacggacccaatatctctggcgcgtcccgaacgccgtggattggcgtctgccgccccctgccggcggcgcgctgcactgcagacactgaactcgcccaatgggtgcgctgagggtggaagaccctga

SEQ ID NO: 223095 - DNA, 1525 bp, Homo sapiens
  chr7:45613459-45614984
  hyper
gaattgccgaggggcggggggtccctcatgcgcatggaagggacgtacgccccaggcctccaccttcctcctgaccccggggattcttggacgtcgattctccgtctcgtaggggcgagggccctgggttcgcagtcagacgcgggcccctctcaaatctagtggcctggttttattgagtgggggaaggcacatattttccaagattaactgccccgcaacagggaatttcgcaggatttcagtattttcgactccccaggtgacgccaagagggtgggttccactgtgcacggtggggaaactgaggctcggaggggacaaggaaggtactcgaggtcacgcggctcctccggcgggcgggaacgcaggacgcggagttggggcgcgggctgtgcgcgcccaggttcgcggctcccggggctcggctgtcgcagcgcggtcgccgccgaggaccacggtcggggcgcgggcgggctccagtgcgcaggcgcggcgggcgggaggggacgcgctccgggcgcgcgcgcggggcagccggcgccccaactccgcccgccccgcgccccgcgccccggcgcctcgccgcccgccgcccgcccgccccggcgccgccgcccgcgccccggcgccccgggccggcgaggggcgcgcccgcggccgcggccgctgcatggcgctgagatggcgggggcgccgcgcggcggaggcggcggcggaggcggcgcgggcgagcccgggggcgccgagcgggcggccgggacaagccgccggcgcgggctccgggcgtgcgacgaggagttcgcttgcccagagctggaggcgctgttccgcggctacacgctgcggctggagcaggcggccacgctgaaggcgctggccgttctcagcctgctggcgggcgcgctggcgctggccgagctgctgggcgcgccggggcccgcgcccggcctggccaagggctcacacccggtgcactgcgtcctcttcctggcgctgctcgtggtaaccaacgtccggtccctgcaggtgccccagctgcagcaggtcggccagctggcgctgctcttcagcctcaccttcgcgctgctctgctgtcctttcgcgctgggcggccccgcccggggttccgccggggccgctggggggccagcgaccgccgaacaaggggtttggcagctccttttggtcaccttcgtgtcctatgccttgctgcccgtgcgcagcctgctggccataggctttgggctcgtggtggctgcgtcgcacttgctggtcacagccaccttggtccccgccaagcgcccacgtctctggaggacggtaagtgcagccgcgcacccctcatctggtctcggacacacttgctgggacgatgctgggaatgcccggagtcgggcgcgctttttcctatgcggcgggtggggacactgaggctccgagtgggggtgtgttcaaggtcactcctacgagttggggacgcagtcggggctggcaccctccggccagggctctcttcagagtta

SEQ ID NO: 223096 - DNA, 153 bp, Homo sapiens
  chr7:47293661-47293814
  hyper
cccttctcgggaatcgcttttctagctcttcctctacagtcggggagctgagcccccagaagccagcagtcacactagtagggcagggcagagcccgcttgaccccttccttgggaggggggcctagcgccggggcgcgtttcctcttcgcgc

SEQ ID NO: 223097 - DNA, 173 bp, Homo sapiens; identical to SEQ ID NO: 200965
  chr7:47294081-47294254
  hyper

SEQ ID NO: 223098 - DNA, 154 bp, Homo sapiens
  chr7:47621699-47621853
  hyper
ggctccgagtagcgcgcgggcgggcccgtcctcctggctggctgccggcgcccgcggcagggccccctcgaggcggcgcgggcaatcgccacggccggcccccgcgcccgcgccccgagcctggcgggtcacctggcctcatcaccctaacaat

SEQ ID NO: 223099 - DNA, 447 bp, Homo sapiens
  chr7:48074954-48075401
  hyper
ccggctctgggctacgggcagttgacaggcggcgcccgcgctccgcttcctgccctgattggcccaccgctccccctcaggcttcccctattggctgacagtgctccagccgcgcccgccggttggccgttcagccgttgccctggcgacgccgatgttgtggttccgcggcgcgctgggagtttgggtttggttggctgcagccagccagccgtgtaaaaactccaacgccgggcgccgcgggcagcacccacggagacccgcggggagctggtgagcctgagcgggctggaggacaatgggggcgcccactgtggtcccgggccttgtccactgtgcggagctcgcagtgcgggcagtgcgcgccggggctggagggaggggaccaccttgtcgccgggttgggatgagcacagggcgggatctccaagcctgcccaagtcccgc

SEQ ID NO: 223100 - DNA, 180 bp, Homo sapiens
  chr7:48075446-48075626
  hyper
ccctggcgtggacgtgcctgtactggatacccggcgtgacgtgccccctctgtgtgccccgcacgcacgtgtctctgctgaataccccgcgtgaatgtgcccctgctgtgtacccggagtgcgtacgtccctgctgtgtaccctgtgtggacgtgccctgctgtctacccggcgtgcgtg

SEQ ID NO: 223101 - DNA, 262 bp, Homo sapiens; identical to SEQ ID NO: 200969
  chr7:48127995-48128257
  hyper

SEQ ID NO: 223102 - DNA, 180 bp, Homo sapiens
  chr7:49812951-49813131
  hyper
aaggtccagcgcaaagtgaatgactcgactggagaatggcagccctggcagggtctgcggccggctgcggaggtggggacgcggccgcgcggacgagtgacaggttggtccggcgcagcaaagggagcgggtgcggcggtagggcctctccgggggcagcgcgagggcctcccccggggc

SEQ ID NO: 223103 - DNA, 1260 bp, Homo sapiens
  chr7:49813204-49814464
  hyper
gctgcggcagggggaggcgggaggcgggcgcgctagctcccatgctggcctcggtgccactcgcgcgccggccgcgctccgggcttctcttttccctccgacgcgccacggctgcccagacattccggctgccgggtctggagagctccccgaacccctccgcggagaggagcgaggcggcgccagggtggcccccggggcgcgcttggtctcggagaagcggggacgaggccggaggatgagcgactgagggcgacgcgggcactgacgcgagttggggccgcgactaccggcagctgacagcgcgatgagcgactccccagagacgccctagcccggtgtgcgcgccaggcggagcgcgcaggtggggctgggctgttagtggtccgccccacgcgggtcgccggccggcccaggatgggcgctggcaacccgggcccgcgcccgccgctgctacccctgcgcccgctgcgagcccggcgtccggcccgcgccctgcgctcatgtatgtaggtttggcgccggtcttcagggctgagggtgcatgctgggtgtccccgcgcggccggacgcgctccagctgggttcagccgctcagctgctccggaggaaccccctcccccgcccaagtttgtgaatatgggcgcttcgcccagtgttgaggtcggcagggaccgggcagggggtcagcagggccgggcacgtccggagccctcagggaggagggctgagggggaggggacagacgcaccggagtgcgcagagtgggggcgttcggggagtgaggcggagagaggctggattgccggtgtcctgcggcgtctcgggctctcccagcccctttgggcggcagaaactttggaatccagaaaggctggccgggatccagcgagtaggagggtctcgcgcccactctgcgccctggggccccagcctcccgcactgcacaccttggtgctgcccgggcgcttctgctccgcagccaggacactacaagactgagcgctgcggccggcgacctggctcccaaggctcggaggggcgggccggcagaggagctgaagccccgggaatccccgacccggccctctggcaaggggccgagggcatcctttcatgcagcggggcttagagagcggggagggggcgtctgctcccgagacgggagtcttttaagaagttgttagaaatgaatcgtggagtcctaggagaagctttgtttaacctccccgcattttcccagcacaaccccctaaagca

SEQ ID NO: 223104 - DNA, 1260 bp, Homo sapiens
  chr7:49814497-49815757
  hyper
cattcgtccgtctctaactccactgctgaattctccatttaataaccttcgggaaatgtggccaggacctagggagggacaccctgggtgcctgaattacgtggttcaaggcagagctttgcaggggggcgcgggcctggctcgctgcgttccctgggctccgcaagccgcccttggccatctccaacactaatcacgactacatcagaaacacgccggccggtgtcgttcttggatttcgcttccaatgtatcgctccacagtttgtgatgtctaagaaccccggccgtgcaccgacgctgggcatgctgcccccgcccccgtcgcccagctcgttaatctagagctatgccggagcccgggtgggggccgcggcgggccggggcgcgcgcgggccgcggggctcagttgtgctgctgttctctccgcagggacggcggctcccggctggcggcggcgcgcccccgggctgtgaatgcgactcgcccctcggccgcgctccccgcccgcccgcccgccgggacgtggtaggggatgcccagctccactgcgatggcagttggcgcgctctccagttccctcctggtcacctgctgcctgatggtggctctgtgcagtccgagcatcccgctggagaagctggcccaggcaccagagcagccgggccaggagaagcgtgagcacgcctctcgggacggcccggggcgggtgaacgagctcgggcgcccggcgagggacgagggcggcagcggccgggactggaagagcaagagcggccgtgggctcgccggccgtgagccgtggagcaagctgaagcaggcctgggtctcccagggcgggggcgccaaggccggggatctgcaggtccggccccgcggggacaccccgcaggcggaagccctggccgcagccgcccaggacgcgattggcccggaactcgcgcccacgcccgagccacccgaggagtacgtgtacccggactaccgtggcaagggctgcgtggacgagagcggcttcgtgtacgcgatcggggagaagttcgcgccgggcccctcggcctgcccgtgcctgtgcaccgaggaggggccgctgtgcgcgcagcccgagtgcccgaggctgcacccgcgctgcatccacgtcgacacgagccagtgctgcccgcagtgcaaggagaggaagaactactgcgagttccggggcaagacctatcagactttggaggagttcgtggtaagatgcgaacgcccgccgggcgacttt

SEQ ID NO: 223105 - DNA, 1658 bp, Homo sapiens
  chr7:50343196-50344854
  hyper
cttttcccaccccctcgggtgggcactcgcatcctggggccggagcctgaacccgggagccaaggggccccagttccagggacgtgaagctgagcgtacagcgggcgctcccagacactggggaaagtgctttacgatgtcccgagtccctccagtctcgccagcggggcgagcgtgagggtgccccgaccgaccagcggccccgggtgcagggtggcgggcccggcggcgcgcgtccccctccccctcctggcggcccgcacgtgtcgcccgcgccgcgcccccacgggttacgcgcgggtcccgcagcgccgcggccgagccgggctgcccggcccgcggacacagcgccggccgccgcatcccgtgcggggccgcggcgcgatgctgcgctggaatgaggaagcgcggcggcgaggggagggcccgggcgcggtgcgcgcgggggtggcggcggcgcgccgagcgggcccggcgcgggcgagcgggctgcagccggcggcggcgccagcaggtacggcccgcacccgccgccgccccggcggcctttgggggctgagccggagcccggcgcgattgcaaagttttcgtgcgcggcccctctggcccggagttgcggctgagacgcgcgccgcgcgagccgggggactcggcgacggggcggggacgggacgacgcaccctctccgtgtcccgctctgcgcccttctgcgcgccccgctccctgtaccggagcagcgatccgggaggcggccgagaggtgcgcgcggggccgagccggctgcggggcaggtcgagcagggaccgccagcgtgcgtcaccccaaagtttgcggggtggcagggcgcgcgctctggccacccgccgctctgggcggcagctggtggcaacgcaagggcgcggcgggggcggccggcgcggagggggccaggtacggggcccgcgggcggcgctgtgcgcgcggggcagccggtcggccgggagcgcgaaagcctggtctgagccggctgggggcggggagtgtggcggagaaatggggaacaatgcgagtgagcaacttcaggaagtcattgtgaaagaaagctgggaagagctccgcggccaagttagcaggacactctaacaagtgactgcgcggcccgcgcccggggcggtgactgcggcaagccccctgggtccccgcgcggcgcatcccagcctgggcgggacgctcggccgcggcgaggcgggcaagcctggcagggcagagggagccccggctccgaggttgctcttcgcacccgaggatcagtcttggccccaaagcgcgacgcacaaatccacgtgagtgttttcaaattgaatttcaataggaaaacttggggtaactggtgaatttaaaaaaaaaaaaacacagtaaagaaaagcggtaaggttggtagaccctggtgtcgctcaggtccgcctctcttttctgaggacagtgagagagttcacttctgtcaagcgtctgttgctctgcactgtgccagcaggtgcaggaccaggccgacatgggacacttctgagcagccccgctgtcaccaggagaggagttctagctcccaaccatatttaaatttatgtagacctacatatacccacggaagtcagcctttataaagtcgtgtgtaaagagtt

SEQ ID NO: 223106 - DNA, 115 bp, Homo sapiens; identical to SEQ ID NO: 200983
  chr7:55593336-55593451
  hyper

SEQ ID NO: 223107 - DNA, 161 bp, Homo sapiens
  chr7:57928159-57928320
  hyper
agcggcggcgggggcaaaaagccgcagcggcaaaaagcctcagcggcgggggcaaaaagccacgaccgggggaaaaagccgcagcggcaggggcaaaaagccacggcggcagggagcaaaaacccgcgggggtaggcgcaaaaagccgcggcggggggtta

SEQ ID NO: 223108 - DNA, 120 bp, Homo sapiens
  chr7:63767610-63767730
  hyper
cgccctgccgccctgcctctctttctaaagctatgcccaaaccccgagcccggagcatgccgggattgtagtcctgcagtcctgcaacctagggactgcgagaggttaagagactacatc

SEQ ID NO: 223109 - DNA, 509 bp, Homo sapiens
  chr7:64349589-64350098
  hyper
gtggagaggggctggcgctgttccttggccccgctccccgcccgcaaagggccgggaggtcgggctcccggcagtgtccaggctctcgcccgccggtgcctgagccgtacccaccgcgtcccctccgccccaacagctggtgctgagggtccggcccggggtcatctggcagggccgtgcggctcctgcgggtgaccaggagcgcggagccccttcccactcgggctcgggtggcctcacctttcctggggctgcgtccccgcgggacgccaggttcccggtttcttctaggtcgccctggttcctggcagctcctggtgccacgcggtcctctacggtctcctctgacctgagagggacagtgagatggggctggcggggatgggggtccccgcgctgttggaaagcagcggggctgctgctgaccggagccgcctgggtctgttctggaaccgtcgccctggggcccctccgccccgcaaacgctcgggatgcggtttgggagtgta

SEQ ID NO: 223110 - DNA, 93 bp, Homo sapiens
  chr7:64974061-64974154
  hyper
gcggcggcgggagcagaaagccgcggcggcaaaaagcggcggcgggggcaaaaagccgcggcggcagggggcaaaatgccgcgggagcaaaaa

SEQ ID NO: 223111 - DNA, 120 bp, Homo sapiens
  chr7:64974301-64974421
  hyper
gggggagcgaaaagcagtgggagctggggcaaaaaaccacaaaaagccgaggcagcggcggcagaaaacctcggcagcgggggcaaaaagctgcagcggcaaaaagcggcgacgggggca

SEQ ID NO: 223112 - DNA, 533 bp, Homo sapiens
  chr7:64974481-64975014
  hyper
aaaagcagtgggagctggggcaaaaaaaccacaaaaagccgcggcagcggcggcagaaaacctcggcagcgggggcaaaaagccacggtggcgggggtaaaaagcagcggtggcaagaagccgcgacggtgggggcaagaagccgcggcggcccaggcaaaaggccgcaaaagccgcggcgacgggggcgaaaagccgcggcggcggaggcaaaaagccgcgacggcagggggcaaaaagctgcaaaagcctcggtgcgggtgaaaaaagtcgcggcgagaaaaagccgctgaggcgggggcaaaaagccgcggcggcaggggcgaaaaccagcaaaaagccgccgcggtgggggcaaaaagcagtgggagctggggtaaaaaaccacaaaaaaccgcggcagcggcggcagcaagccacggcggcgggggcaaaaagccgcggcggcaaaaacccggggtggcaaaaagccgcggcgccgggggacgaaaagcttcaaaggccgcttcggcgggggcaaaatagtggaaagg

SEQ ID NO: 223113 - DNA, 142 bp, Homo sapiens
  chr7:65037619-65037761
  hyper
aaagccgcagcgggcgaaaagccgcggcagcggggggccaaaagccggacgggcagaaagccgtggcagcggcgggcaaaaagccgcggcggcaaaaaggcgcggcggcgggggcaaaaagccgcggcggcggggaccaaaa

SEQ ID NO: 223114 - DNA, 38 bp, Homo sapiens; identical to SEQ ID NO: 200996
  chr7:65541037-65541075
  hyper

SEQ ID NO: 223115 - DNA, 137 bp, Homo sapiens; identical to SEQ ID NO: 200998
  chr7:66094049-66094186
  hyper

SEQ ID NO: 223116 - DNA, 1042 bp, Homo sapiens
  chr7:69062189-69063231
  hyper
agtgccctgaaaaacgcacagctattttacccagagaggctggtcgcttttgttgatcgattctcggctgcagtcagctctttaatacaactttttatgagcatcagccacattgcggcgggaggaggggctgtggtggaaaaagcagggaaaccgccccccactcccaaaaagtaaaggaagcccgcggggcagggactgcggtttgccggtctaacgggtcctcgagctggggcggcggtcccggccccttcggccccgcccctcgcccgcggccgcctccgaggttcaagttcggcccccggctgttaggcctcgcgctcccggatctgaagccgcccgtgcgtccctaggtcccccgctggaagacgaggcgggaatcccaggggtcatccgggcgcggggtcgctcgtccacgcactgtggtgccacgtggaggaaaagtttccaactctgccagttggtgctcccactgcgcccaggcggagcaaaggcccgcgctttggcacccgctccccgttctgtctcctccagtcgcgccccctcccagggacgccccccttgtaccccttctctgaattcccttctctcctcgcagcgcaggtagccaagggaaaacacccttgggggctggtggggcttcccgagaaggcggcctcgggccggccaggggtagaggatccagggacaagtgtcccgaggaggatgtggggggcgcgcgcgcgaagtggcctgggagcaggggcccacacgcgtccccgctgcgacaggcgggatcctccggcggcttccacgccctggcgcgccaactctgcccggccgcggccgaccccacgcgggcgccccctccacgcccccgcccccgcccccctcacagctccccaccgcccccagtgcgcaggcccggccgccccagcgcgcatgccctgggctcgcgagcgcggccagcccccagccttttgctttctacacactctacaactggggagggggcgggggaggagggagcccagccgtccacgtgatcccgccggccggggcc

SEQ ID NO: 223117 - DNA, 180 bp, Homo sapiens
  chr7:69063499-69063679
  hyper
gtgcaccctccggctcggggctttctcggcggcggcggcggcagcagcagcagcgttagcggcggcggcgagagcagcgttcccggctgcgcttctccctcaggcggggcggcgagagaagcggcggcggcggcggcggcacaccggtgtctctcccgctggagatttctttctgctttc

SEQ ID NO: 223118 - DNA, 1380 bp, Homo sapiens
  chr7:69063746-69065126
  hyper
aaaatatttttgtgaggaggggggcgggtggcagcgacagggtttgcttcttctcttctttcatctccctctcctcccccctcgaagaccgaaaagcaaaccccacaactgctccagcagcatcctccttcccttcctccgcctcccttctcctccgccgctcgcagtttcgccctctcttccgctaatgattgcattattatgctcccctctctggggggtctcgcccctcttgggtcgctccggagccccggcctcccctggctgcatttcttaaaaatttgggagcctgggagtgagttttctccgaggcgtgtgtgagaggcggcgggggtgttttcctgcgcgaggggcgggtgaagttcattgcccccacttttcccgcgacctttttcggacccgattttggatcgagttgaggggggcgcgggcgttttcggggggcggggggcgcggcggagaatggccgcggggagggctccccggagcctcccagtctcttgatcaaagcattccgctattctgatttattgcttgcttggtgagttatttttttttcctctaaaggagacctgtgtgttcagccattactttgctcggcgctgctcccaggcatctccgaccctcggtgctgtggggagccccacacttgggctcctcgcctctcgccctcgctccccgtccctcctcccctctctccgccccttcccccttttctttctcctctctttcttcccctctctcccttctttcggccgccgtctcccccgcgccctcctcggggcggagggaagccgtgaagggggagggagggctcggtgtcaatttttttttgtgtggctgcggccgtagcctgtggcgggcaagcggggagaccccggcgcagcagaaccatggatggcccgacgcggggccatggactccgcaaaaagcggcggtcgcggtcgcagcgagaccgggagaggcgctcccggggcgggctgggggccggcgcggccggcggcggcggggctggccggacccgggcgctctcactcgcctcgtcgtcgggctccgacaaggaagacaatgggaagcccccgtcctccgccccgtcccggcccagacccccgcggaggaagcggagagagtccacctcggcagaagaggacatcattgatggatttgccatgaccagctttgtcacttttgaagcgctggaggtaagggggaccccccttcccccgggttccctttatgcacgaccccactcggctgcgcccggctctcctgcctccctcgccgcgctccgggctgtctgtctgtctgtctgtctgtctgtctgtctaggctgaggtcttattgttggtggggggagctgggggcgcgggcagacaggca

SEQ ID NO: 223119 - DNA, 105 bp, Homo sapiens
  chr7:70596058-70596163
  hyper
gaattccagtatttcgagttcctgggttttgggaagaggaagaggtagtggaaaaccaggagccaaatgaatatgcttcttataataaaatttgaacagagcagc

SEQ ID NO: 223120 - DNA, 360 bp, Homo sapiens
  chr7:70596460-70596820
  hyper
cccactctccagaagcccccgccctgcccgggtgcgcgcgcgcacgagtcggcgaaccggggagctgtgcgctcggcagcctgcgggcggcggcggcggccgccgacagcctctcggggacagggtggcgaagagcggcggaggaggagctggcgccgccgccgctcccctcgggccgcgccccgccctccgccgccacctgcgcgtcccctccgggctcctcagctccggggctgtgtggctctcggtgccgcagcggcggtgtcaccgcgtccgccaattgggagactcggcgttttggctcccgggggcgcgggacgagccgcgcggccggatctggcgagcggagggtgattcggc

SEQ ID NO: 223121 - DNA, 300 bp, Homo sapiens
  chr7:70596864-70597164
  hyper
gtagagaactgctgtgacttttgaggtccgactccttccggccagcctcgcgacgcgccagctccgagacaggccggtgtgccctgaaggccccgaaggctctcggcgcggtttgggggcttggaacgtgtccgggagccggcggcgctgtgagcgctggtgagtttgccggcggggtggggtggactccgcgcggggggcggagaggacgtagcgctcggcccggcgcccgccccctagtgctgcccccactttgagagtaattgagacttgagcgtgactgcggagcctggaggatgc

SEQ ID NO: 223122 - DNA, 180 bp, Homo sapiens
  chr7:70597264-70597444
  hyper
cgcgggtggcgcgccgcgacggccgcctgcgggccaaggtgggaggctgtgcggccccaggcgcggcgcgctccgccgtgggcgggcggcgatccctgagtccggcacctgtgcgccgctccctctgtgcctcccgggcagccccgcctgccggcctcggagtccgcggcgccggcggct

SEQ ID NO: 223123 - DNA, 88 bp, Homo sapiens
  chr7:71198521-71198609
  hyper
tgatttctccccggcggagcagcgatgcggatggggatgaggggtggtcagaggagaccagagctagcgaacacgttcccttctatga

SEQ ID NO: 223124 - DNA, 1080 bp, Homo sapiens
  chr7:71801273-71802353
  hyper
cgagtcccctgccctccctccccatcgcccgggcgcctgcgggcgggggcgcgcagcctggtggccactggcgcctgggggctagaagagcggctcccagcctccagcccgcacggtgccgggacagccgagtccgccgcggcccttccctagccccacgtccccaggcaggcggccaggagccagctccacggaaggcaaggtggccggcgcggcccccagcccgcggggtgggtgccccagtgtcggagccaacaggtacgggaggcgctgtctgccaaccatctgcccactctgagcaccagggcccgcgacagcccgggggtttggacaccctagagagaagcgaggaccgagggaagaagaaaagagagcgcgcgcgcgggtaagctagggagccggcggcggcactcacctcttgctgggccggggctccgcagcccggcagccgaggcgcctccgcacagcgcggggggcttcctccgaggcccgcagggagggggcggtgcggaatggatgcgccgagcgggcagcgctcagcctctcgctcacacccccagcaggcagccgcgtccccgtgccggcatcctcgctgccgccggctccctcggcgcccccgggccgctccccacgcgcgcgccgggacctgcacgagccccctcgtcgactcggagcgcgatctgggcgcgtgcctccctgtccttgtcctctgctctcgtctggggacgtgtgccccgcaccccctgcaccgcgcgctcctctacccctcccgctcccgctggccgcgcgggttcagcccatgtgcgcggctgcctcgctgcgccccggagcccagtggccgaggccccgctggagttgcgcgccctagaaactccatgcagctccggcctcctccccagctcctccccagcggatcccccagggccttgccgccgacagcaccacactcctcgctctgccggcgcccgcgttcaggagccgggcttctgggctcgccttggccgcctgcgccccagctcctccgagggtcggggagcccccaccccccaacctccgcctctccaatggctccctcggttt

SEQ ID NO: 223125 - DNA, 180 bp, Homo sapiens
  chr7:77167496-77167676
  hyper
tggggtcgcagtcatgatctccaacgcttgggaaaggattgcccataaggaatctcatgggtttacctaatttccatttacccgcgtcccgcttctcctctcctgaggcccaggtttgaggtggtcttggggtccgtgtgactataggttcaggggataagtgtgggtgggggaattatc

SEQ ID NO: 223126 - DNA, 104 bp, Homo sapiens
  chr7:77167773-77167877
  hyper
ttgggaacaatagtcctggtggggcggaggcgacgctacgggccgaagccctgaactgggagataaccttcccagcgcccccccgcctccgccaccccctactt

SEQ ID NO: 223127 - DNA, 180 bp, Homo sapiens
  chr7:79082859-79083039
  hyper
ttgtgctgtcccttgaatgacactcaaggctgtggccccgcagcagaggaagcagtggtggtggcgtcggcggcggcggcggcggcagccggagcgagcagtagccgagctggtgagcgggtgtggtgggggtggggaaggagggtagggatgccgggggccactcctgcgtggtgcgag

SEQ ID NO: 223128 - DNA, 180 bp, Homo sapiens
  chr7:79083101-79083281
  hyper
cagggtgcgtgtgcgtgtgtgtgtgtgtgtgtgtgtgtactagttctactgtactggcagacgggaggaggcaggggaggaggggcgcgcgcgccgggtggggagccacggagggcttcgccgctgcctccctccctccctccgcagcttgacccggtagtgaaggcagagagagaggca

SEQ ID NO: 223129 - DNA, 360 bp, Homo sapiens
  chr7:79083338-79083698
  hyper
taggcccggcgtggggaggccggcaggaagggcctcgagcccagtgcggacctttcttcagcctctgtgcgaccgagccgcgcgccaggctcctgtgcgaggaggacgcgctgactccctccgacctgggctccgatggagcagaaatagcgggacctggacttgtggcgcgcctggtgccacatctcgggctctgcgagcgtcctggcgcgggatcctgccgtgagaaggagttggggcgggggacccggcggggcattgcgggagaaggcctgggatccctgggagccttgtagcgtgggggagttcactgtgtagagaggtttcatgtcttcatctatatagtcacttatttgtctt

SEQ ID NO: 223130 - DNA, 660 bp, Homo sapiens
  chr7:80548127-80548787
  hyper
gaccaatttagcttaccgaggttgaaagaaatcagcacggaaaagtcatcagtttgctaccggggttggatgcgcttgtgtctccagtccttttcccagacgaccttattttctagcacgtcgcaaaggtgaaattctttcttcccggtcctctgagtttctttgtaaaggaatctcagcgctgcagtgccgcggcacccggagctcttctccgcgtcgctcaatcaagcacctcggagtgaatggaaagtggccggaggccgggggcgagcgctcttggtgtccgattacagcgccgcggcgcgcggctccggctgccccggcgcgccgccctgcaggctcgcatcaccaccgcgcagccccggccgcatctccgccagccgcgaggccccaccccgagcgcgcccgcgagagcctggcagggagccgcgggggcggaccgggcggggccgacccttagagctcgcggctggccagacgcaagaatgcgcggccgcaggctggagccctagctccgcaaccctgctcctttcgcagtccgcggcggagtgagcaacttgctgggtgcgctccacggtttttgttgccggcggctctcgaagacttacacaggctttgcctggccgtaaatatcaaagtgcaaagcagttgtggtttttt

SEQ ID NO: 223131 - DNA, 615 bp, Homo sapiens
  chr7:82791810-82792425
  hyper
gaggggctccccgccccgctagctcctcctccagccgctgcggccgccgccagcccttcggggagcccttccccttccaagctcgcctcgttgcccatggctcagggagactcggggccgccgcgctccctcctcgcgccgcgtcccagtcgagaagcccgcggccaggggagcagtcagagccggggtccgcctcggggcgtgcaggcagccgagtccctggactctggaccaggcactgccgcccggaacgccaggcaggggttagtcccgctcgcaggtaacgcccgctgccggtgcctcctccatgttggacagcgccaggcaacctttgcagaagacacctcccggacgccgcctcggcgccccgagccggggagaagcagatctgagcggtgccagccgggcgccgtccgcccctcccaccgcgcaccgcctcctcgcccgcgccctctcagtgcgcaggcgcctctcggaacaggtgatgcccgcggcccacgcccaccccatcctgcgtcgctccggatccttcctcgctctcagcaccgatttaaaggagcccagtgaacgcccggctaaaaacagggaagaaacaggcgacgtttctttcaggca

SEQ ID NO: 223132 - DNA, 109 bp, Homo sapiens; identical to SEQ ID NO: 201027
  chr7:86849527-86849636
  hyper

SEQ ID NO: 223133 - DNA, 505 bp, Homo sapiens
  chr7:87257953-87258458
  hyper
caagggcgagccgtcagtccccgggtgcgagtccctgctgtcttccacacccttcctccctccaggctcctttcctacatccttcccgcgcccccacggttgcggaccgagcgagaacccccttaagcaggtgtggggggcgtgcggggtggcacgagacaaaaggggcacgggggtaagcccgccatggcctcccggagcctggggggcctgagcgggatccgcggcggtggcggcggaggcggcaagaaaagcctgagcgcccgcaatgctgcggtggagaggaggaacctgatcaccgtgtgcaggtacggcagcgcagggcgaggggaaccagcctcccgccggggctgagagctctgggcttccgcgcgggtccttgggggtcccgggcatgatgggctgccgcccagtgcccccgcctatgttgcgccagccaaatctgtgagcgcgcagctccttggacaggggcccgggtctggacaccgtcgcagccctggacttt

SEQ ID NO: 223134 - DNA, 180 bp, Homo sapiens
  chr7:87563698-87563878
  hyper
ggcgcggagcgagggaaacggactcggcggcgccggcatgaggagctgagcgtctcgggcgaggcgggctgacggcagcaccatgcaggcggcagtggctgtgtccgtgcccttcttgctgctctgtgtcctggggacctgccctccggcgcgctgcggccaggcaggtaagttagccgt

SEQ ID NO: 223135 - DNA, 471 bp, Homo sapiens
  chr7:87564093-87564564
  hyper
agaggaatggggagaatgggaaaggggtgccctgcttctgggccccgctcctggttgctctcggatgagctggtccaaggctctcgggctggtgtctctgcgtccttcccagttgggttccgagagggagggggcggtggggattttcgtaggggagacgtaggactgcaggatggaggagtgagggtcagggtcattattttcgccttttctctccactccctcctttcccggttcctgcctggaggagacgcctcattgatggagctagagaagaggaaggaaaaccgcttcgtggagcgccagagcatcgtgccactgcgcctcatctaccgctcgggcggcgaagacgaaagtcggcacgacgcgctcgacacgcgggtgcggggcgacctcggtggcccgcaggtgagaggctcggtccgggaggtggtcctccgcgcctcccggcccacccgagaccccacgatt

SEQ ID NO: 223136 - DNA, 153 bp, Homo sapiens
  chr7:87849420-87849573
  hyper
ggggccgccccagagcgcaccacgcgggcgtgggggacgcgctccgcagtcgtctccagctcttgcctgtgcgcgcggccgtggctcccctgcctgcgcgcttcttcgtatctttgccattacggcgctaatgcagtgcacgactgaaggtcc

SEQ ID NO: 223137 - DNA, 840 bp, Homo sapiens
  chr7:90225596-90226436
  hyper
ccgcaccactccccctgccggccgcgcttctctccgttacaaaggagggaaaatgagccgggcggcggcggcgcggcgcggggccaccacggcggcggcgagcgcggccgcccccggcaccacgtaaaccgcccccgcccgcccagctgcggcccaggccggagcggagcctgccgtcctccgcctgcctgctgctcgcctccctagacctgcgcgtcgcttcccggcccgccgaggaggtggtggaggaggaggcgccgctttccccgcggcgcgcgccctcgccgttgtctgagctgtgcctggaccagtttggggaagttgtcggggctccgcgtcgcccagatgtgtgacctcattgagccgcagccggccgagaagatcggcaagatgaagaagttgcggagaactttgtcggagagtttcagtcgcattggtgagtagcgcgctgcccccggcccccccagcgcccgctcccctcggcctgcgcccccgccgcgttcctggcaccagccatgcagctgccagcggggctggcgtggggtgcgttgtaggcggggatcgagggcacagtgctagggacccgggggagggcaaggacgtaaaggaaagagacccctcttcctcaggatctgggggttcatttgtagattctctcaagcctacaatatgggttctcccctcctccgccactagtgctcgccctttcgcgcgcgtgggggacgggcgaggggacccctcggcccccaccgcgcaaggggctgcgcggctgcttgggccacttgttattttttgcgcacaggcttggatattgggcgtttagtcagtaatttagctttg

SEQ ID NO: 223138 - DNA, 606 bp, Homo sapiens
  chr7:90894561-90895167
  hyper
ctgtgcacggacatcgcgtacaaccagaccatcatgcccaacctgctgggccacacgaaccaggaggacgcgggcctggaggtgcaccagttctaccctctagtgaaagtgcagtgttccgctgagctcaagttcttcctgtgctccatgtacgcgcccgtgtgcaccgtgctagagcaggcgctgccgccctgccgctccctgtgcgagcgcgcgcgccagggctgcgaggcgctcatgaacaagttcggcttccagtggccagacacgctcaagtgtgagaagttcccggtgcacggcgccggcgagctgtgcgtgggccagaacacgtccgacaagggcaccccgacgccctcgctgcttccagagttctggaccagcaaccctcagcacggcggcggagggcaccgtggcggcttcccggggggcgccggcgcgtcggagcgaggcaagttctcctgcccgcgcgccctcaaggtgccctcctacctcaactaccacttcctgggggagaaggactgcggcgcaccttgtgagccgaccaaggtgtatgggctcatgtacttcgggcccgaggagctgcgcttctcgcgcacctggattggc

SEQ ID NO: 223139 - DNA, 347 bp, Homo sapiens
  chr7:91808298-91808645
  hyper
taagacacacccttcgcttcacctgtggcctcccgcggcggctgcggctccttcgcaggaccggtagggggcgcgcgcggttgagtccagcaattgcgaggacctccgcaggcgcagcccagcactgacgcctctccgggccgtggctcctctttcccaggccgaaagcggccgggccctctgctccgctgcgccctggcgcggccgcacccactgcgcgtttgtgagctggccatcggtcacactgggatactcgaggaggaggcctggggcctgcattcaattccctaagagggacccgcgctggccgctgcaggcgggtggagaacgggcgtctgagtctttgg

SEQ ID NO: 223140 - DNA, 143 bp, Homo sapiens; identical to SEQ ID NO: 201043
  chr7:92219764-92219907
  hyper

SEQ ID NO: 223141 - DNA, 1229 bp, Homo sapiens; identical to SEQ ID NO: 44386
  chr7:92462187-92463416
  hyper

SEQ ID NO: 223142 - DNA, 247 bp, Homo sapiens; identical to SEQ ID NO: 201045
  chr7:92463701-92463948
  hyper

SEQ ID NO: 223143 - DNA, 205 bp, Homo sapiens
  chr7:92464934-92465139
  hyper
tgctctctgtcttcacactcaatgaaatccttcatgcgcctctcccgaagcctgccaagcaccacaagggtcgccaccagcacagcgacaagaggccacaccggggaccgcgactcccgcgtgtgcgcacacgcagatgcgcccatatgcacacggacgggcgcgctgcggggaccagggctgctcactgcggggcgtgtgttta

SEQ ID NO: 223144 - DNA, 252 bp, Homo sapiens
  chr7:92466276-92466528
  hyper
gagagttaaatgaaaatttccggctttcgctgaaactgtagtagggggatcctgcgactaaaataagcggcattagtgggagagagtgggacgtgtcgtcgggagtcggcggagtttccaaacccagggtcgcccagagttggggttttgacagggtgaagcggggggcatcctcactgtgtgacgtggacggatgggaaaaacacaaaacaaccaacaataattatgagcggccaatgggggtggtaaata

SEQ ID NO: 223145 - DNA, 180 bp, Homo sapiens
  chr7:95064267-95064447
  hyper
cgggagccgggcgcgctgcctcgctccggcctggccagcagctccgtgggcggtgccatcttcccggctcgatggtgccggccgcgctccgccccgtcctccgcctaggccgagtccctgcgtcggggccgcggaggctccgccctgggcctggccctggtctttgtcctcacaaaccta

SEQ ID NO: 223146 - DNA, 180 bp, Homo sapiens
  chr7:96635628-96635808
  hyper
gccgcctacccctacatgagccactcgcagcacagcccttacctccagtcctaccacaacagcagcgcagccgcccagacgcgaggggacgacacaggtgagaggccgctggggcagctcgcttctcccgcctcccgactgccccctaccccgcccgcccgctcacttcctcgacgcccg

SEQ ID NO: 223147 - DNA, 420 bp, Homo sapiens
  chr7:96635832-96636252
  hyper
ggcggccccgcgcgcccttggccgggccccgtgcgcgcccgctcgcctggcgcctgcctgccggcctctcccagccgggccccttcccgccgccgcggaccctcagcttccgacgcgcagttcgggctgagtcccgggcccggcgcaggcttcgttcgacgagttagtccacactgcgctctccagcctcctgggtctgtgcgcccttttccttgctccttccctccaggctgtaacccacgtttgacccggctggggacatttctgggccggaactggggagcgtgttttgcttcccagcccacgctgggcaggcagtggcctactttgcgtggggcgccccgtgctcctcagtgactcggagggaagctggcctggctttcgctctggttaaactagtaacagtcaggctctttccag

SEQ ID NO: 223148 - DNA, 180 bp, Homo sapiens
  chr7:96636291-96636471
  hyper
ccccctatctagcttttcgctacagtgttggctgctcctttgttcgtggaggggaagcaaagaacctcgggctgatggttctcagcacccgagggggacaaagttgccgtgagaggcgcagcctgctcgtgggctggtctgagctgttggttgtgttttgtttgaggatttggtcctcct

SEQ ID NO: 223149 - DNA, 821 bp, Homo sapiens
  chr7:96746747-96747568
  hyper
ctctctttcaaggcctgtgtcgtcaggacgcaggccagaagaagccacgacgaggcgcaggcgcgactccacgagggccacgcccctcctagagaaggaccgacccgttttccgcccgcagcggagcttgggtttccgggaggacctgattgtgcaagggaccaaaccggatagaggtcgcgcgccctctttcgtctgccttccggttcactaatacgcaagttcgcagaagtgcgggaacgcgccgtccctctgcgcaggcgcagtcggcggtcggcgtggggcgctatgccggggcggcacgtttctcgagtccgggcattgtacaagcgcgtcttgcagctgcaccgtgttctgcccccggacctcaaatccctgggcgaccagtacgtgaaagacgaatttaggagacataagaccgttggttctgacgaggcacagcgtttcttgcaagaatgggaggcaagtgacgctcccttctctttgcccaagacctttggggttcctcggtgtccaggtttctagttccagtcccccatgcggggttaaacagagcagcaacctgttctgtttgaaatagcgtaatgctgttcaggtaacactttccaaagtttctcccacgggtttctcactagagcagatcctgttacttcagcgtccccaattcagttcaacttttgagctcctgcagatgccaggtgctcaaagggtgagggtaggaggtcacaaaaatgagcaagtcgtcgttaagtgctcaaaaacctcaggagctttttgtccttttaagtgcctttgcacctagtaagcgcccattaataaat

SEQ ID NO: 223150 - DNA, 674 bp, Homo sapiens
  chr7:97501249-97501923
  hyper
ccacgagcacgatccgacccgtccgccgcagggacccggaccgcgaaaatgtccacaggcttcgacgccacatagtaaaaaaaagtacacatataacatttacaggggctcaaactgccgctgcctcctctccggagcggtccggcctgccggccgcggttccctctcgatgcttcagggaaccaggacagaaaggtccttccgctagctgtcaggtgcgtaacaatcgctaggcgtccgccccgccctccctaccgcaggagccgcagcatcagcaggcgcccgcgaaccgcgtctgccgggtgccaggctgaagaccgcatcctccaccccttccttccggagcagccccagggcacgcgaggaggatgctggcgcggggcgcagggcacggggcgcaggacccggctcacctgggcgtaagcaggtcagggtgatgtggcgggctgaggccagggatgtggacagcttgacgggcggcgaggccgctggcgcttataccgacctggctcctgtaacgcgtgcgggaagtttcatcatgcctgcgaggaccaaccagcgcgcacaggggcggggccgcggggtgtccggggcggagcaggactaagtggggcggcggaagggcgcaaggaggagctcttttgtttccagcgccttgcgtctcagtgcgcctg

SEQ ID NO: 223151 - DNA, 217 bp, Homo sapiens
  chr7:98030420-98030637
  hyper
cggccccacctgaggcgggcggggcagacgggggcggggccgcagggccggaggggcgtggcgtacccacctgaggcggcctggtgagcggggcccggccggggtgggcggggaggaggcggggccaggcagctggaatgggcgtggccagagggaagcgggccccccgagtgggcggggtcaccccacctgtggcggacagggcagcgaggccacg

SEQ ID NO: 223152 - DNA, 720 bp, Homo sapiens
  chr7:98246402-98247122
  hyper
gctctcgcctcaggctccggcccacgctcccgcccggccgccaggcgcgcaacggaaagcgcccccgccccgccccgctccgcccactgcgtgacgcgcacccggccgagccaatcagagctcgtggcgcgcgccccacacgccggccccctccgcccctcagcttaagaaagggcgcgcggacccggcaggccagagtgccgagcagcgcggtgggtgcggctgtgagacggcaggagacttctgccccgcggtgcacgcgaccctcgagacgacagcgcggctactgccagcagcgaaggcgcctcccgcggagcgccccgacggcgcccgctcgcccatgccgagctgagcgcggcagcggcggcgggatgctggcgctgctggccgccagcgtggcgctcgccgtggccgctggggcccaggacagcccggcgcccggtagccgcttcgtgtgcacggcactgcccccagaggcggtgcacgccggctgcccgctgcccgcgatgcccatgcagggcggcgcgcagagtcccgaggaggagctgagggccgcggtgctgcagctgcgcgagaccgtcgtgcagcagaaggagacgctgggcgcgcagcgcgaggccatccgcgagctcacgggcaagctagcgcgctgcgaggggctggcgggcggcaaggcgcgcggcgcgggggccacgggcaaggacactatgggcgacctgc

SEQ ID NO: 223153 - DNA, 678 bp, Homo sapiens
  chr7:98971534-98972212
  hyper
cgaggtaaggttttcactggggtctcttccatctgcctggccgccaggccacgtatccactgaagaggcagagggtcaggatgggaagactccggggaccacctagcccaagacccgcaatcaggcggctctgcaaggctaaccgggtaacttaaagaagtgaagccgattgacgtaaaacagaaaggaaagaagttaactggccggccagcgtcagcaggggcggccagtgtcaccctgcccggggacagcacccctgtttcgtggcgaggacacggagggccaagggggcggggccgggctgccctggccacgcccggaccgcctgctccccgcccagggcctgcacagttggcgcccaccggcatcagcgtgaagggagctcctcgctggctgccgacggggctgcagggctcgctagccgctcacctgcgtgtgagcgcggagcccgcagtacccgccgtccgggctcagaggacgtgactccccgaccctgcgcccggcagtccccgggggccgtgcgcccggcccaggctcggaggtccagcccagcggcggctcaggctgcgcgcctggctcccagcctcagtttccccattggtaaagcattgacggtggttgcggacggcttctgcggacagagccttgggctccgacgtctgcgcgggtaccggcagc

SEQ ID NO: 223154 - DNA, 1128 bp, Homo sapiens
  chr7:99155928-99157056
  hyper
ggtcgggccgcctccttgcagggagtctcaaggatgggctggcgtcagggaggggcccagggggcgctttcccaacactggtcgcagtcattgttggtataacggctagagacgcccagtgagttagcatggagggcagtgggaccggaaaaagacgtggaaaagctgcgaaaacgagccttcgaatcatggacgcgcgggcccagctcctcctccgagttcctcatccggggccgtcactcacatccggggccctcactcacatccgggaccctcatccggggctctcacccacatccgggaccctcatgcctgggcggaggagggggggccctcattcgggaccctgcactccgtcgccggaagtgccaccgagaagcgccggcctcggggctgtctacagcggcccgggagaggctgtggtggccccgagcgcgagtgtgtaggtgacaggacagcggccaggcccgcccctcccctcggtgagtacccggaagccgttttggggtcgcagcggggtggcagcttgttttgccttcacgggagtagaaggaggcggcgtccggccgcggccgacggtagttcgcttccccgagagtgcgcggaggcccgggtgcgaggagggcctgtttctcttcagccctggttcattcacctcgcggaccgagggccccgccgtcaggagccggcgaccgtgccctggtgcgagctggtctgtatgtcctcactggtccttttgggactttgccttggcctaaaagggaagtgggaggagggcagcgccgggcaaggccttctgaggaccgagctgggagccgggcaggggcccagggcgagggtggtgggagggggacggcaccctcatgcgtccttgggcctgaaggacgccgctcaaacctgttcgaaccgcagctcttacctgcgttgctctcaggattccgggaaaaggccggtctagctggtctgagttagcgaagggcctgaccccaaaagtggagttttattcgccaagcccgtgtagtaaatcggagtgggctgacggtgttaccaagacatttcctagggggcctgctgttttatttatttaaatgagtttatttacgtaaacgcgggcctgtcacggtggtt

SEQ ID NO: 223155 - DNA, 74 bp, Homo sapiens
  chr7:99613133-99613207
  hyper
tgcaaagtcctcccgcgctcctagagaggacccggaagcgcggcgcggtcccggaagacgaggtggtgacacgc

SEQ ID NO: 223156 - DNA, 206 bp, Homo sapiens
  chr7:99725600-99725806
  hyper
gagcgagatggggacgaggattcgtggcaggcactgagtgaagaccccgcagcccaggagcggagccggaagagggtcctggtcgttgccgacgtggtcgtacctggtcacgggcccccctttcgagtgttaagggaagcctcgcagcccgagacggagggtggagggaacagccagcaggagccggtggtcggagacgaggagcc

SEQ ID NO: 223157 - DNA, 240 bp, Homo sapiens
  chr7:100424529-100424769
  hyper
tccgaggcccagatgttgggggggaggtcccaggagtgacggggtgcgcccccccccgcaaggaaactcaccttccaaagctgcggccaacgaagcccagcagagcagcacccggagctccatggcgccgcctcactcgggtaggatccgaactgagtttggggggccctcgcccccccaggtctgactctccctgggcgggtggacgccgatactccgcgcgggactcctcgtcggggc

SEQ ID NO: 223158 - DNA, 240 bp, Homo sapiens
  chr7:100424796-100425036
  hyper
ggggcaccgggcggcggcgccaagtgtggccccgcgtctgtgccgcgcgcgcgggcggcgggcccggagcgtgctggcagtggccgcgccgggcgggcgcgcagcaagacgtggctggagttggggtccctccggggcctcggggtcccgccccgggtggcgggggctgagccggccgctcgcggtctccccccctccctggagtggctctgctcgcgccgccgggccgagtgctctcct

SEQ ID NO: 223159 - DNA, 105 bp, Homo sapiens
  chr7:100608956-100609061
  hyper
ctcacgcgccgccccggctctgcccccaggccctacagtggagcctcgtccccagagtcccgctccaagcccatccccgttgccctacagtggagccctgccctg

SEQ ID NO: 223160 - DNA, 104 bp, Homo sapiens
  chr7:100609394-100609498
  hyper
aaccccccagcttgccctagggtggaacccccccgctgccctaggctggagccccgccccctcacccgcccccgcggggcccaggtgcacgcgtggaccccgag

SEQ ID NO: 223161 - DNA, 521 bp, Homo sapiens
  chr7:100808390-100808911
  hyper
catctcactgccatcgcccacgtactaagcagcagcaatatgggggaaaaaaaaatctctgctccctccccgtaggactccccggatggtgcgtgggcgacttcagcagcaagagaaaaagctgcgactcccccgtttaccggggacccttaccagggggctccccgctgtgtttgcaacacccccatcgagaggagagagaaccctccctcacgcccacggctggctgccgagggtttgagggacgaacagcggagtatttaccagctggtgtcacgacgcgagaggtggagaggagggtcggggcagggtggggacaggggaagatcgggacgcgtccgcctcggctccgagcggtggccggggtaggagcgacggtcgaggtctggcgtcccgtgggctgggctcagctgggtcggcgcggctccgggcggctagctcgctccggcttcagcacgctggacagcgcccgcgcctccaccgccttataaaggggagcgcgcggggtcacgtgggcgcgc

SEQ ID NO: 223162 - DNA, 640 bp, Homo sapiens
  chr7:100823171-100823811
  hyper
gttttctgggtcttcggactgggaggggctgggcagaagggggcgcagccgcttggtccccctgaggggcggtggccttctgctgccccattctgcggtggaggagcacgctagccccctccccagtccccaggcccggccgcccccctacctcgccggagccggagctggagccagggccgagatgccgcaaagccaagcggggcgggcggcgggcgcagacacccccggtgccaagagagaggtccctttggagcccccaagagtcaaaggaggatgacgcgcggggactcggccgcgctgtcggagcccgactctaacgtcggtcagcgctggggcagcgccgcagctccgttggcgacgcgggccggggcgcccatcggttcaggggttcgggtggcacgcgtggctcccccggcgacgctccggcggcagcttcgaggggcggagaccccggcgacgcggaagaaacccgggacggatccggagcggactcgtgccctgctggcggggccgggggtcggggtgcgccctgggcagctgggtggcctcaagccctactggcgagactccgccctgtgtcccggctggggagtgggactgaggatggtggtgtctcgggttttggtggtggtgatgc

SEQ ID NO: 223163 - DNA, 410 bp, Homo sapiens
  chr7:101006043-101006453
  hyper
cgcctcctcggccccggaccgccgagggttaacaaaaaagccccacgccccctttgacggcttagagcccacctcgccgaatttgaaaaggcggccccggagaggcgtgggcgccccccacacatttccagctcgcacccgggctccgaccgctcgccccgctcctctcgctgtgctcccggccggtgccgcgggttcggtccgggcgccggtgcgctcctgccggtcctcgtgcccgggactccgggtccccgcgggctgctgcgcacgatgaagctggccctgctcctgccctgggcgtgttgctgcctctgcgggtcggcgctggccaccggcttcctctatcccttctcggccgcagctctgcagcagcacggctaccccgagcccggcgccggctcccctggcag

SEQ ID NO: 223164 - DNA, 159 bp, Homo sapiens
  chr7:101457610-101457769
  hyper
gcgcggcggccggccgactgagcgcgcgggccggggcgccccacacggaggcagcccttggccacccgagatccacagtgccctgctgtgcgcggcgtcaccgcatctagggtggaggctcgcaacgtgccccccgacgccagcgcgctcccacccacc

SEQ ID NO: 223165 - DNA, 340 bp, Homo sapiens
  chr7:101458373-101458713
  hyper
ggcgcggggggacacagaactgggctcccagacttttcctgtcgtggcctaaactggaacggcttgggcgaatgggggctgccgggacccccagcgctaccgccgttggggtgcgttcgggtgcgacgctggcaccgccgctgtccgggtgtggggcatccacgcgcgcggccccctgagagggtcagggctgtttccccctcaactccactcctccaaacatgccacgctgttcctggtcgtgtcggtgtcccggtcctcgctgggcgcagagggatcagagtgttgccgtccaccgtcggggcgcctcccacgcacgctgctgcggggggcctgggcc

SEQ ID NO: 223166 - DNA, 190 bp, Homo sapiens; identical to SEQ ID NO: 201088
  chr7:101459183-101459373
  hyper

SEQ ID NO: 223167 - DNA, 496 bp, Homo sapiens
  chr7:101460545-101461041
  hyper
cccccggtgacctgcggcgccgggtcccttccttgcgtcccctcggggcttctgccctctctgcagggcccgccatggagcgcgcggcgggtgcgctcggagatgccttctcgggccgggttctcgaaagcagagccccgggggcccgttgggaccgtggcatgccgggcggtggtccgcgcgcggagtccccggcgccgcggggggaccgtgccggggctccccggcccgcgcccgagtcgccgccgtgcccaaggggcgagtgcctgcctgccaccccccgcccggaggagcggcgcacccttagggtccgccccgcacgtgccagctcggcgcccgcggcgccgggacagccccgggactctgccaggtggatgttgtgcgtagccggagccaggttgaaggtgagcggcgtgtgggccagaagtcccgaggttgcaggcgcggagggaaccggggatgtcggggggtgcccgggtcccgcggcttagaatgc

SEQ ID NO: 223168 - DNA, 111 bp, Homo sapiens; identical to SEQ ID NO: 201091
  chr7:101559394-101559505
  hyper

SEQ ID NO: 223169 - DNA, 48 bp, Homo sapiens; identical to SEQ ID NO: 201092
  chr7:101671377-101671425
  hyper

SEQ ID NO: 223170 - DNA, 97 bp, Homo sapiens
  chr7:101707445-101707542
  hyper
aaccgtctctagatccgtcctggtttagcttcttccaaatagttttgtgtctgtgtgagagtgtgtgtgaaacggagttttgctgtgttgcccaggt

SEQ ID NO: 223171 - DNA, 79 bp, Homo sapiens; identical to SEQ ID NO: 201093
  chr7:101713618-101713697
  hyper

SEQ ID NO: 223172 - DNA, 138 bp, Homo sapiens; identical to SEQ ID NO: 201094
  chr7:101740643-101740781
  hyper

SEQ ID NO: 223173 - DNA, 124 bp, Homo sapiens; identical to SEQ ID NO: 201095
  chr7:101747615-101747739
  hyper

SEQ ID NO: 223174 - DNA, 77 bp, Homo sapiens; identical to SEQ ID NO: 201096
  chr7:101754977-101755054
  hyper

SEQ ID NO: 223175 - DNA, 67 bp, Homo sapiens; identical to SEQ ID NO: 201097
  chr7:101758486-101758553
  hyper

SEQ ID NO: 223176 - DNA, 49 bp, Homo sapiens; identical to SEQ ID NO: 201098
  chr7:101801839-101801888
  hyper

SEQ ID NO: 223177 - DNA, 105 bp, Homo sapiens; identical to SEQ ID NO: 201099
  chr7:101813725-101813830
  hyper

SEQ ID NO: 223178 - DNA, 189 bp, Homo sapiens; identical to SEQ ID NO: 201100
  chr7:101821748-101821937
  hyper

SEQ ID NO: 223179 - DNA, 59 bp, Homo sapiens; identical to SEQ ID NO: 201101
  chr7:101833092-101833151
  hyper

SEQ ID NO: 223180 - DNA, 49 bp, Homo sapiens; identical to SEQ ID NO: 201102
  chr7:101837121-101837170
  hyper

SEQ ID NO: 223181 - DNA, 97 bp, Homo sapiens; identical to SEQ ID NO: 201103
  chr7:101838786-101838883
  hyper

SEQ ID NO: 223182 - DNA, 672 bp, Homo sapiens; identical to SEQ ID NO: 201104
  chr7:101839913-101840585
  hyper

SEQ ID NO: 223183 - DNA, 66 bp, Homo sapiens; identical to SEQ ID NO: 201105
  chr7:101842081-101842147
  hyper

SEQ ID NO: 223184 - DNA, 102 bp, Homo sapiens; identical to SEQ ID NO: 201106
  chr7:101843350-101843452
  hyper

SEQ ID NO: 223185 - DNA, 845 bp, Homo sapiens; identical to SEQ ID NO: 201107
  chr7:101844639-101845484
  hyper

SEQ ID NO: 223186 - DNA, 166 bp, Homo sapiens; identical to SEQ ID NO: 201108
  chr7:101847670-101847836
  hyper

SEQ ID NO: 223187 - DNA, 57 bp, Homo sapiens; identical to SEQ ID NO: 201109
  chr7:101848393-101848450
  hyper

SEQ ID NO: 223188 - DNA, 303 bp, Homo sapiens; identical to SEQ ID NO: 201110
  chr7:101870646-101870949
  hyper

SEQ ID NO: 223189 - DNA, 189 bp, Homo sapiens; identical to SEQ ID NO: 201111
  chr7:101877331-101877520
  hyper

SEQ ID NO: 223190 - DNA, 265 bp, Homo sapiens; identical to SEQ ID NO: 201112
  chr7:101882599-101882864
  hyper

SEQ ID NO: 223191 - DNA, 9822 bp, Homo sapiens; identical to SEQ ID NO: 201113
  chr7:101891691-101901513
  hyper

SEQ ID NO: 223192 - DNA, 128 bp, Homo sapiens; identical to SEQ ID NO: 201114
  chr7:101916636-101916764
  hyper

SEQ ID NO: 223193 - DNA, 67 bp, Homo sapiens; identical to SEQ ID NO: 201115
  chr7:101917514-101917581
  hyper

SEQ ID NO: 223194 - DNA, 113 bp, Homo sapiens; identical to SEQ ID NO: 201116
  chr7:101918517-101918630
  hyper

SEQ ID NO: 223195 - DNA, 117 bp, Homo sapiens; identical to SEQ ID NO: 201117
  chr7:101921219-101921336
  hyper

SEQ ID NO: 223196 - DNA, 84 bp, Homo sapiens; identical to SEQ ID NO: 201118
  chr7:101923328-101923412
  hyper

SEQ ID NO: 223197 - DNA, 57 bp, Homo sapiens; identical to SEQ ID NO: 201119
  chr7:101924095-101924152
  hyper

SEQ ID NO: 223198 - DNA, 81 bp, Homo sapiens; identical to SEQ ID NO: 201120
  chr7:101925131-101925212
  hyper

SEQ ID NO: 223199 - DNA, 65 bp, Homo sapiens; identical to SEQ ID NO: 201121
  chr7:101926003-101926068
  hyper

SEQ ID NO: 223200 - DNA, 938 bp, Homo sapiens; identical to SEQ ID NO: 201122
  chr7:101926312-101927250
  hyper

SEQ ID NO: 223201 - DNA, 690 bp, Homo sapiens
  chr7:102920838-102921528
  hyper
agcacccccgcctccgcgcttccccgagcgtgcagcttccggtgagggcagccccacgcacagccccccacaccctccccagcgcctgcagacttcggtgcgcgcagttcctaagcccacatgcgcagttctcaccttgcgcgcagcctcacgtacagcccccgacaggctcccagccccactggcgcagaacccatcaccgcttgcccttcacgcgcttcattgggagtgcagcccccaccccgagcgcacagctccacgcagcctctccacactctccccagcgcctgcagcacccgcagtgcgcacagctccgccagtagcttccccgcgcgccgcccctgcaccgcttcgggccataaccttgctggcgactaagtctgaagaacttcccgtggtttcattcttttcttcgcgtttagtcttagctctgacattttaaccaaaaggttacacgttaattaacgaggtattgaaggggaagatctcagctgaaagaaatgactgtaggaagtgtgtcagggaagccaacggaaccgccggcccgccggtggtgctccgggcattaggaacgtctctgctctcctacgatcgctgaggtatcggacagtcagtgcccgttgccaacacggagggaacgggccgagactgcgggcaacacgtggcagagccggcgtgagtctggtgggt

SEQ ID NO: 223202 - DNA, 960 bp, Homo sapiens
  chr7:103085903-103086863
  hyper
ttggtagggagaaggatttcccgggagggggccaataccaaattttagggctgttaggctctgagcagtcccttcgtgaccggataagtcagagacccggggtttgagccttgcccggcgctgagcggagggcccagtttcgggaccacagccttgctccctgggagctccgggcggccaatgccgggcaagcccagcccggcacaggaggaggcagggcccgtctccggaaagagggccagaggcagaactgagggcctggttttgtgtaattcgatttggatacaaacaggccagacccaaactggaaacggcgaagggctggattagcaccgaagggattcgaggaggcaaacgggaagtaaaaatgctgtgtggagctgcagagggcaaggggacaggggttgcaaaggaaagagcttcgtgagactttctccttcccggcgtagggaccagcagagtgcgggcaggtcagccctgtcaccggttcgtttagggaaaaagcgcgacatggggcctgggagacaggggcagaggcggtgacagcgagggcccctgctcgggtgggcccgcgggcctcagctcagtcccctcccgagggaccgcgacccccggccccgcggccgcccgcgcgcactcaccagcccgggctgccctgggcggagccgccccgccgcgctccacagccgctgcctcttcgacgcgcgcgctgcctccaggtgcggctctaggaggaggcgccgcgggcagtgccggccgcgccccgcgactcccggtaacccgagcccgccccgccccgctagggccaggccccgccgccaccctccgcgctgggacgccggggcgcgggcatccctgccgcctacggatctcttcccaagcacctagaactttccaaagcgtgcttggaatttaacaccttggtcgtcgatccccgcaaatatactctgatgagaccgg

SEQ ID NO: 223203 - DNA, 960 bp, Homo sapiens
  chr7:103629201-103630161
  hyper
gagcaggacaaaggtctgaaatccaagtcctaggagtaaagaaacaaaatgcgcaggttcaatttaaagtgcctgcggtaagtacggggagtgagggggaaagacaccggcctccaagaattctcaggcgtttagcacaagcaccagctcattaccaggagatgcgttcggggagtggggacatggagaatgaatcccaacttgtgactccattctccactaactttattctcgctccctggaccaagcgcatcgctggggccagggttgtcatggttcttgtttccaaggccccttggaagaaggaaagggatgagaaaggtgcgctggcgggcgcacccggcggcggcgagcgcggaggtgctgcggtacctaccatggtattcttgtcccggaacgtagtaggtggggttgcccgcaatatgcagggaaatgagcacctcgccctgctccccatccccttccagctccccgtggtgggtgcacaggaaaaagaagggcgaaaagcgggggtaatagccagccgccgcgcgcgccctcagcgtcgcccccagcaacagcgctaggaggaaagtctgccgggcccagccactgcgctccatgccgccgccgccgccgccgccgccgcgcgccctacgcgccgctcgctcattcagttttggagacgccgggacggaggagccacgcggagagaaggcgagaagaaggcggacgggagcggaacgggctcgggagcgggcctgggagcgggcccccgccgagaagttccgcgggagacggcggctcccaaagttactttgggccgcgggagcgcgggaccggggctgcgggcgccgagagcgcgtcgtctgccgcctccgtgcgccgccgccgcctctgcgcgacgcccctcggccaggcctgggaaagcgcccgccccgctccacaccttcttaaagccccgggcgccgcgtccccccc

SEQ ID NO: 223204 - DNA, 180 bp, Homo sapiens
  chr7:103630274-103630454
  hyper
cccggagtccccggccagcgcccggttcgcacccgggaggacagggaggggcgcccgccggggagcgggacggggacgctgtcgaggaccgctgagcccgcgactcttctgcgagggacgtcaaagccccgcagagggcacctcccgtccagctgtctgaaggggaaggccagccccttt

SEQ ID NO: 223205 - DNA, 256 bp, Homo sapiens
  chr7:105517675-105517931
  hyper
agtgggtagatgtcgttctgaaacgcaggtgagtttggagcgctacgagctaccttcccatctcaggctgcggggcgtgcaaaactcaaaagttagggcccccggacccccgggttccccgcgcggtgcgtatctccggctctcagagaaccactgcatggactttgctccagggtcagcagagcgggagggcgaatttacggctcttggaagacgacgctaacgggcctagcccctgagccgtttccagcgctcc

SEQ ID NO: 223206 - DNA, 687 bp, Homo sapiens
  chr7:106508245-106508932
  hyper
gaccagcgtggcggcggacttctaccaccggctgggaccgcatcacttcctcctgctctatcagaagaaggggcagtggtacgagatctacgacaagtaccaggtggtgcagactctggactgcctgcgctactggaaggccacgcaccggagcccgggccagatccacctggtgcagcggcacccgccctccgaggagtcccaagccttccagcggcagctcacggcgctgattggctatgacgtcactgacgtcagcaacgtgcacgacgatgagctggagttcacgcgccgtggcttggtgaccccgcgcatggcggaggtggccagccgcgaccccaagctctacgccatgcacccgtgggtgacgtccaagcccctcccggagtacctgtggaagaagattgccaacaactgcatcttcatcgtcattcaccgcagcaccaccagccagaccattaaggtctcacccgacgacacccccggcgccatcctgcagagcttcttcaccaagatggccaagaagaaatctctgatggatattcccgaaagccaaagcgaacaggattttgtgctgcgcgtctgtggccgggatgagtacctggtgggcgaaacgcccatcaaaaacttccagtgggtgaggcactgcctcaagaacggagaagagattcacgtggtactggacac

SEQ ID NO: 223207 - DNA, 956 bp, Homo sapiens
  chr7:106684800-106685756
  hyper
ggcaccacctctgcgggggttcaccatggcgaatgacgcctgggaagcggggcgagtggccagcccgctcctggacgcgcggacaggtggacacgaaggcggcctcgctgggcctccctccgcctctcccggcccgggcgcgcagccctgcggtggtctgacaggcgggtgcgcggcgccagccagcggaggttgccatggtttccgggggtcacgtgggcgcgctctcctgcgccccctcccgcgcaccgcggcggggcgggggcggggcgcccgggcgggggagaggcgcggccgcggctggagcgggaggagcaggagatgctgccagccctcccggggccgcgctcgctcagccgccgccaccacacggagcagacgcgcgccgggagccgcgggccgggccagccgggccgccggggcccagtgcgccgcgctcgcagccggtagcgcgccagcgccgtaggcgctcgctcggcagccgcggggccctaggccgtgccggggagggggcgagggcggcgcccaggcgcctgccgccccggaggcaggatgagcatcgagatcccggcgggactgacggagctgctgcagggcttcacggtggaggtgctgaggcaccagcccgcggacctgctggagttcgcgctgcagcacttcacccgcctgcagcaggagaacgagcgcaaaggcaccgcgcgcttcggccatgagggcaggacctggggggacctgggcgccgctgccgggggcggcacccccagcaagggggtcaacttcgccgaggagcccatgcagtccgactccgaggacggggaggaggaggaggcggcgcccgcggacgcaggggcgttcaatggtgaggaccagaccccccacttcgcgcccccggatcccctcgctgccccccaccgctccccgctgtgctctcggatcttgccgctttgcgcacccac

SEQ ID NO: 223208 - DNA, 233 bp, Homo sapiens
  chr7:107531764-107531997
  hyper
gccagaggcacggaaggtcccgctcagtgggtccggtacgcggcttaaccgtgttgggctggcggaggcgggcgcctgggccgcaccacccctggccccgcctctgcactggctcagcccggccctgggctccgaggtggccgctcatcctgcagcaggcgagggacggggctgggcccaggctgtggcgagtcctttcgggttgtgtgacggccggcggtcacacatgccac

SEQ ID NO: 223209 - DNA, 1053 bp, Homo sapiens
  chr7:108095229-108096282
  hyper
cctcctgcaaaagcctggggcgaggaagagcccagtctcttagacccgcacttctgagcgttaaccatctgggactcggaaaggaaaagaaagctttcttctcaggacagttctgcgccggtggtagccaagggctggagcccctgatgcgaagaaaagggaaggagagaggcggggtgcgaaagaaacgccaccgctcggcgccctccctcggtgcccgcggcgcaggggccacccgccagcgtacgggggacgaagatgtggccgcgggcgcgggcgggaggggaggcgatccggggaaggaagcggcctgttcgccagccccggggcccggggagccctccagcagcgcttgcggccctgaggacaccgctttgggagaaatgacgactcccttgctcaccctactgcgacaccccgtccccctccgcactctagcagatgcgggccgggagtagctgagctggccaaccgcctgggaccaggatgcggcagcgcccacccgcgcggcgtggagggggccgggggcggcgctcggcgcagatggcgctcgctgcgagatggatgctccagggcgggtaatcactcctggctcaacacagcatcccgggcggagcggatgccagatcccaccgctaagagcctgggctgggaaagcaatctttccaggcagcccccagcccggtgcgccggccccgacaagtcccagccctcggaggcagggcggggcgcagggactcccgggacccgcacctgtaaggccgacaaagcccccgcaagcgccccacccctctgtcctccgtgtctctctcgttccgcctcgattccccgagccctctccaggcagcgactggagaagcgaagtcggcctcgcccccgaactccgtggtcagcacaggtgtacgcacttccgaacaaagcccacgcccagacgtgtccgcaggggcccgaacaggcacacgcccgtgcgctcccggcccggcccccgcgctcctcgccccgccggcactgtggcgtgacgccccgcgcctccgtgtccaagcccgggaagcc

SEQ ID NO: 223210 - DNA, 180 bp, Homo sapiens
  chr7:108096508-108096688
  hyper
agggagttggagatctgctttgcccctcctgcagcgctgccagcccggtgagcgctcggctgaaccccgcggcggtgtccaagtgacaacgcagcagcctcgcgcgtcctcctccgctccagccgtcacccccgagcaggacccagtgtcaccgccagacgcgcaaggagctacttacgt

SEQ ID NO: 223211 - DNA, 526 bp, Homo sapiens
  chr7:113727289-113727815
  hyper
tggaaaggggacactcctgtttctggagtcaagaaactcctgggccctactgacgcttcgggataaccgtgcacagggatgactgctgccttgatcgcgttcctttccctgtccacgcgttagcacgaccggcttcccccggtgtctggcctggttttacttttattccgctttagagaggtcgcctggctgtttgtgggtgggtttggggtgaaatcgcacctcgcggcacttggtgaggggacgtgggaggagcgcagacacctttcggtgatagggagggcttctcacttggctgttacctggaagtccacagtggccccggcgggcaggcgggcgggcagagcgcgggtccgaacgcccttcgcgctcgcggcggcgcacgtgcggcggcggcggcggcgccggcggcgcgggcgggacccactgggtggccgcgcgcgccacccgcgcgttttctgcgcgcctctgcccacccgcgaggccgcaacgcgccctgacacccgacctcagtgtggaccctcac

SEQ ID NO: 223212 - DNA, 869 bp, Homo sapiens
  chr7:116962854-116963723
  hyper
gagactgctgcggccgcgggggaacgcagccaggaagggtctatgtggccaatgcggtccccattccgatctccaaaatcccccgcgcccgtgcgcgtggacttaccaccatgaagagttgacctcgggggtgagccaggtcaagagcagagggagccagagccagattccaccgagaggggcgttcatattaacccccttgcgtctgcatcaggtcagactccgtgtgcgggcgccatgcgtgcccagagcagaagcgctcagctccgggagcgcctcgtcacggccgccggcgcctcgccgcgcccccgccccccgctcgcgtctgcgacgagtggcgagactcgctgataaagtttcaaacgatgggcccagcgagcgataaaggccagcccggaccgcctcgcccacagcccaattccccaggcgcagcgagcgcctgcagcccgaaagctctgcgcgcctcccgcgcgccccgtccgctctgctcccctccgggcgcagccgagggagggggtgctgcgcctggcgggggtggggagaaacgcggggttttagacacgggtgcatgaaatgatggcaagagatgtctggggatgaggtgaggcggggaagggggaacatcgctgcatggttacgagcacacgcgaatacaggaacctttagggaagctccaggccaaagagcatccgtgggctctcggagcgtgcgttccggattgccgaggccatccgctggcaaacaagtccctgagcgtgcaatgtgaggaaacgaggaagggggccaggggataaggagattactatgcatgggatacaagaatccagagatgattctcaactcattgcttcgcttctctccctgaagct

SEQ ID NO: 223213 - DNA, 180 bp, Homo sapiens
  chr7:120497345-120497525
  hyper
gacagttcctgggcactccaactccgcacccctctaccccgtcccgcagctcgggtgtgaatgcaagggactggggcggcggggcgggggcgggggcgggggcgagggggcagcgcggagttgagattccgcccggctactagggtttctctgggagaacgtgagaaatgatgttttcgg

SEQ ID NO: 223214 - DNA, 105 bp, Homo sapiens
  chr7:121863466-121863571
  hyper
actgaaagacagttccgactaacttaaaaaaataactcggaagttcaagggatgaccatacaggtacagctgaattcaggggctccagtgatggcatcagcctac

SEQ ID NO: 223215 - DNA, 152 bp, Homo sapiens
  chr7:123174511-123174663
  hyper
accaggaggccgcagtcaaaatctgttctcctacctgtgtacgaaaccaaactattctcgtcgaagtgctttcccaggctcctaagacgcagcttccatactcgccgcgttctcagctgttggtcgtatcctagcaacggccctggcaccac

SEQ ID NO: 223216 - DNA, 1260 bp, Homo sapiens
  chr7:126891196-126892456
  hyper
cggcgagggggtctgttttcacccccgctatcttgggtgcgcagacactctctgacaccaggcttcacagtttgggccacgggggaagtaattccccagggaaccgcgggggtgcggttttgcgcaactgggtgactcgcgtgtccctccgcatttcatttgcaccaagggagcgcgtgtcagacgaagggaatttttttttcttttttggtgattctgttattttttcaccaactgtacgaagctcaagggatatccgagctttctggctgggcggatgggcttcgcgcttggcatggctgagcggtccatctctacctctccgtttctatctctaccataacagcgaccactcagcccgccaggagcccctgtttcccagcgcaggttcctttttcttctcagttccttgggctgttgaagccgggttctgggtagatagagactggggccgtggggagagcgccaggctgcttttgcctttcccgcgccccggggcattccggcgcgctggggatgcagcctccgcccccgccgcacctggccgcccgagcgcccgcgcccacgccccgcgcggggccgcccgaaactggggccgcgccagccgcgggagctaccgaggagctgttggggtgcgtttgcctttgctttttaaacaagatccccgagaccttttctccatccccccaacccccagcaggacacggaactccggcgtttctcgaaagccacaaaagaggggcacggaaatcccaagctcgccgtgctaactcggagaacgcaaactcgaggcagagcgtgcgccgtgcggggatgtgggtgtcgaggaccccgaagcgcccggcttcccccgcgacccccatcctccctagatcctggttagacatccatccagcccacgctcagagggcgggggttaccccgactcatcccggaagccgctaacttcagaaatccctcctgttaggttcgcgaaacgaaggtacctcgtcatctcggcggggcaagtccggattccaccagggcaggtccgggaggtcacccagggcagacgatccgaggcagagcgctttaaaatcctgccgccgcacgcccagtcagagcgccgagcgcgcctgcccccttcccgtcacccttcagtctcccattcgccgactaaacttttgggggatcacatctccaagccttgggagttccgggtaaagtctccctcttttctgaacctctttactgtaatgtaatcatgggcagacaagaggg

SEQ ID NO: 223217 - DNA, 180 bp, Homo sapiens
  chr7:126892488-126892668
  hyper
acagacacccaatcaagctccaatgcccggccagcccctcgccccctggtgcccactctccttctccccccattcccgtcacctccgcccgctatttctctcacagactacggacatgcagggccatctacttgtgctcaggaaaaacaaatcactagagtgatatgagaaggaatggtg

SEQ ID NO: 223218 - DNA, 420 bp, Homo sapiens
  chr7:126892805-126893225
  hyper
tgctttcctcggagccgctttctgctgccgggcggcgagtcttaccctgctccccgcagagggcgcggtgaggaagcccgccgggggcccgcagctccatgtcagcgccgccgccgccgccgccgccgccgcgtgaggcgagcacagcggccgcacttgtggctgatctctgggctgagggggctgagctggcctagcaggcgccaagtctcttccatgtgaataacaaatactcccaccggcggccgcgattggtctgcgcccggcgcctcccgatcctccgcccgcggccattcacccggcgcggcgcggggagccgcggccaggatcgcgcccgggatcgccaatcgcttcgcgccaaccagtcacctcgggaagcgggaggaggaacccccgaggggcgggagcctctggatttcg

SEQ ID NO: 223219 - DNA, 454 bp, Homo sapiens
  chr7:126987826-126988280
  hyper
ccgtggagacggccgcggcgaggcgcctgaggtacggcggtgcggagcgagggcgaggtcccgccggcggccaggcggcggcgctcacggagccgcgggcttccccaggccccgggcagcgtgctggagctctcgggcggcgccgccgcggagcttggcgcggcagctggcagcggcctgacgcgtggtgacggcgcccgcgggcaggcagcggctcccgggggcggccgggcgcagggcggcggcgctgcgggacgacggcttcgcgaggcttcggcccgcacgggtggcagcggtccccagggaggaaagacaaagatatgcgggttagaaaccaaggaaagagcgccgacgcctctcagccccgcaagagctgcagacccacgggcagtgcggtgccactttcgcccaacagggtgccaagagagaaaactgcggtggtcataggaaaaca

SEQ ID NO: 223220 - DNA, 671 bp, Homo sapiens
  chr7:127671336-127672007
  hyper
gccaaagtgcgctccggcggccccggcccgctctgcgggccgccgccggagggagtgcgggggcgccccgaagccgcccaggccgcactcgctggatgctgcgctccctctcccggcgtcggccgctccgggccggcggcagctgattgcggtcgtgagctcgcggagcggcgagagttaagaggaggtgttcgcggcgccttcgccctccccagacacacaccccctttctcctcgcctcttctcggagggtggaagagacaaaaacggggggtcagttctccagtccgccggctgccggcacgcggggcggcgctccgtccggcccccgaggaccagcggcgtggcggctgcgctcggacccggtccgccggccggaggagcgcgcggcgcccgcggtcgcgcccgcaccgcaggccccttcagagagtccgggggcgggcgcgggtccggcggcggcggcggccgcagcccccggcggcgcgcaaccgcccgtcgccgcccgccgctgcccggcccccggcgcgccgccggctccggctttgtgcggagggagcgagttcgcggcttcggctcccggcgccctcagtggccgcgccgccagcggactgctgcagcggcgtgagcagcgggggtcgcggctgcgggaaacgctccggagcccaggaaca

SEQ ID NO: 223221 - DNA, 498 bp, Homo sapiens
  chr7:127744070-127744568
  hyper
gccgaggaaaggaagcgacttggccaaggtcggagagctcattctttgcagggcggggtttggaacccggggtctggctctcggcaacgcgccctcggcccgcagcctcctgccccctgtgccccgcttcggcccccagcgcagctgcagaggggcccccctcgacgcatacactcaagagcccgaccgcgcggctgaaatcgcggagctcggagccgcggctggctgagcgatcgcggttcctgggctgcgtgcgcgccccttggagctgaaaggagcgccaggatcgggggcgctgcaccgggctgggcccctcaacgctcgcagaccgggccgggctgcagctggagatggcagcaatcccgggaggtctccgggcctcttcagggtgcgtccaggaggcgggttccgtgcgacgcggcgcagcccacccccacgagaccgcttaacttcgcgggggcagcctcgggcgctcggagacgcggaggcccagactgc

SEQ ID NO: 223222 - DNA, 621 bp, Homo sapiens
  chr7:128470517-128471138
  hyper
gcctaggaggcccgccgagcctcgccgagccccgccagccccggcgcgagagaagttggagaggagagcagcgcagcgcagcgagtcccgtggtcgcgccccaacagcgcccgacagcccccgatagcccaaaccgcggccctagccccggccgcacccccagcccgcgccagcatgatgaacaacagcggctactcagacgccggcctcggcctgggcgatgagacagacgagatgccgtccacggagaaggacctggcggaggacgcgccgtggaagaagatccagcagaacacattcacgcgctggtgcaatgagcacctcaagtgcgtgggcaagcgcctgaccgacctgcagcgcgacctcagcgacgggctccggctcatcgcgctgctcgaggtgctcagccagaagcgcatgtaccgcaagttccatccgcgccccaacttccgccaaatgaagctggagaacgtgtccgtggccctcgagttcctcgagcgcgagcacatcaagctcgtgtccataggtcagtgccgggggcgagggcacgggcgctgcggggatagggtcgtcccatggggcaggggcacaggtgcggggtgggcgcgcggggagctgaga

SEQ ID NO: 223223 - DNA, 104 bp, Homo sapiens
  chr7:128509606-128509710
  hyper
gtcagcgtccggccgcccctcggtgccccgcccgctccaggcaggccccgatcccggcgtggggacacacccggagccgctgctgctcacggtcccgccggcgg

SEQ ID NO: 223224 - DNA, 239 bp, Homo sapiens
  chr7:128509982-128510221
  hyper
cccgaggagcccctgctgcccggatacctcggcgcgcagggtcgctggcatctcggctccggctccgcgacctgggagccgccgccgggccgggggcttcgggcgggtaagcgcagcccacgccccctcccgggcggcccccagctttgccaccgccggtgccgacctttgtggctcgcctttgatcatgctctgcgtcagcgtggtagtccttctccggaggtttgggctctccctgc

SEQ ID NO: 223225 - DNA, 480 bp, Homo sapiens
  chr7:128828199-128828679
  hyper
cttcctgcagacgacctcagaccaagcaaggtgcccgccgagtctctccttgcaggtccggcccacgatttccactcatctctttcccccgggcgcggggcggcggcaggcggggtcaccagatccccctagcccgggcccctccaggcgccagggacgctgacgctcgcgctcttcctctctcgcctcccctccccacctctccgctccttcgtccagtccctcccccagcctcggcgcaggggggccgggcttggctccgcgaggcccgtgcattccagagagcccagcgagctagagcaacaaaggagccgggtcgccggcggggagagttcggggggctgcggcgcgctggggcgaaggtggctgctgggccgcgggctggcgcgggggcggagccggagctgcactcgcacccccggcccgcgtctggcctccctcgcggggcggggaggtggctttaatggtgggagagggaat

SEQ ID NO: 223226 - DNA, 180 bp, Homo sapiens
  chr7:129421889-129422069
  hyper
tcggagcgggcggggctggggcgccgccgagacagatccgatttccaccttttcttaaatgcgctgctgaaagtcgagaaggccccggccggggagctcgcgtcgcttcctcccccctcagctcccctcgcaccctgagtcccccagccccactccgggaggggccgcgaaactgcaccc

SEQ ID NO: 223227 - DNA, 600 bp, Homo sapiens
  chr7:132261552-132262152
  hyper
gccccccttcgtccccacccccgcgggctgaatgtccttgatgccaagcgggcacagcggcgtcactccgcgccgcccatgctcgcccggtcgggccgctgcccgggcgcggcgagtgcgcgggggacccgccggggagcgctctcggcgcctctgcgcgcctctctgggtagcggcggccgccccccggcagcccgcggccggccgcgccgcggcagcccccacccttgccgagacactcgccgggcagtgccctggggccggggctggggggccgcgggagccgccggctgctccccggggaggcgcggggctgcggcggtggtggctgcggcggctggcgctgcggcggcggagagctcggccgcgggccgagccgggcctcccgggcgcgcccccggccccccgggcgggctgctcgcaaagtttgcagggggcagggagcggggccgccgctggctcggccgccgccggagctcccgggctgcctgctgccgccgcggctcgctgctgctgtgcattgaagcccggccaagcgctgcaaaaactccagctgcctggcgctctctgggtcctcctctcctccctcccgccctccct

SEQ ID NO: 223228 - DNA, 104 bp, Homo sapiens
  chr7:132262376-132262480
  hyper
cctgggtcccctcggcccgcacggagctaccctggcggtggcgatgtggggcggagagaggggcatacatgggtgaccggagcgcacggcgcgcgctcagaggg

SEQ ID NO: 223229 - DNA, 878 bp, Homo sapiens
  chr7:134143261-134144139
  hyper
ctatttacaagtgaggcaaccgggctacaggtgcctcgagggaaaggaggctgggtctgcgctcccacaccttgccgacggctccacgtccctgtctgcgcccgaggtccaccggtctgtgaagcccactttccccgcctccctctcgcgttgtgccgcttggggcgcccgctaggacccaaaatgcggactggtgggccgcccatcaagggttgcccgcggtagggcgggggctcccgtgagctgctcccaaaccccactcgcaggatgctgccctgacgcccagggccaacccggggagccaaggcccccggtctctgcaaggccgaccccagcccgctggggaccctgcaagcccgcgcgtggctcccagcacgccgggcgtccgcggggcgagctgctcagggtcactcggggtccctcgccaatacaggccgcgcggagagtgtgaggcgagccccgggcccgcgcccccacgagcacctaccttccaggtacccaaccccaggatgggcatcttggcgccgttgttgagcaggagacggcttgccatggctgctgcgctccccagacccccgcccagtacggtgcggccttggccgcggcgcgtacctttaaatagcccgtgaggtcggcagaaagggcgcctgcggttggcgcgccgctgcgcgaaggagccttctgattggttgcgctgggggtgccgcggcggccttccccaagggtcggcggggatgcttcttccgcctggtcctagtggcagcggattctttccgcccccaacgctcgcccgcgccccgcgtggcagaaaggagttcctcagctgctgtatctggtgggaaagcgaatgctttagcgaaaataacaggcatcccata

SEQ ID NO: 223230 - DNA, 492 bp, Homo sapiens
  chr7:138720460-138720952
  hyper
ggcctggcactcgccgcgctggtagcgggcgcagaggcgcacagaggacacggccaccaccctccaggcggaggtgccgccaccgcccaccgcgccggccgccgcctcggcctccgcgtccccgaggccctcctgcgtctccacctcctgcagcaggaaacgctcgggcccggcgcgctgcagcacgtcccggagcctggcctccgacagctccacgtggccgcgcaggtccttcaggaacatgcggccgccgtgggcgcacagcaccttggtgaggaaggagcacactgtgggctccgccatggtcgctggcgcgggccctgtgcgcgcggcgcagcgagccggggcgggcaggctcctcccagtcacgtccacgatttccagcgaacagcccggggatgggcctgggcctggcgaggggtgggcctgcgggaggccgggcgaggggcggccccggcgcgtggaagcagggtacggcgcctgcggatcccc

SEQ ID NO: 223231 - DNA, 478 bp, Homo sapiens
  chr7:139167556-139168034
  hyper
ctgggcgggtgtgggggtttcggctacgtccacccgacctggcggcgtcggctgccggcgcaggtgagcactcacccgtaagcgttacggcccggggcagcttctcgtcgccgtccaaccccgcgcggggcaacagcgccgcatcctccttctccagccccagctccttgcagcggcagcacgtgggggagcccggggagccggcgcttccttccgcggggctggcccggccctctgcgtcgcagccgctctccgtccgggctgcagccagcggcgagcggcggccccacgtgccgccctgggatggtgcgcgcagcaggagctggtgcgccgggtccgcgtggcgggagaaggcaggggactcgggcaccggcaccttgaggaagcgcgtggagggcctgggcgatggcgtgctgctgccaccggccgcgcccacgggcttcacgcgcacatctacctgcagctccatgggcgccca

SEQ ID NO: 223232 - DNA, 540 bp, Homo sapiens
  chr7:139168060-139168600
  hyper
gcgcctcgccattccggggcagcttgaccaaggcagggcccggtgacggcggctcggggcagaccccgtagcccaggctgagcggcggcacgcgcggggacccggggcgaggcgaaggcggctttttcttgctcgagggctccaggcctgcgcccgccgccttctccacggccccggccggacttgggctgctttcgggaccttcaggttgtcgcaccttcgcgggcacctgcggctgctccagcgtggggaccaggcttcccacgggctccattgggagctctgccccggcttggcctccgggcgcagcctcccaagactcctccatcccgcgcgccccgccacccggagacgctgaggagcgcacctgggcccagtgcagaggagcttcgctctcctccgtccggattggtccagccgcgtcgccgaagttgtcaggccacgcccctccccgaaggaccccgctgtgattggctgtggctgaggttctgctgccccgacccccttcgggacacagccccggcctccaccaggcactgg

SEQ ID NO: 223233 - DNA, 363 bp, Homo sapiens
  chr7:139208473-139208836
  hyper
tgagcgcaccgcggcggcacccggcgcagaggctccagcgcggggagccgggctcagccccggcctgccagcgccgcggtcctagcccacccgaggccggcctggggggcccgcagggcgcgcggagcgccgagtgcgcgtcgggctgggccccgcaccccggtgcaggagcgcgggcgcggcgcggcggagcgccccgcatggagccggcccgggagcccccctcgcgggcccggccgccgccgcccctcgccgcgcgccccgcgcccgcccccgccgcccccaggccgcgttcgcccgcagaggctgaggcccgcggccccgaggggctgctgcggcgatccgggtcgggctacgagggca

SEQ ID NO: 223234 - DNA, 437 bp, Homo sapiens
  chr7:139478051-139478488
  hyper
ccggcctggacccggcgggcgcacggctccgagcccagcgcagccgagccggtctgcagaggggcccccagaactttgtgtgtgtgtgtgcacgcgcgcgcgtgtgtgcccaggtgcgagggttcgcgcgtgtgctggcggggagggaaccgacccgaaagagagccccacgctggcaaagtggctcgcccatctcacagccggttggcgctcgcggaggtaggagtggaatgaatgaatgaaggagtgggcgcgcgccgtgctccggaggagggcgggtgagtggaggagcttcggaaagccacacgaggtcagaggcaccgaagccctgccgtgcacgccgcggaaatgcagcccccggggtggtcgctgggttcctgccggagtctggcttccacgccaccctgatcttctcctcctcgcgtctacactgtccc

SEQ ID NO: 223235 - DNA, 627 bp, Homo sapiens
  chr7:139930082-139930709
  hyper
ctgatctggcggtggacgtgcagggcagcgggcccgcgcccaccagctgtggcaagtttctagtaagagagggatagagacaggcggagaccgctggggagtttcccggtgctcagccatcgcataggggggaacggacccttttgtgggccctcgggtccccccgtggtccccgctggcgcgctcgtcctctgccacccccagatctctgcgcactccccactcctgggcgttcgcactgccccccggcgcactctcgccgccccggggtccgaagcaccgcgcactccaccccgcgacgcgcgcatccctcgaccctcgcgcgtccacaccgccgctgcgcctcgcgcccccgcacccccgcaaccccacaccacgccggccgggcggggccggatgcgcagacgtgcagcacgtgcgctgcgcagcgattggcagcgccgcccccacgccgccccgccagggaaagggtgtcccgtgccctgccgcggctgctggtcccgcgggcgggggctgtcggggcgcgcgggccgggccgtgggggtcgccgcccgaagtgaccggggaacaatgacagcccgatggggaagggcggcggcttccctagagggccggttctctggctcg

SEQ ID NO: 223236 - DNA, 180 bp, Homo sapiens
  chr7:140098228-140098408
  hyper
tggtcgccgctctccagccccggctccgctcgccgggtcagcttggctccgctgcccgcctcccccgccgccagctcacccctggcggtgcgaccagggtttccggacgcccacgtgaccctcccgtcgcggggcacgctgggagttgtagtcccgccacgcggcctcacctgccggcgc

SEQ ID NO: 223237 - DNA, 320 bp, Homo sapiens
  chr7:140339867-140340187
  hyper
ccgcctcgatgccccgcgcttgcacgcgcacgcacacactcacacacactcgcacagacacactcacacacagacacacaagcgcgcacacacacacacgcgcgcgcgcggacacacacacactcacactcgcgccccgagggacccagcacggcgcagggcgggggtctaccggctttctgcaggtccccgaggcgcgagacggcggcgtccgggctcagtcctgggagtcagcccgagcccgggaggaacgcctggatcgcgctctgcacagtcccgggaccaggcgggaactcagactcccgtctgcagagccgctt

SEQ ID NO: 223238 - DNA, 696 bp, Homo sapiens
  chr7:140340287-140340983
  hyper
cccggcccggccctacctccccgcgggcggcggctccgcgggctctggggcgcatcttgggggctccggggcgggccgggacggctggcggcgcggctcgggggcgggcggcggcgggtgccggggacgccatggccctccgccctccgcccctttgtccgccgagcctcccccggccgcccgcaagcccctgggggtccccgccgcgcgcgctcccgtggggtccccgccgcccccggccccagcggcgcgcttccctcggccggcccagcgcaggctcgcccgcggcccctgcctcctcctgccgtggctccgcgacgatctgcgcgacgcgcgccccctcctcccgacccatcccgcccggcccagtgagctaatccgcagctggcgggcgcccggccggttgccacggcaacccctctcccagggcccggccccgcgcggagctgcggtaaacaggaccttctgccggactcgccccctcgcctctcggggtgggggagaggtggcttaacccttcctgggaggacgcccgccgcgcgcgggctccattccacccaggcccgggcggattcgcgaggtgcttccggcctgaggcttagacctggacgtccaagcctggggaacggcggccgcgtgcccggccccgcttactctaggcagttaacacactctcggcaccgggccggggccggg

SEQ ID NO: 223239 - DNA, 2149 bp, Homo sapiens
  chr7:140772338-140774487
  hyper
aaaataagagatgaggctcacgttgcacggatgacatcactagcttttggctgcgcgctcggtgttctcgtctgtgggttttagccaaggctgcagctacccgcgccggacgagagagcgcggcagcagcttcctccggcgcccgcacccgggcaatgcgatttccccagtcccctgggcgcagcctgggctctcgcgcctcccgggcaccagccgagcctgcgaggcctcggagccgccgcggctagaggaggaggcgacgaggggaagccgagtgacccagcctccctcccccaccctctccccattcatctcggcgaccaccgcgcgccgggagccggatcgtgggacgccgaggccaggacgggattctctgcacgctgtcgagtgagccggcatctcggcgcccgggtgggctgcgaagaaaatggtgcaatctgagagcgactgagcccagctgggcagagcagacggggtgccagagtgccaagggctcaggtgcctggagaaaggggcggattgtttggaggggccgggaccggggttttcttcggtgcctgcggcattttctttgcacctgggcggcaggctcccggggctcccgggtgccagatgaagtgaggcggaggcgtcgcgggagagccgggtccggaggcggtcgggtggacactccaggcagaagacggcgctgggaagagctgcgtgacgctcgggggctggcggctgggccggcagcgcgccgtggcggcgtgacctgtccatggtgttgaaggcgcggtgggccgagcccctagcgccgcgcgcagtgagcgctgcctggtgcaccctccgccgcgcagcccgcccctcgcgtccgccagcagccgcccagtctccgcagatcccaggccgggtctcgtccggtaacgccgcccgggtgaacacgctgtcggcccgaggggccgcctgaatggcgatgccagaggcagggcaccggggagctcgcggggaaaggtcggccgagagcgtgcgtccgcggggagtgcgcctctgagcgcagcacgcgggtcagaaggagcaaccgacctgctggtgaccagagaacggagattttaagaggacccgacccaaagaggaagaacatttctgggtgcgcgccccaggtctttgcttgcagacggggagggggagaggctctgagccagagacccaggagggactccgagaagccggccccagcacctggaggtttctttcgcccgccggccgcatccggggcgttctacttcacccggtggtccagtggcgcctcctgacagcaccccccgtccccctcagagagacaggcgagttctgtcccgtcaccatcctgcacaaagaagccccaccgcagccgaggacacttggcatttagtttccggcccgagggcagcggcgcccgaagccgggctgggagccgaggcggctgcttcggggcagtcgcttcctgcggggcggggagggggcgggaggcggccgcgctgggttcgccgccgccggaggctgcacctgcctcagaggatgcccaggagcccgcgggagcctctccggatcagaactttttaggccgcccgcccccatccccgcagtccccgggccgtgctccggtaggcgggggccgagggggcgccgcggcgcgagtccctctcctgccccctcccccagctcggccgcccgccgctttgttccgggtgcggcgagggaaggcgaggctgcggcggatcatgcccatggtgtagccgccaagcggaggcatggctgccggaaggttactgctctacactggcctctcgctagcgctctgcgccctcggcatgctggccgtggccatctgctcggaccactggtacgagacggacgccaggaagcacagggacaggtgcaaggccttcaacacccgccgggtcgaccccggcttcatttacaacaataacaacaacttgccgctccgggcgagccgctcgcgcctggaccgctgggagggcaaactcctccgggcccggaatcgccggcagctgttcgccatgagccccgcggacgagtgcagccggcagtacaactccaccaacatgggcctctggaggaagtgccaccggcagggcttcgaccccgagatcgccgccctcattcg

SEQ ID NO: 223240 - DNA, 408 bp, Homo sapiens
  chr7:142985429-142985837
  hyper
gcgcaggcgcaggcgcagtgtgcgtccgcgtctgaggggagggatgtgggggaagcgacggcccccggtttgtttgggctgtgggcggtgcgcagcggagagcccgggaaaagcgggaaatggcggcgccgagcgcggggtcttggtccaccttccagcacaaggagctgatggccgctgacaggggacgcaggtaagtagggaacggtcttagggctccttaggggagcccagggaaggggagcgtggcccccaggcgtgcggccctgcagccccctcccctcggagccccggaaagcagccgtgtccgcgcttcctgccaagggtgggacgcccgcccgagccgctccgagcctgactccgcgcaagggcccgcgggcggacctcttggccttgtctctcgtggga

SEQ ID NO: 223241 - DNA, 257 bp, Homo sapiens
  chr7:144100839-144101096
  hyper
gaagcctcgccgggcgggcaggtgtgcagcccgcacgggccgggccgggccgggggagccgtagcccgaggctgcgccccctcacccccacccccacccccagggcgaggccggcccgggaggctcggctggggcagctgcgagggcggggaggacccgggcctgggcgccgcctgctccgctccccccagccaggagcccaggcccaggtgcgggtctccttcaggcggcccctcccgtggcggggctggagggcg

SEQ ID NO: 223242 - DNA, 180 bp, Homo sapiens
  chr7:145813816-145813996
  hyper
cctggaggggggtgaggggagaagaggaagcgggaggggcttggcttcctcgcgtatttgaggacagcccatctcccttcaagaaccctacggagagtcggactgcatctccgcagcgagctcttggagcgccgccggccgggaggcgaaggatgcaggcggctccgcgcgccggctgcg

SEQ ID NO: 223243 - DNA, 152 bp, Homo sapiens; identical to SEQ ID NO: 201215
  chr7:145981901-145982053
  hyper

SEQ ID NO: 223244 - DNA, 540 bp, Homo sapiens
  chr7:148036404-148036944
  hyper
tgcaagtacaattacgttttttaaaactccagtccagatattggcttttccttggatacttttgtgtggctctcccagtacagtcagatccgccgccgcagcctagcgctccaccccgggttttgcgtcctcccctcacctgcctttcagtggtgcggggtttgatcccgagagcggtggactcaaagctgcccgccgggactcgggctgccggccgacaaaggacggtcctcgggggttctgaagtctgacccggccagtgggaaagccacctgcatcacaaagcgaggggcacacctgaaccggggctggcgggaagaggcaagtattgcgcgcgggctggctcccacatggagctgcctcccggtgcaagtgttgcaagggtgcgctgctccagcccggggagcgcgggaggcggcggagagagcgtccgggtgatgagcggggcactgtaactggattttaacacctctgcaagcagcgcttttggtcaaaaaatttccgattcttgatcttctctctgcaaggtcgggggttctt

SEQ ID NO: 223245 - DNA, 79 bp, Homo sapiens; identical to SEQ ID NO: 201217
  chr7:148506412-148506491
  hyper

SEQ ID NO: 223246 - DNA, 89 bp, Homo sapiens; identical to SEQ ID NO: 201218
  chr7:148507424-148507513
  hyper

SEQ ID NO: 223247 - DNA, 100 bp, Homo sapiens
  chr7:148508712-148508812
  hyper
ttacctctccacagtattctgagatgaattcatttttctgcacaggatctttgataaaaatcccccagcctgccacgtcagatggtgccagcaatagatg

SEQ ID NO: 223248 - DNA, 184 bp, Homo sapiens; identical to SEQ ID NO: 201220
  chr7:148511050-148511234
  hyper

SEQ ID NO: 223249 - DNA, 107 bp, Homo sapiens; identical to SEQ ID NO: 201221
  chr7:148512014-148512121
  hyper

SEQ ID NO: 223250 - DNA, 34 bp, Homo sapiens; identical to SEQ ID NO: 201222
  chr7:148513818-148513852
  hyper

SEQ ID NO: 223251 - DNA, 121 bp, Homo sapiens; identical to SEQ ID NO: 201223
  chr7:148514301-148514422
  hyper

SEQ ID NO: 223252 - DNA, 76 bp, Homo sapiens; identical to SEQ ID NO: 201224
  chr7:148515086-148515162
  hyper

SEQ ID NO: 223253 - DNA, 200 bp, Homo sapiens; identical to SEQ ID NO: 201225
  chr7:148523536-148523736
  hyper

SEQ ID NO: 223254 - DNA, 119 bp, Homo sapiens; identical to SEQ ID NO: 201226
  chr7:148526816-148526935
  hyper

SEQ ID NO: 223255 - DNA, 105 bp, Homo sapiens
  chr7:148936611-148936716
  hyper
tggtgcccgcactctggccgggagtgccaagcagcgttctccctcccgccgcacgggggcacaatgggaagcctgcacagtgaggaagagcggctggagccggtc

SEQ ID NO: 223256 - DNA, 314 bp, Homo sapiens
  chr7:148959355-148959669
  hyper
ctgccgcgccgccccgggcccgacaggccgggtccagggactgcaacccagcgagggacgcgggcagccatggccgaagcggcgcctgcccgggtaagcgccctcggccccgcggacgcccggaaggcccaggccgccgccgcgtgagcccgcgcgagggactctggccgcgcgaggccgcggggtgagagggccttgcgcgcagcctccgcgctcgttgcccccggcccatcgcccagcccgcgtcgaaggcattgaccgggcggcccaaatgccaggcccggcgggcggggccccgacgtcagcggctgacg

SEQ ID NO: 223257 - DNA, 801 bp, Homo sapiens
  chr7:149411563-149412364
  hyper
tttcactccaggtcgggtttccccgaccgcggcctctgggaaagatgggtccctcttcatccccaccatcagcccctggcacatgggacgcgctgagtggtggctgcgggaatgaatgagtgataagcggcgcgtacccgcgggcttgcacgcccacagccgccccggctggtctcggcgcgcaacctctacccgcagctgggggcggggacgaggggagggggcggggacgaggcccgagccaggtccgccccgccctgtctccgccccccgcttccgagccggcgccgcggcgccttctgggaagtgtagtccgcgtctgcgccggccggccgggccgccgaagccgggggctccgggcggaaacggcaccacccaccaagggatgcgaggcgctcggggcgggctcaacgaggccgggggcgggcccgggcgcgcccacccccgcccctccccctcggcccaggcccccggccccgccttctcctgcgcggacctgggccgccgccgacgagggtcgcgtgcgcccgcgccagggcccgcgccggaaaccgaggagtggcggggaggctgagcccggggatggcgcgccaggtaaggcaggcggacgcgcggacccctcggcgcagtgcggccccgaaggcggtagggcgagaaagagctgggacccccccgcaacttcgggatcggctgggtgaggctgggcaggcctgatgctcaggggttcgtgccgggaagttcaggtcctcggacaacctctctccagctctccgccgccggtacccacggcccagtctccac

SEQ ID NO: 223258 - DNA, 105 bp, Homo sapiens
  chr7:150497095-150497200
  hyper
aggagccaccccaccgtagggctccagccagggtccaggcgtgcaggcggcagaaggtggacgggacgcgccagccccaggcctctcctcccgctctccagccgt

SEQ ID NO: 223259 - DNA, 780 bp, Homo sapiens
  chr7:150497279-150498059
  hyper
agacgtcctgtggacaggacggggtgggggcatggccctggggactcctcgtgacagagggtcctgcggcaagagggtctcccgggccgcggaggccctgcctcacctgcagtcctccgggagcccgcggccgagcagagcggacactagctgaccccgagcaggggagcgacgggagggcggagacggcagatgcacgggtgggggctgcggccccgcccaggctgcgcggtttcccgaaaccagctgcggcccgggggcccggcaaagggggttccgcccggaggagcggaccgggcgggagaagaccgagcccccgcgcgccccctgcgctcccactcgcgcacacttgcacgccggccctggccgggcggggctggaggcgagaacgaccccacgggctttcccagggccgtccgcccgcggaccctcccagctccccagagcccagtgaccctcgcgcagcaggagaaccccagacggaccccaggccctgcagcctgtcatgaacccgaggggctgaagttcagccccacccccgcctcccctccccgcctccccctccaactctcaacccacttctccagccagcgccccagccctcccgccgcccgctcgcaggtcccgaggagcgcaggtgaggcggcaccccactcccggcggcccccgggcctccttccgcacgcaccccgagctgcctccgcacagttggaggagcgtaggagggacccccacccagggatgacactccaggaaggggactgcagaggaagccaggtg

SEQ ID NO: 223260 - DNA, 360 bp, Homo sapiens
  chr7:150671754-150672114
  hyper
ttgaccccgcccctggtcgtggccccgccccggcccgctcctaccatctttccggtagaaggcgatttccactttgcgctcctcggcgcccagcagtgcctgcgcgatctgcgcggcagcgcggcgctgcgtgcgcggcccgtgcaggaagtcgcaggtgcagggtcgctgcatcacctcggcccgcgagtagccgcacagctcgcagaagccgtcgttgcagtagatgacggcgcagttctccacccgagcgttggcgatgatgaacttacggcctaggggggcggggaggagagtgcgcgtgagcggggaccccagcctccgggactcccagcccttccccacattctccactcacac

SEQ ID NO: 223261 - DNA, 380 bp, Homo sapiens
  chr7:150676164-150676544
  hyper
gagaggtccctgagcgcgaggttccaaccaggggatccccgggtgcgagcggcccgccctcccccggcagcccggggccagccttgcacgcccaatcggcgggctcggggccctgcggcggcggccacggcccagcccctcggaaagccctggcctagccgcaggcccctccccccggccagctggctcgctccagctgcggctcccttatttaggcaaggaggcctagggatgctcaagggcaggcggggtgtctgccccgccgcctgctcatcgcctgcttgcgtctgagtgagggtctccgggcgcggtgtcctcggacttagcagtcaggcagggccccgggaaggccagggcggggaggcgagtgttgacagctg

SEQ ID NO: 223262 - DNA, 1113 bp, Homo sapiens
  chr7:150714959-150716072
  hyper
gagggtgtccgtggcgcttcacatccataagggcaaaggaacagatgtccccaaccccagccacatccacagtgaagtgatgaaaaaagtcgataatctccagggcacgagggcggaaccagaaaagcagaaacagcggggtgaggagcggggacaggagctcctccaggagggagacctggggaagcagcggtgaggctgagcaggggtcgctgaggggcccacgcgcgttatcaggaccaagcagtccccagcgaccctcgccagggcaagaagcctccccacccagtcactccctagactcctggtatagtccgtttgtctcatgccctctcccagacagaccctccgcgcagacagaccctccgcgcagacagaccccacaacttcctcctcagcccgccgtcgcgcccaccctcaccgctcggtactgcagcagctgcgccatctgccggtaggcgcggtccctgccgccggggccgggctcctccgggaggtagtgcatgtgggccagggctgtctgcagcaggagctgcggcgcacgaccctggcactgctcttccggaatgaaagacctgaaaggcgggatccgtggggggaaggggcctgcgattaggaggacgcgcggtgggatgtagggctagagggccccagtggtgggagaggtaaggattcggggggaacctcacatggccccagatcagagaaaccaacacacaccaccaccccgggcatctgccgtcgcacctggcgacggtggcggtgaccccgagcgcggtcatggcggtgagcacgtgctccacggctagcacgtcctcgtcgtagacggtgagcacaagcagcgcggcgaagagtgcacccgcgaagaaaacgagctggcgggccagcagcgtgcgcaggggcgcggggggcgcagcggtgcgcaggaaggcggcggcggggcggtaggcgcgggccaggcgcgcgcgcagctcgtgcggcagctcgttgaagtggcgcagctgcaagcgcgccaggcgggaccagccgcgcgcccccagcgcgccaggctcgcgccgcagcagctccacgtggctatagaagacgtgcagaacctgccaggccagcaccagc

SEQ ID NO: 223263 - DNA, 206 bp, Homo sapiens
  chr7:150784073-150784279
  hyper
tatctacgccatctacgacctgatcgagcgcatcgaggatttggcgctgcagaaccagatccgggagcacgtcatctccatcgagggtgagcggagccgggggctgcgggagccggggcgcagtggcctctccggcgccggccgagggctccacaggccgtgcctggccatgctctccctgtcgggggtccttgcgcgcttgagga

SEQ ID NO: 223264 - DNA, 446 bp, Homo sapiens
  chr7:150784597-150785043
  hyper
caggcccggagggtggcgctcgccgcggcgccctctcccgacgcacaccccctacgccgcggcggccaagcgggagcgggccgggcctggcgctgggctgaggctcagcgaccgcgtgggaggcgccggcaggtccatccgcgctttggccgggtcatgagcctgacggggatccgcggctcctcggtctggaggcagctgctgggcagccgggtgctgaccgaccgccagggacaccgcacccggagtcggggaccggaaacccccggccactgcgctgcctagcgcttttttctctgggcccttaggccctggactttcgaccgctgagggcacaggaagtggtggcacgctgctggcagatgcctcgcaagccctggtgtggtgggtgctggaggcacccgcaggcaccccggtggcatggtgaccttcgagcgggcacggac

SEQ ID NO: 223265 - DNA, 33 bp, Homo sapiens; identical to SEQ ID NO: 201242
  chr7:150869804-150869837
  hyper

SEQ ID NO: 223266 - DNA, 64 bp, Homo sapiens
  chr7:150948746-150948810
  hyper
gcaatagggcgcccgccgcacttggggcaggccgtgcgcctgtcgggggcgagggcggccgccc

SEQ ID NO: 223267 - DNA, 380 bp, Homo sapiens
  chr7:151038583-151038963
  hyper
tgagcccgggcgggaagtcctggaagactgagcctggggtggcgttggacaccaactcccaggtcctcgccccacacggccacatcctcgcccagccccgcctccgcttagctccgccccgtcgcggctccgccccgcggtaaccacgcccacacaaccgtatccccgcccacagctggcttcgccttggccccgcccacaaccctctttccaagcggcggcggcggcggcggcgcgaaggcgacagcggcggcgggggcggggctggcctcacccggaatgaaaacaaacggcggccgctgccgcatccgggcactctgctggtcgcggcgggagtggcgtggcgcaggtgaggacacggcggccgagtgtcctcgacc

SEQ ID NO: 223268 - DNA, 1346 bp, Homo sapiens
  chr7:151106381-151107727
  hyper
ttccgctagtgtgccgggatgagcgggggctggacttctagaaaggggtctgcgggcgcaggagctggggtccgcggtctggggccggtgagctgcggcgaagaggtcagggagggagtgggagggtctaccttgcaggagcgcgcagcactggccgtccgcggtgctccagagccgggccgtgccgtcctcgctgcccgtcagcaggcgctgcccgtcggggctcaggctcagccagttgatgcccccgcggtggtcggcgcagaccctcagggccgacccgccgccccccatcccgctggcagggcggggaacaagaaggagctgcgccccgctagggaggggcgccccggggtccgcgcggcggctccgtacgactgcggcccgcggccatcgcggggaacggggagcccgactcctgcggaggcacgcggcgaggggagggtgaaggaccctagctccccgctgcctccagcctctgggcccgcgaacccagggcgctgcggggggcggcccactcgggacctccgccctgggtagagtcctgggcgcgcgggcagagagaacccccttcccagcaccgctcggaggatccacaccccaccgggcgaacaaggcagctgcgtctctggtgcacaaggagccccccgcctcctctcgcgcccacggggctggggcggggagaggaacacgggaagccgagcgccccgcgccctccccggccgagcgcggaacaatacggtccagcctggctcctcctcagagaccacccctcacccgatcccctcccacttctcgggctgcgccccagcccccaccccgcgcgcctgcagcctccccccttcgtcgctgtgcgggtccgggggacggctccacgtgcgaccctcctagctgcccgggctgcgcctctgggctctggcctctgccacctccgccgccgccgcctgggtcccctgagccaagggccgggacgagggagggggaggcggacaaagggtcggggtcggggagaatcgcgcgccgggaactcatttggggcgcagctccaccgacccctcggctactcgcctccaccaggcaagccaggtcctcccatgctctgagccctaaggactctgcccgaggggctctcggggacttgggggcggtcccccaatggagggtgcgacagggaaagccccgagtccgccctccctgggaaatcacgcgcacacccaggattctactttggtctggccggagtggggatgaggtgcgagccgctgcggggtcggtggagccgggatgtcaagttcaccttccagccgccgcgggctccctcggcctggggcgcctctaatggaccc

SEQ ID NO: 223269 - DNA, 152 bp, Homo sapiens
  chr7:151217153-151217305
  hyper
taccgcgctgttgggcgccggctaggtttgaaggcttcaaacttccaaccggttaggggcgggcgggagaggcggagagacaaacggtggctccctggtgattggccagaacggagcgcagggcggggcaataggtgggaggtgcggtgatt

SEQ ID NO: 223270 - DNA, 240 bp, Homo sapiens
  chr7:151573007-151573247
  hyper
cgggggaagggaacggcggcagaggagacccccgctccaggcccagaaacgcccggagagaaactggagcggagggggtgcattggaagacgcagctacacagctccccccaacccccgccccgctgctttccccacccaccgcccctcccctctcctccctcccctcccctctctccgtctccagcagccgagcgcgggctccacctccccggagcgcagtccacaccgtcccttttca

SEQ ID NO: 223271 - DNA, 536 bp, Homo sapiens
  chr7:151722708-151723244
  hyper
gcgggggcggggccgcctgtcacgcggcgccggcggacgcgcggcgctgggcggaggcagcggctcggggactgggcgagggccctgggcctgaggaggcgcggccgccactgcgcccagcgcctgcgcgacgcctggctgctgggccccggggcagttcagcccgcgccgctcctgcgggtcggactggggctgtggcgggagagaagatgccgcagcccgagtcccagaaggcggcgatcctgggctgcgggcaaggcggtgagtaccctctaggcggcggcctcccggcgtccctcagcacctcgagagctgcggcggcggcggcgcgcggggcctgggcaggctgggggcggcggcggggcagcgcctggctccccgcgggtcctgggctcccgcacgccccctgggcgaggctcgtgtctccgggagacgccgctgcccccgcgcctcccccagcgtctcctgaggcttgttcgcgggcgtgggggcgaggaccagggcgctggcctcgttttcgcgtatttaggacggag

SEQ ID NO: 223272 - DNA, 180 bp, Homo sapiens
  chr7:155166648-155166828
  hyper
attatgtttggcaatgtccccggtgccccagacccgcactccgctgcctcctggcttctcatgcccgcgaagcacggcctcgccctgggcgcggggcatcaccggcgcggaggcccgagggcgggtcacttcggatccctttcttcccttcctcgtctctgcctcttttcctttcttttc

SEQ ID NO: 223273 - DNA, 752 bp, Homo sapiens
  chr7:155167096-155167848
  hyper
ccaggtgcgggtttcagcacgcggggcgcgtgtgggcggaggcgccggggcccgcggctccgcttgttcgcgcgttgtcgctggcgaggcgtttcttgtccccggcgcccgctcggtgccgtctcagtgagtttgattgaaacgcggctgcgggaaggggtcgacagaggcaagctgcgagcaaggcgggggtgggggcgaggaaggggacccggagagctcccggagggcttggccggccaccgccgcgcggcgctgctcggggactgctactttgcaaggcggcggctgcccctgcggggttcgggttgcagggtcaagtgtcacgtcctccgcaatctccaatattcctgtaatgtatttaaatggacgaattcattacgcggggccgtgtgaatggggcgaggccgcgagcgcggcgcgatcagtagcgcccactaacagttcgttctgcacggcggagcgcgagaccgcggacccacggaagccccctcaatggtgtttgcgtcctcgccgccaccggcttggtagggtcctttagggaaggaggaagagttcaggcacccggacagatcctaatggtctttctgatttttctttcccttcggtccgctttccccgcgacctcctccaccctcagtccgcctttcaaacgtcgtccgcggggatggctgcgcgatggagaaattggtctcgtccagagacgcgcgcacagccgtccccgcgcacacgcgacacgcccagggccggcg

SEQ ID NO: 223274 - DNA, 170 bp, Homo sapiens
  chr7:155170271-155170441
  hyper
atttcccctgaacaggctggcggtgggaagcaggcattggagtcccacggctcactggactgcagcagcgagcccttcacggttgcaaaggaaggaaattcctagcggggcaactcttcagcgtccgccccacagacctagcacgatgtccttttctgtctcaagataca

SEQ ID NO: 223275 - DNA, 445 bp, Homo sapiens
  chr7:155170533-155170978
  hyper
catgccagtgcaattcatgtctccaaaccccctctcctccacaaaaacgaaacaaaacaaaaccccaggtccaggagctcaggcccaggccggatccaagacgcggcagccaggcagccccgccgcgagcctgtgcgggcttgagccggcttggcccccggaagccccagccccgcgctcggcagcgtgcgcccagcgcccagaagaagcagctccaggcggccgcgctccccgtcccgccgcggtgcggtcggatgcccagctcgcgtccagacccgcgggatgcagacccggatcagtcaggcttgagggctgctccgcatagaccaacgtccggggaaggcacacagtggccgagggcccgcgcgcttgggctacggctgtgatggtatctgcgctgcttgcgccttggggatgggaggccgcctttgctgactgaagggcc

SEQ ID NO: 223276 - DNA, 420 bp, Homo sapiens
  chr7:155247390-155247810
  hyper
cgattcctgggtgaagctagagggaaaacggggttcccgggtcagtgccccactttccatcccgggagaaactaatgtccggagagggctcgtctgatccgcacagaaaggccgaccttgagggcggcggtcgttcgggggagaaagcggaggctctgggctcgcgggagcgcggcagccggggctggcatcgcagaggagagacacgccactgccccgcatccccagaaagcgcgaggcgccgtcccagctggggcaggcggccgaggccggtcctcatgcgcgcttctcgaagcttcctgaaacaccttgcggagttccgtgtgtatagaactcagcaccgcccagcccctgggcagctcaactttctgcagccccatcccagcttccccggccctttgaacggtgacccctcttacc

SEQ ID NO: 223277 - DNA, 180 bp, Homo sapiens
  chr7:155247941-155248121
  hyper
cgacccacgaattcctcttcctccagccaaccccagggcccagcccgcagaccctgcgagggcaggtctctgcccaccggcccgccaggcgccctggaggtgacgctctgcttcccagagtctctgttgcagccacgaattggggtctgggtcgcaggaaagcacagggctgaagcccag

SEQ ID NO: 223278 - DNA, 1680 bp, Homo sapiens
  chr7:155250312-155251992
  hyper
ggccgaggcggcgagggcggcggacggccggggagcgcgggcggcccagcccggcccggccgggccctggcctcgcgtctctcacccatgcgactcgggccgcggagctctgcggggctcggcgggggcgcggccgcacgccggtggggcgccccggcccgcagcggggcggcggccgcgaggagggggcctccatgtgcgtgcgggcggtggcgggcgcgctgaccgcgggcgcccggcaccctcgagggccggctagggcgtgcgggcggggacggccgggcggcggcggcggccggagccggcccgggcgggcgtgagcgccggggaacgcgctgcctgcatgcgcgcagctctcgccccgggcggcccaggcggcggcgccggagcccgaggcggccggacgcggagaggagcggggagcccgggaggcggcccgcgtccccgccggaccactgcgactgtctagaccccggctgcgcggcgaagtcgaggacttggctctgttgaatctctcatcgtctgggcgagcggggcggctcgtggtgtttctaacccagttcgtggattcaaaggtggctccgcgccgagcgcggccggcgacttgtaggacctcagccctggccgcggccgccgcgcacgccctcggaagactcggcggggtgggggcgcgggggtctccgtgtgcgccgcgggagggccgaaggctgatttggaagggcgtccccggagaaccagtgtgggatttactgtgaacagcatggaggagaatgaccccaagcctggcgaagcagcggcggcggtggagggacagcggcagccggaatccagccccggcggcggctcgggcggcggcggcggtagcagcccgggcgaagcggacaccgggcgccggcgggctctgatgctgcccgcggtcctgcaggcgcccggcaaccaccagcacccgcaccgcatcaccaacttcttcatcgacaacatcctgcggcccgagttcggccggcgaaaggacgcggggacctgctgtgcgggcgcgggaggaggaaggggcggcggagccggcggcgaaggcggcgcgagcggtgcggagggaggcggcggcgcgggcggctcggagcagctcttgggctcgggctcccgagagccccggcagaacccgccatgtgcgcccggcgcgggcgggccgctcccagccgccggcagcgactctccgggtgacggggaaggcggctccaagacgctctcgctgcacggtggcgccaagaaaggcggcgaccccggcggccccctggacgggtcgctcaaggcccgcggcttgggcggcggcgacctgtcggtgagctcggactcggacagctcgcaagccggcgccaacctgggcgcgcagcccatgctctggccggcgtgggtctactgtacgcgctactcggaccggccttcttcaggtgagcccgcggggaccacgcgtcccggctcgccgcggggaggcccgcggagctggggggcggtgctggcgcgggaacttaccgggaggaaaacatctcgaacctcccccgcgcacacgcacaaagactcacgcgacattgtgtgaagctgacgccggcccgggcagcggccaggagtccagcggcaggactgattcgctagggggtacagacttcttaggaccgcagaagggac

SEQ ID NO: 223279 - DNA, 180 bp, Homo sapiens
  chr7:155252154-155252334
  hyper
gcacactctcatccccttccctacgatcttccaactcaggccaggccggggacgcatgccccagcccaccccagacttgtcctaccatccggttatcccggctgtgctcggggaagaaaaggcgaggccctttgccgctctgccttctgcccctcgggcctgcgctgaccggtgggactc

SEQ ID NO: 223280 - DNA, 780 bp, Homo sapiens
  chr7:155259402-155260182
  hyper
cctttctcctaaggagcggagggaaggagccatgtgaatgaccccagcctgaccaccaagagggcgccagcatttctgttttcctagagtgaaaaggtcaaatcgatgggggctcctacaccgctggacacaggtgcgcccgggcgtccagtgcgcgcaacacacgcccagacactctatatgcaaatatgcctgccgccgcggagccggccgggaggcagcgtttgttcgctggggttctgctagaagtcattctgtctcccgctggtttaatatccgccctctgcggtctccgctcgcctcggcggctcccgaagcgcccccgggagggtcccggctccgccgaaaactgcagcctgccaggctgagccgccgcgcgctgggaggttaatagcgactgacgacaaagggccaaggtgcaattcctaaagcggggattcgccgggtgaggcagaaatcagcctccggggagatgggtccccccttcccgacgcgcccctgcacacactgctgccccggcgccgggcctccgggcggggacccctcttccgggcatcgcggccccattcggcggagagctaggccctctccaggcctccaagtagggagcggacgtgggtggtggggaagggaagccgccggcgggacggagagtggggtcccccggaccctgggtcgggcaggcctggcgctggcagctctgttgcacagatttgtgagcgatgctggtggccgcattgccgcgcggcgcgaaccccaagtagaccattcatgttttta

SEQ ID NO: 223281 - DNA, 180 bp, Homo sapiens
  chr7:155260233-155260413
  hyper
aaaaggccattcttgaaatcgcctgaaatgtaataatattcattaaagcgcctcctaattatgtgatttaatcaagcgtggtgcgcccgcgctctcggctctcgctggaaaggctggcgatgacggttattattactgctgttgttagtggcctcgtgatagcagccggccagctcttca

SEQ ID NO: 223282 - DNA, 366 bp, Homo sapiens
  chr7:155580046-155580412
  hyper
acagcccccgcctgagcccgcggctaaaggaggccgggccgccgcgcacccccgcaccccttccccggaccgcgaggctccgcgcgcgcatctctgccgggagctcccgaccacggcccagcgcaagggacctccgggccgcccctgtctcgggccctgccgcgccgcccgcccgctgcaggccaggactgcgctctgtctgcccacggcccccgcctggcacacacgctggggacctttcctcagtgctgcctcgacatccgaaggggctgggacgcccgtccctggtgggagcgagcaccggggcgggtgaggggtgcgccgcgggaggctctcctgccccgcggaggagggtcagagagaaag

SEQ ID NO: 223283 - DNA, 196 bp, Homo sapiens
  chr7:155580715-155580911
  hyper
tgtttcccccaccctcgggcctggaccgtcaatgccggctccgctcacaccatctgtgtccacgcagagggtcgggccgtgggagccgcgagtgtctggcccacacttctgttcttaacctcgcaatgtattcaggtttccccaggcggagcgctcagcatatcgacagctaaaaatccaaccaaggccgggcgcg

SEQ ID NO: 223284 - DNA, 480 bp, Homo sapiens
  chr7:156802197-156802677
  hyper
gggcgagtcctcgcaggccccgggcagagccgaggcggcttcgcagctcttcccccgctcgctgggagccaagcgcagagaggggcaggcggtgccggtggaggatgcgcgaggccctcccgccacgcgcatccacgggggccgcagggtactcacagttgaagtcgggcatcttaggcaggatcatgcccgcggtggacgcgcgcagccactggtccagctggaaggtgccggcgcccagcttgatggggtcggcggggtgcgcggggtgcgcgccttgcacctgcgggtacgagtaggagagcgccgggtgctggcccgccagcgcagccgccgccgccgccgcggagtagccgtagaccgggtggccgtagagcgccgcctgcgccgggaggcccgcgccgccctgcgcgcccccagggtgcagccccagcgccaggcccccagcggcggcggcggcggcggcggcggcggcagcgg

SEQ ID NO: 223285 - DNA, 960 bp, Homo sapiens
  chr7:156802713-156803673
  hyper
cgtgcccgccgcccgtgccgccgccgccgccgcccgcgcccaggaagcccggcttgggcagcagcgcgcagtgcgcggccagcaggcgcggcggcgacgggctctcggcgcgcaggcggtcggcgggcgcagccggcggctccgaggacgcggggctgcagctgccgctagtcccgccgctcgccccgccgccgccgccgccacctccggtgccagatgcggcggcggcgagcgacgtgaccaaggccagcggcgcgctctgcgcagaggcggctcgtggggggtccaccgccagcagggcgtcgatgcggaaatttttggatttttccatcggctcgtttggggctggcgctcagggcccggtggcgggcgacgcggccgtgtgcgggctcgcggagtcagtgcgtgcggtgcaagcccgggggctcggtattgttatggtggttatttgccaataatcaaagtcgccgccggaaactcagccgagggtgaccatggtcccggcgcctcctccgtgcgggccccgccccgggccgcgctcgcacaaactcccacgcgagtgcttccccgcgtccgggcccgggagcccggttctttgcgctgcagccctcaggcgaccgcgcggaggccgctgccgccgtggtggggacccgcgcccctccgcgcacttgaagctcagcgcggcttccgattggcgcgcgcagcgggggcccggggagggccgcgggctccgccattggccgaggggcgcacctgtcaccgtcccggccgcccgccgccccgcccccgcgccgcgaggtcctaagcagcccgggctgttgcgcggcgctggcgggcggggacaccaacggggagtggatactccgaggctcaacctggggcctctgcccgccctcccctgggtgcggagccggacggcgggcactggcaacccccgggcccctggagagccccgcggcg

SEQ ID NO: 223286 - DNA, 180 bp, Homo sapiens
  chr7:156813616-156813796
  hyper
gcactgtgtttccacgggctaggagagcggtgactccccagcctccccgtaggcctcgctcgcaccgcagagggatggctggcccgtgccgctccgcggttcccctccccgggcggatccgcgcagggagagcccggcgggcctgggcttgggcctgggcctggttcgggggtgcaggcc

SEQ ID NO: 223287 - DNA, 360 bp, Homo sapiens
  chr7:156813892-156814252
  hyper
gaccgtgtctcctctcggcagcccccctcgacctcttcgcaggcgcctgagcagccccgcaccgaggggcgcacctttgcttttgcgagctgcgcggcgcggacacccgggctgcgctcagcccccacccccacaggcttcccagccgtctgcccgagttcggcttcaacgggagcggggctccacttttccttaattgacgaagtcacggattcctcccgggcggatttatggggctgcgcgttgtgccggcgcccgctgcttcgcatctgcgcgcccgcccggtgccgggccccgccctccgcctcagccccaagctcggcccgcgggcccggccacaggtgccccggcggccccgcc

SEQ ID NO: 223288 - DNA, 360 bp, Homo sapiens
  chr7:156814294-156814654
  hyper
gcccgttcctgctgcgggtgagcaccaggtccccgcgggccttgcgcggtgccccccagctcagcgtggcgctcggcggcccaaggtctggggcgtggagggcgtcagcacctggccgactcgccggttcccataggctgcctcgccccgcgttttcctagcgggggatggcggctccccgtgtccgcatcgctgccgggccctgccaccccaaccccggccgcagtggctggaagccgtggccttttccgggctccgagagccggcggggcggttttcctccgggtttcctcccgccggggtcttgggagcccctcagcctcgccctccctgcagggagaaacctgtctactgcgtgaa

SEQ ID NO: 223289 - DNA, 231 bp, Homo sapiens
  chr7:157129086-157129317
  hyper
tggcgaagtctccacgcgctcccgttcgccggggaacttagggtatccgggcttccctaaattgacaagcgggggccggcgccttcgcccgccttcgctggccgccgcttggtttgttcttcttctccttcggggacttctccgcccgcgcccgcgcccgcgccccagctttcgtcccgctgtgcggagatgccacccagctccaccgcaggaccgcggagcgagaggcgg

SEQ ID NO: 223290 - DNA, 104 bp, Homo sapiens
  chr7:157150797-157150901
  hyper
cagggcagggacaacgtgtttgtccttggagccccgtggtcttgcccgatgcctggcacaggaatgcattgaatgaaagaggtaactgacgttccctgagcaca

SEQ ID NO: 223291 - DNA, 880 bp, Homo sapiens
  chr7:157477409-157478289
  hyper
ccgcccctccccgggcacagcccgttcacgaaacctaaggcgccggccacgcgccacctcccccgggccggggtctcctcggtccccgcgcgggcgctggttctcccgggtgggcggcagccccgccctgtgccctcctgggccggcgcgagggaccctagagcgcgcggggggccccaggcggggaggagcggccgcgaccccggatgcgagaggcgtgtgggtccaagcggcgccgggacaggggccgggtcctctgcccaccccagggtccatgttcgcctgcggggccgcgtcccccggagccatacctgggcgggagggcttttcccgggggcccggcctgcgcccctcgccgcccctcgcccctcgcctctcgcctcccgcgggtcccgcctggccttggccgacggaacaagaacaacaaaggaagcggcgcgaccggcggagggggcgcccgccgccctcccacccctcatcccggccgggccgatggcccccgcgcgcctccatccgccccagcgcggaggcgaccccggccccgctgccccggcgtcgggaggacaccgcgcgctcacgtggatgactgcgcccgggaacagggacttcccgaaccttcctgccccgcgccgtgaggcccacacgcgcgcggtgaccaccctggttctgagggggcggcggggccacggcgtgtggcggacccggcagtggcacccaggctgtgcgcgcgggtgtgtggggttccgaggcgcagggcgaccgccggctccggctccccgaggaaggggcacaggcgctgcccgcggtcactcgggccaggtgagggcaggggacgcgcgggggccggaggaggaggcctggtctgcgggcggcaggaggg

SEQ ID NO: 223292 - DNA, 270 bp, Homo sapiens
  chr7:157594763-157595033
  hyper
tgggacttcacttccgtgtgctaagaacgtgtagcgaggcccaccgtgttgacacttccctgagtgtgcagcgtggtactgttggctctcaaccgtacggcagatgtcgagaccgcgttgaggccgcgtcgctgaaaccttgtgcccttggaacggccccttcccgtgcttcccccagcgccagacccggcagcctccatcctcctctcttcttcggtgcgttcaattgtcatagattccacgcttcagcgacgtcgtgcagcctctgtc

SEQ ID NO: 223293 - DNA, 104 bp, Homo sapiens
  chr7:157731955-157732059
  hyper
caataagataaaataaagcacgcaggtctcctgtctcactagcaaggtttccatcactgagcggccacaggggctggtggctgtcctgcaggacagcacacatg

SEQ ID NO: 223294 - DNA, 462 bp, Homo sapiens
  chr7:158379348-158379810
  hyper
ggcttccactccctcgctgccgtgaagctgccgccctccctttcctcccgcggctgccacggaggaaaaatgtcctctgatttcggcggcgctgcccgcgggggggtgcgggggacgcaggtagaagcgggtgcagcgggacatccgaggcccggcccctcgcggcacacgcggcggaacacgagcggggggcgcacccacgccggaccagggccgcgcgctccagggccaggggagtgccgagtggcggggctcggggcgtgaggcccaggagccggggtagaggcaggaggcggcgccggggaggaaactgaggcaggggcgcgagacctgctccgagcccccagtgaggacagagaggcgcgcgacccgtggccgggggcttgagacccagagcctgggggtgtcgcgctggaaccccgagacccccggagcccccgacccgctcgccaaggcgcgctc

SEQ ID NO: 223295 - DNA, 351 bp, Homo sapiens
  chr7:158936494-158936845
  hyper
aagcagcattaaccgtgataaaacccgttactttccaaggacccgctccgcaaagcgcccaccctcgagggaggaaagccgagctgcgcctccgcgcaaggccagggagtgtggctcgagccccgctgcagaccgggcgtcgccggttaatcaatgacactgtcgggtcagcagcgcagcctcccagctgcggaggggccgcggatcgatccagacctgcctcggctgcgacgcgcacgaaaaccgcgcgcaccgcaaacccgcttcagtctccaagaggaaagcaagaaacaaggctcgggtttttttctttcttttttctttcctttttttttaaggttcacagaggga

SEQ ID NO: 223296 - DNA, 960 bp, Homo sapiens
  chr7:158936949-158937909
  hyper
tatttaaccgacgccacgtccccccgacactaaaactaaccagtaagtacagggagggaccgagaggcatctgcggccaacgccaaccccgatctccccgtgaaacgcgcagcccgcgcaggcgcccgcagctcccagctcccgggacggccccgaacgagctcatcgttgacgcgtccaggaagaaacgatcccgtttccagcaaaccccggacggtggggcgcggggaagggcgcaggcagcctcccaacccgagtcccgcaacccggcgggaccggagctcagcgcttcacgctctccgggaggaagctccggaccccgggcgaccccgctccctctcccggaccccgcccgcgctccagcacccgggaggaaggcgaagaccggcgggaggagcgctcttctcggaaggggagaaccgggtccgaggcgccgtggggcgggggtcgcgggcgcactcacgggggcgagcagccagcaggtcagcagcgcgggaggcagcagcgtccgcatcccgagctcagcgtgccgggggccgcccagcgcccgccgcctccgtcctaggtccccgcggttccgccgcctccagcatgggccgggagcgagtgcgcggagacctcgggccccgcagctgtagccgagcgcccgagcgcgggggccgccccctccgtcccggcagctggagcgcgctcaatgcacgcccgtcccccacgcgccccgccgctccgccccccgcccctgtccccgccccgcgctgccccaatcctcgtctccctcctcccccgagaacccccgctccgcgcccctcctcaccgccccccacttccccttccgctgcgccccgcgccctctcctcgcccctgggctctctgtccccgccgcgcgcgctccctctggtctcctcgacccccccagcctctctctccgttctcctcccctcttccctggcccacgccccc

SEQ ID NO: 223297 - DNA, 457 bp, Homo sapiens
  chr8:494406-494863
  hyper
cggggagtgggtccacgcggaccacagcggcaactcagcccaggacgagcctcgggtcaagttctccgactccgcactcgggcacctagcgggccgcgccccggagctacgcggccccaacctcacctgcccgcccaaactgtgcccccaactacccgcacctccacctgcgcgccgcccaccctcgccctccacctgcgcgcccccggcctactagcactccccacctgcgcaccccctcacctgcgcctgggcggcggcggcggcggccggtggcggccccccacgcaggccgtcctcctcctcggggggctcgtccagcagcactcggccccggcccagcttccacatggtcaggcgggctccggcgtccctccgtccgtgcgtcgggctgtggctccgcgtccctcccggccgccggacgctctgcctgcggctcctgcgggacgcgggccca

SEQ ID NO: 223298 - DNA, 120 bp, Homo sapiens
  chr8:495072-495192
  hyper
cccacccccaaattcgacggggctccgaatcccatcccccacagaaaggtcaaccccggccccctcctcccagtgtggtccccgccaccgccccggcgagaccctcgcccttcactgttc

SEQ ID NO: 223299 - DNA, 477 bp, Homo sapiens
  chr8:495479-495956
  hyper
ggcgtggccacgtccgctcgggtcaccaaggcaacggccgggagcgcagtgcgcatgcgcgccgctggcgctcaggccgcggcaaggctgaggggaaggtggagggggcacagtccgcggagcggcgcctgtaccccagcgcttcagggcatccctcggggcctgggcgccgggcatccgggactcatcccctccggcgcccgaggtcgcgggatagtgggggcgccgggaggaagcctcgcccagccctggtgggcggtggggccgctggggcctggggcgccgcgggctcggcccggactgacggcggtggggggcggggatggggccgtggtgccgggccgcgcagaacccttgggacccccgcggcgcccaggttggggctcagggcccggagaacgttttcccgcgtggctatggctttgtcagaatcaggagcgggagaggcgcccacagattcctgagggcagaaccgcc

SEQ ID NO: 223300 - DNA, 1920 bp, Homo sapiens
  chr8:686814-688734
  hyper
gagacttgcccagggtcggtgaccgcccagggatccccataccagcgcgtctagctcccgcgttccgatcccggaagggaaaacccatgatcctggcgagggtccgtccacacgtggccagggtggctgatcttcccggctgctgtggttgtcaacaccacttctccggatcgattttcccttttcctcggctctgtcgtccatacgccactcacagcaaacccaggcggcgggccccctccgagggcgctccttgcgtccggacccaggttctcggggcgccccccggtgggtccccgcgaagccgccgccgcacaccttcctcagcgtagcccgccagtggaaaccgggggaggttctgcctccagcacccaagcggcggccgcacctcgcagtgagaccctcgcaagcgcccgcgcctccctcgccccgcgtcccctctgccccgcgagcccccctgggcgccgagccgactcgaacccgagcgcgagtcccgcgcacaaacgcgccggcgcgtctctaacagcggtccagaaaggctgaccctgcccgggggcgacgggtgtgaccgggtcccccgctaactttcgggcgcggtgagcgtcgcctgcgcgcgccgcggtggaggccgctgctttcccgccgggagcccggcacagtccccgggtgacccgcgcgccccgcgcaacagttggagccgggctgcccgcgcgctccccaagccgggcccttccccagatgcagccgcgcgccggccgccccccagtgcgccggtgcctccctgggcgccgagtgcgcaggcgccggccgtgaagaccgaccgtgcgccgggctcgagcgcggtctgagcgcgcggcgcctgcggcggcgaacggacggacggaccgcggacggacgtactgaccccaacccgcgagccccgggagccgtcggtctgaggaggggccgcttcgccatgtcgccccgcacctgctgagcccggagcgtccgaggatgtccgcgctgaggaaggtgcgagccgccgggggctgccgggagccgggcgcggggctccgagagccgtcgaggcggggagggcgcggtgtgtcggacccgcggggacgccccgagggcgtcagggttgggggcgggggcgagcgggggtcgtgccgcccgccggggccggagcgctggggaccccagggacagcctgtgctcgggggtcgcgcgttgcgctcctcgccgggctccgcgcatccctggccgcgctcgggggtgccgggaccctgggctccgggggtgcgggagcgcacggggccgcggaggtgtgaaattctccgctctgcctgcccggggtggagggggcaaagcctggggggtgccggcgcgccaggggctacgcgcctagctccggtggggcagctgcgagcgagtgggggcggcgggcagcagactgcatccccctccccccaagcccgggtggaaacgccgacggggactgggaatgaatgaagggtgccgggctgggctgcgcgcacgggggctcgcgggggcgggggcgaccaggatggggcccttgtgccgggcagcagcggctgccgagaccaggcggagtggagggtgcgcgcagcgagggggtggccgccgcccggctctccaagtgcgagcgaggagctcggggtcttttttaggggtggttgctaagcgaggcgctacccagcgcagggttttgtaactaagcctcccccggcagcggctgttgctgtctccggctccttcgctaacgattgcaggagaaataatgaggatgtaattattacagccctgcgcggagggctggggggcggcggacgcgggctcctctgcctgcgcgcccaggtggggctgggctgggctgggctgggctgggctggactggacgcctctccccgcccggccctc

SEQ ID NO: 223301 - DNA, 540 bp, Homo sapiens
  chr8:688768-689308
  hyper
cggagcaggctggacctgggaacccggggaggggcctggaggagagatagctgggcgaggtgggcgccggcgagaaggcggagcccccggacagcgtaggttcgcaggtggagagcggacgcgggggcgagggtgcgcggcgggtctgcgatgcgcgtcggaaactcgcggcccccggtcccggccctgcgcgcttggagcccgggtccttccagcccctgcgcgacgccgccgccgccgccgccggtgaatggcgatcccggccacggcctggaattggaaattcgtgacttgtcggcggccccggtcttctatcgattaaagataaagcgatcagcagtgaatttatccttcgtgtggatgaactcggccagcccgggctgtggggggtttgggaactgtaaatattctccaaagcgccgccgcttctcccgtcttcccggactcgaggctggaggcagctccggcgacgcgaaggggggtaccccccggagaggtcgggcctggggcgcggcggacagagacccggtcccagagcct

SEQ ID NO: 223302 - DNA, 169 bp, Homo sapiens
  chr8:798795-798964
  hyper
ttccagtgtaggaacgtgccagggtttgttccagtctaggatcttgtgatgtgtgttccagcataggatcgcgcggtgtctgttccagcataggaacgcgcggtgcctgttccagcataggaacgcgcggtgcctgttccagcataggaacgcgcggtgcctgttccag

SEQ ID NO: 223303 - DNA, 44 bp, Homo sapiens
  chr8:8640056-8640100
  hyper
aagcgctggcaggcctctgcgtatgtggacggccaaccccaagg

SEQ ID NO: 223304 - DNA, 167 bp, Homo sapiens
  chr8:8750284-8750451
  hyper
cgcaggaccaggacgcgcaggctgcccagcgccgaccccagcccctcgggtacctcctccaggccgttgttccccaggttcagtgcctcaatgtccccgaggttggccggcagcacgagctggggggaggcgggggactcgagcgcgtcggccccggccccggggca

SEQ ID NO: 223305 - DNA, 139 bp, Homo sapiens
  chr8:8750520-8750659
  hyper
ccgccacagcctcgcggtcttcaggttgccactgtccatcccagccatggcggggccccgggccgacagcctcacgcggacgcgggagcccgcagctacatgccgcgccgcgccccgggccctccggctcctgcccctg

SEQ ID NO: 223306 - DNA, 462 bp, Homo sapiens
  chr8:8820810-8821272
  hyper
tggaaaggaaccaggcgggctgaggaactggcgcgccctcgtccgcccacaagtccttggaaagcgcaggcctcgtgcgctctccagcgcccttccagggcgcaagggcaggacaggtacatcccgcgtgctgcggtggcgatcagcgcggacacggagcctggctccacccgtccgcccagccttggggttctgccagagcgccgggcgcagagcaagcgggtctgagctccagcacctttggcagctcccggccccggggtgcgaacggcggccgtggctcaccgcttcaggagcaggcgaccaggacactaggaagagaagcccggaccagggctagtttgtttccccaactcctctggccagctcaggttcttaaacccgccgtgcaacagacgcaggtaccggctcagaaagctcagtcagtggtgcaggaagcctgggtcgcggtgcatcgtgttt

SEQ ID NO: 223307 - DNA, 180 bp, Homo sapiens
  chr8:9761081-9761261
  hyper
aaaagcggcgcgtgtgcgtgcgcactgacagcggggagagggatgggggtggggaacgccggaggaagggaccacagcatcctccccgccgcagctcccccaatcacacagacaatgagataacagcgacgtcttccaaaggctctttgttctcccccatcctttcgcatccaggctttt

SEQ ID NO: 223308 - DNA, 180 bp, Homo sapiens
  chr8:9761468-9761648
  hyper
ccaggaaactgaaggggactaggaggaggaagaagagagcgaaggacaaggagagcagcggggactcggcagcggcagccggggcagggcgcgcggccgccgcctctttacctccatcgctgagtgggggcgcagccgggccgggcgtgccgcaggggcgagttgccgcggtccggggct

SEQ ID NO: 223309 - DNA, 125 bp, Homo sapiens
  chr8:9762660-9762785
  hyper
ccgaataccctcagcgttccgcacgccgggcggacgcccttccgcagcggccacgcgtgttctgggttcagcgctcctgcgcgtcccttctcgccgaacccaaggtgctttgtcccggcggccac

SEQ ID NO: 223310 - DNA, 840 bp, Homo sapiens
  chr8:9763745-9764585
  hyper
gccaaggccggaggtggcgattcgcacccccacactcacacgcgcttccgtttatccgtttctatcccgggaaaagggggcgcctgcccgagcccacgcgcgccgccgcatctgcagcggtcggcgccccacgctccctgaacgccccccaggcggcaccagtgccgggcagagtcccctcggcggccgcgggcgtcaaatcgacacctgactccacagctcccttccctctcctcttcttccacctccccgggggtccaggcaccgccgtgcgtccactcccggtctccacggcttaggcagacggagtgggggactccggggacccgcgcgtcctctcctcctcggccctggcgggaggagccgggctggggtttccgcgggccgcggcgcgttttagggctgccggggactgcggcggatgcggttgacatcactgcggcggctgccgggccgctgcggcgacctgagcgccggtgcagcctcccccaccccgcctgggcgggcgtctgggcaggacagctgcggggggttgggagaggagtcggggagagggggacgatcgccccatcccccgcccccccgcagtcaaggtgaacatgaaggagagccggcgcgcgtgcccgcgcctgggaggcgcgcggccccgcccctcccggagccctccagcgcgcccgggccagatggacgcccgagattagaggcgcagaagtgcgctccacgacgggcccacccgtcccgcggacatcagacctacttcggggaggcgccttttgttgtggtggccgtggcggtgtttgtgtctttccgggagcacagggtgagcttggccttcaggaa

SEQ ID NO: 223311 - DNA, 185 bp, Homo sapiens
  chr8:10058672-10058857
  hyper
ttactccagccccaccgtgaccctcctctctgctgctcagtgtagtagcagctggattagtcagtagaaacacttgatacgtcagtccagatccctcaggagcatgcggtatgggttgggttggcatggggttaataacatgacccgatgagattgtacttcttgatgaccggcagttctgagag

SEQ ID NO: 223312 - DNA, 360 bp, Homo sapiens
  chr8:10587292-10587652
  hyper
gctggcttttcccgcttcggtattcctagtaaacgcctgttccacccagcctcaaacgtttccgtccctgccctgtccatgcacgccggtccctgtcgccaggcgtcctggcctggccgctgccccgtctccccgccccctggggcgccgatctccgctcctgtcccagcagaggagcctccctgcccgccgcgcggtttcactttggaccgcgccaagtgcccccgctctgaatcctgggcaccgcgagcacccacgctcgcgcagatggccagccacgcgggcacgaagagggccctcgtcccgcgtgccgggtcttccccaggctccgcgctcgcacccgccctgcagtgccgccag

SEQ ID NO: 223313 - DNA, 360 bp, Homo sapiens
  chr8:10587749-10588109
  hyper
actgccagccgtttcctctcgtccttggcccaaaccatgaaggcgttcatgggccgccggatacggctctcggagcccttgtcccccgggggccgggggacggccggcggcgattgtccatccgacagctcggcgtccagggccgggcactcgagaccctcgggccaagggtaggctcccagcagcgaagccatggccgcacgcgggtcgcctcgcttcgcctggcggggcaggcgcggacctggccctcgcacgggtcggggcgtccaacttggcccgcagccgcgacccggcccctgatttatcagcttcgggcggccgcgtcctccaatgactctccaaggcggcgcggcccctccc

SEQ ID NO: 223314 - DNA, 300 bp, Homo sapiens
  chr8:10873482-10873782
  hyper
gggcagcagggctcagacgatccggctcggtttggtcagcagacccccggtaacgccccgcaccgtcggcgatccctgcccccttccactgcgcccccacaagccccgagctcgccagtccttccccgcggcgctccgctctgtggccccctcgcatcccaccgtgggggtgcagctcccctggcacagcccgacggtgggagagggcggccagctggactaaaagccccgtccccgggcgggaccttcctccccgcaccctgacgcggaggttggccgggggcctctgcgtccctctgc

SEQ ID NO: 223315 - DNA, 1045 bp, Homo sapiens
  chr8:11058124-11059169
  hyper
gccagatccacacggagaggcgacacaggcgctgcgcccccggcgtgggggagaccctcacgcctgggccaccgcgggccgcgccgtggacgtagccggcccccatcatgggggggccccggctggtgagcccctccacggcgcccagcccgccgcccgtgtagtcctgcacgaaccagcggaagctcaggctctgcaccagcagcgacggcaccagcacgaagaagagggtcagcccgaagtagacgtagtcccccttgcggtagtagtcgagggccagccacaggtcggtgcccacgtccccgaagaacaccagcagcgccagcacgatccacaggcagtcgagccacggccgctccacctgcggcggcggcggctccggccgcgcggccgagggcgtcgggggttggcggccggcgccgggggccgcgggaggctgcagcggctggtcccccccgtcggcggcggcgctgcggcgcggcttcctgcccaggagggagcgcaggcaggcggagcggcagccccagtagcacgaggaggtgttgcagcagtggcagatgtgcatcgagctgctctcgccgggctcgctgccgtcgccgccgccgccgcagccgcctcccccgggctccccgtcctcctcgccgccgctgcccaccgcctcgtccaggttgtgcagctgagcgaagcccacccccacgccaccgccatcggatttcgccgccatcttgactctcttcccagctccggaggttgggggggagggacggcggggggggggggaagaaggcagggaacggggagggggggaaacgaatggagaggaaggggggcggggaggaagcgggggagcaaacgaacgaggggggagtgggccagggaaccccctccgcttccgggtagttggcgtcacttccgggcgagccccccaatcgcacggcgcccgcagctccccagccctaccctcccggccaagatggccgccctcctgtgcctcagctgctgggcgggggaccggggggttctccccgccagggctccccttccc

SEQ ID NO: 223316 - DNA, 129 bp, Homo sapiens
  chr8:11204526-11204655
  hyper
ttcttaagctactgcgcgcaccggcgtcccgctgggggcgcgcgagccccacccccagagatgctgactcagcaagtcgggaggggttgggggtgggacctgccaatctgcatttccaaccggcgccca

SEQ ID NO: 223317 - DNA, 780 bp, Homo sapiens
  chr8:11204763-11205543
  hyper
cgacctccagaccctcaatcctgggccagctacaccgcaaacctttccagctgtctctcctgcgccctgcgtttcttccccacgtcacttgccagggagccgctaaacagcaagaccgcgcgctctgcggctccagagtgcggatttcggtcgcgtgcggctctgaccgcgtcgccccatccctggcggggccacgcacggacgccatggctggcgccgcggagccgggcgatgcgcgcggactctcccggggccctgactgtccctgagtcctccctgcggggggcgtgcgcggcccgccccccgcggcgccacgcggcccctcctcggccggggattggtgcgccgggcggggcggggcggggcgggataaaggcgcggggtctggctgcgcggggtctgcgggcagctccaactctgggttcgtagtttgcgctgggtgcgcaggaaggtcagtgtgggggtcgcccgacatttcccccccgcggaggtgggagccgagccacatcttggagtggggactggccgcggagcgggttgcccagggccggccgaggtcggggcgagccctgcgcggcgctggagactctgcattcccgggcgcgcgcagggtccccggccgtggtcgcagagtcaggaggggcggctccggagcccggcgcggggagggcccaggcgcagtcggggttggcagggcgcgacactcgctcccctccacttttgaaagggcttcccacgccgagaagaggggcgggcatggccggcccggcgaaaccggtt

SEQ ID NO: 223318 - DNA, 449 bp, Homo sapiens
  chr8:11550051-11550500
  hyper
tgaatctgatccttcgggccgcggcggctccgcctgggagggcgtggcccccgcgctggggcgggaaccggcttctggggacccgcggcctctgcgcctcagccgacctccaccgcgggtgcgtgcgggggtgcgggggtgaggggtgcggggctgctccgtcgggaggctgggagggagagcaggcgccgggacccacgcgagggcgcggacggacggggggcgggaagcgaggctgccgaggggaggaagcggggccggcgcagcgggcgccaggccgggcagaggcgggggcggccggccgggggctgaccccgagcgccgccgagtttgcgccgcccgccgccccgcgctcgcctccagccgcctggggttccgcggcggccgtcagcgcgcacctcatcaataaggcctgccaggcgccggccccgcggccatccatcacccgg

SEQ ID NO: 223319 - DNA, 147 bp, Homo sapiens
  chr8:11726004-11726151
  hyper
tgcctgccgagttggcgggggtggggtggtggagagggcgccgtcgcttatttcattcattcagaagccgctgcagaggctgggggtggcgaggctgtggaccccacagaacagcctttagaagggccactttgttgttcagagaac

SEQ ID NO: 223320 - DNA, 1201 bp, Homo sapiens
  chr8:16884158-16885359
  hyper
gccttctcccatcaaaagtccggaagctgcccttcagtcgtcaaagtgtttgccttaatttgcaatcgttatgacttgagccaaatgcttatacctcatttgtgtcgtatatgtgaagatacaattgcaaatcgttcacgaccttgagtcaagaccttgagtttcctgaggtcaggagaccgttagggaatgtgagtgtcccagacgggcgctgagcccagctcggagacccaccccgcccgtagcagcggcgcgggccccagagagccccgcactcggccgcgcctcagttacgctgactcggctgtgcccgcagtgtcgcgctgtcgcgtagccaggtgtcgccgggctggcgcggttatttatgactgcgtggttgggctgggggttcggggccggggagcagccgggatccgccgcctcttccatgatcttcccgggccgaaccacgggaccgctacgctgaaggtggcgtcgcgggtccccggggccgcgcgagtgtaggggtcgctctcggccggccgcgaagctcgcggcaccgacttctcgcgagatttcggcgacccccccccccgcccccgcccctccgttctctgccccctcccagctctggtgtgggcggcctccgctatggctgcgctgcgaaggctcttgtggccgccaccccgggtgtctcctccactctgcgctcaccagcccctccttgggccgtgggggcggcctgcggtgaccaccctgggccttcctggccggcccttctcctcccgagaggatgaggagagggctgtggcggaggcggcatggaggcggcggcggcgctggggggagctgagcgtggcggcggcggccggcggggggctggtcggcctggtatgctaccagctgtacggggaccccagggccggctcgccggcgaccgggcgaccctcaaagagcgcggccacggagcccgaggacccgccccgcggccgggggatgctgcccatcccagtggcggctgccaaggagacggtgagtgcgcgagcgcgcgtcacacctgcgcgggggatgtgaccttcgtgccgggtacgcaggaccctggaggctgtggggacggtgcaagcgctgtggccgcgggtgaggaacttcccgtgagcgaggctgacacctaggccggacagcctaggatccggtcacccacgtattgggaagaccagtgatg

SEQ ID NO: 223321 - DNA, 240 bp, Homo sapiens
  chr8:17434563-17434803
  hyper
caggagaagtcacattacacagagaactaaaaaaaaaaaaaattccccaactttttcccccaaaccttgttcctcctgaagaaaccgaatcctcccgcttcggcgtcccaggagcccgcccctcgcccgccgcctcccctgcgtccccgccccgcgcagccgccgcgctcctgcgctccgaggtccgaggttcccgagatgaaggtctggctgctgcttggtcttctgctggtgcacgaa

SEQ ID NO: 223322 - DNA, 180 bp, Homo sapiens; identical to SEQ ID NO: 201321
  chr8:18870741-18870921
  hyper

SEQ ID NO: 223323 - DNA, 180 bp, Homo sapiens
  chr8:19797331-19797511
  hyper
ccgccggggaggttccggggtgtgggggccgggacggcggaggcggggagtaagggcccggctggcggtgacctgcagtcacctctctgccggaggggccctggaatgaaaggcgcgcgggccaaggtgacctcgccttggttggcactgcggctcagcccccgcccggggactcgcggg

SEQ ID NO: 223324 - DNA, 480 bp, Homo sapiens
  chr8:19797597-19798077
  hyper
ggcccctcgctccgctgtgggagtggcagtgggtgtcggggtggagaaagtacgcgtggcgcggagtcctggggacgcggcgtcccacccgctctggggagccccggactctctccagcttccaggctcgcatgcccctcttttcttagtgccctgagaacccagcgaggggctgaccctcccgaaaccgtggcgcagccaccagcaatctgtggtcgccgactcggggggttgccaggtctgcgtttggccaccctttctgtcctgggggctgaggtcagctccgggcgcccggccccgccgcgcggctgcgagcacgtggggttgacgggcgccgcgtggaggcagcgagcacaacggtggtcaccgccgccagggaaccgcccgctcgctggggtccaggcgttcggggccaaatgagaatgtctcagacctgtccgcaatggaggcagcctgcttaattcgaacctcgattcagta

SEQ ID NO: 223325 - DNA, 944 bp, Homo sapiens
  chr8:20160737-20161681
  hyper
tttcaaatctctggctgcaacgcaccggtgtcctccccaccggtgtggacacagctcatctgcaaagttccaggcggcgaagttcagcggcccggaccgaccgccggaccctcttcctgcggcccctgctcctgcggcctcgcgtccccacctcccacttcttcacctccgacaccagtgtcacctaacactgacgtccccgccaggatcagcatcggtgctgggaatagacgaaccccgtctgcaggagacacgaagacaaagacaggaggacagacgcacagtcacctcctctgggccgggccggagaagcggcgcccaccctgcagaggggagaccctgacagctccacgcggagacaaagacacctcgacagccacggacacagacagacaaagaccgacggacgcgcggacgcacggacggtccggcccggcgaggggaaagcggtttcccgcagccagggcagcagaccctccaggggcgaggagatccccggccaccgcaccttacctgccccctgcgcctcgggcgcacttgagactttttttttttcccagtgtttcccggtgtgttcccgtctctctttttccagagctgctgagcgggccgggccggtcccactgcgcgggatgcagctcccggctcccactcactggccgaggcgggcagagaaactttcggcctccccgcccggccgctgccaacccgccagctccaggcgcgccggcctctgcgcgggtcccggagccggggcggggcggggcggggcggggcggggcggggccggcccggggcggggccagagccggcgccgctgattggcagcgagctgccggcagcctggtctgtgccgctcggcggcctttgttccgggctgacagctggggctgctcgcgacctcgcggctccttcgcgcccgcggcctgcgcggggtcccgggt

SEQ ID NO: 223326 - DNA, 45 bp, Homo sapiens
  chr8:21868699-21868744
  hyper
gtcccacaaaagttcggaaaatagtagaaagggggcgacgaatgg

SEQ ID NO: 223327 - DNA, 124 bp, Homo sapiens; identical to SEQ ID NO: 201326
  chr8:21906319-21906443
  hyper

SEQ ID NO: 223328 - DNA, 420 bp, Homo sapiens
  chr8:22408681-22409101
  hyper
cccgggggggccgctcccttgggctgatttcctccctgtgcttgcacgtgtgtgagcgtccccacgtttgcagtgtacgcgcgcgtgtttgtttgcacacgaccggccgcgcgccgccgcaggcacaccctctcccccagcgcggaggggcggcggggccttcccctggtccgctccgccactctgcctgcggggcgccctcatctcgctcccggcctgtccgtctctcccggcttgcccagttcaccactcctgcccccttgtcctggctccgcccggttcatcgctcctgcccctgtcctggctccgctgcgaggccgctcgcttcccacactctggaaatgtcgctggaaactctgagtggcccgtgtcgggccgcccgacccctccccgacgccagccctgcggtaggggccggga

SEQ ID NO: 223329 - DNA, 275 bp, Homo sapiens
  chr8:22409120-22409395
  hyper
gagggctccccggggaccctcggcggcccctcccggcgccgcctccccgccggccaggcctcctcggcagggggccaccagtgtccccgcgcgcgccccgacggacggagagcactcgcacgtccctcctctccggcccagccccggcccgcagtccagatccgagacccaaactccgcccgccccgccgcgcgactctcacggtccggcctccggcgcgcgccccttcggcctccctcttcctgcgccggcgcccggcccggcccggcccgtcc

SEQ ID NO: 223330 - DNA, 660 bp, Homo sapiens
  chr8:22436932-22437592
  hyper
tactttgccctcggagcgaaggaggctccagaactggtagagccgggccatcgggctgggcacctccccgcggcgcccgcagcgcggagtccactgaccggctcaaaggtctgggaatctcggggcggccgcgagccggcctcggggactggggtgggggcggtgctgggaacagaggctaggcctgggcccaaggggaaggcagccggggatggagcggacagaccgctggtgctcttgatagattctcgcagcacttgcgtccccagggcagccccaggatgggtgctgggcagggtggtgcccagcctggcaccgcggcttcctgcctggattggctcctggctccagagctagaggctcaggaaatcccacaggggtctgtctgcaagggcacttccttgcccagcggaggggctgtggatgggaggcctgtcaccccggctgtctgtcgggcagcatcaggaatctgggggtgggtgtgtccagcttgacagatgaaccctggcctccttgccctggcagccggcccctgggggaggtggggagcccggtcttgcccgtgtgatccactttgccaagaacgaggtgggcagctaggaggcccatgtgaagactcggcctcaccccaccagtccttcacctggccagtgacttaca

SEQ ID NO: 223331 - DNA, 217 bp, Homo sapiens
  chr8:22550331-22550548
  hyper
cgagtcgctgctgccggagaagaggttgagcgcgctggggatctcctcggggtacagattgtcaggcagttggtttagcaaactgctcatggtcaccggcagcttctcggcgagtttgccggtcatagcactcccgagctgccgccgccgccgccaccgccgccaccgccgccgctcgctcctaacgcagcttccaggcaagcggcatccgagaggc

SEQ ID NO: 223332 - DNA, 256 bp, Homo sapiens
  chr8:22550912-22551168
  hyper
tctgccgccgctgccgccgctgctaccaccaccaccagccccgccgcttcctagcaagctcactgctgcccaaaagctcccagccagggaactccaccagcctatttatctgagccccgggaaagctccgtgacgtagctgcccatatatggacagacaaagcccagccgaaggggcgcgacgtcacaatggaagctcctcacaatggaacattagaaagcaggaagcgggccgcagccaacgtgcggcgcccgca

SEQ ID NO: 223333 - DNA, 309 bp, Homo sapiens
  chr8:22925472-22925781
  hyper
gttccctacaaagccgactctttgtcccttccccattatcacggatacttgccaagaggtggcaagaaaggctcttcccaggccaaaatgcagctgctattatcaagcaggtcaggccccaagtgccacaactcccttctcctaaatctcgttttcccaaggaaccccaaacaatggcattggcgatgagcggccccgcacgcgtaggggcgcagccgctaaggaggggaaggggcctctccagctgcgcccgcgacgactcccgcgcacggaacggaaccactgggccgcagcgaccacaggggagtt

SEQ ID NO: 223334 - DNA, 711 bp, Homo sapiens
  chr8:23020919-23021630
  hyper
ttaacgttatgaacgaacgaacgaacgaacgaacgaaagaggcaaccgctctgtggcttcctgaggttcactccggggtttccatcttgactccctccctccgctgattctggaacttcctctggggcagctcagtgcggtcctcgccgcacgggacagccagggggagcgcgcgctctgctccctcgcggcccggtcgctcctgcccagcccgggcaccccactcttcccctgactccgacggcgggttcgtcctgcccagacatgcccggccgcaggcgacccgggccaagcatccccaccgtgtccccctctctccctgcccactcccggcgccaggtgcgctcttccccagccagggaccgcggcggagactcaccggcagcagaaccgcgacgatgaagacgacgaacttaaggatcttggggtccaggagccatggtctggttcccgacgctgtcctggctcctggatagcgccctgctcgagcgctcgaggcggtcgggacgctttgtccccaaagtcccatgagaagggaggagggtggatcgaaagcgccaaaaatcaatcagaaatcgtccccgtagtttgtgcgcgtgcaaaggttctcgcagctacactgccagaatagaacgtgctcctccgcttttataccccggaaaaaaggcgtggtcagttgtactcccttcccgcagtcacttccaggcactc

SEQ ID NO: 223335 - DNA, 194 bp, Homo sapiens; identical to SEQ ID NO: 201338
  chr8:23386092-23386286
  hyper

SEQ ID NO: 223336 - DNA, 240 bp, Homo sapiens
  chr8:23560427-23560667
  hyper
ccagggccagcacctgcgcctgcgaaaagagcacgcgcggcttccgtcgttgccgcgccttgggctgctccgagcggccaccccgcacgctgtcgccgctgttgccaacgccgcgctctggcaccctggtcccgccgccgaggggcgaggccgcgttcaggccgggctctaaaagcacaggaagggacacatcagcgcccagcctaaggctcacctgagcggttcctacttagttttcaa

SEQ ID NO: 223337 - DNA, 300 bp, Homo sapiens
  chr8:23567466-23567766
  hyper
cggtcacctctcggaggggcctggagtccctcctccctcctcctacttcagcgccagaagcattgaaagccgcccgcccgccgagagtggaaccggtacctcgaatctcgctcattccgggtcaattggaggcgcattagcggctgccttgcagtgcaacagaggctcgagtgacaggccacctgcctaagcgctggcgcccaggaaagccggggaggaaactaggaagggaggcgacagcagaaaagccagagagtccagagactcctaggcaggcctccgtgcagccccaacagcgtg

SEQ ID NO: 223338 - DNA, 180 bp, Homo sapiens
  chr8:25901675-25901855
  hyper
gtcccccctcccagagctcccggccgcctcgtcttcccgggcagccgctccggcttttcccgctcccctcgccgccgccaccctctggccgccggcctcccaggctccaggaatcgcccagcaagatgcgggaggtaggcgctcgcaggcggcgtggcgaagccaagagtggccaggaag

SEQ ID NO: 223339 - DNA, 314 bp, Homo sapiens
  chr8:25902015-25902329
  hyper
aacgcctacgacccaggcagttcaggaactcgagtgccggctgccgggtgagcgttcgcctgactgcagcgatctgcttgcccgagggcgagccccagcgcgcagggcctgggcgacagatggggggacagggagagagaaaggcacggggtgcgcggggggggtgcacacggagagacagaccgtaagagcgagagacagcataataattgcgcggccgtgtcgttacctctgcgcggcgacattagcgtccaccactccgacattccggacccaggacctgaccgaatccatctccgcgcccagcgatttct

SEQ ID NO: 223340 - DNA, 360 bp, Homo sapiens
  chr8:25905117-25905477
  hyper
caccagcttttctcggcggtaacagctgccacccaaattatgccccctcaggaagcgaatgaattgttcctttctcccagctccctgctgcccgccccaaaacagacggggccgcgctcggcgggcgcccctcctcccagccaaccccccgagacgcgctcaggggcctcggtgccccgctgggaggcaatttgggggagccgtggtcccgaactttgacagagtggggcttccccactacttgccggctgcgctaagggcgccccccgcggcagtgctgctgggagctccagggatggctgtgtggctcgctgcgggcgttgaagttccctgttggccaggctgaagtgcctgcgcgag

SEQ ID NO: 223341 - DNA, 335 bp, Homo sapiens
  chr8:25909334-25909669
  hyper
acccagggagagaatgcgacttcattcctaggaggctgtgctgggggctccgcgctgcgcgcggcagtgagtagggcgcaccccgaatgcaagtgcggttcgctgcgtggccgcgtgctgggatggatcgcggaactcgctagataattgaagatctcgaggagctctgaaatggatcttcggtttctacgacaaacccccgtcgatgagtggttcacagagagcttggggagcccctccccgccctgcgccctcaggaagagacgcggctcgcctgacactactggtctctgtctcccgagagccagagccgagctccccgagtggtgctttcc

SEQ ID NO: 223342 - DNA, 206 bp, Homo sapiens
  chr8:26148759-26148965
  hyper
ccccagagccccggcgctagtgctcgaggctgggacactgctaggtgcacacagccgcggcctggcgcaggcggtgcggacagagggtatgccatggcgagacgctggcgcggcgcaggccctgccggccgggacacggagggcggggcacaggcgcagcaggaagggggcgtggccaagagccgcccggccgctcccccgcccct

SEQ ID NO: 223343 - DNA, 180 bp, Homo sapiens
  chr8:26372013-26372193
  hyper
gccggggctcggggcaggtggtggctcagcagcgggacgtcgcccacttgggcccggacccgcagccgccgtactcgcggcagggccggcgcgccggcggagagccatctgttgaatcgggccggaaggtggagatccggagggcctcgggcaaagaagccctgcagaacatcaacgacc

SEQ ID NO: 223344 - DNA, 404 bp, Homo sapiens
  chr8:26372392-26372796
  hyper
cccacaaaggctgcccgcgtctccttgagcttgagaggtggggcgtgggcatagggaatgggctgatcccctgctggggcgggcggtggtcgtctgggagggggttggccgcggttccattcttctgaaaccctcccgggcggcttccgattgcagctgcggctgggtgccccaccctttttttgagcggctcagagcgtgcggtggaggctttgcgtgaaggcccgcggctccccggtggtcgggaggggcgggggttcggacggccgctccctacagcctccgcccgcgccttctgcgctcacgtcccgagctccgaggccaggaccatggtcagcgccccccggaccccctccgagcaccgcaccgcccttgactcctgctcgcagcgtgagaagagccag

SEQ ID NO: 223345 - DNA, 64 bp, Homo sapiens
  chr8:26435020-26435084
  hyper
ccgcggcggcctccgcggattggcgcgcaggcgggcagggaccggggcgcgcgcaggcgagtgc

SEQ ID NO: 223346 - DNA, 105 bp, Homo sapiens
  chr8:26436194-26436299
  hyper
gactcctccagcagcgatggggagatggggacttggatcctccccgggtcttccgcccccacccaaaaagggctttctggagccttctccgggtccttggaaaaa

SEQ ID NO: 223347 - DNA, 383 bp, Homo sapiens
  chr8:26436415-26436798
  hyper
aggaaggcggggggcaaggcgggggcttcttgttggccaggaaccggttttgggtgccccccccccggttttctcgccctgtagttcggggctggggccctggcggggattcgggctctttttcacgtctcttttccgccccttctgccgctcaggaggcgtccgtgttggtgcatacaaagcggactgcagggtgggcgcggggaccgcggcgagcggccgggcgctaatggcgctgcgcgacgcgggagcagatggcccggccccggccagacaatgatcgcggcggccggagggctcggcgcagtgctggggcctggacttgttggtttgcaaaccacggggaaaacgtctgtgccgtgaattagcgatgcctcagagat

SEQ ID NO: 223348 - DNA, 78 bp, Homo sapiens; identical to SEQ ID NO: 201364
  chr8:27168528-27168606
  hyper

SEQ ID NO: 223349 - DNA, 217 bp, Homo sapiens
  chr8:27327235-27327452
  hyper
gggatctccttcctcgggccagcggtgggaagacaggcgcaccacatcgatgagctgagcgatggacagtccaaagcgcacaatcaccacgtctgaagtgttgggcaccgggcgcgcccagcggttgtagccccggaagaggtgtttgaagagccggtcctcagtctcggtatgcgagcctccctgcggcaatgccgtgggactgggagaggagagt

SEQ ID NO: 223350 - DNA, 152 bp, Homo sapiens
  chr8:28242733-28242885
  hyper
gggagctggccagggctgcccaaaaccgggaggcggcggcggccccccttcccgctggccaggtgggcttctttaggtctctgagtcagttccaaagtgaaggcgctgagccctgcactcccaggcagggaagaaaacgctgccttggaaat

SEQ ID NO: 223351 - DNA, 78 bp, Homo sapiens; identical to SEQ ID NO: 201368
  chr8:28258795-28258873
  hyper

SEQ ID NO: 223352 - DNA, 288 bp, Homo sapiens
  chr8:28748909-28749197
  hyper
tgtttcttaatattttattccggaaccgtgttttggttacactattggggctactttgaaaggcgtcctccacccaccttcaccccgaaacagtaggtagaggtatcttgtcttcgtgtgaattagatgaataattgctgaagattcggggggcctggggtgggggtcgggagtgctggattgtgtacgcgtctgtgtgtgtctactaaggagacggaatgtctgttatgtatctggagatagggcgacttattttcgtagcaggaggaactgttggaaattatttgc

SEQ ID NO: 223353 - DNA, 480 bp, Homo sapiens
  chr8:29206314-29206794
  hyper
tgaactgcctaccgggctcggaagcgcagaccctacccgcgcggaagaatgcgcggaatgcggcggcgggaggcggaggcgcagcgcggcggggggcgcccggaccccacgcgccctgcccgctccctagcccgagggccgcggacccaccctgccctgcaggtgtggcgggcgccaggtccctccagggactcggacagcacgcgatttttccaggatttccgactaccaaatgtgacaagacagtctcgccgccgagagtttcgccagggctcgctaaaatccggcacgcgccgccatcagatagtcgaaaatccgggctgaacaaaaggtgatcattctccgctgcccggatttgcaggcgctagaggaccggttccgcccggcgtcccccagatacccagtccttcagcctcccgctcccagagcctggatctagcccgggacggggattggccaccttccaagctgagcttggag

SEQ ID NO: 223354 - DNA, 1320 bp, Homo sapiens
  chr8:29206910-29208230
  hyper
ggcgcccacccctcttcaccttttctccacctctgggattctcccggtccggctcagtgtagggccccagcacgccaaaccaacaggcctatcttgtccccacgcgccccgtggtacttggaaactgttcccgggactcaagatggaccgcgcagaggagtcgcttcatcctcgaggctaggaccgttaatgtcaataaacggggcctcgctaggacggtgcggaattgcaggtgaccggagaaacccgtccgcactttccctgaggacttgaacctcgcacttgcacagaaaccttgcaaacccctacacaccaacacacacaaaggggcgcgcggggatccccgcaaccacgaatcacgccggggactccttcccgtgccaataaggcgcaggccgccaagaccccctccatctccccgactccagctagcgcccggagccctcgtttacctttgagcaggcagatgtcggtgcgctcggcgttgcggcgcagcgcctgcaccaccagcgacacggtgctgtcctcgcggaggctctcggcgcgcgggctgcgctcgtcgtagacgatgaccgccgagtagaggccggagcgcaagcgggcgcgtacctcctcctcggcgggcaggatctgctccaggctcacggagcccttagcccgccgccgcacgatggtgttacagcgcacgttgaccgaacctaggatgtagcccgcgctgtgcgccaggaacggtctgcagtccagcagcaggcacttgccgccgctcggcagccccagggtgccgtggctgccgctgccgcccgcgccgccgccattctcgtcccggttcatcagccttttgagcacactgcagtccatctcccgcagctcctccatcgtcaccatggtcgccgggaaccgaggcggctgggcgcgcgaggaagagaagagaacccgggccgcctaggctgcagaaaggggcgggcgagagctaagaagggacgcctgcagaagtggccgcaaacttggtcctcaagggctcccgcgggagagcctcttcttccctgtccccttcctcccgcagcctcgcggtcacatagcagtcggagcggcctcgggcgcccagccgggcggcgcgcagagcggagggggaggcgccggtggaggagagtgtgtttacgagagaggaccgcggactcttttcggcgacggcctcccgtgtatttttgccggtcgcgcggctcctgtcgccactggcgccagcgctgccctgcctacgctcctccggcgctcagcgcactgccccagccagagttttctcctcggcttagaggtttatta

SEQ ID NO: 223355 - DNA, 180 bp, Homo sapiens
  chr8:30241852-30242032
  hyper
cgctgcccctccccggcgcgcgccatccggccgccggcccctcctcccgcggggggctccgtcccgcgccccgtccctccgggctgcagccggcagcccacgtccagggagggcggagggaggaggagaggcgcggagaggagggaggggagaggggagggaggaaggcgagagaaaggg

SEQ ID NO: 223356 - DNA, 480 bp, Homo sapiens
  chr8:30242849-30243329
  hyper
ccacgcgcgtctgcgggccccaaattgcgtaactccaaggacttttcggagacttttgtaagtataatgctcagctttgtttgcccgggatttataagtggaaccgagagctgactcctgggtgacctcagataatcgggactcggagggtcaggacttagggccggggctggaaattgtgtatggattcagggtcggggggggagcagtttaaggaagaaactcgggggaaagttctcgttaaaagatacctctattccctgccccctccctttccgtgttaaaagttcttggtgaaatatctttctagccgaggttttttggattaatagataactcatcagccacattcttctctgctgagtcaaagaccccgagcctgggcggtgaacgcttgtgattttaggggccgtgcagctgaggggagcagagtaagagggttaaaaacgcagcaattcaccaaatgctcatcgagggtat

SEQ ID NO: 223357 - DNA, 540 bp, Homo sapiens
  chr8:33371767-33372307
  hyper
tgcaatactttagctggtttctggagctagcgttttaaagcctgtagccacaagcgtttgaaaattcaaattctagcgtcaaggtagaagcccccagctggcgtctggggcagccctgagggaggtgggtcgtcgggttggcggatccggcttgggcccgccccgccagtgtcggcgccgggtgcgcagggacagcagagcgctgtcttgggcatgggtcgcaggcggcgcccggaacgggccaggggagctggaggctgcagactcgggctcggcgggtgtaggaaccagtggtgtttgcttgggttttgagaaggcgcgagaagggtcgcgcctgtgcgaccgccctgtgttgggtcccccacgccgcgtcggcattgcttgttccctcttcctgcgctttcctggagggtagaattgcgtccgattggccttcagttcccgaggagctgcttccatttaggaccttgtgactctcatagcttccacggtttcgcaggagcccgaggaggcaaacttcatttgtgccactgcacaggc

SEQ ID NO: 223358 - DNA, 180 bp, Homo sapiens
  chr8:35092997-35093177
  hyper
gttcggggcccggcagcggcgcgagggctgggaactgcgcggcggggactgcgggcgactccggcatccgcgctggcggcagcggtcgccgcgccgtgggaagctatggggacgcgccctttctcggggtgcccattcagcggcggctcggagctccctgccccgctgctttaggaagcg

SEQ ID NO: 223359 - DNA, 273 bp, Homo sapiens
  chr8:35093226-35093499
  hyper
gggaccctcatcgccgaccctttcccgggctcccggagcgtgaagaagagccgccctccggaacgcggcgaggagcatggggagagcggcggccaccgcaggcggcggcggaggggcgcgccgctggctcccgtggctggggctgtgcttctgggcggcagggaccgcggctgcccgaggtaagcgctgggcggagcgggcagctgggggcgagggcgcaggggcgccagcctgacggagcgggacctgcaccgatggcgttggcttcccaac

SEQ ID NO: 223360 - DNA, 1140 bp, Homo sapiens
  chr8:37552565-37553705
  hyper
cccgcgcttggtcgccgaccatgtcactccagaagggagacaaacttgcaggcttcagacaagacgggctcaaagtagttggagctgcctacgccgcgtcccgagaacagtgggtgcctccgaggctcgggcgcttccaagtgaacacaccaaggggaggccaagtaggggaaggagagcggggccgaggagagccggagcagctctggagaaggacccgggctcccgaggcgaggcctgcccccaggcggcctctgggagaggcttgaactccagcgtcccagagcccgcgccgtgcgatccctcccaccccaccccaccccaccccaccccacctcggacacacacggcgggcggggttacagcccccgccagcatcaccccccacccacccagtggtgagaagggagagaggagagagagcggccggaaaggaggacggggcgcagagctcagggtcccggagaagtcccgtcccaggcgggggaccccagggcgaggaaggcccagtcggggggaggggaggaatcccgggagcggccgagaccgaggcagcggcggcgcgcggcgcggcccctttaaggctctccccgcccaccgatggagccggcctcagcccgccgctctccccgccccggggtcccggcgagagctgcgattgggcgggcgcggcgatccctttgaagtgtggctgccgatcgcggctatttgacgtgcggctcgaggaaggcgaaggtttttgtgttgctagccggggccagcggcggtggcggcggcggcggaggcgtcggtggaggaggggaggcggcgaggaggcgcagctcccgctgcaccgcgatcgacgctgcggagcgagcccacccgccccgggagctcgcctccccggtgctcccccgccctccccgcccccccagcggcgctgcctcctccaaatgagcgattcgcccgctggatctaacccaaggacacccgaaagcagcggcagcggcagcggcggcggcgggaagaggccggcggtgccggcagcggtgtccctcttgccaccggcggaccccctgcgccaggcgaaccggctcccgatcagggtcctgaagatgctgagcgctcacaccggtcacctcctgcacccggagtacctgc

SEQ ID NO: 223361 - DNA, 660 bp, Homo sapiens
  chr8:37655519-37656179
  hyper
ccttgtcccttcaattggggtcatcccatccttgccccctggcctgccagcgccgcttccagccggtctccttagggcaaggggaggctgggctcagaaaagtcggcccttggaataccggcgctcctgggctgcaggagaccctggcgtccccatccctctagaggcccctctcccacggcgccgtttgtgcagtgagctctgtgctgggtcccgcgtccttgcctctcctttgcctctcctggaagtaactcgagctttggctgtttctccattgacttcgcgcaaagattgcgaagaaagaaacgcggctggggaagcggggttccctcaccgcagcccacccgggcctccttccgcgacttccctcttagtcagggcctcagtacgcctttgctttgctggcagcgagcgctgcagcgccgcagcccgaccccaagcctcctacaagggggtcgcaagtcccagcagccgcgcgagcattggcgacccctccccaccgcagagatttcctgcgccgaccacgtgctcgcagctccacgcacgccgtggatttgagggtcgggcccccgcggccgccgcttcctttcctgtcccaaatccagcctaagagccgcttccctttccctgtcctcctgaccccagtggcaaccgtttctc

SEQ ID NO: 223362 - DNA, 480 bp, Homo sapiens
  chr8:38325248-38325728
  hyper
cgggaagagcggcgggacgagcgcagggagggggcgcaggagacgcggacggagggaagggaggggagacccaaggggcgcggatcgcccgggagggagccaggaggtgaaaggggcgggcggcgagcggagggaggcgccggccccggctgggctgcggcgggcaaagcgcgcagccgggaggctccggcgccgggggccgctcgggacgccaagcccgccccagatccgggggcgccgcggctcttacctcgctcggcgtggaggttccgcctcgggagagtccgccgtggcttgtgcgagcgggcgtgtgcccgcgtccccggctccggcccgccgcccccgggctctgttcgggtcctggcggggtcgcaagagctccgcggccggcgctcgactcccggcggcgctcggtgctcggcgcctccagcccgggcgggaacaatggagccggagctggtgccccggaggcggggcggg

SEQ ID NO: 223363 - DNA, 180 bp, Homo sapiens
  chr8:38325889-38326069
  hyper
gcggggcgccccgagctcggaccggagaaaagtccttgggttccgcggcttttcaagcagcggcgcgctcgcggccggggaaggcgaggtcgccgcaatgcgctacgaggggtctcggtcccgtccggacgtggccgcccagctcccggcacacccgggttcctccgcgcgctgcggctg

SEQ ID NO: 223364 - DNA, 180 bp, Homo sapiens
  chr8:38614525-38614705
  hyper
tgctgccccgtgccacctaggagtttccttgccgggcgaggaggcgccgctgcccgggctccccgcagccccgcacgccccaggggctccgcatctccaggcggcagcacccgcggggccctgcaatccgcggagaagttggcggcatctgaagccacctccttccccgctttcccagcg

SEQ ID NO: 223365 - DNA, 340 bp, Homo sapiens
  chr8:38614823-38615163
  hyper
tgcagccccggccccaagttctgcgccatgggaggctcccactctcagaccccgaggggccgggaacccgccggggagaggcacccgagacccacggagaccgcgtgagtcccagagccctctccaagggccgcctttgggggtttgcgtgccagcccgggatggagcgcgctggggcccgtcccagaaaggctgggaaggtggggttcccgctggcggcagcggggcacgagcgctcggcagcggggcacgagagtttggccagcagggccccaggggcgtccggctgggagcgtcctgccaggaccccaccgcgaccggatcgcgtccgggcgtgacc

SEQ ID NO: 223366 - DNA, 780 bp, Homo sapiens
  chr8:41166351-41167131
  hyper
ggtgccggcgtggcagttcttgttgagcaggggcacccagctgctggcctgctgcttcacctccgccatggtctcgtgctccagcaggttgggcagcaccatcttcttgtagcccacgttgtggcacagccgcaggtccgcggggatgtccacgcactgaggtggcttggtgtagaagcgcccgctctggtacgggccgatgtccgactggaagctcacgtagtcgtactcgctggccgagcccacggccagaagcgccgcgcccagcgccagcagcacgcccagggctgccccgcggcggcccccctcgctgcgcccgatgcccatgccggctctgcgccctgttctccgcgacgtcggggctgcctccgccgcctccccgcgcgcgtcctgccgcaaacttccagggacctccggggacaaaaggcgcagtccccagcgttgcccggctccgcggccgcaagctgctgcccggtccccccggccagtggcggccctcggcctgcggtcggaggcggcgcgggcggggaggcggcgctgcgggctgggtgcgccccggctcccggaggtgcggcgagcaggaaggcgcggggcggcgggcgcgcggcactgactccggaggctgcagggctggagtgcgcggggctcctacggccgagccctcggagccgccccgcgcagccaatcagctcccggcggggcgagccgcactcgttaccacgtccgtcaccggcgcgggagccaatcgcctccctcgcgagcgggttcggtttactagaa

SEQ ID NO: 223367 - DNA, 1620 bp, Homo sapiens
  chr8:41753534-41755154
  hyper
gccaaggccgggaaagttggtcctagagcagcgcgggcctgccgggtgctgtccaaggtgctgaaaggtctctgcgggcagctggcgggaggattctgcgcgccctcagcctcccggccacccgctctgcccttccagcctgccgccctgtccccttcccggccgcgcagaagcctccgtccctcctctacgcccaccgagccttccccgctcgggtgccgccaactccgccgcaccgggcgccgcgccccaccgcgtcccgggccgcccgacccctgcccccagcagccacttgcaggtgccgcggtcgctgggctttcaccgccgccccctcctaccttcttctttcggtcacgggagcggtttctccgcttcctgttggattcctccttctccttctgctcctggagggcctgcgcctcgatgtctttgattttcttcagctgtttggccgcttgagccatggcgggtcacggcgctcccgtccccgcctcctggacccctagcgctcagcgatccccgaggcgacaccccctaagaaggggaagggggtctctgctccacagaggggacagcgttcgtggcgccccgagggccggctgctgcggggtcgcgggaaggcgaaggcagttccggacgcggagggcgaggggcggctgcccgcggcccgggatggcgctgccgccgcggccggagctcgcttgccggcgcccgggacgggctctgggcagggcccgccgcctccctccctccgcctccctccctctcctgcggcggcggcggcggcgaagcgggggggcgggggcggggaggcggctcgtactgcggcggcggcgggcggtgagcggccgcggaaggggcggattcgggcgctcagcgcgggaaggcccgggggcccggccggcgcggcgaggctgggcgcactgggcgtccgcacggggtcatggcgagcgccgagcttccgcctttgcagagccccgcgccgtcgggcggcgggaacaaagcggccgctctaccccggaccccgctgcgggccgcagggccaagccgggggaagaggggaggctgcggcgggcggcgcgccccgcgcccgggcgacccggcggaccagcgcgcctggcggcggcgagcgcggcgacatcgcgggagcggaggctcggcctagagggcgggcggcagagggcaaggaccgggcttggggagcccccgggcggtggccgctgagggcccggacgcgctactcccgagcccggggtgcggttcctccccgggcgccctcggcgtggggcgcgcgcctccggggctccctggggaagagccggttccccgcgccgcacgctgggagcttgatttgcccctttcagaccatgtgggcctttcatttgcatatttccgaattatagatgaaaacgtatccaggatcaagtgaattgttttcctttgagtcctcttgggacagaaaaggaagtaggtccccgctccagccccgcccgtcccccatccccggcgctcccgcgcacgcctccctggggacgccgcctgcgcccgtgccccgcggggaagagctgcacttgggtccgcagcgccagcccagcctgcggcaggcggagggggcctagg

SEQ ID NO: 223368 - DNA, 34 bp, Homo sapiens; identical to SEQ ID NO: 201399
  chr8:42040329-42040363
  hyper

SEQ ID NO: 223369 - DNA, 380 bp, Homo sapiens
  chr8:42996735-42997115
  hyper
tctttcccctctcgcgcccttttcttggtcagaatacgaagttttagtgtctgtgtatggagttcaaacgacccctcctctccaagcagaagctggaggagaaaggcgttgtgaattttggaaaagcggctcagaggattacattttgtgcgatccttgatccacccaaccttcatctcctgcgctcccctcctttaaaattgcaaggaccccggggaggttatgtaatctgcctgatcacaatttgtcagggactgatcccgccgaacactctttgcattttagcgccagtattagcttatcaaagggcacttacttttagagagaggtggtttgtaaatagtaatcacacgtagtgaggggaagccgcgttgggaccg

SEQ ID NO: 223370 - DNA, 300 bp, Homo sapiens
  chr8:48649775-48650075
  hyper
ggcggctctggctgcgccagggcagggcgcgctccgctccgggccgtcgggtctgaggtatgggtcgttgctgagtctctcccgccccggccgcgcgttaccggcagtctgctgtcccggcggccggcaggaagggcgggctgggcagctgcttgaagaactgccggaggccggccaggtcccgcgtgagctgctccacgcgctggtgcagcttctcgttctcagccgacagctccaccaacttctgctgcatctcctggttgcgccgcttggccttgtcgcggctcttgcgcacggcga

SEQ ID NO: 223371 - DNA, 300 bp, Homo sapiens
  chr8:48650137-48650437
  hyper
gcgctcttctcccgggcggggccgggcgcgggggtctgcctggggctgctgcgcggcggctccggcgacgtgggcggggtgggctgccctgcggccgccaagctcaccacggtctgtgcgcacgcggccacctgcgcgggcaacagcgagccgggcgcgtcgccgtcgccccagtcgggctcgcgcttgagcaggcggggagcggcagggcccgggcccaaggggcgcgcggggccgccgggaagaagctccaggggccccgcgccgcccgccttgtgattgctgttgaagaggtcggcg

SEQ ID NO: 223372 - DNA, 240 bp, Homo sapiens
  chr8:48650853-48651093
  hyper
gccgccccgagccttcccggggcgcgccccctctcagttcctccccggggccccctccccggccctggggacccccagcccacgttgcaggagggtgcccgcgctgctgctccctccccggcccgggccggcctgcgctgcgctgctgggaatgacactccctctgccagcactccagggccttctcttcttcctgtttgtgggcttggaacctcctcgctcctcggggttgggagtgaa

SEQ ID NO: 223373 - DNA, 481 bp, Homo sapiens
  chr8:49468663-49469144
  hyper
atgtattaggaacatttccccggtcggtcattagcgcgcgctctccccgcgcccagggtgcccccgtgcccagggtgcccccgcccggcgcctccgcggtcccctcccgcgcgcacctttccgagtgccagtggggcggccccgagaccgcaattgctctggcccggattgacgagcctccgatgcccatttactgcgcgcggcagccactctggagccgcggcacatctggatggagtcagctgcctagcgccaggggccagcacggcccagccagcggagcgcggcggtgagcgctagggaggccggcgcccgggccgcctccgcggccgaccccctgtccccacccgagcaggatttcctgatgtaaacacagcggctctgcgagaacagagctgctctcctgaatgtgtcatttagtgttctttatctgcttggggtcagcatagcgacttagaaaaacagcagtcttgctttgaat

SEQ ID NO: 223374 - DNA, 944 bp, Homo sapiens
  chr8:53852161-53853105
  hyper
gaggaggtttggggcgccgcggcgccacccccacccctcctcgggaccgcgcctatttctaaagttacacgtcgacgaactaacctatgctttaaattcctctttccagccccgtgagtccgcggcgacattgggccgtggggtggctgggaacggtcccctcctccggaaaaaccagagaacggcttggagagctgaaacgagcgtccgcgagcaggtccgtgcagaaccgggcttcaggaccgctgagctccgtagggcgtccttgggggacgccaggtcgccggctcctctgccctcgttgagatggacaacgcctcgttctcggagccctggcccgccaacgcatcgggcccggacccggcgctgagctgctccaacgcgtcgactctggcgccgctgccggcgccgctggcggtggctgtaccagttgtctacgcggtgatctgcgccgtgggtctggcgggcaactccgccgtgctgtacgtgttgctgcgggcgccccgcatgaagaccgtcaccaacctgttcatcctcaacctggccatcgccgacgagctcttcacgctggtgctgcccatcaacatcgccgacttcctgctgcggcagtggcccttcggggagctcatgtgcaagctcatcgtggctatcgaccagtacaacaccttctccagcctctacttcctcaccgtcatgagcgccgaccgctacctggtggtgttggccactgcggagtcgcgccgggtggccggccgcacctacagcgccgcgcgcgcggtgagcctggccgtgtgggggatcgtcacactcgtcgtgctgcccttcgcagtcttcgcccggctagacgacgagcagggccggcgccagtgcgtgctagtctttccgcagcccgaggccttctggtggcgcgcgagccgcctctacacgctcgtgctgggcttcgc

SEQ ID NO: 223375 - DNA, 384 bp, Homo sapiens
  chr8:53853385-53853769
  hyper
tacgccttcctggacgccagcttccgcaggaacctccgccagctgataacttgccgcgcggcagcctgactcccccagcgtccggctccgcaactgcccgccactcctggccagcgagggaggagccggcgccagagtgcgggaccagacaggccgcctaggcctcctggggaaaccgactcgcgccccatacccgacctagcagatcggaagcgctgcgactgtgcccgcaggttgaccttgccaagccctccaggtgatgcgcggccatgccgggtgaggagaactgaggctgagatcgccacactgagggctccctaaagccgaggtggaggaagaggagggtagaggaggagggcggtattgctgggaaccgccccctcc

SEQ ID NO: 223376 - DNA, 300 bp, Homo sapiens
  chr8:53853783-53854083
  hyper
gctgccccacccgagccctggcagtctggaacctggctggagtcggaactctccgcgccttcgaagggaggcccgaggacgctgccggcgcccccaggcgtcggctccgcgcggcccctgctgtagctggcgcacagccccggcgggtccccttgtcctccgcgcgctctgggaagacggtcaggcgcgcgcgtttggcgcccacccctgtgagacccgcttggcctggcgccgcgggcggggaccgctgccgaggccgccagcgcctcttcaactggggaaaacacaacaactcgggat

SEQ ID NO: 223377 - DNA, 180 bp, Homo sapiens
  chr8:54163352-54163532
  hyper
aacatgaccagcgagttgcccaccaagcccacgacgaacactacggagtagaccgccgtgatgatgaccgggatggccggggagatgtgcgcgggctccagctgcgcgtcctccgagccggcgctgccgttgctgtcgggctcggcccagccgggaaaccaggcgctgctgttggggggc

SEQ ID NO: 223378 - DNA, 300 bp, Homo sapiens
  chr8:54163580-54163880
  hyper
tggatcggggagtccatggtggggcgattgcagcaggaaggcgaggacaggcggcacctgcggcgctgcgggagcgaaagaaccggctggacgcggagaggcaaactttgcccgcgccctggccagcggcgctggggacccggagcctgcggactcccacccgggccgcaagtcgccgggggcaggacagggagaacggacttctcgctgcctttccggccagcaggcgcgccgctgggtgccagagaggggcgaagagcgctcgctccttctcccccagcccctgaggtgcctccctca

SEQ ID NO: 223379 - DNA, 300 bp, Homo sapiens
  chr8:54164031-54164331
  hyper
ggcgaggttttttacgggacgccctggtaggtgctgaaccgcgcgctcacgagtcccgctcagctcttggcatcacctgctctcggaccccggccccgctctccgcccgagggctgctgttccgccgagcgcagcccccgcctctcagcgcacgtctcccactactggcggcggctctgcggggcggggcggggcgggaccggcgggacgcagccgggacgcggctgggcgctgggggcctgcgggcggagagctcgtctggtgcgcccgccccaggccggcaggtccctgccccgcccc

SEQ ID NO: 223380 - DNA, 180 bp, Homo sapiens
  chr8:54792690-54792870
  hyper
acggggacacgcggtgctgcgagtccggagagctgggcggctgggttccccctcccgctgccccctggtctactcctttccccggactccggagtccctggagaaggggacgcggagggcgactgccgagggtctcagcgggatctggagtcaggggttagttcccccccttatcccccg

SEQ ID NO: 223381 - DNA, 1200 bp, Homo sapiens
  chr8:54792943-54794143
  hyper
accggaggcctaggctgcgccggggtggggcggggacagagctcagagaggcgccccgggccggggagaaggtagggggctgccctccagagacgcgcagtccacagacgcgaagctctggggaccaagcgccccctccatgcctgccgcccacccccgctccttcctcccgctcccttcattcacgaggtccgagcacgcagtccagcacactctagtctcgctcggccccgcgcgccgaggggaggcgatgacacagagggcttcgcggacgccctctacgcgcgcctggcttcgcatccacactcttgggacttgctaatgcggggctggagcagtggggctgcggccggggtggaggtcgcgccccgcgtggggcctcgggggtacccctagcacccgcggcggtggagtgcgccgccgctggagggaggcgagacgtgggattgcccggccgggtaaaaggagtgagggggcggggaggaggcagagcaaggggaggaagaggccgggagaagagggctagagcaaagaccgagagccggagaaaggcgaaaggcgcggtgagcaatcgccgacgtagagagggcagccctccgcgctgcaatattgagaaggcacccgcgggacgcatgcgcacggcggacggaggcgagccggccggggcttcctccccggccggcagggtggacggtgggctcgtgagtatcccagttcctcgaactctctttcttcgtctcgggctcgccctgaggcttcgtgctggaaagtggccgaggctgggaggggcgcgccgctcgtccggacctcagggtgtcgccgttgctgcggggcgggagccggtgcgagtcgggggttccttcccgcagtgcgagtttgggggagtggggctgcgagtgcgtccgcgtgcgaagaggggcatcgcgccaccaggatcaatatgtcccgggcctgccagggcgtccgcgattccacctctgcggcttcgcgtcggtgtcttggtggggaacgcgggagtctagtctttagaccctagaaatcgcattgaccacccgaagcgtatttcggaaagaccaggcgggtggaagcgtcggctttctcacgggatagggagaggacaaggaaggggttgggcgcccggggctggtggtttgagcgccgctgggaagggtaaggagacagagcctcctggaatcgtag

SEQ ID NO: 223382 - DNA, 600 bp, Homo sapiens
  chr8:55366393-55366993
  hyper
ccaaatcccctctcgctgtcgccctttttttcagtcctcacggggagaggccggcgcagcagtggagcaccgcaggggctggatcggacccgcactgcagcatctgcagggctccgacctggtgcgggcctccaaggcagggggcgcgcggcggcacagccggtggccgcgattttccgggccactccttccccccttacactcccctcccgcccgcgaccttcgacctccatcctggacccacggggtactggcccggggacaaggaggagacgttaaaggtatcaaggggcgcggcaccgccgcctagacggcgccgggacgcgaggtgcgaatcggcggcgtccggctgcgctgccctacctgggaggtgcgggaccctcggccgcgctccaccgccgcgcgccacctcgtgctggcctccgggaggcagccgcccgcgcacgatttataaatgcaaaggccttattgttgttctttgttcagggataccattgtctagtcatccacgggcagcctggagttttcccagggtttgcggcgcgcactcccctcccccgcccccacagacttgctctccagcgccaacccggatctgcc

SEQ ID NO: 223383 - DNA, 180 bp, Homo sapiens
  chr8:55367083-55367263
  hyper
atcacccagcctttgcctggtcactcaggggcccacggataagcgtggctctgattcctccaggtcagccccacggttcgccacctacccgagttaatttctgcgcccgctgaccaaaggccccaactggcaacgggcacagcttcttggtgcgctagtcgcttccttgcccagccttta

SEQ ID NO: 223384 - DNA, 1406 bp, Homo sapiens
  chr8:55371178-55372584
  hyper
tccaaagcagctttccgccttgctctccggctcccggattccccaggtggccgggggcgcgggtccaacggctctgggaaggcgacttcccggcacctccgggcggcgcgagagcacccttggccctgaactgggccggttgtgtccatccctcgaccccttccctagttaggtgtccttttctgtttttcgaacgaccgggtgatgggtgagcggaaagccgcttccaggagaccaaaagaaaggggtgcctttagaggacgggtgttccccaagggctcggactcaggagtcccagatctccctctttaacttcaccccggttgcgcaattcaaagtctgaggggggaggtgcgtccaggtggggccaggtggggcctggagcgggagcgcagccgataagccctgcgcccctctcccccttccttccactgtgcaggcaagtcgtggaaggcgctgacgctggcggagaagcggcccttcgtggaggaggcagagcggctgcgcgtgcagcacatgcaggaccaccccaactacaagtaccggccgcggcggcgcaagcaggtgaagcggctgaagcgggtggagggcggcttcctgcacggcctggctgagccgcaggcggccgcgctgggccccgagggcggccgcgtggccatggacggcctgggcctccagttccccgagcagggcttccccgccggcccgccgctgctgcctccgcacatgggcggccactaccgcgactgccagagtctgggcgcgcctccgctcgacggctacccgttgcccacgcccgacacgtccccgctggacggcgtggaccccgacccggctttcttcgccgccccgatgcccggggactgcccggcggccggcacctacagctacgcgcaggtctcggactacgctggccccccggagcctcccgccggtcccatgcacccccgactcggcccagagcccgcgggtccctcgattccgggcctcctggcgccacccagcgcccttcacgtgtactacggcgcgatgggctcgcccggggcgggcggcgggcgcggcttccagatgcagccgcaacaccagcaccagcaccagcaccagcaccaccccccgggccccggacagccgtcgccccctccggaggcactgccctgccgggacggcacggaccccagtcagcccgccgagctcctcggggaggtggaccgcacggaatttgaacagtatctgcacttcgtgtgcaagcctgagatgggcctcccctaccaggggcatgactccggtgtgaatctccccgacagccacggggccatttcctcggtggtgtccgacgccagctccgcggtatattactgcaactatcctgacgtgtgacaggtccctgatccgccccagcctgcagg

SEQ ID NO: 223385 - DNA, 529 bp, Homo sapiens
  chr8:55382715-55383244
  hyper
agaccaggaccgtcccccaaccgttcgcggccgcgtagccctgggcggcctgggcctgcccttccccgcgcagggctttccctcctgccggtcgctgccccgcacatggctctggtcgtactcccgctccactgccaccactgcccacgccctgcgtccccgtttgaccgcgtggagccggaccccgccttcctcgccccgcgctgccccaggcctgccccgcaccagcagctaagcgcaggtctctactgcaagcccgcagccccctcatcgctgggcctactggcgacccccggcgccatgcgcgtgaactgtgggcgacgggctcgcccttggcgggcggcgcgcgcggtttccagatgcagccgccgcgccggggcagctgacgccgcctccaaagacgcgccctgctggacggcgctgaccccacgcagccagcggagtctcctgggaacagcccaggcgccggtgccgacttcaacctctctgctcaggcctcttgagttgcgttaccagcttaccatgtatt

SEQ ID NO: 223386 - DNA, 844 bp, Homo sapiens
  chr8:56013636-56014480
  hyper
gtaaggagtaagggaggtggcgcctgctccgggctccgccactccccgcccgcgggccgggggtggggtggcactcggtttcccgcggctgccggccgcgccccgcgccgccgccaggggtgctgcgcttcccacctgccgcaggacgcctcgagggccggtgcggtgcccactgggctgccgctcctcccggctcagagctttccagccgccgagaacgtgcgagggaccccggcgtcgggcaggggcctgggccgcgaagggcgggagcgcctccgcacctgcctgagctcaggcacccccgcccgccggagaagccgggagccctcggaatgccggctgcctccaccgagggcgctggctcggggctcccagcggacccgcccgccctcagctgccggcgcggcaccaggctccgcgctccgagccccgtacgcctttctctcccctgcactctctggcaaggccgggcacgcccactgccgctgctggcctccgagcccgggcgcccgagttacacccattctccccaccatcgtcggccagagccgcgctcccagcccttctccaggtgctggcggctccgaccggaatacaaagaggcctgctcctccctggcccttgctgccgccacacccgtccgtgcccactctccgccgtcctccgcgagggctgcacgcagggacccctcctctcagcgcgctcctccccctcccccagtgtcgctcaaatccacccagcgttccgaaatcccgggagtgggggccttcgactgtcaccctcaggcccccttggccgctcctcccggcccttgggacccgccagggcagtcccccaacccccg

SEQ ID NO: 223387 - DNA, 1233 bp, Homo sapiens
  chr8:56014573-56015806
  hyper
gaagggatgaggtcatcctctccctcggagtcagctggtggaggagaggaagcgggaggagggagcgcgcgcgaggggaggagaggaatgtgcaggtccgaggagcgccgcggcggccgctgctgctcctgctgctggcggcggcggcggctcgggcggcagcagcgaagccgggacggcgaggagcgcgggcggcgggcaggggcgcgcgcggggcgccgcgagcagcttggctccgcgcaggcagccaggcggcgctcctgccggccccaggcgcgccgctagcccggcccagcgcccagcccggcgggcggcgggcggcggcggacggcaggcgagccgacgcaggagcaggaggagggggagccgcaccgcctgggagggaagccggggcgaggcgaggaggtggcgggaggaggagacagcggggaaaggtgtcagataaaggagggctctcctccggtgtggaggcatcatggccgctaaatcagacgggaggctgaaaatgaagaaaagcagcgacgtggcgttcaccccgctgcagaactcggaccactcgggctcggtgcagggattggctccaggcttgccgtcggggtcgggagccgaggacgaggaggcggccgggggcggctgctgcccggacggcggcggctgctcgcgctgctgctgctgctgcgccgggagtggcggctccgcgggctcgggcggctccggcggcgtcgccggcccgggcggcggcggggcgggctcggctgcgctgtgcctgcgcctgggcagggagcagcggcgctactcactgtgggactgcctctggatcctggccgccgtggccgtgtacttcgcggacgtgggcacagacgtctggctcgccgtggactactacctgcgcggccagcgctggtggttcgggctcacgctcttcttcgtggtgctcggctctctgtcggtgcaagtgttcagcttccgctggtttgtgcacgatttcagcaccgaggacagcgccacggccgctgctgcctccagctgcccgcagcctggagccgattgcaagacggtggtcggcggtgggtctgcagccggggaaggcgaggctcgtccttccacgccgcaaaggcaagcatctaacgccagcaagagcaacatcgccgcggccaacagcggcagcaacagcagcggggctacccgggccagtggcaagcacaggtctgcgtcctgctccttctgcatctg

SEQ ID NO: 223388 - DNA, 360 bp, Homo sapiens
  chr8:56791925-56792285
  hyper
cccttaaggaacttactttgtaatgattattaagaactcagcgagaccccgagcatcacctcggcatatcgcatcctttctctagagaacccctaatgttggaagggatcagagcgcacctcctccgctcctgggagcacccccttcctaataataccttggggatgggtcggaaggaaaggaaaggagacgcgagaggtgtagtcgatgtgcctgcgaagcccaggctcctctggagatccttccgtccgtccctacaggagaaggctggcccgggctgctccactccccggagctgcagactgagtcgccaggtttctgtgccttcaaagccctgcgcgacggccacaccaaacaccc

SEQ ID NO: 223389 - DNA, 933 bp, Homo sapiens
  chr8:56792306-56793239
  hyper
cggtcacttccccgccctccgggctcaatatgcaaatccgagcaccaggaagtagctgggacctctcggccgagcccagagacagccagttcctctcccgccgcgccgggccgcgctgccgctcgctccccggccgtggcgcctccgggccagacgcgctgcagcctccagcccgcggcaagcggggcggccgcgccacccccggccccgcgccagcagcccctcgccgcgcgtccagcgttcccggccagcagcctccccatacgcaggtcctgctgggccgccccgtcgcgccccccactctgaactcaagtcaccgtggagctccgccgccccgaaactttcaccgcgagcgggtgagtcctctgcgcgagcccaggggtgggcgcgggcacgcgggcagtgggtgcaggggccgcggctgtgccaccagccggagtcccgggcgcagggtagactcggggccgggggcatcggcgcggcccgcggcggcttcctggccgcaccgcctctgggctccggcggcgaaggctcttagatgtcttcagccgacgggtgaccgggcccgggggagccagggcgcggggactgaggctccgcaggtgtccgccgcggagccgcgcaggggagcggtgggaggtgcgggcgcgggggcgggctcaccgcgtgtccttcccggtgagggcccgagggccggctgctgtccctgctccggccgcttctcgcacacagtggggaagccgctgcccttgcggagcgggcgcgcggcggggatactggagaggactcctcggattgtgcaatctgatctcccctctggaccctgggtctcctggcagtgggagatggggctcggccggcgccctctcgaggcccgcggacagttgccctccctggtggccccgggcaggagcgtgacgtcgaggggctgca

SEQ ID NO: 223390 - DNA, 180 bp, Homo sapiens
  chr8:57122746-57122926
  hyper
agtcaaaatggacttcaggggaaaggcggtacatacttttacctttagcgagaaaagggggagcatcccggatttttagggattttttgcgattttttaaaaatttttatttggttatatgcctgagttctccctccattttggttgtttatgatactgacaacaagctgtccctgctct

SEQ ID NO: 223391 - DNA, 208 bp, Homo sapiens
  chr8:57123067-57123275
  hyper
tctccagaaaagaaaaacctcttttgaaaaaggggcaaagttaccccaagtcactcaaagtgccccccaaatattgccgactgcgggtttccgccaggccctttgggaagcgaccttcccccgggatgttttggtggaaaatgcggagagtttactctcaaaactgaatttatattaatttttcccttatttttcgggtctctaatgt

SEQ ID NO: 223392 - DNA, 141 bp, Homo sapiens
  chr8:57123329-57123470
  hyper
ggaggaggaggaggaggaggaggaaaacttttcaaactttccagaccctgaataaaggtttttttttttttcccaccgacctcaccttcgggtccccagccgcatcgccccctgccctgtcagaagcgacttcgggagtcc

SEQ ID NO: 223393 - DNA, 202 bp, Homo sapiens
  chr8:57360600-57360802
  hyper
cggcgctgctcccgcggggctccggccgcgctgcatgtcccattatagtcgctagagggcagcgctctcctgcgtaggctgggcttgcggggactggggtctcagttctccgcaggcctcaatgtgcgggcttgacacgcagccctcggattagccccgaagctgcacccgagcaccgcctgcctcccggccggggcatcac

SEQ ID NO: 223394 - DNA, 180 bp, Homo sapiens
  chr8:60030765-60030945
  hyper
ctcccaacaaacttgcaatttccgcgcgcaccccttaaacaggaactgttccccaaaccttgacccagctaccccgctgtgctctggcccgcggacctgtgtccgaacccgggctcggctgccggaaccggtttgagaaaacaaaagagttgtggggcagttttccctgtggggggcagg

SEQ ID NO: 223395 - DNA, 480 bp, Homo sapiens
  chr8:60031138-60031618
  hyper
ttttctcttattatttttttaaacgccccccggcaaacctaggcagggatccttagccgcgaacagcaggaaggaaagaatccgagcaaatcgtgtcactttccgcacaatcgcggtgtttggcaagcccccggagctactccacaatatttactacccaagcgcacgcaggctgcagcgggctgcgagccgagcgcgcccgggaccggcctccgccaagccggccccgccgcggcccggccaccgccgctcccctcccaggatcaagcagcaagaacacggtggaaacaaaagcagagcgttcaccttgttgcaatagtaggggtccaggcagggagaaggtcccagacagggagcgtcgggcgcagcggcgggctgggctggaggtggataaaatcttacgtccatttcactctcacatcaagcaactccttttctttttccttttttaaaaaaaagtgttcagcaaaacaagcttag

SEQ ID NO: 223396 - DNA, 180 bp, Homo sapiens
  chr8:60031678-60031858
  hyper
ccgtttgtggtttgtttaagaagaagaggaaaaaaaaaaaaaagaggggggaaaagcgctcaactctcccccaagccgcggcgcgcacccgtcggcgccgagcgcgcagcctgctccaccgccgcctcttggtcccgccgccgccgctgccgccgccgccgggcaggtaacttcatgcgc

SEQ ID NO: 223397 - DNA, 1003 bp, Homo sapiens
  chr8:61193254-61194257
  hyper
ttagtaaaatgtaccgctgctcttcttgactactcagaagacataaaaggtacagccacggcttggaggctagcccgccctccggaccgcagcaggtgcgaacgccagccctgcggaaggctcccgggtgagagcgcaggcggcggaagagcgcaggcggcgagcacgcctccctggagcgcctcccgcccgaaacgcaccaggggagtgggaaagtggcagagacccccgtgggaaagagggggcgtgggggtgctcggagcgcgcagcggcagcaggactcgagtcccgcgctcggcgagacactgacgccgccgcgggaccccggacaccccgactcgcggccacttaccttcctcgtagccccactccacaccctcctcttcttcctcctcatcctcttccttctcggggaaggcgacggtatcttcgatgaagctcaggtccgccatgggaaggccgcggggcccctcggcgctctcggcagcagtgcctgcgccttcgctgggcgcggggctggagccggagcggagcgcgcgtgggggagtgtgagcacgcgtgagcggcagtgtgagtgcgagagcgcctccgggtgtgaaccgcagtgtgagtgcaagcaggcgtgcgttcggaccgagtgttccagagacccgcgtgggaagcgcgtccggaggccccagcagagcgagggagcggctgtggcctggggagcgagcgcctggcgaattttatacccgaccggggcgtgtctggtacgcgaggatccgcccccttctctctctggccgttggggccaggggagccgacagttagaatgcgcctcggggcgactagtcccaagtcacggaaacctcggcgcatccccgcccgcccttcccccggggtcgcccccgccgcctcctggcgcttcctcgctgcggcgactcctgcttggccgcccgagccttccttccagaagcccgcaagtctcccaaggtcactcgggacccctgtgtgcctggcc

SEQ ID NO: 223398 - DNA, 321 bp, Homo sapiens
  chr8:61822706-61823027
  hyper
tcccttcttcggccctggcccctcggaccggagcgcccaggccagctcagggtgttcccgtgggggtctccggaaacaatggtgagcctgtgctctgctggctggggggcgtcgtccccgcagctggcgcgtccctccaggctgagcgcccagcgccccccgcggccctaagttgggccacctggcggggcgctgcggccgggccgggcggggacatctgaggcccgacagacccgcgctcatggacaagtgtcgcccgcgccgggcagggccgtggagacagaccacgcagtgacaggccggaggcggctcgagggatcc

SEQ ID NO: 223399 - DNA, 1119 bp, Homo sapiens
  chr8:62626314-62627433
  hyper
aataatttctgagagcattcaaatcactcccaacttcttccctccccctgccccccggcgcccccattttcacctcctttgagttgctctgaaacgctgctggttaggcaggaactcactttccctgactttggctcattttcaactccccaaaacacgcaaggcaaacgataaattgttctcttactcccatgttcaattccacggaaagccaagaaacagtcgttcagcaacctctgtctcggctgcgccctgcaggtgaaggaaccgctgggaaggggctccccgagactagcatcccgagggctcggaccccggtccgcctggcccctcgcccgcccgccaggcccgccgaatgcggcctccgccccgcgcgcctaaaggaggagcgtcgcgggggatggaggcggcgcgcggtgggacctggggagatgcacccgcagcgtccgccgcgccagccggctccctaccccgaggcgaggccccagatccccgccccgcagggcctctgacctctccgggccccggggctgctgctgcccgcactcgtgctaccgctgccggagccgctgctgctgctgttgccgctgctcttggcattcttacgctgggccattgcacggtccgcgggggctggtgagggctggcggacctccttcagtgcgcgggggtacacacgcgacgcgggaaccgctggcggcggcgggccgctggagcgggttcgggccgctgctcctgcagcagaccctgtgcctcagcaccgcctgcagcacctgggaagacttcacccgcctgccggctgcgcgcgcccggcctcgcgtgtacgaacctgtgactccctcccggggcgagagcgcgcggctcgccgcccgacggccacgccccttcccggcctcgccccgcccccggaaggctgagtgacggcgcctgggacccaatcgcaagggcccttacgaggcggcggtaccctgccgcgctccccgcccctgctcacttagggctgttcgggcgctacgcagctgcctgtgagcgcgagcctctttcggctttccagtttgtctcggtcctttggaacgtggcaaacgtggaagccgagagggctctcgcgagcgttggcag

SEQ ID NO: 223400 - DNA, 144 bp, Homo sapiens
  chr8:65281622-65281766
  hyper
gggaaacaccgacctccactttttcccccgacattttccctcctggcatttaaagctgttcgttttcggggaaacttctgtgagtttcgcgcttgttcgaccaacaccagtgttaggaggaggcgagaccggtggaaaaaggag

SEQ ID NO: 223401 - DNA, 180 bp, Homo sapiens
  chr8:65281875-65282055
  hyper
gggggaggggagaagaaaaaggaaagagcgcgtttcctcgccggggttaccggggtggcgcgggcttcgcggccgaggggctgccggcccggcccgcagctcctcgcggccggctgggaagtggcgggtccggctagtccgcgggcgggcggagcgcgccgtcgctgccagtgtccccct

SEQ ID NO: 223402 - DNA, 780 bp, Homo sapiens
  chr8:65492945-65493725
  hyper
ggcggctgtttgatgggtccggaaatctcttgaaggtgaatccaagcaagataaacggtgcggagaggaggcgcggggctgggctcagagcggcggcggcggcggctccactccctccgcgcccaccctcccaccatgcggggccgcggcccatggtgagccccagcagccagcaccatcggctggagacgaagaagaagaagaagaggaggcggcgagcgcgggggaaggcgaaaaagaaaaagaaagaaggggagagggctcccggcagcaccaggaccgacgcgcgcaccagctccggagcccagctcgcgcgcgtctgtggggccgcctgactccggggccgaggcggcggcggcggcagcgggcgcggcggcccgggctgcgcgccggcgcgggaccatggagcgcgggatgcacctcggtgcagcggccgccggcgaggacgacctcttcctgcacaagagcctgagcgcctccacctccaagcgcttggaagcggctttccgctccacgcccccgggcatggacctgtccctggcgccgccgcctcgggaacgcccggcgtcctcctcctcgtcgcccctgggctgcttcgagccggctgaccccgagggggcagggctgctgttgccgccgcctggaggaggcggcggcggcagcgcgggaagtggcggcggcggcggcggcggggtgggtgtccccgggctgctagtaggttcagccggcgttgggggcgaccctagcctaagcagcctgccggccggggccgccctttgc

SEQ ID NO: 223403 - DNA, 480 bp, Homo sapiens
  chr8:65493843-65494323
  hyper
acccgcgggcctccccgggagcgggaggtggtggcgcgaaggcagccgagggctgctccaatgcccacctccacggcggcgccagcgtccccccggggggcctgggcggcggcggcggcgggggtagcagcagcggtagcagtggcggcggtggcggtagcggtagcggcagcggcggcagcagcagcagcagcagcagcagcagcaagaaatccaaagagcaaaaggcgctgcggcttaacatcaatgcccgagagcgccggcggatgcacgacctgaacgacgcgctggacgagctgcgcgcggtgatcccctacgcgcacagcccctcggtgcgaaagctctccaagatcgccacgctgctgctcgccaagaactacatcctcatgcaggcgcaggccctggaggagatgcggcgcctagtcgcctacctcaaccagggccaggccatctcggctgcctccctgcccagctcggcgg

SEQ ID NO: 223404 - DNA, 180 bp, Homo sapiens
  chr8:67025328-67025508
  hyper
ctggtaaaggaaaagtacgacaagggggggcggtggaatcgcagggtcttggcatcgcggaccccagacacctgggttgagggcctttcccgggtcagtcaggctagcgagccggagcgttctgtctttctgcgcacgcgtagagcacacaggccggctctggggctctgcgctcctcgg

SEQ ID NO: 223405 - DNA, 360 bp, Homo sapiens
  chr8:67417603-67417963
  hyper
cggcaggtggtgatcgagtcggacctgtacacgcaccagcccctggagctgctgccccaccgcggagaccgcagggaccctggcgaccgccgcaggtttgggcggctccagaccgcgcggccgcccacagcccacccggccaaagcctctgccagacccggtacgtgagtcccggccccagctccccgcacctccctgggcgcagagacccactcagagccaccacaagcccaggtcagggcagcgttggcggtggctgcggcctcagtcgcgccaggtgaccaagcacctgtgctttcccaagtaaatgctgtttccaccacaaaagcacctgctctcaggcctcaccttagcctcaca

SEQ ID NO: 223406 - DNA, 1435 bp, Homo sapiens
  chr8:67873384-67874819
  hyper
accccggctttaaacgcctctccagccacctgtgaaccgcgaaggagccggctttcgcggcggggaccttgccaccagtaccctcgcgggccgaggtcgttctcccggtcggcttcccgcctcacccgaaaaggaattagagcatctacccaagacggtgactggcagggcagatcaaggtgtcctggtctcggccccagccccgcggtgcgccccgcccgcttaccttgaccgggtgcaggtagccatcgccgcgcagggcgcccaacccggcgtccgccggcgcctcggcgtcgtcctgcaggctgcgggtgagatgcgcgatgtaggtggtggccagcagcagcacgtccagcttggacagcttggtgtcgggcggcacggacggcagcgtgcgctgcagctccaggaaagcgtgccgcagggtctgcacccggctgcgctcccgcgccgcattcgccgccgccggccgcccgctcccggaacgcgagccgcccccagggcccgccggccccggcccggtccgcccgggacgcgagtcgcggatggcggcggccaggggcgcgggctcggcgctggcgctgagggggctgcccgctgggcggccgcggtccatggcagcttcccgcgccgcgcgcgctgcaaaggaccgaaggtgcggtgaggccggggggcggtcgggcttaacccgagaggcgcagccccctggttctccccgtgcgcccaccagcagcccaacggggctaagggcgctctcaagcgagctcgttttgcctgggacgcgatttgcttccggacgtctggggagagttgcggaactccggagttcttgggcttcctagaaggataagaagaggcgcagtgccggctttgcttttcaggggcaaattaagcaaaaggtctactctacccgggaagaaagatctcggaagcacagctcaggatcagcactcgttcgcgcttgggtgactttatccaacccggcacgcacgagaggtggcgcggctccttctcgccgacgccgcggaaaaccacggctcaccagccgccctcggcctttcacgccaggggggatttctgcccgaggagcgggggacccttagcctcacctcggggtacggcacccgccaccgttccgagcccgagagctgcgcagtacgcgtctgacgggcccctcacctttcctggagcggctgagtggagctccgctccgtcgtgagggcgggcgaggggcgtggagcagggcctgtgtggccagggccgcgctggtcactccatcctcgtccggccgatgcccaagtcgacggctgtttccaacctccgctggctgtgacttttatgcgggcgccccgcggccaggcgtgtgtgctccgaccggctaaggcaggtcgggcggaggacctggcccaccggagaggctacgccgggggctgag

SEQ ID NO: 223407 - DNA, 420 bp, Homo sapiens
  chr8:67940671-67941091
  hyper
acatggttctagggtttcctcggtccccacgcttattccccgcgggcagctcaccgctcgcgggacagtccggtagctaactccagtttggtcggtttcatcggcgccgggtccctacgcagaccagcggcggttgctgggcgaccagacgcgctgtccaagcgccgctcacgagaaatctcgcgacatcgcaggctgctccctccccggtgggtccttcccctgtgaggcggcggccgggcgctgatgggcactgacggtggtcactaggccgactccgactagagtcctgttagcttgaagaggccgtgaggcatcggtcaccgcattgttttagtggaccagttagtagccggaacaatttttggcagaccaccatttccccctaccggattatcctgccatcggctttgaccgttt

SEQ ID NO: 223408 - DNA, 142 bp, Homo sapiens
  chr8:68863998-68864140
  hyper
ttcaggatttgtacgaaacacattaaagttaaacaatagcggaggcttaggagtaaccctcgagctgcgccttggagtgtgtgtccctgggattgggaacctcctgtgagttccatatcaagtgctgctgtgtgtgtgtgtg

SEQ ID NO: 223409 - DNA, 780 bp, Homo sapiens
  chr8:68864200-68864980
  hyper
acgcagtacttccccagggttgtgtttcctttttcctgagatttggcgaagggtaaagggtcggagtcacatggatacaaagcttttgattaatgtccaagtcactgctgtggctgccgaagccgcttcccctccagccccggccgtgtgaggccagagcagcggggccgggcgcgcagggcctggccggagcccccactcccaggagtttcctctgcagagccccgcgccccccgcgccgggatttcagcccgatcccctcctctccctgcgcccagcctctccccagcatgtaaagtcttctgtctctcctcggagttggcggaggcggcaactttccattctcgccgccgggggccgggcagcagcgggcgcgcgggtcagcgctcagcacggcgggcagcgccgcgctgcgcaccgccgccgaccatgagcgaggacagccgcggagacagccgcgccgagagcgccaaggacctggagaagcagcttcgcctgcgcgtgtgcgtgctcagcgagctccagaagaccgagcgggactatgtgggcacgctggagttcctggtgtcggtgagtgtccccggcagacgcagggggacgtccgggcggcgcggggcgcgggtcccggagtggctgcgggaaggacgcgcggcattgtctgtgcggggacccgggacgggtcggggcatcacaggcgcgggaatccacgtgtggactctgcgttcgcgggcgcggtgacccccgcggggatttgttggtgccccgagactcactgagttg

SEQ ID NO: 223410 - DNA, 805 bp, Homo sapiens
  chr8:69242747-69243552
  hyper
cttctcaacccctgcgctagagtaggcagggcagaaggtgctgaggagaggctcagaaggggcggtggggacgatcccctttcgaactgcatttgtagctgccaaggagtagccaacaagcaccagatttatgtgcactttgaaagaagcaccttcaccattggctttttaagcggcgctgtcgctagggagcggctggtagggcgagcagcctcggggagcagcccgggctgtttgttccgtcaccggggaaaggaggtacacacagtcgcgcgcgcacggacacacacacacacgcacgcacgcacacacaccggtggcgagttcgagccccgcggcccctgtccgcccgcgtgcgcccctcgacacagctcgcctcccgccccctgattcctgctgctgccgcccagaggagaaaggaacctctgcctcgaatttccccactgcgccgggcgctgcggagagcggcgagggtgggcgcgaggcggagaacgcgatgaatgagttctcccctcgcctcggagttgtctgagttggcggcgctgcgcccaggcttccggctctcagcgccccacgcgcgcgtggctccccgggctgccacccacgcccgcggccggggccgagccagccacgcagggcagccgaggctccggagctcctgtcccggccccagtccgggtaaaaggagggttgtccccagcggaggcgcacagccgcgcgttctccctgcactctcttcgcggtcccatctgttccccatggcgtctcatccgcaaacccggatccaggcttacctggagaagaa

SEQ ID NO: 223411 - DNA, 180 bp, Homo sapiens
  chr8:69243612-69243792
  hyper
ggggaaggggtgcagtaatgaaaacagaacactcccaatcccacccctcccagggaaggagggctagagaaccaacgcgcgggagagggcgccctgggattcactggcattcgctctgtcccggccaggtgtcctggaacgcggccgggcgggcacttagccagttacctgaacgcggac

SEQ ID NO: 223412 - DNA, 420 bp, Homo sapiens
  chr8:70744936-70745356
  hyper
atggcacccaagcactccggcacgtttcatccaccggcacgaggggccgaagccgggcccagtcagtcttgcccacctgggactggggctgggggcgcagggccgcgcagcagggcatcctcaccagctgcgaggcgcccagtgcatcctgatcacagacacggcttcaaggctccgcagccgcgtgccacagggggcaggggtccgcgcggtactgcgatgagccctactcggcgtccctctccgggcggtagcttgaggcaggcgcctcgcgcgtcccgggctcatcccctccgccgccgccgccgccgccgccgctgggcccgcggccaggagcgagtgcaccctgcgccgggggtgggggggcacttagcgctgctgtccgtacagcatcccacctcgctgcgccaggggtaccgg

SEQ ID NO: 223413 - DNA, 319 bp, Homo sapiens
  chr8:71316515-71316834
  hyper
actagcgactgggacgggcctgggccgctgagttagaggcagtggggcctgggggctgcagacggcagggacggtgccccaggacgaagatcggggagagccgagttccagggtcgccagcagaggaccctcgcgcccgtccggccggacccttcggccagcaccctgcaccccctcgggcgcacctcaccctacccaactcccggtcctgccgctgctccccggaggcgccccgcatccgtcaagtcccctacggctccaacagggagaggcttctcccattgcagtcctagctccagaggggatggagaggcgcgac

SEQ ID NO: 223414 - DNA, 180 bp, Homo sapiens
  chr8:72459557-72459737
  hyper
tcccctccgtcccccgacgtcccaatcagttaccacctccccgaaggaaaacaaaccggcccttgacacatccctccacgtgcagcgcccgacgccacgggccttgggcggctgcacctctcccctgccggccacggctcaaggccccattattgcgcgcacccagctcccttccaggtg

SEQ ID NO: 223415 - DNA, 1020 bp, Homo sapiens
  chr8:72755722-72756742
  hyper
cttgatttgggagaaactaaactggccttctcgttcccagtcccagaacctccacccctttcgaattcttcccaacgggctgaccctgcccggcgcccaggagcgccctgggtatctcctggctgctctcccgaatccttgcgcgccgcgcccctaccaggttcactgggtgcacgtagccgttctcatagcggtcctcctgcaacagctgccgcaggtgagcgatgtaactggaagccagccggagcgtgtccagcttggagagcttagtgtcggggggcacccagggcaggctggtcttgagcctggagaaggctttgctcagcacgcgcatccgggcacgctcacgggcgttggccgcgttccgctgcgactgcttgcactctgcggctgagcccttggccgggaggggcttcttgccaccaccgcccgcgctaccacctgcgccgccgcccccagccacacggggccgcttcctcttgcagccttccgcgctgccggctgtgcccagagcgcagcgctcctcctcgccgtcggggtcctcctcctctgccgacgagttgtcactgggcgaggcgtagctgcgctctacgccgcggaggggcggcctcttggaggcggggaccgggtactcccgctgcagcccccgaagctccatctcctccggatcactcaccgagcccgtggacatcccgttgtcccccttgcccacacgcgtcctctttcctcccccctggccagtctcgctgtctccgccttccgctccctggcggaggcggaggccagagagcgctccaaggaagactaaaaacccaggccgggaagcgcggggtgagaaagcgaggtgggtggcgagagcgtgagcgcccctctgctgaccccggggagcgtggactacgagttggcgcccaagtccagaatccgcgcgcaccgcggtaagctgcgccttttgaaaaggctatctgtactccttggaacaaaccaccccgggcaaagaagagggggttgtaaagggggcca

SEQ ID NO: 223416 - DNA, 180 bp, Homo sapiens
  chr8:72756811-72756991
  hyper
cgggggaaggggacgtctctgcagagccgagatttgggctctgaagcccgacggcccttcaacatgtctgcgcaggataagtgagctttcggggagtgaaggggcacatcttgttcctaccgacggtgcttctacccccaggtaatcttagcagtggcaaagattaccagacacttagaa

SEQ ID NO: 223417 - DNA, 1524 bp, Homo sapiens
  chr8:73448678-73450202
  hyper
ggttaaggttgccacggacccggctttaccctcaaacccaggaaagccgggtcacttggggctagggacggcccccgagcgagcggggctgcaggtgccgcgaggaaagtcagatcttatctgcgctcctagttatctccgcagctctttctccaggaaaataatcctggcaccaccactcaggagccatctgtcttcgccccagttccccggggtcgagcagtcagcccagggtcagggtcctgctgtgggcgggcgggaggacagccctgcagttggaagcagaagggccgagggaatcccgcgaagccgccggagcgcgtcgcggcggggcctcccggggctttcccggccccgggtgcgcggcagccgcgggggctgcgtccctctagtccagtgcagccgggtgggagctgcagagcgaagcaggtgggtgtggagccaggcccggggcagcaggagtggctggcgcgcggaagctgagggaggcaccccgccgaggtgtgggcggtgcctgcccgcgccccagccgcgccctgggcaccagagcgctgtccccggccgagcgcacagctccggcgccgcgaggcagagccccggcgtccccggcggtgcgctgccggctcgcgcagcccagccatcccgccccgccgcccaccttgacagccgggagcgctgaggaggaagagggggagggggaggaggaagagaaggcggcggccgctccagcccgcgggtgcgcggagcgcgggaggaggcggagcgggaggctggggtggccgcagccctgtgtgcgcgccgggccggctagctgcggggcgggggagcggcgccccagagcgccccgcctagcctcccgcgcgcagcctctaccctgctccgccacagacacacacccaccaagcacccaccgccctccgccctccgccctccgcccccgcggccgccgccgccgctgcgcctcgggcagccccagcgagcggcaactcccgggctggcgcggctcgctttctggctccttccgcgcggcgagctcagccccgctcgatttttcctcttctgttccagccctctcttgtctgggtggctgtggcggcggcagggggatggggaccccgtgtggggaaggggttgaagatcgatgaagattattgttcttttaaaggatgccttagcttcctcccgccgcctttcctctgagccttcctactagagaccgtgaaccagagtcagggatgtaaagacagggggaaagcacgccgggagctccagccagccggggagaccctcctctctgtggaggggagggggatttccagcgacaggtcattggcgaaggggatcgtcgcggggagaggctccccggagggagcggggaatcccacagccctttgtggtgcccgagcccgtgccgcctgctgagcggggtctgtgggagctaggtaagtggcgggggcattgctgctccccgaagggggtcttcctttaagaatgaatcatcgcggcagcctagccagacttgag

SEQ ID NO: 223418 - DNA, 183 bp, Homo sapiens
  chr8:74208009-74208192
  hyper
gtgccctgtcctcgcggaggttcggtctctggggaccacggcggggggagggggcgggtttcctaagccctccggggtagggaaggcggagggaacttgttaccacaggtttggatcccaaagaaatgtcttgctccgacttacaagcggcgcgatgggaaactgaagcgtctttgggaagtt

SEQ ID NO: 223419 - DNA, 462 bp, Homo sapiens
  chr8:75896508-75896970
  hyper
ccaccaggggccagaccttccgggcttgggtctcgggagcccaaagcacgcccacaaaggccgagcgccctggcttcgctgcgttccggagaagcagggcgggctgcttctcccggatctggcgggcctctggccacggctggttggaggtgggggtgggcgaggaggggcgctcaagtcacgtgcccgcgctggggccgcaataaatgctcgcgaacgcgagagagcgacggaagcgctaggcgcctggttctgcgcgtactggctgtacggagcaggagcaagaggtcgccgccagcctccgccgccgagcctcgttcgtgtccccgcccctcgctcctgcagctactgctcagaaacgctggggcgcccaccctggcagactaacgaagcagctcccttcccaccccaactgcaggtctaattttggacgctttgcctgccatttcttccaggttgagg

SEQ ID NO: 223420 - DNA, 539 bp, Homo sapiens
  chr8:77590075-77590614
  hyper
gccctgtaaagtgttgaagaggatctagggaaagttctcggagcggcagggaaacctctactcctttcactttgaaataaaaagtggcccaacgttccgtgagggcggcggcgggttcgcgcagagtttagggacagtggaatgggggtggggcagggagtgggagtcagggtcaaaggcgtccgcggagacccgagaggagcagctgggtttcctggcgctgggagcccagaagtagggcgcaagcggccgcggcacagcggagcagccaggtccagccgctcggatcgcgctcgcgccccatagcggcccgcgggctgggctcgggctcgcccgcctccccgctcccctgccagcggcgccgcgctccgcgccccggggcccaccccacgcagtcccgccgccgcttcagcccaacagccctcctcacgctggcgcgctccgaggccaagccctggaggaaactcttgactctgcgctagaacctctctgccccttccctcagcccattaacccccgaccctcacctccagcctctc

SEQ ID NO: 223421 - DNA, 217 bp, Homo sapiens
  chr8:80523884-80524101
  hyper
agaaaattgcaaagtcaaagcggtcccatcccgctgtttgaaagatgggtggagacggggggaggggatggagagaactgggcacattttacggtattgtctcgtcgaagaaaccgctagtcctggggtgcggtgcagggaggtaagacggcgggggacagggtgggggtaggacctccgctcctttgttttagggcaagggaggggaaggagagag

SEQ ID NO: 223422 - DNA, 377 bp, Homo sapiens
  chr8:80524105-80524482
  hyper
tcgcggagggcgtggagggcgcgggtgggcagctgcaggggcggggaagcgcgcggcagggaggggtggagggacagcggcttcgaaggcgctggggtggggtttctttgtgtgcggaccagcggtcccggggggaggcacctgcagcgctgggcgcacaatgcggacagccccacccagtgcggaaccgcgcagccccgcccccccgcccggtgctgcatcttcattcgaaagggggtcgggtggggagcgcagcgtgacacccaggagcccaaccctgcggggacagcggcgccacgccccgcgctccccgctcccgactccccgccgcggcttccaagagagacctgaccactgaccccgccctccccacgctg

SEQ ID NO: 223423 - DNA, 398 bp, Homo sapiens
  chr8:80525381-80525779
  hyper
ccagcccaagccccccgcccaccctctgttctctatgattttccagaatggagaccccgcgaggggcttctctaagggagaccctcgctcctccagcggggcgcggctcggccccacccctcccagctgaggcccagagccgcctaccgctggccgggtgggggcgcacgtggcgactgggtgtgtggagcgcagccagccctgcagagccccgcgccgcgccctgcgctcccctccccggagttgggcgctcgcccccgcggtgcagccggggagaccggtttctgcgcagtgtcctgagctacccccgctttccacaattcgcagttcactcgcacgtccagaaaggttctgagaatgggtggtgggggcgatctcgcctcgctttctgcacccct

SEQ ID NO: 223424 - DNA, 521 bp, Homo sapiens
  chr8:80803644-80804165
  hyper
agaaagaaaaagaaaataagagaggaaaaggtcctgagaaatgacggacgcttgaacctcgggcccgggaagaccagcgccctttggcggctaggcctcgggggcgtgcggagggcgggcccccgcgcggccgccgctttcccaggccgccaggggtgaggaggtgacgctgcgggcttggtggcggctggtttttcacacaggaatcctcctcgccaccgctccctcgaaggccgccccccgctccacccccagcactgggcgcccgcgcctcccaactcagcccgccgccgagcagacggcgcgccgcggtaattgggcacaggggcctttttcagagtcgctcagtcgataaatgaaacgtcagctcccctgtgatcccgcgtgtgtggggcggcggtggctgcgagccggggcgcagggccggccggcagccgctgctctttcacagccccagaccctgcgcggcctgccggcggctggcgacctcccttcccctcccgaggcgcccgagcctctga

SEQ ID NO: 223425 - DNA, 300 bp, Homo sapiens
  chr8:81398360-81398660
  hyper
gccccaagcccagcccccctcccccagcccggcccccaccctttccccctccagcggttactgctaccccggtgcattgtgggcgcacggtccgttgttcatttgccattcgacctccgccagggcctggtcggacggaaacgctccgccggctttattgtcgcttcgttatgtggcggagccgagcagtttagcgtgcctctcaccctcagcgcctgcgaagccggcggcggcgtcgggactcctcggcgcgcggaggaaggatatctgtgtggaggatcggtgtgtgcgcgcgcggct

SEQ ID NO: 223426 - DNA, 240 bp, Homo sapiens
  chr8:81490306-81490546
  hyper
gcagcccgtggggacgagggcctgcacgtccccgggggactgagggctgctctgggtgaggatgggaaggcgggtgccgcttccgagggctcctctcgccaagggagagagccctagacccgttcccggggcgctgctcttcccgggctggggtgggctgcagcggcggcaggacctcgccccctcccggccgcccgcacccccgcgcctcctcctagggcccggtgtcccacgggcctg

SEQ ID NO: 223427 - DNA, 119 bp, Homo sapiens
  chr8:81599502-81599621
  hyper
ggcctccgcctcgtcgatgccgtcgtctggctgcgcggggctgcggaagggcttgaagctgtcagccgagagcggcggcgacggcgtggacgggttggactggtcgctgggggcgctcc

SEQ ID NO: 223428 - DNA, 300 bp, Homo sapiens; identical to SEQ ID NO: 201486
  chr8:81785141-81785441
  hyper

SEQ ID NO: 223429 - DNA, 178 bp, Homo sapiens
  chr8:81785467-81785645
  hyper
cccaagttccccacctcactggggagaagcgccctttcccggcacccacaccaaacaacaaacccgacacggcctttgaggaaagcgggagccgccgcctgggagagacgcaggggcccaaggcgcaggcaaatcaacagttcctcgcgctgccccgcgcggccgcccgcgccgcctg

SEQ ID NO: 223430 - DNA, 360 bp, Homo sapiens
  chr8:81786384-81786744
  hyper
caaggggctgcaggagccgccggccaggacccgcggctgccactggctgcagaggcgcgggcgccgccttcgctggaccggccggcggggacgccggcggccggcggctacggcggggcggcgcggcggccgcgggcgggggtgggtgtgagcgagcggcgcgctgccgcctccgccgccgccgccgccgcccgggagccgcgggccgcgctgcgctccatgcggccggcggccgagcccgcgcgcgcctctcccggccggctgcgcccgcgcgctccgggcctaccgctgccgtgcctcggcgcgagctgtttgtgttgtatgttttccaccaccgcccccctcttcgcgagccattcc

SEQ ID NO: 223431 - DNA, 449 bp, Homo sapiens
  chr8:82192417-82192866
  hyper
gaaaggaaaaacggcggtggatatgttgtcaaacggaggggtgcaggagaggcggggccaggcctccaggtgacccctctggcttcctgggcctgcagaggcgccgaaacgtgcaggcgccggcgtccatgaggcgtggggcgcgccgggcgagtccctgcttgcaggaggcgcccgagaggccgtcgcgtaccctggcaagaggagctggttagcacctcccgaccccgagaaggcccagggggcgcccggcgggcggggcggggaccgggcgaggcccgcctcccattggccgcatagcgccgcccagcgcgggccgccgttataaagcagccgccggcgccgggtgcctcacagcacgctgccacgccgacgcagacccctctctgcacgccagcccgcccgcacccaccatggccacagttcagcagctggaaggaagatggcgc

SEQ ID NO: 223432 - DNA, 402 bp, Homo sapiens
  chr8:82193409-82193811
  hyper
ctgtggcgcgcaggtcaccctccgttttcttcatggggacgcggtgctggcgcgcagtttcccgcagaaatcctgtggaggggtctgagtggcgctacagcttcagcttgcattcctctgtcagccccgtctcccccaggtcctctgctcgcccttaccagttgagccgaaccctttggattggtaccccatggaacaccagggcccccgagaagcgtggcgctggcggtgccgacctgctgctggcactgccgggccggggcgccgcagtgggcgggtggcctgtgggaggagcgcaatgaggcctgggggtggccgtgtgttgccatcctggcctctgccacttgagggtgaggaggaaggaggcagtgggctttgctggaaaaccgtaacagaaactgc

SEQ ID NO: 223433 - DNA, 148 bp, Homo sapiens
  chr8:86132759-86132907
  hyper
ggtgcagtgaaaaagcgaagccccacccatagagcgaggttcggaagtccagtctcattagcatcccttgtcttccgcggtgttgcagacttatcctcagctcaagcgagtttggggcgttatggagccagccaagtctccccttgct

SEQ ID NO: 223434 - DNA, 89 bp, Homo sapiens; identical to SEQ ID NO: 201499
  chr8:87527032-87527121
  hyper

SEQ ID NO: 223435 - DNA, 180 bp, Homo sapiens
  chr8:91657418-91657598
  hyper
ccactacgcgaataaccgcgctcagcttctcgctgctctggatcctggcggccacccaggcggtgaggagccgcttgcagaccacatgggcgatgaaggtgccgatgaggacgcccaccatcatcagacccatgcccagcacgaagccgtacaggtagccagcggccacgttgagcacga

SEQ ID NO: 223436 - DNA, 840 bp, Homo sapiens
  chr8:91997152-91997992
  hyper
cccactcccattcagggtccacagggtactgaaggggccctgagagatttcccgacccacctcagagcttctcttcctcgcctcaactttcccggggtcgggcctgggagacggcgcccacccgcctcctccacaccacggggcccgacttccgtcccccagtgtcgctcatcctccctagccacttaccgactcaaaatccacggggatttcggggcagcagcgtcgccgcgctcagcccacacgcggaggccgagcgccctgctgcccgtcggggaacggctcctgccgctggtccgctggctgaccgcggtggcggcggcggggggcgaggggcggggggcgaggggcggggggcggggcgggaggcggctccgaggggcacgaggcgggcccagggcgggcgcggggcgtggcctcgggcgctgagcctcgagagcagccgcacccctgccggggtagaaccgttaaaagggtggcgcgcgctttcccgggcgagctgggcgcgtggggttggagcggcgccacccagagccggtcgtctagggtaggaggccgcgagtgaggcgctgacaggctagccctcgacggggcgcgcccgcgtgaacggccttgggggccccagaccgtggccctgcttgtgcgaagactgggaggcgccaggcgggccgcctgctgggggcttggcggcgggttccaggcagcgtctgtgagggaggccgcctctgtgagggaggccgccgtcgtgctgacgactgagtccaccctactcctgtcccccgtcagagctgctggcaggcgctgctttccccttggtgcatttagtgggtgtcgggattc

SEQ ID NO: 223437 - DNA, 333 bp, Homo sapiens
  chr8:94713096-94713429
  hyper
gccggctgccacccacccacgccaccgggtctcgggtccccacactgccgcgggcagtgcggaagcctaggaggcagccgggcgcccaggccgcgctgcgcggagcagccggagcagccacctccccagttaaggccaggcccacccggcctgggccttttcctgtgcctacacagtccggatagtgaggtcaggaccccatggagagcagtccgcgccgggagacgctgggtcgttgatgggtttacgccttcaaagctgcagaatgcccggggaatgtttgcatgttaaattaacgtgaagccttctcatctctaacgagaatgttttgcc

SEQ ID NO: 223438 - DNA, 209 bp, Homo sapiens; identical to SEQ ID NO: 201506
  chr8:94929137-94929346
  hyper

SEQ ID NO: 223439 - DNA, 812 bp, Homo sapiens
  chr8:95653941-95654753
  hyper
gccgagacgaggtggggtctcggaggccccggggtccacttccagggcttttccgacctatcgggtggggggtggggcggggggcaggaacgcaccggaaccgatggcgagtcgagagctttgattctgcgtccggaccccaagagaggcgcgggccgccccagcaggggagcgagggaggagggtgcagaaagaggctccgaaattgggggaaactgacccgtgcttctctaccttcggaggtgggacagttgcacgaagtgctagttagaccggatcagttggaactgacggaggactgcaaagaagaaactaaaatagacgtcgaaagcctgtcctcggcgtcgcagctggaccaagccctccgacaggtgacaaccccgggtcacgccacccaccccagcctgggcccaaccccaccgcaccctacgccctctcagggcggcccacgcgtgttcccggagcagggtggcgagacgcctgcccggccgcgtgggtgggagcccagcctgagggccggggcgcaccgtttgggcgggggtcgctgcttctcttcatctcccagcccccagggtttgggaccgacattcactagttttcgagttgcttcctgagtagttactggagccggagagtcagctccattttgccaattgattgacgtgcggagtttgaatcctagcgcccccatctccaggtccagaccccagacgcgccgctcccctgcggggtttgggcccacagccttcgggcagggggcgctgtggcgtagacgtgcaggtgggcccggcgggtgtgcaagaagtagcact

SEQ ID NO: 223440 - DNA, 570 bp, Homo sapiens
  chr8:96145958-96146528
  hyper
ccgcgcgctcgcgcccggagtgtggacgggggcgcgcccgtgcgcgcgcaggggagaggccagcccaggcagccgttgtcgggttcgactggaggggcgggggagtcacctgcgagcggctgcgctggcggccagcccgcccaccgcgtctggatcgcgccggctgcgcggggctgcggacagcacacaccctggaaggccccggcggggaacgggcagagtccgcgccctgcgtccgcgaccaggaggatcggaccttcgccttcgctgtcgccgccgccgccgcccgcggccgtcggggtaggtgaagcccgggtgggtggtccgccggctcctgacgggccgggaggggagacgcgaaactttccgggcgcttcctcccgcggtcccggagccgtcgcagcgccgggaggtgtcgtcgtcgcgggcggtggcggccgacgccatgttggggtctgtgagaaacggggcgctcccggccgctcccctcgcgccggggccggcccgcgggccagttgccgccgccgtcccgccagcccgggagcgagccgcgcccgcccgtaggacgcc

SEQ ID NO: 223441 - DNA, 420 bp, Homo sapiens
  chr8:97172653-97173073
  hyper
acccctgcctggcggctcctgcgcccggggctgctgagcccggggttcgtcctgaggccgcggctgtggttcctggccctcccggcccgcgtcactgtcgcgcggcgcccgctgcatcttgccttccttgcggcttcgcatgcccttggtggaacccagctcggcggacgacgaggaggatgagatggaagcctgctggaaaccgggcaaatcccacagaaaactgatgaggaagacggccgagagcaggaccctgggagtatccatggcgggcaagtggctgcgtctccccaggaggcggtggcggcggcgcaggacgcgcggggcacggagcggctggacagcggccggggcccggctcctcgggcggactcggagtgcgaggagccgggtcccagccacacaaaccccggccccgcc

SEQ ID NO: 223442 - DNA, 420 bp, Homo sapiens
  chr8:97173126-97173546
  hyper
gaggggtggggagggtgggaggagagccgggtggtgcgggccggaggtgtgggggagaggggccgcggtgcgccggtgtggcaggaagacgcagcgcccccgcgggacgcgcgcggggttgccgggcggtgcgcgcggcgcgggccgcaagcgctgaccgggggaaggcgggcgctgccggcccgtggccggggagcaaaggctggcccgccgcgccagggtccccctcgaactcccggaggtgtggtccctccgcagcgcggccccggctctcggtcctcgccagccgcctccactttcctgggagcgagcggccccggaggagggaagcggcggcggcgcccccaagagacagcttggagcaggcgcctctgctgcaggctgcgtgctgcctcggggcggtggtaccctccctcctcg

SEQ ID NO: 223443 - DNA, 180 bp, Homo sapiens
  chr8:97657760-97657940
  hyper
atcgctcattcgggggcgtgacgggaggacctggctggggagcggcgggttgggagcctgtggctgccccttcggtgacagtggagtcaccgagcctagaaatggggaagctgtgacgtgggggtggtggagggtgctgcgggacagcagcgagcacggccctcagccgtccttcccaac

SEQ ID NO: 223444 - DNA, 205 bp, Homo sapiens
  chr8:98880995-98881200
  hyper
ccgcactcccaacccgacaggcccctaaagctgcctgtgttccgtgcctgcggctccggacccctggagtctgatgcccgcctgggctcaggcacggacggagtggagccaggtggcagcaggcagggcgcgccgccagagtgcccagctcccggggctgcccacagggtggggccgccctcgccgccgctccctctccgcgcct

SEQ ID NO: 223445 - DNA, 707 bp, Homo sapiens
  chr8:98881235-98881942
  hyper
cggcccgctccccacccccgccgcggcaccgcctccccagccgcccgcccttgcccagcgcctcccaggcagccagcgagcgaagggagcgctctgggatgggacttggagcaagcggcggcggcggagacagaggcagaggcagaagctggggctccgtcctcgcctcccacgagcgatccccgaggagagccgcggccctcggcgaggcgaagaggccgacgaggaagacccgggtggctgcgcccctgcctcgcttcccaggcgccggcggctgcaggtgagcgcggcgcgctttcccccggctctgcgcggccgggcggcctcgaagtgcaggcggaccgacccaccgacagaataccgagcctgggctgcccgacgcgcaggcgccctccccaggcccgcactgcagcccccagcgccccggggccccggcgccttcgacccctccgaggacagggggagagggagggcggcgctgcccgacccctcggccgggagagctgggcgcgctccctgcgcaggacaagccgcgctgcagccgccccggagtgccccgtgggggcgctgtggcacgcagcggggacgcccagaccccggccaccgcgacccagggaaagggagacctgttgagcgggtatgcagggtgattcctattccacggacagccgatggctcccccttccctcttcggaacctggtatttt

SEQ ID NO: 223446 - DNA, 1123 bp, Homo sapiens
  chr8:99438692-99439815
  hyper
cgaccagaactcagcgactcccgcccccgccgtgcggcctgcgctcccgccccccgcgtactaagccgatctccaccttggacttcccggccccctcttttcccctccagctcctgttccccaacaaccccacccccgggcttcgggaaacttttcttcaggtccctaaaaggggacacctggagttcctccggtcccgccctgtccccggacacgcgcaagccgccctttatttcccagcccagctcccgccagacccagcggggaaaggtcaccgtaggcagccccctgcctgcgccctgggggtggtgataataacagctgtcaccgggggatggtcggggggaagggagaggtgtcggccccgcgccgagccgggggcgcaaggtggtcgcggtgacgcgccggggaagcgcagagaagcagcggcggcggcggctgcgccttccgagcccgggcggcggccgaggcacgcggagctgtccgttcagcaccaccgcgccgcgccccgcgcagggcgggcgccccgtcacacccgctctgctcccgccccggctcacggggcgaatgcggcgcgggttcctgcctctctgggtgggtgaggggcgcgcggatccggagagggggctccgggagcggcgggaccacgcagccacctgtgagccttcggcagctgcgggcggcggcggcgtacccggcccgagacgggaggagacgctcggcggcccccgcccgccggcccgccgggcgcacacactcgcacccgcgcacgcaccgccagcaggcagcggccaccgccgcgatgctcgcccgcgggttggggaagtttcccgccggcctcggccgcgggcacccgtgctcccaggtaagcgcttccagaacgcgcagggcgagcccgggcagccccgctgggtgaggcgcagcgcacgcggccccggggcatagcgccaggccggcagggagacctgggccggggacgcgggggctgcaggcgtgggatctggacccaggggaggccgggccgcccccctcattcccgcggcccgggtttccagactccagcgcatcccccccaccccaccaaagctacgcgccccccgtgtcggcccggccctgcccgtgc

SEQ ID NO: 223447 - DNA, 54 bp, Homo sapiens
  chr8:99837477-99837531
  hyper
gccgcagggagcccggcgctgcccacccgactttccacgcgccaggcctgccgg

SEQ ID NO: 223448 - DNA, 600 bp, Homo sapiens
  chr8:99954165-99954765
  hyper
atggaacggctccgcggagacagcctcgggggcacagccgggccactgcagactccgggacttccctctccgcacacccgaaacccacaactcgcccgtgggccgcgtggcctttctgcgccgagggctgctgggggcgggcggcgagcctggcgggtgacctgctcttgggtgggccccgcaatgcctgcgccctagacgccggccgggacgaggggctggctgggtctgagcctggagaaacacaagggtcagcccccagtgggcgcagaggtggcccaggagggcccgcggacggtgctgcgctgcgctcagcctccgggccgctccccgcgttcggcgcgcacctgcccatcgaggcggcagggccagcaggcggcctaggcgcggccgggccacgcggcatcccccaaagctggagctcgccgactcttccctaccttttcaagagaccgtagtcgtgcccagaacgccggcgtggcccagactccattttggaacttcgcaggctggcgtggacgaagtaaacacatttatggaaaaaccccggggttaggaggtttgcggaaagagggagcagctcgtggggttggaaattct

SEQ ID NO: 223449 - DNA, 480 bp, Homo sapiens
  chr8:99956590-99957070
  hyper
gggccccgcgcggcggcgggacgcccgcccgaaggggaggcggggccgctactaaagcccaagactcccggcctggggcagcctggggagggacgcgggcggggacggagctcggcgtgcttgctgctggagggtgatggccctgcaaggctgtgggctccgacctcaccgggagtcgacagcgagaggttcgccgaagagcgaggttctgggcgagcgctgaacgccggccccaagcaccccgggtctttacacagtccgcgtccacagactctgacgaagacgtggatctgctctcgctttagctgctcgcggtcctccagatcatgtccgcgactcctgcgactccgcgcggaaaaaaaagtttgccaggcgtggactcaatgacctttccaagctgtgcgcctcgctgcctggaccgggtctgagcgcggctgcccaggttgacctttctgcgggaggtgagtgttcgctctggga

SEQ ID NO: 223450 - DNA, 142 bp, Homo sapiens
  chr8:102505557-102505699
  hyper
cccgcgtgtggccccgatgggaggcgaggcgctgggaggccggggggcgcgggggcggccggcgccgtcccccactccctcgacatcccgccttcctcccccctcccccgcctccctcccccgggtccgcccccgcattgtt

SEQ ID NO: 223451 - DNA, 696 bp, Homo sapiens
  chr8:102505721-102506417
  hyper
ggggggaaaggacggttcgcgaactgggggaactcatgtgaggcctcgagttagggcctcggcggggcgcgaaggggcgcctgccactgagcgattcacccgcgcccccgacggcgtctgcacgcccctcgagctcgcggccctccacgcagttggccgccacctcggacgcggcaggcgggactgcgtggggcgcgccgagccttctcggggtgctctcgccgtcaaggccgagggctcggggcggcgggaacgctgggctcgcgtccttcccgtcccggacaggcactccagacgcgtcggggagccacagcctgcgcggccggagccgcccgcgggtcactgggcccggtccggccgcgtcctgacggcctcccccctggccggcccccgccctcggaaggctttgtgcgagccgggggaggtggggcctgggcgggcgcgggagggagccggaggtgggtcccgcggcctttctcgggattcggcggggacactcccttccccctcctctcgggcgcgtccgggcctgggaactggctgcgtcctattggaagtgcgcggggccgcccttttgctttccccggtaactttgccgtggcgttgcggccaccccgaggggaccttcctgaaggtgtctcgccggagagggccggtgccccaaggccgcgggccgctgggcctgtcatggagaag

SEQ ID NO: 223452 - DNA, 600 bp, Homo sapiens
  chr8:104511008-104511608
  hyper
tggcgagcccgcccagctctgttcacccggccccgccccgccccctccgggagggctctccgggcggcgcccagccccgagcagagcaaaggacggcggcggccacctccgttctccggccgctggtttctcgtctttcctcgtcctttcattgaacccatctccgtgcttcgaaaatctgactctaacccgatctcttcgcgtctccgcctcttctttctagagtgagcgccaaaaagggcctgacagacagaagcctttggccccagcaccggcccagcccgtctctagacgattcttgctcctttcaccctcacagcctccagtggtcgcttcatcttcgcaccctcccggccaaccctaactctcctcgtctctcctcgcgctgtctcgcgtcctcccctcaggatccttccgcacattctcagcgtccagcgcggtttcccacaacttcctcacgccccgctcccctcgccctgtccccgccctcgacaccacctgcgttccccactcgctccaacctccctcccccgctatccccacttgtgggcctccagctctctgcccctttcctggcccccatccctgacaccccaggga

SEQ ID NO: 223453 - DNA, 240 bp, Homo sapiens
  chr8:104511638-104511878
  hyper
tccaggatcccgccccgacacttcggggccctcccgctacgcgcactctttctcctcaggtcctgacacctgggcgccccctccctgtcacccaccttcagctccagccctgactctcgggcgccttgccacccttacgctccccgccccgccccggtccctcgggcgcccccactcgccgcctctacctccctacctgctacacctggcacccctgcccccacccctgctcatactctt

SEQ ID NO: 223454 - DNA, 2007 bp, Homo sapiens
  chr8:104511926-104513933
  hyper
acacttccgtccccgaaaactcgggcgccctctcccttcacgctcagtctctcctccctccccgcccggccccggacccagcctggagatcgcgctcgggaggggcggctgccgcccgcggggcgcccgcggtgcccgggcctgggcagcgaggaggtgacgccgcccccgcgggatgagcccgggaggcggaggggcggaggaggtgctggcggcggcactgagcggcggcggcgcagggcgcgcgggccttccgcgccgactccatcgacccaaggggcggcggcggtggcggcggctgagcgaccctgggccgggcgcgtgatgaggaggggccggcgccagaccccgctgcacgtcggagctcgcctggatccgggcgttggcagccgaagggccctggccccgggactctccgccgctagcccccgtcatatcttctccgctttcgcttctccactctagccgggggtggggtgggtggggttggggtctccgcgggggtttccggccccgcggcccgctcccgggtgtgcctggaggagttctccctctgtggcgcgcgggagccctgtgatgcgtcagccggcgggacggatgagttgcttctccgggaaaccgtcctcgcttcctcacgaccctctcggctcccgcctgggtgcccctcgggccggcagtactccgcctccgggcgctcgaagcgagttccccgggggcttgttcgcaggcaccccttcccctccgaggcggcgcgcgcgctcccggccctgaccgcggccggacacactcgcgccccggtccgcctgtcgccctcccgcctgctccctccagtcaccccacccttagctgtccccgccaccttactccaccaccctcccccgcctctccgcgcactccgcgtcccggcctccagttcccctttcccttgaaccgctcacttcacagcccttcgcccccgggaagaagaaacatttcccgaagcgcactcctcagccctccttccccacgcgctcgccctcccctccccctgcttttcttgggggaggggggctgtcgccttggattgaaggccattgatttgtatgtatttgtcccagcgctggaggctgccccagccgccgcgccggtgccgccgctgccagtggagttgcctccccgcttccctagggtggttcggctccaccaaacatgtcggctcctgtcgggccccggggccgcctggctcccatcccggcggcctctcagccgcctctgcagcccgagatgcctgacctcagccacctcacggaggaggagaggaaaatcatcctggccgtcatggataggcagaagaaagaagaggagaaggagcagtccgtgctcaagtaaggacctggctccatattcccgcctctctccctgccctccgccccctcgcccactgccctgcggccgcctgcgcgccccagttcgccgccctccctcccgctggcggcgcccaggccacgagggctgcggccagcgccggccgcccgggctgttttaggggtgtctgagagcaggggtgtgtgtcggggagggagggcgccaaggccggctgaggtgagggtggcgagccttaggcggtgtgattttccttggcgcctttccggatttcctcgctggtcatcttggctccggggccccagcgggactggggctgaacccaggctctgtgcgtaccctctcctttcccgccgcgctgaggcagtgactggggcacagaatccaatatggccgtgcacaggtgctccctggacggacccgggcgaaggcgcgctggcaggggatgcggacgccaccctggtcccacgcctccgcggggcggctctaccagcaacgcgggacagagcagggctgcccacagtggctgcgagcagcgggcggcggcgcgggctaggggcctaagctctgtcgcggtcgggtgggtgtgcgtccgccgccatcttccagcccctccccctcggcgagtgctaacaccctgcactc

SEQ ID NO: 223455 - DNA, 452 bp, Homo sapiens
  chr8:106330393-106330845
  hyper
tggcagctgcccagcgttgacgcggtgacaactgcagaaggtggccctcctccaagccgtccccacgcctcccctccaactcccacccacccctgcccccatcccccaccaccgcctggatcccccgcacttcgcccgaccaaggccggggccgtagtttgcatccggactggatttggatgcagccaatcctcctttggctgatggaatagtctcccctccccacagccccggcgcgcccctccctcgcgcgcctcgccgcctcccgccgcagaacaggagctgcgcggcccggagcggcggcggcggcgccggagtatccgtcccgcacgccggggcgaggggcgagcgagcgcgctcctcctcccgcgccctgcgcccccgcgctccccctctcctcgctgctcgctctcccgtccctccctccttctcttccttctttccgtgttatt

SEQ ID NO: 223456 - DNA, 360 bp, Homo sapiens
  chr8:106330910-106331270
  hyper
gtcgctctcctctccccctcccctcctcactgtcacactctctgtgcccccgtctctcttctctcatttgcttgctcatctccgaacgtgaatccgcggctcccggaggagcccagcgcccggagcacctggagtccggccggcggcgggccgagcctggccagcggcggcggcggcggcggcggcggcgggagccgagggagcggcagccgcgaccgcgggcaccgcgggagccccagcggcagcagccgccgccgagatgtcccggcgaaagcaaagcaaaccccggcagatcaaacgtaagtttgcgcgcggggccgggagttggtgggattattgcccaggagcggggtgcgcggg

SEQ ID NO: 223457 - DNA, 180 bp, Homo sapiens
  chr8:107669643-107669823
  hyper
cagttattttcagacccctcctaggctcccgaactccatgcaactccagcagtctcccctgggccatttttagcctctgctctgacctggcgggaggctgggtgtccaccctttcccctgcagtcctgaaagtccggtccgagcgcggacggggcggggaggggctgggcgggccaggcc

SEQ ID NO: 223458 - DNA, 719 bp, Homo sapiens
  chr8:109799247-109799966
  hyper
cccaggggaccagctaaagactcttttcttccgtcctctccctctttttcctctgatctgcttaaaagcccagttaacgacattgcaccttaaagcgaggggacacgcactttccctcgtccatctgtcatcaattaaaagcattaatatttgctttaaactgacacaggcaaggctgatctcggggaggcgacctctggatgcgccctgtgcgagcaaagccgggagagcgagccccaagcacctggcagcggtgcccccagcaggcgccgaggaatccggctatccatttctggtgaactctgcgcccactgaggcattcgaggtacggatgtgtccgcctagtactcggagacgaaggagagagagcggggatatgcgctccagctctgctaggctccagggctctcacccttgcattcaaagcctccaccccatcccactccccgccactcaccttctgcttcggccacccggtgcggctccagcaccgcgcgctctcccggcacggttcccggagaaagtcccccaatcaccagctacggcacttgtagcctctgcacgccgctcggctccgccgggtgggcagcgcccgccacggcgggcggggtggggcggggcggggcgctcccggagcatcccgggagttgtaggccaggggcggtccctgcatccctcctgtctctgtctcctcccacgccttctgggttttacccttc

SEQ ID NO: 223459 - DNA, 324 bp, Homo sapiens
  chr8:110703974-110704298
  hyper
gccctggcagattatgctgcaggatctgtttcttgaagaagccgctctcagcgtgggtggcgcgctgcagagactctgggctcctgccagatgagggagccccggcggaggccaggagggcttgcgttgcacaatctggagcggatccccgggggcggctgagggcctgggaccccagtctccctcgaggtcttcactcacccctctgctaaggagcacccttgtcctcacgctggagaggaagagccctgaacactgacttcagcgtgaacctaaggtgccctttaggacagtctccctgggaaaatttatctcgcgaccaca

SEQ ID NO: 223460 - DNA, 1758 bp, Homo sapiens; identical to SEQ ID NO: 201571
  chr8:117858172-117859930
  hyper

SEQ ID NO: 223461 - DNA, 84 bp, Homo sapiens; identical to SEQ ID NO: 201572
  chr8:117861184-117861268
  hyper

SEQ ID NO: 223462 - DNA, 161 bp, Homo sapiens; identical to SEQ ID NO: 201573
  chr8:117862856-117863017
  hyper

SEQ ID NO: 223463 - DNA, 149 bp, Homo sapiens; identical to SEQ ID NO: 201574
  chr8:117864186-117864335
  hyper

SEQ ID NO: 223464 - DNA, 174 bp, Homo sapiens; identical to SEQ ID NO: 201575
  chr8:117864773-117864947
  hyper

SEQ ID NO: 223465 - DNA, 224 bp, Homo sapiens; identical to SEQ ID NO: 201576
  chr8:117866483-117866707
  hyper

SEQ ID NO: 223466 - DNA, 123 bp, Homo sapiens; identical to SEQ ID NO: 201577
  chr8:117868404-117868527
  hyper

SEQ ID NO: 223467 - DNA, 133 bp, Homo sapiens; identical to SEQ ID NO: 201578
  chr8:117868877-117869010
  hyper

SEQ ID NO: 223468 - DNA, 221 bp, Homo sapiens; identical to SEQ ID NO: 201579
  chr8:117869491-117869712
  hyper

SEQ ID NO: 223469 - DNA, 107 bp, Homo sapiens; identical to SEQ ID NO: 201580
  chr8:117870590-117870697
  hyper

SEQ ID NO: 223470 - DNA, 112 bp, Homo sapiens; identical to SEQ ID NO: 201581
  chr8:117874067-117874179
  hyper

SEQ ID NO: 223471 - DNA, 130 bp, Homo sapiens; identical to SEQ ID NO: 201582
  chr8:117875368-117875498
  hyper

SEQ ID NO: 223472 - DNA, 176 bp, Homo sapiens; identical to SEQ ID NO: 201583
  chr8:117878824-117879000
  hyper

SEQ ID NO: 223473 - DNA, 338 bp, Homo sapiens
  chr8:117886849-117887187
  hyper
cttgctctccgctgggagttgggcgggctgggtggcccggggaggggaaaagggtcgggggagggggtggggaaaggggggagcccttgcgaggtgtagcttccgagcagctcccgccgccgccacagccggcgcctcctttccgattcactcaaacaaacaagatggctgccgttacgccgcggctcttcctgccgcccaaatcctcggttcaaatcggcaggatgtttacggtcaaaatggtacctgtgcgcctgcgcagccagcccaagcccccccctccccccagaaggagcggcgcaggcgcaatgactatttccttttctttggaacccgcc

SEQ ID NO: 223474 - DNA, 207 bp, Homo sapiens; identical to SEQ ID NO: 201586
  chr8:119123498-119123705
  hyper

SEQ ID NO: 223475 - DNA, 240 bp, Homo sapiens
  chr8:121823386-121823626
  hyper
cacacacacccggccccctggggtgtgtccgcatgtggccgagtgagtgtgagtgtgagcgtgcgggtgggaagccgagcaggtgtgtgcgcgcccggcgcggcccgcgcgctgttaaccccttaccttccagcagcacttccttgcccgcgcgcttcaacgcctgcaccgcctcgtcgtgggtggcgtcccgcaggtcggctccgttcacggacaggatggcgtcgcccacgtacaggg

SEQ ID NO: 223476 - DNA, 216 bp, Homo sapiens
  chr8:121823749-121823965
  hyper
cacgcttctggttcgagatggactcgggcacctgctcgggcaggtcggtgaaagcggtgcggaccccggcgggcgagtccgggggctgcgcgccgcccgcgcccgggtgcccagccccggcgcccctgcagaacgagccattggtggcggtcccgatgccgttgtacgccgcagcgccctcctcgctgctcagaaccagggcgtcctcgctcaagt

SEQ ID NO: 223477 - DNA, 257 bp, Homo sapiens
  chr8:121824444-121824701
  hyper
agggcggggacccacaacccagcggccgctcacctgttccagccgccgcagcctcggcggtcacacgccacccgcccgcccagacctcccctcctctgtccccagagcgcacgacgccgcggggacagcttcccgagcgccttccccgtcccgcttctctccagcccaccgcagccccctttcttcccagctcccccactccgtgggcgcccacactgcaccttcgccgggtgcgtgcgtcccgcctcggtgccctc

SEQ ID NO: 223478 - DNA, 259 bp, Homo sapiens
  chr8:124552598-124552857
  hyper
gttactcatcctcccggccacttcgtggttgcccgtgcctgggcagggcctggaagcgctccaggcgggaccttcgtcggatcccgtcacctgtcgcgtccacagcgcttgggcgctgggagccgggccaccccgcggtgaaggggctcagcccacccgcccgcgcccccacatgggcaaagtgcgcgactccggtgtccttaaagcagggaccactaaagctgtgtgattaagtttgagcgaacgtttggggacacga

SEQ ID NO: 223479 - DNA, 334 bp, Homo sapiens
  chr8:125985497-125985831
  hyper
ggccccagcaaagccgccgggggagatgagggtaacttcctgtttctgccttccgggtttgagagtttaggaccctgggttggtggggtcagagggagagggggtaccttcctcccggaccgctgggggtgcagggcgccttgggtgtagcacccagaacagtgagttccttcttggggggaagggagccgagggttgcgggctagaggagtggaaacagccccgtccaggctgcagtggacgtccgggagagagttcccgctgctgccaggggcgaaggcccagcatctcccgccgacgggccaccgtcatccttgtccgcggggtcccttac

SEQ ID NO: 223480 - DNA, 180 bp, Homo sapiens
  chr8:127569952-127570132
  hyper
aaagcccattgcatcagcagcttctactgcttccgcctgcgccctacctgccaagcttgggcaggaagagggaaggaaagagaaactttacgccaatcccccccctcctctgctaacttcccctcccaccctcgggccctaactagccccggggacgcctcctccccaccaacgcatcca

SEQ ID NO: 223481 - DNA, 240 bp, Homo sapiens
  chr8:127570653-127570893
  hyper
ggacgggattgtagatccggctccgggctcccgggcgggagcgcagcccgtggcatttaaagagacaggcgctcactccccgagctcgggtctttttcacattgcgccgagcggccgggagccccgcccccgccccgcccactcgggcctcgggactccgcccggccacgcccccgcgccggagcgggtttaaatccccctgtaaataatccacccgccgcctggggctggtgctgtgag

SEQ ID NO: 223482 - DNA, 521 bp, Homo sapiens
  chr8:131455078-131455599
  hyper
tcgctctcagaaaacgcagcaggtcccaaaatggtacaagcagaaaacacaagccacttcacggtccgcccaggagccaaccccaagctccaagtaggactccccccacccccttccctttcgtttctcttcttttgctttaggcaagtggcctggggcctgccaagcagcgccgggtccgggtaggggccgggggccgcggggaactttcctcggctgcaccagagacaatgccgggagggcgccccatcggcggggtccgggccgccaagcacgtcgtcccgggccctcccccggagggggacgcgaaaccccccagggcgggccccgtccccggccccactgcaggggccccctctcccgagctggaggcgaggagacctcccccccccaccgggcggcctcgcccggccccgcagagcctggccgcgcgtcccgcacacgccccagcccagggccggcgccctccccgcggagaaggacaccccgctgcgagaggagccgggagcccgccccgcgcc

SEQ ID NO: 223483 - DNA, 180 bp, Homo sapiens
  chr8:131455651-131455831
  hyper
tgtgggcgactccgcccggccccgccgagcgcgcccgagcgccccgcaactcaccgggacctggcgggccgctgggcattattccatcgcgggttcggccgggcgctcgcggctctcgggtgggaaagcgaactgcgaccgggaagcgccggctgggcgggaggcgcgggcccggggctg

SEQ ID NO: 223484 - DNA, 879 bp, Homo sapiens
  chr8:132051950-132052829
  hyper
gggtccatgggggccgaggccaggctcaagtgtaggaccaagagagtgagtttggtcagcacgtccagcacgttcatcaccacttccgatttgcgcctttggcccaagaaatagcgctggtagaggcgttccaaatcccgagatttgaaggagttgcgcagggtggggaaaatgacccctcggtagctatagcccccattaagaaagaaatccgagttgctaggggcacagtcaaggtgcaggaagcccaggtcgcccccgcctccgctgccgctggcactgccgctcccgctgcgttccgggaagactttggtgccgcaggtgctgtgcgctcgctctcccgggcccagcgagtagaggggcagcgccgagtcgcctgacagctgcggcgcgtggtggttggggccgccgcccgcagggtccgaggctttgcccgagcctccactcccgctgccgctgcctccccggtgcccgtgaatgaagcgctgctccgtgatgtgtcgcaccgccgtctgccacagcagccgctgcggccgggaggcgctcctgccgtcgccggccgggggcgtcgggtggatggtgtagagttcctcgctgcctgtaaggcagcgcacatcggagagctccatggctctgggccgcagggaaggaggcccagaaccttggggaggcagccggaggaggggttcctaaagactcaaaggcggcctggtaggagcttggcaaggatcctttttatcctaggctgccccgttgcaggagccctgcgctagggctccctgtaggtcgggtcatactgtgcccaggggcaaagggcacctggaagatcgcggcggacctcggcgtccttgcgtgctgctctcccgccagccggcgcag

SEQ ID NO: 223485 - DNA, 142 bp, Homo sapiens
  chr8:133492048-133492190
  hyper
aacccacataattattttaagcttccaaaccaacacccctagaagatgtcataaatgtgcacccgcgcgcgcacacatccgcccaaatcagcaggggaaccacgcttcgttttttaagcccctagtgtggaacacccggaga

SEQ ID NO: 223486 - DNA, 698 bp, Homo sapiens
  chr8:133492250-133492948
  hyper
gcgtgctgaggacgggctggtctccccttcagcgggaaagcatccatgggtcttaaagccccagagacttctcagctccagccccgaccccaagtccccaagcgcgccgccgccgagggcgccccgagcggccgggtactcacaccaacgcgtggtaaagcagcgcccagccccgcggtctctccagggcgtcgtagatcaaagtttggatgcgccggtacttggcgttgtttctcttgactgggcggctcagcggggtcttggccaggagcccgatgccctgcggggtcctccgctgcccctcgtcgcggccgccgccctccagcagcagggtcccgtctttgtcggctccggccccgagcgccaaggtgacttgctccacgtcgccgggcgccagccccactttccgctcctcgtcgccggccgccgccgcgtcccctccggctgggttagccgccccgccgcctccgccgcccccgtcgccgccgccgccagccgcccccgccgccctgcgcgccttgagccccatctgcctcgcccccgccggccgcttcgccttctccgctgctgctctgggaagaaggggcgctcggggtgcgtgaacgaggcggcggcggcggctgcaagcccgggaactccaatgccatgatccgcgcgcccctccccacccccccccaaaagcaggcaaaggcgggccc

SEQ ID NO: 223487 - DNA, 180 bp, Homo sapiens
  chr8:133493029-133493209
  hyper
gccgggggctgcggagaagctgggagggcgcgcgaggctggcgcggaggcgctagggcgcgcggcggcgggagcctggaaccggcgctccggggcggcggcggcggcggcggcacccaggccggcgagcccaagacagcatcgcagtttatttacaagcccggtgccagccgccctcccg

SEQ ID NO: 223488 - DNA, 319 bp, Homo sapiens
  chr8:134232754-134233073
  hyper
ctataaaggcagctgggccagccaggggcaccaaggccactgggcctgaccggccacctgtgtttgcagaggtggtcggtgtgggctgcgtcctggatggggtgcgctacaacaacggccagtccttccagcctaactgcaagtacaactgcacgtgcatcgacggcgcggtgggctgcacaccactgtgcctccgagtgcgccccccgcgtctctggtgcccccacccgcggcgcgtgagcatacctggccactgctgtgagcagtgggtatgtgaggacgacgccaagaggccacgcaagaccgcaccccgtgacac

SEQ ID NO: 223489 - DNA, 453 bp, Homo sapiens
  chr8:134308942-134309395
  hyper
cacacacacacacacacacacacacacacacactcacctagtcccttctgcacccacgtccagcgcgcacccctgccagcggcgccagctgggattcggagacgacgccaggaaacgctatcctggtattttttcggaccgtctcatcgcccccttcccgacctccagaaccccaatccccagctaggggggagatgaatgggaccctgtctttttttcctccctttccgtaattgaaccccccacttcagcggtgtctgcacccaaagccccctcgcgcccgcgccccggggtgaccgcgcacttgcagctccggggcgcttactcctggagtacgcggggctacaaagggcggtcctggcgctccagcggcaccgcacgggcggcccctttctgctccgcgtcgcgcctgggagaagagggcgcgggcttacctaacgcgagggagaaagg

SEQ ID NO: 223490 - DNA, 85 bp, Homo sapiens
  chr8:134581264-134581349
  hyper
ctgctgcagagcttcgaggaacagactccacactccctaagaaaccctcctctgccatcacttctagcaacgcttcctgtttttc

SEQ ID NO: 223491 - DNA, 480 bp, Homo sapiens
  chr8:134583169-134583649
  hyper
tggggcggattcagagtttcgagttgccactaacacgactccggccgtgctctccttggcccacccgcgtcccccactgtccgccacgccgcgttcagctctcttgtcccgggtgtcaacttcacccccagatccggagcagcgcgctctgacggcgtccccggggccgatagccacctcccggatctgcgcctgcttgcagcggattgggggactcgatccggatactgtcccacggccgctcgtccagaacactggcggcctccgcggtgtcccagcctgtgaccccaaatccgctcgagagcgcctgagcccggccacccagcgaggtctcctcccacgggcggccccagcggaggagatcccagcccggcgccgggtgcaatgtcactggggctgctttcgggaaccgctgcccgggacttggcgtaggttccccacagagctccaggcagctcctccagtgtcggccgaagaccc

SEQ ID NO: 223492 - DNA, 1020 bp, Homo sapiens
  chr8:136469378-136470398
  hyper
tctctgagccccagtttcccagtccgtgcatctgaaaggctgtaatagcgtcgtggggctccccactcggccctcagggccaaaggtgggcgccggacacgcgggaggggcccttggacgcaccccctctcgcaaacgcccggttagtcccggcggactcgcagtggagagcggccccaggaggcggcgggcggcggggcggtgggcgccagtgcgcaggcgcggcgcggcagggcggggcggcgggcgcggggcggggcggggcggagccgggcggggcggggccggcggcaggcgctgggcgctcggcgcggtggctcagagtgcgcggggcggcgcgcggcgtgcaggtcgcagctgtggctcgggtgctggcaggtgctggcgggactggcggggatcgccgtggactgcctcaggggcgccgcagcccgctcggcccgagggcccgcctaaccgcgccgcccgcgcccgctcctcctcggcccgcgcccggagcgcgggggccgccggcgctgggtactcggcggccaccggggatcggggctgagcggtcggttcccgcccccgtgccgccgccgccgccttccggccgaccgcccggcttggccgctgctgccgcgtctggcccccgggtccccgccgctgggggcgcgggcggggtcgggggttgccgggcgccgccccccgtgcgcctggagtccacatcccgggcccggcggccggcgagcatggaggagaagtacctgcccgagctgatggcggagaaggactccctggacccctccttcacgcacgccctgcgcctggtgaaccaaggtgaggcgccggccgttaactgccggccggcggcggttgggggccgggtggaaacgcgggggcccagggggcccctccgtgccctctgctgtcagcggacgcggcggagacggaggcccgggtggcccccggggtcgtttgcacggggacctgggaggctgtgggacacctaggggaagaccctgatgtgaattttgggga

SEQ ID NO: 223493 - DNA, 697 bp, Homo sapiens
  chr8:139509025-139509722
  hyper
gggcggactggggagtccgcagcacctgcgagctggtgttgggtccccgcggcgaggctgcctggaggaggagcgagcggatgctgccctcgcccgccgccgccggtgctgatgcggttgctatggttatggaaccccgcaactgcccccctctccgtgcaacagctgcccggccgcggcctccgggcagccccagcgagcaggcgccaggacgcgaggctgtcagcgcggtcgggggaacgcagccgccagcgccgcaagaaagcaaggaccgaccggctgcgcccgcgccgctgggctggcgcctcccgggctgcgctcacctctggcgccctcactcctctccttcctccgccgggacgcggccagaccctccgcgccgcgccgcgcgccctcgcggccgggagagcccgccctgctgctcccgctggctccgctccgcagccgctgcgcaccgcgtgggtagacgctgcgcgactggctggcggcgcggctcacgcgctcccacctcggtccctctccgccgcgaggccctgatgggagcccggggcgggccgcccggcggccaaaccccgcccgctcggccgcccgggtgcccagggcgcaggctgcggccccgcgtgcggccctcccagactgaccggcgcgagcatgctcagtccccgcggcggggctcccctctcgagccaagacccca

SEQ ID NO: 223494 - DNA, 1771 bp, Homo sapiens
  chr8:140714565-140716336
  hyper
aagtgtaaggctcagagccccgcgcagcccagcccgcgccggggcggtgggtgggtgggtgtctgctatgggattattcttagcgctccactctcttcgcaaaagtggcgcctccgccctcccggctcaggcacactcgctcggggctcgcacgcccggcccagacaccagcgcggtggagagcaccgggtggggtccccgaagggtgaggctcggaggcgccgcggagggggggctccctagagaggagggggcgctgcgggaaggcccccaagggaggctgcgtttaaccctcgacgccctgcacccagcccggcgcggcgcgctcagccgcctccccggactcctcccggggcgcgggagcccagcggcgcgcccagcccttacctatggtggtgatgaccgtgatcgcaaagtagaaggagccggcgaatttccactggacgccggcgcggtgcggttccgactgcaggatcaccagctccagctgccggtagtcctcgctgctgatgttgtacttccccttgatccggatctcctcggctttgagtttctcctcctcgcgcatctcgtggtccgactcgagggcgtcgaacacggcggcgcccaccagcaggtaggtgaaggtgcagacgatgagggacagagtccgcacgttctgcctcttcatggccgccagcaaggagccggcgcggggggcatgtcccgcaggctcacagccgcgcgcgtcccactgcagcgcccggcggccgccgccgcctcctcctccgccgccgccgccgccgcctccaagttgtaagcggcggcggcagcagcagcagcagcagcggggaggcggggggcggggaggctggggggggccccctccgctggggccgccacagccaccgccaccgcgaggcggctggcggggcaggggcggcgcgggcccgggctcagccgagaaggcggacaggcacaggaggctgctcgagcgccggggccaggcgtccgggaaccccgacaccctgcgccagacccggccgaagcagcccgccccactgcgcagggccatgcagggcggccccgctgggtaccgcgcgggccttgctgccctccgcaccccgccccccgctcccgcgggaaacgcagggacgggaaccggagccagaaagcggccggagggcggccgcggggcccggtacccctgtgggtccagctcgcgggtggcggtgcccagcaaggagcctgcaggtccgcgcgcccagcggaacctgcttccccttttacccctcctcgccccctctcggtggtggggaggaaaagtttgcgaagtggcggtgtctctggagtcccctgcaagcggggagggggccgagcaggtgcagcgggaggggcagcccgctccccaaaggtccgcgcgcccagcgcccacccgggcgcgcgggtgcgcagcggggtccccgccgggcgtcggccggtgcgcgaagtttgctcggctcaacccccaaggcgcgggagcggggcgcggccccaggacggcagggaccgcgatggagcggcttcgggggcggccgggggacggcgcggtggcggtcggccagcccgctcctccgggggcggcgggcgcggcggcggcggcgggaggggtcccgcgggcctcgcggagcagcggggcggacgcgggcgcatgagccgcgcgggggtcggggccctccggcgtccgggcgtcccgggaggcggccgccgcgctggtctgccccgggcgctacgtgcgtgcgcgccgttggga

SEQ ID NO: 223495 - DNA, 268 bp, Homo sapiens
  chr8:140716396-140716664
  hyper
ggcagccccgctccggcgggagggcctcggggagcgggggccgggctacgccgaggccgggcctccctccctccctccctcccgcagcctccagggcgcgccacctcccgcctggtccccagccagctggcgaggctgctgtggcagctcccgctgcagacccagcgcggcgcagggcgcacgcggagggagcccgggaggggcggcctgagccgccagggagggggcgggggcggagccgccggcgggttttggcgggggatgggag

SEQ ID NO: 223496 - DNA, 300 bp, Homo sapiens
  chr8:140716780-140717080
  hyper
gatggcaggctgacagcttcaggcagattgggcagagagtggggagcagaaggggagggggccatgggcacacaggagagcggcagcagcggttcacgaagtcttccccaccccccaccccccacctagccacccggcgcgggagcgtgtcattggccagggacatggcctcgtggagtggtggggtcccgagggctgcctcggccccctcgcctcccagcggcacagcccgcttgggccagcacctgcagacccgagtcgtttccctggagagcgctaaggacagcatgggccgccact

SEQ ID NO: 223497 - DNA, 188 bp, Homo sapiens
  chr8:141260487-141260675
  hyper
aaccataattaatgcgagtccatgcctgagaatcaaattggatccacacgtggtcccccattagatgtctctgagaatgttagactgtgagctacagggggtcgtctcccagttcccagaggccacaaatgagcctctgccactgagttcacagccacttcacataagggcgccgtgattgtctcgtg

SEQ ID NO: 223498 - DNA, 81 bp, Homo sapiens; identical to SEQ ID NO: 201611
  chr8:141644414-141644495
  hyper

SEQ ID NO: 223499 - DNA, 561 bp, Homo sapiens
  chr8:142010302-142010863
  hyper
caccgcggcagagtcgggggctgggggcggggaagaggagaaaacttgggaagcacaatgactccagtgaggacttcagtgagggctccagggctcccgccaagaagcccacggggctctaccaaacttgagggtttgcgttcggggacacggcgggcttggggctcgggcaccggcaggccgctcggagcccacccttggctgcccgcgaggccgcgcccgggggacggaggtcgggccgtcgcgagcctccctctcgcgtccgggcgaaccctgccgacgtccctgcgatttccctcttcctcctcctgcctctccccttttgtttttcaggcattgggtccgctccggcggaggccggcccgtcctccccgcgcctctgtccgccctgcgcgcccccagagccccggcctcctcgtcttcctcaggcccctcggcctctccgcgcgcccggccttttcgaaagccgccccccccttcctcctcacgtctcccggactccccacgtcccccagcctttctgtcttccccgaaccccttggcctccccgcgcgcccccaa

SEQ ID NO: 223500 - DNA, 1080 bp, Homo sapiens
  chr8:142010924-142012004
  hyper
agcctcccgaccacccagcgccccgaacccccgcctcccagcgcgccccctgacctccttaagcctctcggcctccgcgagggcccccaacctcctcacggccaccggcctcccctcctcccagaacccgggccgggggcgcgggaggggccggtctccgccgcatccgccccgggactggttgggcggccccgctctgcccctccgccctcagggccgcggcccagcccacgaccgctgcacagaaggagcccgcccagcccccgacccgcgccccgcgcccggcgccccgcactcactcggaccgcggctcggcgccgtgaagcgaaggcagacgacgacggggcggcgctgggcgacagcagccgcgcttcctcccacgcctcacgccgcgggctcacagtggtccgggaccggcggcggcggcggcggcgcgggctcgcgccctcgaggccgtgctgcgtcggcgcgggcccgcgcgcgtgcgcggcagccggctgaggcgcgcgtcctctctcggcagcgcacgcccgacccggtctcagtccggagttcccgcctctcggggggactgggcatgcgcgccgcccccgcgcatgcccagcgcgccgctaggctctgctcgcgtaatttgtcctgtagtgaccgcgccggggtttcggggtggcccgaggctgcgcgcgggcgtggcggccggacgaggaaagccctggtctcgggggtggccggggtcgccccgccgagcggacatcctggggtcccacctgcctcgctctccgccagcgggattagacggacttcgggaaagtcctccccatctccttccctgcccccaaatcccgaaggggtcccctctggagaacctccctcctgagcggccctgcggccccgcccccagagttggacgcccgctgtcgggcacccgctgcgggccccgggccttgcagtgcactctccaggcaccacaccgaccctaacgagcggttcctgggccctttttgcagacaaggaaactgaggctcagagattcttttcatggcattatagctaagttgggctgggccattatttgattttgga

SEQ ID NO: 223501 - DNA, 180 bp, Homo sapiens
  chr8:142012067-142012247
  hyper
gccagcagggaacgagccctgcaatccctcccgagggctacagacctgagacgggctccaggaaaaggagggaaggctcgccccgacaccgacccgggcttccgcggtgtgagccagtttcagcgaggagctagttggttatgaccggaacgtgccgtaggtggggtgggggaaatagca

SEQ ID NO: 223502 - DNA, 334 bp, Homo sapiens
  chr8:142138200-142138534
  hyper
cctggaggcggcagcgggcggcgcgtccggcctttgtccccccacgctctccagggtaggtccagggactgccagatcaggggaccctttgcgtcctggagccttgggggctggatgacgtcgccgggcacctgaggaccccgcccattcctccctcggttccccagggagcgggcggccggcggggctgggcggggccgaaggaaggggccgcttgctccgacgccgcgcacgcgccagggcccgcaggcgggttaggaaatgacgaccgcgcgcgggtctccagcagcacccgccctaggaccggccccgcccccaagtcccggtccctagg

SEQ ID NO: 223503 - DNA, 420 bp, Homo sapiens
  chr8:142138658-142139078
  hyper
cctccaggccccgcctccagccccgccccgcagacggcgctcgcagcgcccccggcccccaggcggcgcggctggtccccaggggtctgcgggcgactgcgcggctgaggcgcccgagtgcggtactggcggcgggcggcgggcagccatggcggaggccgcgtcgccgcacttgtcgctgccctcggggctgctggagctctgcgcgctgctgggcgccccccgggacagtctccgaagtctcgagcaggtgaggggcggggaaactgaggcggacgtgggccacgagtcggcagccgggacagcagtcggagagcgggcgcccgggtgccctgtgggttggcgcggactttccgagggctgagtcccggtcccccggcggtgaccccgcgcgcctgtggccggggatcgcgcccgagc

SEQ ID NO: 223504 - DNA, 360 bp, Homo sapiens
  chr8:142139201-142139561
  hyper
tgggggtgccgcccctcggagagtctctggggcctctctcttcagtcgctcccatcttgggcaggtgcttctgaaggtggggtgcaccagacaacgggcggaagccgccggagcctcacggtctagcgggcccagccctcgctgctgaaatgatttcattctttatgctgggatgtgttgtcccctgagtagtgggttttgcaccaggcacagaataacgagagagcaatcttagagttagccgccggcctcgcgtattctgcatgaacccctttgcgatgaagcctatagctatttttctcccttgcggtaccacccccacccccaacccttcctccatctctgcaccctcgcagccaa

SEQ ID NO: 223505 - DNA, 105 bp, Homo sapiens
  chr8:142297652-142297757
  hyper
aattacagacagttgagtactgtcttttctgtgaacactagcatgtatttagcttaaaaggatcttctgtgcggcatcttttcagtctagcgagagaatgcttta

SEQ ID NO: 223506 - DNA, 360 bp, Homo sapiens
  chr8:142317782-142318142
  hyper
aggaccaggagttagaggcgccaggctcctctctgggtagagaaaccgaggaactgggggcggggaggactgatgggtgcgaaagcgggccgggtccaaatgaaggcgcgcgccccggggtgggggccggggtggggggaatgagggaggctgcagggctggggaccagggcaggtgcaatccggaaagaggaggcgggaaggaattggggggccctgaggagccagcgcaagccgggtgggggcacgtcccctcccccggagaaggtgcggggctggggctgcggcgcggacccgacctggaggccgaggctgtgcgggaggtgggggtggggaggctgcaggtgcccggcgcccaggt

SEQ ID NO: 223507 - DNA, 406 bp, Homo sapiens
  chr8:142318191-142318597
  hyper
cacctgtctcctccggccggggccgcgggggcggcggggcggccgggccgggccgggcaggggctacgggggcgcggagccccgggcgcaccggggtcgggaggcggctgcgggtccgggcgggggctgctccctcggccggccggccgggcggtcagtcagcgacgcgggcgcggagagagcgctgcgaggctgcggccggcgcgcggagacaacgccgctttatcgggtcggaaacagccgctccgcgccgcttccgctgacgcagcgccggcccctgcgcctcatgactatgcagcacccgccgccgcgggacggggattcggggggcggggtctgcgccgcgcgcgctcattggcctccgctgccgcccaccccgcccccgaacggccgccccgcccccgcc

SEQ ID NO: 223508 - DNA, 137 bp, Homo sapiens
  chr8:142425663-142425800
  hyper
agccccgcgcccccgcctcccacatgactccgggtgggcccttttgacgtgcgcggagggcggggggcagggggcggggcgggggggcagggggcaggggtggtgaagggtagggggcgtggcggggagaggggatg

SEQ ID NO: 223509 - DNA, 799 bp, Homo sapiens
  chr8:142427479-142428278
  hyper
gaggagtgcccgggcggtggggctggtgggctgggcagggggtctgaactggagggactcgggcgccctcctcctcagggtgcaggacagcacctgcacggcggggccgcatttccatttccaaagctgggcgcgctctgtccaggcctccccaccaggagcgcggcccggcggctcctgccctccggacccccagcccacaggcccgtgcagccccatgagggggccagggggagctccgaggttctagggagggcgcgcaccgggagagggcgccgggccggccggcgggaggaaggaggggtcccgggcggcagcgcccccggccctcgccgcgccccgcacttccctttcctggctgggcttcctcttccccgcgcccgccctgcgcggcccctttgtttcccgggcagggcgcggctatatttaggcggcaggtgtgggagcccccggcagccgggtcgcccgccggtcacgccccccacgtgacgcccgggcgctataaatagccgcaggcggcggtggcggcagcgcctggagccggctccgcggcggaggggcggcgccccgacccagggccagcaccgtgggcaccgccaggccggcgcgtatggaggcggtgggacgcctgcggcgcgggtgagcctggcaggtggggacgcggcggacccaggccttccgggaccccagccccgccggggaggaggtggcgccctccggagggctgggcgggagccccgctggcacccagggagggggccgcgccccttaccacgaccccacccgcgactggttcccc

SEQ ID NO: 223510 - DNA, 688 bp, Homo sapiens
  chr8:142528219-142528907
  hyper
cctctcttcgcgcccggcctcctggtctcccgcctgcgcgggccgctcccggccctccccgccctgccgggcgttcactgtcccctccgcccgcaggtcccgcggcgcccccggagcccgccttcccggacatctacggcggggacgcgcagctctgggaggcgcatttccgcggcatcgggcgcgcctaccgcgcgctgggcaagcaggacgacttcgccatccgcgtgctcaccgagaacttcacgctgcccttcccgttcgcctggccgccggggtccgaccccgcctgcgggccgctcttctacgacccccgcgaccgcgcagacttcgacttcctgctgcgcggccccggagcttcgcccccagcgctgctgcggcccctgcacgccacggcccaggcagcgatgcgcaagcggcgcctggagcggctggccctgagctgcgcccgcgcgcggggcccgggcccggcctcgtcctgctgctgcccggccccgccgccgccttcccggagcccgaggccagcgcttccagcgacggcacccccaggctggcccaggccccgccgctgccccgagagcgaacagaataaataaagagtttccccagctctcccgcgcccggcgcttttctgcacacactccgacaggcctgggcggctgggcccggcggggaaggggggcggtgg

SEQ ID NO: 223511 - DNA, 41 bp, Homo sapiens; identical to SEQ ID NO: 201620
  chr8:143429133-143429174
  hyper

SEQ ID NO: 223512 - DNA, 780 bp, Homo sapiens
  chr8:143531075-143531855
  hyper
ggcggcggcggcgggcgcggcgttggcggcggccccggcggagcgagcgcggagccggagagccgggagcacaggcggccgcgccgcgtcctggcccggcccgggcccgcgcgccagcatcgtccgcagcgcgggcatccggaccctccgggcgcccggggggctccagcaggcgcgggggaacgggagggggcctgcgtgcgccggcgggtgctctccagggggcgtcccggcgaggcccagagcgggccgggggcggcggcggctggaggagccccccccacctccggtcgggcgcccggctcagccgccggcgacgcgaggcgctcgcggggatttgcaactcgccggatcgagtcctcgccggcggggccgctgctgctggggaaggtaaggaaggctccggcggggggctgggggcgcggcgggtgggggcgcagcgagggtgggagggggtcgggggaggggcgggcgcccagacttcctaacttcgccgtttggggcttcgcagctccgaggttttgcgctcagagctcaggagtttggacccccaccccctaccccctcagccccctgccttctccagcggtggcgatggaatgtggcaggtccccgcgagcccgcattgggcaggctgaggagggggcgaccctggacgcaggagaggctcctcggcgccgccgcctcctccccatccacacaccacagcctggcacccctcttcatcacatgcacagggcaggctggggagggcgttcccgctgtacccccagcacacac

SEQ ID NO: 223513 - DNA, 2220 bp, Homo sapiens
  chr8:143531942-143534162
  hyper
tccccctcctgctaatcacgtccagggccccctacagacattgtaagggcccgagacgtcctccccccacgcacagagctcggggcaggcaggagaaaaccccagactccttctcgaagccctcgctcgtagaagccctcgcctgtagacctggcattggcagtggagactccctggaggtactctcccccacttcgggcggagggctatttttgcgccccccacccccacgcgaacgcctggctcttccctccttgtctacctttccactgggtcggacaggccgcgcggataagccgctctcaactttgggccggccctatgccgtctccgctccaagcgccgagcactcccgggcgccgagcactcccgggtccgcgtcgccggtgagcagaggccgccggccctccaccgtcgccgcgctagcttggagccgcgcggagctgcctcgaggaacgagcacggcccccgccccctcctggggaggctgggagctctggacccggccaggagccctctccctaggtccccgcggccccctgggcgaggtagagagctcctccggcctcgggagggggcggcggagctgagaatcaccgcgaagcgatgcgaccgggagggcttgacggaggctgcggctccgagcccgcgtccctcctcctggccgcggcggctcctgcttggccactccccggcagcctgaagagaacgcctaatctggcaccccagccccaggccgctgggcaccttacccctttccacttttattttgggcttctaagtttcttggagcgcaggcgcctaggctgggacccgaagagccctaagccagccctctttcagcacccgtccccgccgcgacctccccgttcttcctccgggtctggggcgcagattcctgggctgcaactccggagtagttgaaaggcaggaaggcgtgtgggcgggtagggggcctgcactcccgccccagaggagccgcttgtcgtttgtgttggggagggagctgggaggtctgctctcccgctccatcctgggaacccacggagaccctcggtactctccccacagacacaaacacacgccccctcggagcgagagccgccgcgggggaacagcagaggccgcgcgggcggaggcgggggaaaggggagctgggtcccttttctatctgggagggaggtggtatacggtgtgtggggtctggggaggcgactgtcacgtctcctagaaccctcatgccttccactcgtctgcgaccccggctgccgaggaggcaacgagggaggtcgagccgctccctcccgtgggcggcagcgaaactctgcgcccgcacgccggggtgccgccgagtccggctttgagtacccagcaaggtcaagcaggcgaaggagggggcgggggttcctgggcgcgcccccgtccgcgcacagtcggggccttggaagggggtgtgcgcagcccgccgagtcagtcccgctcgcctgccgcccgcgcccggtccccggaggcggacgttgcgcgcgttcggggatcccggagcgcccggcgccccacgccctcccttcggctcgctagctgctccttggcgctgctttcagacttgttgcgcctcgatctggggggcagaaggctggcccgggagacccggcggctgagggccgagccgcgaagcccagggatgcgccagagaggcgcgcggctccgcgggtgggcgctgcgctggggggctcgagcctggggtttgccgcctccgatcccagggacgggcgcttgttcctgccggggtcccgcgcaggggcggatagagggcgattcgtcgcctcggcctcaggcagcactcatccggatcccgggctagggagggggcgcagccaagttgtggagccctcggaggcccttccctctcccgcaggctccggcccctctcggacctcggtggccgcgtccgtgaaatggggacgcgggctctgctctcggatcccttccagcccccgaccctccgcacttgtcccgagatccaacgtgcccggtccgcagcgtgctgggtctgcggcgtcagggtggcccgagtcccgagaccatctgcgcttgcggacacagccgcggggcctggcatgaagggccccagggagggcctagcaagcgcccggggtccgagcagcctcctgcggcgtcctccgcccccggtcggcccgaccccgcctccgggagtgggtc

SEQ ID NO: 223514 - DNA, 180 bp, Homo sapiens
  chr8:143534210-143534390
  hyper
aggcggccggcgcggggccgcagtggcggaaggcggagggccggcgcgctgccgctgactgccgggagagggcgcccgcaccgcgcccgcgcggccctgcccgccccttccgtctcctccgcgcctggcccgcggctccggccccatcttgggcagccccggccgccacctccctcccgc

SEQ ID NO: 223515 - DNA, 240 bp, Homo sapiens
  chr8:143534443-143534683
  hyper
cccgtgacgcgcctcgcgtctcggccggagcccccctcgccggcccggcccggtccccgtgtgcggtgcgctggcgtgagcgcgcgtttgcgtgctggtgtccatgtgtggcgcgcatgcacgtgcgtgcccgtccgggaggctgggggcacgtgtgtgcaggcatgcagacttgcacatgtgtgtgcgtgacgggggcgggtctcgcgccggtgtggccccggatggcaggatttagtc

SEQ ID NO: 223516 - DNA, 520 bp, Homo sapiens
  chr8:143545528-143546048
  hyper
ccgcggaaccccggcggccccgcgagctaggatgaggggccaggccgccgccccgggccccgtctggatcctcgccccgctgctactgctgctgctgctgctgggacgccgcgcgcgggcggccgccggagcagacgcggggcccgggcccgagccgtgcgccacgctggtgcagggaaagttcttcggctacttctccgcggccgccgtgttcccggccaacgcctcgcgctgctcctggacgctacgcaacccggacccgcggcgctacactctctacatgaaggtggccaaggcgcccgtgccctgcagcggccccggccgcgtgcgcacctaccagttcgactccttcctcgagtccacgcgcacctacctgggcgtggagagcttcgacgaggtgctgcggctctgcgacccctccgcacccctggccttcctgcaggccagcaagcagttcctgcagatgcggcgccagcagccgccccagcacgacgggctccggccccgggccgggccgccg

SEQ ID NO: 223517 - DNA, 295 bp, Homo sapiens; identical to SEQ ID NO: 201622
  chr8:143556723-143557018
  hyper

SEQ ID NO: 223518 - DNA, 240 bp, Homo sapiens
  chr8:144241219-144241459
  hyper
tccgcccggagctcgcagagccccacccccagccccttctccagagcgtccgccgtcacagcatccccgccgggagacgtctggcctctggggcgaggtgacagctcgagacgcctccgccccgcgccggcacctgtgtgggggagcggatggggggcgtcctcttctccccggggagctgcaggtgcgtccggacaggaatgagcggcaggggcgggagcgggtgggacctgccactgg

SEQ ID NO: 223519 - DNA, 720 bp, Homo sapiens
  chr8:144241477-144242197
  hyper
ggtccccacccccacccctgggctggggggccgggaaccccgggccgagtcccctcccttggccttccgcgcgcgcctcggcgctcaccgcggatggggcgtggagcgcgggcctcggggtcggggggctcactcacatcccgggggtgtccgcactccgggctcgggcggcgtgcgcggcgcggggagctgtgcccttcggtctccctgcggaccggaatccgggcgcagcctcgtctttcggggaacgcagccgcagacgcggaccccgcgcgaggggcggggcggagccggggcgggggccgcgcggggggcgggggcggctgggagacgcgcggggcggggggcgcccggggctcgcggcccccacgcaggtagctggcccgggccctccgcgcccccttgctggcgcgcgcgctccctcgggttcccgctccctccctcgcggcgccccctgctcctccccagcctccgcggccccctacccaggcgtgggcaggatcccttccccctctgcttggctgagatccccttggaatttctcggaagaacgtttactgcgaaaggaagcaaaatgcacaaagacgcagagagggggaggtacccggcgcggcgccacgcgcaggtccgggttcgcagacccctggggtcagactcccgccctggggccccgccctccccctcctccccgcccctccccaacctcatacccgtttcccc

SEQ ID NO: 223520 - DNA, 135 bp, Homo sapiens
  chr8:144484160-144484295
  hyper
gccccacagtgctccgtttggcatcactgatcagccgcagggctcgcccgaagtctgcactgacaccggggctcaccccaggtgtgccacgtgggttctggtgcacactgctgtttccaccgtcgtggcaccaca

SEQ ID NO: 223521 - DNA, 180 bp, Homo sapiens
  chr8:144510878-144511058
  hyper
aggaacgccggtagcagggtcgggggcaagcggggagggggcaggcaggggccgggcccctcctggcgagcgactcatgctgtgactcgcgactgagggcggaccccggctggggaaagaaggggcttcctccaaggttttcttttctaatcaccaagcataataattataaatacttcg

SEQ ID NO: 223522 - DNA, 1727 bp, Homo sapiens
  chr8:144511086-144512813
  hyper
gggaagttaaaaaaggcaaggaaagggaggctgagaagagaacgaaggagggcgggggcaggcaggggccacccgggaagggacggcagcgcggtccctctaggctggcagggcgaaggtgggaacggagaaccacgttcaacgtatgtacaagcggacgcttggaaagaagttagacctggctcaagtttccttagaaatcaccgttctccgctcaacctcaggacggcgacccgggccgacgcgcgcgaacggggaccgggagcgaaggggcctccagccccgcgcccgcagacttggcaccggggccagcacggccgggccgggcctggtgtccacgtcctgtaccgcggagtccgagccgaggccccgagaggcctgcgcgaacttgtccccggcgacggcggcgcgggctcggggtccggcgcctacaggaagaagtcggccgtgcccttggccccgccgggaccggcctgcggcggcgaaggctcccgcgggaaaccggccccgcccgcgctcccggggccgccccggcccgccagcttctcgtatttctccttgtacaggtcccgctctttggccaggcgccccacctccagcttcagctgctccacctggctctggagttggcacttctcgctctccagaatgtgccgctgctgcacccgcttgaagcggcaggactgcgcgtagccgcggttcttgagcgtgcgccgcttctgcttgagccggatgacctcctccttgctgaagccgcggagctgccggttcagctcgcgcaccgacatggacaccagctggtcgtcggagaagcgctcctccaggcgcacgtggtggcccgcgccaccgccgtgtcccgcgccgccatggtggtggtggtggtggtggtggtggtgggcggcgtggtgatggtgggcggcgtggtgcgcgccgtggtggtggccggcgcccatgtcgtccgctccgccgccgcccgcgaagcccgggccgcggaaagcctcgtaggctgcggcggccgccgggtggtgcgcgccgtggtgcgcgccgtggtggccgctgccgatgagcgcctccaccgcgtcctcgggcgtcaggttgagcgcctcggggttgaggtgatgctggtagccgctcatccagtacagatcctccagcgccggcttccccgaggtgcccccgacggcgccggggcccccgctcggcggcccgggggcgcccccggcctgagacgagccgccgccgccccccgcgccgccgccgccgccggtgcccgggctgggcgcgcagaagctgggcgaggagggcacggaggagcagggcgtgctgagcggcgtcgaggacagcgagcctggcggcaggcggtggcagaagcgctcggcctcgggaggctccttcttcacctcgaacttcatcaggtcgaagtcgttgacgtactcgatggccagcgggctgctgggcagctcggcgcccatcgccagctccgcggccatcgcccggggcccgcgcccggccgcgccccgacgggcggcgtgggagtggggggggagctgcaggcctctcccccccctgctccccgcgggcggcggtcccggcgggggcgggggggcgccggcgcggggcggcggcgccgaggggcgcagggaaaagtttcacgtggtcaactccggggcggcgcgctaggggcaccgctggccaggtgtctcgggcgaccccgggcccgcgtcgcc

SEQ ID NO: 223523 - DNA, 324 bp, Homo sapiens
  chr8:144636562-144636886
  hyper
cacaaacgcgcacacgtacgtgtatgcacacgcgcacaaacatgcacaaaacacggacgtgcatgcacacgcgcacatgtacacaacacgcacgtgcatacacatacgcacaatacgcacgtgtgtgctcacgtgcacaaacgcacacaacacgcacgtgcatacacgcgcgcaaacgcacacaacacgcacgtgcatacacgcgcacaacgcgcacacaacactcaggtgcataaacgcgcgcaaacgcacaacacacacgtgcatacacacgtgcacaaacacgctcaacacgcacgtgcaagcacccgcatacaaacaggc

SEQ ID NO: 223524 - DNA, 137 bp, Homo sapiens
  chr8:144640633-144640770
  hyper
ccgccccctcccccggcctggctggagctcccgagtggggccggccgctggctcccgggtgggggatgctggccctgctgccccagcgttcgcccagaaggccccgcgccgcacacgggggcggaagctccaggctt

SEQ ID NO: 223525 - DNA, 85 bp, Homo sapiens
  chr8:144680874-144680959
  hyper
cggcgctggcggggcgaccgcgtaacggtgctgctggccgcaaacctgaccggcagccacaagctgaagccgctggtcatcgggc

SEQ ID NO: 223526 - DNA, 53 bp, Homo sapiens; identical to SEQ ID NO: 201633
  chr8:144691796-144691849
  hyper

SEQ ID NO: 223527 - DNA, 237 bp, Homo sapiens
  chr8:145697349-145697586
  hyper
tgctgtcctgcctccgaggctacagcgtctgcatcttcacctatggccagacaggcaccgggaagacctacagcatggaggtgggacagagctcacgccccagtgggagaggccccaggggccctgcatgacttggatgtgagcccggtgtgcaccccaccccatcctcagggccctcctgaggaccccggcatagttcctagggcgctgcagtcgctgttccgggagatgggggcc

SEQ ID NO: 223528 - DNA, 280 bp, Homo sapiens
  chr8:145697859-145698139
  hyper
tgcaccaggtagggctgcaccgctctccgagaccccgccccgtgcttccacttgggggcggggaccctgcacctgaccagcccttcgccccgccttccagatgctgaaactggggaggagcaaccgggccaccgccgccaccgccatgaaccagcgcagctcccgctcgcatgccctggtcacgctgacgctgcgcgcggcgtctccaccgcgcgctccaggcaccgcaggtaccacggccggtgcctgagccctgcggagtctccagagcacccgaggc

SEQ ID NO: 223529 - DNA, 477 bp, Homo sapiens
  chr8:145726121-145726598
  hyper
cctgatggacgagacgccccttggtgagcttgcggggcccacctccacctgggggagaggacaggcggggagggcgcccctgacgcctgcgcccacttctcagatgtgtgcggggacgaggaggtgcgggccaagctgctggagctgaagcacaagcacgacgccctcctgcgcgcccagagccgccagcgctccttgctgcgccgccgcacctccagcgccggcagccgcgggtgagcgccgcccccagcaggccccgccccgggcttggccccgcggacgtcagccccgggcggagtgccagccgaactgggggcagagtccgagggggtgggcggggtcctccgggcactccccttcccctcactccctctcctctctcctccccaggaaggtggtgaggcgggtgagcctaacccagcgcaccgacctgtaccgcaagcagcacgcccaggaggccatcgtgtggcaacagcc

SEQ ID NO: 223530 - DNA, 321 bp, Homo sapiens
  chr8:145733644-145733965
  hyper
cggacaccgaagggcgtcacgggcagtggctggcggtgtccttctgagctaagctgggtcctgacctttcacacttccctcctaacttccatggctctgtcaccgccttacggaggagctgaagccacagacacagcaaggttggggtccgcaccggaagtatccagtggtagacggcggaacccttaagaaacggacgccttcatgcgggcggctggagaagcgggggctgggcactgcagcaaccacgcttcggctgacaccaggaaggaagcacgcctggagcggatccgaaactactgagaggggccagggctggcc

SEQ ID NO: 223531 - DNA, 104 bp, Homo sapiens
  chr8:145910677-145910781
  hyper
ttggggccgggcacactcacacccacctagggcagggacacaactcactctggacagggtacagtcacacccacttcgggccgggcacacgcgaactcacccac

SEQ ID NO: 223532 - DNA, 542 bp, Homo sapiens
  chr8:145910994-145911536
  hyper
cacggggaccgcagcgccggcccctccgccatcttcttggcccgcgccgcccaccgcccgttgcccgcgctctcaccggccggctgcgcgcgggccgcgccgccacagtccctcatcccggcccgcgcgacgcgcgtgagccagccgccgctccccggcctctctgctgctccgccgctgctgccgcggcagcccgtgctgtcggcgtcctccgccgccgccgccggcccagtgcgcggcggccgcgcgtcctcccgtcaccaagcgcaaccccccgcctccggctccgcccccgcggcggtcactacccgccgccagggggcactgcctcgcgaggccgcatcacgcatgcgctggcgcgcggcatgccgggagccggagtcccgcggagggcgcgcgcggcatgctgggagccgcctggccccgccccgtcgccgcgccagaggcctcccgcgcggacctaccctgtgagttagcggtgtcttcccgtctctttcggtgcagagcagttaccatctgacacgtctcggtgtggtttggtg

SEQ ID NO: 223533 - DNA, 105 bp, Homo sapiens
  chr8:146052101-146052206
  hyper
tcgccgggagccacgcggggaggtccaggcagtcgggacgcaggcagcgtcctcgccgaggctgcgagtccgtggccgtccgggggaggcgcgcaggctctgccg

SEQ ID NO: 223534 - DNA, 36 bp, Homo sapiens; identical to SEQ ID NO: 201641
  chr8:146078071-146078107
  hyper

SEQ ID NO: 223535 - DNA, 786 bp, Homo sapiens
  chr9:113512-114298
  hyper
ccggctccgcggggcggcgcggggcggcgcggggcccggagctgcccaactccgccgcctcgggaaggcggcttcgggcccgcagggagccccggggagggttcccggttccgccggcagcggcgtcgaggggtgcctgggctcctggggaccgcgagaggaaaaagaacggaaatcgcaccggggaggaaggacgcgcagaacgcccccgtgaagcggggtgctccggtcaggcgtgcgcgggagcgcggtccgggggagtccggcggcgccgtcgcgcgcactcggcagaggcttcgcgggagaacgcgcagcccggggcgtggggcggggaactgcccgcgcgaggctttcggcgcgtctgggtctcggcgagagcaaagcgcgtcctggcaccgggggcggcggcgcagaggccgggaggaagaaatccgggccctggcccaggtcgggcttccacccctgcgacccgcgagaggcccaggcgggaaaggcggcgagtggcgtcagcggttccgaaagcaaacctggcccggtgctactgcccgagggtcgccgggcgcgtttcctaattcccccgagtctggaaaacggagacttccgtagcgtcttcttcagtgcgtgctgcgagtgctgaaggaggacccggtgcctggacgacccggagcaggggaagcactcggccgacgctgtcgctgtcatcggcgtcattggcgggcaggacagtggggcgggtaaggggcctccccgcgcctcccggcccttcgcgctcggcgccagctcttt

SEQ ID NO: 223536 - DNA, 240 bp, Homo sapiens
  chr9:214546-214786
  hyper
tgtggggctcccccgacttgcctacattccctggcagcctcgcagcttcgggcagatggagcttccggcctgcgcgcagtggtcgcctgtcgtccgcccgcgctcccttcggccggaggtcggcggccccgggcagagcgcgccgtctgccccagtatcgggaggccagttccgcgctgggcccacgccctcctcgcccgccgctgcctgcgcgccaggccgggtggcggagccggccgt

SEQ ID NO: 223537 - DNA, 1320 bp, Homo sapiens
  chr9:503993-505313
  hyper
cggaggtcacaagggaggtgcccttggaggcgggaggtttctggccgccggggcgaccgtgctgacgaggcacctgcaggaaacagagctctgcacgctccggtccccctcacccggggagggagaggaggtacagaggcgctgggggaggacgtcgagcaggccagcctcgttgccagaacccccgccccagccggagatgggagcaccgcaccgtctcacgggggctggatttcttctccccttgcgggtgtgtgtgcgaggatggacgtggtaaatacgggttggcagaaggagcgaaccgcggtggaggaagttcttctgcttagttctcgccgcggcgaggcccgcgggccaggcgcggcgacgaaggtgcacgaaggtgccccgcgggcctggtggagttgcagcggcgcgcaggcgcactgagggccgcccgcggccggctccgcggtacaaagagcgcccccgcggggagccgggcgtcctctgggcggagggagcagccggggcttcgccggcccgcgccgttcttctcacgcgccgctccggggcgcagccacagctgtcgcccaccgcgggtgagaggcttgctggtccgccccggcttccccgccccggcggcggccgtgcggttcgggctttaattctggcgcttgccagccggggccgactccgccccctgcgccccgcccttccccgagctccgggtccgcggcggagcgagcgagcggccggcaggttgggaggagcggccgaaggtgagtgacgcggcggggccgtgccgcgccccgtgccgcggcgaggttgtcccggagcgcgaggcccctacccctgcctcgggctggccccgcgcggagccgacttggcgcgcgccggggttgcgcggcggccgtggcggtggcggagggcagcccccgcgggctcccgctcgtgcgggtgaacccggcggcctcggggcggtcctgggggggggtccgagaggtggcgtcggccccgcggccgtcggagtttggcgcgctctgcagcggcggcgctcggccggtctggaggagggagaggcgcgccgggcacggagcagcgagaaagttcgggccgggccggccggcgggagggtgcgggcgcctggctaccccggcccggcgctctgtccctcggatgcctctgggcccttccctagcccggggcggaacgggggaccctctctgaagcggctctccgtggagttggatgttgcccttcgcgggagggagtggcggtcaagacccctttatcctcggccccagaggggcaggtggcctcgggtcgccctccgccaac

SEQ ID NO: 223538 - DNA, 354 bp, Homo sapiens
  chr9:505388-505742
  hyper
cccaacccggcgcgggcagcgtgggtttccgaggtcccgcggttccaggtcgagggaaggtgtaggggccctgaagcgggctggtccccgaatgttgcgttttctgtgccgctttgggcaacacgcagtggcgctcgcggcagccacggctccttgaccgttcatctccttcacccgggtcccgtggaactttcagaggcaactgttcttggtggctcttgcgggtcagcacgagccgtgctgcacgagcgtgacctagtgaaggccttgggcgagttggcgttaacaatttatggcgtccgccagcgctcgctttccgcacgtggcctctgcggagggtcagcccatcttatt

SEQ ID NO: 223539 - DNA, 431 bp, Homo sapiens
  chr9:706973-707404
  hyper
ttttcagaagataccggtttcctgttttcattaagaaaacagggaatgcggaacagctgagtgcggcgggggtggtgtcactgcagccggagggagacctcgccggtgaaagctcagcctatggcatccgagcgtggccggccaagtttacacgaatgttgaaacttctcctcacggggtgaggatcgagggcgcccgaggccgggtccggctgagctggagcgagctgtgcggggcagcgcgggctggcggggagcgcggcgggcgccacgtggtaggtgagctgcgagcggcgtggggcggccaccgctggccgaattccggggggcctgggcgaggggggccggccgggaaggtgcgcactgctgggccgcttcactccaccgcaggcctacgggagtccagcttagacccgccggctcccacacaca

SEQ ID NO: 223540 - DNA, 637 bp, Homo sapiens
  chr9:841600-842237
  hyper
gttctgaaaagtatccgaaagttctgagtcgcgcgcgcgccaaaagaaaaggcacaaccccccaccactccgggcgtggcgtgcccagacctcgccactccagctgcgcctccggctgcagcgcacacgtctcctgcgcctcctcctccggagcgtcgctgtccgtcgggttcatccctcgcagcagtctccaggcgagagagggggccagagtgctcgcacttctcctaggggcaccatgcccaacgacgaggcattcagcaagccctctacaccgtcggaagcccctcacgcccccggggtaccgccgcagggcagagccgggggctttggcaaagcgtctggggcgctagtgggggcggccagcggctcgagcgccgggggcagcagcagaggaggcggctccggctccggggcgtcggacctgggtgccgggagcaagaagtccccgcggctgcccaagtgcgcacgctgcaggaaccacggctacgcctcgccgctcaagggccacaagcgcttctgcatgtggcgcgactgccagtgcaagaagtgcaacctgatcgccgagaggcagcgcgtgatggccgcgcaggtgggtgcgggcgtgcgggagcccgggttcagccttagttttttt

SEQ ID NO: 223541 - DNA, 165 bp, Homo sapiens
  chr9:842552-842717
  hyper
atgaagtccccccagcatggccgttgccatgcgggtcctgggttgtggagagatgcggcggtacttgccgacagcggcggcgcttggggtcctgggctcccggccacgctacatcgccggtctgggagcgccggagacgcgtctgatcccgcccgccgggcagag

SEQ ID NO: 223542 - DNA, 442 bp, Homo sapiens
  chr9:1042427-1042869
  hyper
caagtagggcccttcgtcattcttcggagtagccgcttgagggctggaaggagcagtgatagaaaccccagagacgcagagaccctccgaacttcgaactcgatcactgtcctcccccgaccgccgaacccgctggagaagcgggcgcgacagggcgatgagttaacgcggagggagcgcggaggccgcggaagccgggggcgctgggtctcaggcccggatgctgagcgcggaccggcgtgtcctccccacagcgcccccgcgcggcctcctcccgctgcgccccgcacggcgacccgccgcgggtagccctggcgtttggccacgccgtcggctgaggaccgctagagctggggggagatcaaagcattcctatggggcccaaagagcctgggattgcagtgttgttagcctggcctcgccgcgtcaataaattttcggc

SEQ ID NO: 223543 - DNA, 792 bp, Homo sapiens
  chr9:4299403-4300195
  hyper
ctatggcatccacttaccaggtaaccgggatttccacaacaaagcccggcgtgcgggtcccttcccccggccggccagcgcgagtgacagcgggcggccggcgctggcgaggagtaacttggggctccagcccttcagagcgctccgcgggctgtgcctccttcggaaatgaaaacccccatccaaacggggggacggagcgcggaaacccggcccaagtgccgtgtgtgcgcgcgcgtctgcgagggcagcggcggcagggggaggaggaggcagaggcggggtggctggaccctcggcatcagctcattctcccctgctacacacatacacacacaaataatgtttctaaaaagttcagttgcgactttgtgcctcgcctgtcctgttcatcctcgtcctgggccggggaatgcttctgggggccgaccccgggatgctggctaattgctgccggcgggttccgtcgccggtgtgaccctggacggcgcggacggcgtacagggggtcccgggaggggcagtggccgcggcactcgccgccggtgcccgtgcgcgccgcgctctgggctgcccgggcggcgcagtgtggacgcggctgcagggagaggggaagggggaagagggagggaggaaggcagccgggcgaggagtgtggatgtgtgtgcggccgcgagggccggcctgtagccagctgcttcctgagtgtgagcgccggagggggagggggaagagtgggggcgggctcgcgggtcactaggctggccaattcgaaggccgagcttgtgtctcc

SEQ ID NO: 223544 - DNA, 99 bp, Homo sapiens; identical to SEQ ID NO: 201655
  chr9:5022028-5022127
  hyper

SEQ ID NO: 223545 - DNA, 248 bp, Homo sapiens; identical to SEQ ID NO: 201656
  chr9:5054640-5054888
  hyper

SEQ ID NO: 223546 - DNA, 128 bp, Homo sapiens
  chr9:5069924-5070052
  hyper
ataaatcaaaccttctagtcttcagaacgaatggtgtttctgatgtaccaacctcaccaacattacagaggcctactcatatgaaccaaatggtgtttcacaaaatcagaaatgaagatttgatattt

SEQ ID NO: 223547 - DNA, 62 bp, Homo sapiens
  chr9:5073737-5073799
  hyper
acaagcatttggttttaaattatggagtatgtgtctgtggagacgagagtaagtaaaactac

SEQ ID NO: 223548 - DNA, 152 bp, Homo sapiens; identical to SEQ ID NO: 201658
  chr9:5080228-5080380
  hyper

SEQ ID NO: 223549 - DNA, 99 bp, Homo sapiens; identical to SEQ ID NO: 201659
  chr9:5081712-5081811
  hyper

SEQ ID NO: 223550 - DNA, 147 bp, Homo sapiens
  chr9:6412837-6412984
  hyper
ccagggtttcttatttttggtgtgtttttgagaccaaagaaccatatccgctaagcctgaggaggcacccgccccctcagctctgaaacgaggcctcaaaacggcaaccgatgtggtagccgcgcaatcttccgaaacccaaaggct

SEQ ID NO: 223551 - DNA, 572 bp, Homo sapiens
  chr9:12776013-12776585
  hyper
caggcaagagatggtgagtgtggtgcgccagccgcgggggctgggacctgggctgggccaaaagatggggcgatctgagaatggggctgggagagaggacggcaggggctgcagagcggagcgctgggcgcgtgggaaatgctgggtggaggaatgagcagggggcgctcatccggaggcagctgctgcgaggcttgtttaccgcggactttgctcggtcacggtttgcaaagacagcacagtcggctggctccactctgtgtactttcggacaacgcgactcactgcgccgggctctatttagctgccagcccgtagcctcttaggcaccagcccgttgagagtttgcagttattgcacccatctaaggcctgctgtgcgctgttaacacttcgggtaggttcaaaaggtggctcagtccaatgcacttactgcaaaaatacttcctggtttgccgggaggtggcgtggcagggtccttgcagcctttcctcctagctcacccttccaccagtaccgctccgccctcctgccctcccttcttggtgcagcagccgcagctgttccaaggcc

SEQ ID NO: 223552 - DNA, 180 bp, Homo sapiens
  chr9:13278760-13278940
  hyper
tagcggctcgcctcggggtccccgcggctaaggcgagaacgcaggaccaggagcattgctgcccactctctaccgcaacccgcacatcccgggaccacgtaacggcggatggggcgtccgggagcggcccctgcaggggagagcaacaggctcccgcgccctggaggcctggtctgcgct

SEQ ID NO: 223553 - DNA, 697 bp, Homo sapiens
  chr9:13279078-13279775
  hyper
ctaggattatccaccgcggggctggggggagtggagacttgcgagtagcaaaggaaacttctagaccccatccttttaaaaaagccacagcagcggcttccgcgaagcgccgggccgcgcggggtggggcaagcgcaccgccccaccgccccacggcccgccgccacccctacccccacccccacccccacccccatccccgcccccacccccacccccaagcgccgagcccagggcgcccgcgcaccttccccgccggcgcgcgcgcagggcgcgggggcgcgcctcggcctctgggccggggctcaagcgccgcttacccggctcgcggcgcccgcccagggccgcgacgcgagggggcggaggactggggagcaggggtcgccggggcctctggatgcctcgcctcgcccacgctcactgtcttctcttctgaagtaacgacccggcgaggagcttcggatcaaaacgcacagacactcacgcgtgactgagaaacttaatcccgcggtggcccgacgccagcctagcgctccgccgcgccccctcccccagcgcgcgccgcacttgcgccgaccggggctgccgcggaggcggtggcggggcccaggctgctggggctgccgtgacgcctgcgaccggcggggcggcgggcgcgccttggccaatcaggggacgcggccgagcaggcctgtgc

SEQ ID NO: 223554 - DNA, 180 bp, Homo sapiens
  chr9:14313265-14313445
  hyper
gcccagggcgcggggctgggcgctcgcagtggccgtggcgaggggccgctcccggctcccacgccgccccgcgacgcccgctgcaactccgggccacttctccaagggacggggatgtgcggaggttaactcaagccgctaattgtccgcaacaaaacaaaacaaaggcatttcgggcca

SEQ ID NO: 223555 - DNA, 360 bp, Homo sapiens
  chr9:14313531-14313891
  hyper
ttccgggagatgcccaagaaaatcttcgagaagcaagaatttcatctattcattttacagtcatctgagccccgcgatgcgatcaatcaggacggggctctgcgctggatcaccgcaacttcacaacaaacccagtcctccttaaatagccaaagattcaagttcactcggcgtgctagatttccaggggtgaaatccaatctacacttttaaccctcttgcagtccgagcgcgctggccgtgcttgccgaggccgccgccgccgccggtgttggctgcttttcgcctgggtttggggatttgttttctattttgcagttgttgttgttgttggggtgtagggggtgcgcgaaggttcgg

SEQ ID NO: 223556 - DNA, 780 bp, Homo sapiens
  chr9:14313969-14314749
  hyper
ggagggcgagcgggcgggcgggagggagagcggggagaatgtgtcaccgcgctgggaaagttcaaggttacagccccaagcactgcggcaggatcccggagtggtgatcgcaggcgaaactttgccgcgagccgaccatgtgtgtgcgcgaggggcagcgtgagcgagtgcgcgcgggtggcggggcgcgcgcgggagagggccggggtgggggcggggtgggatgggggagaagggagaggccggggtgagggagggggcgcgagcgctgatctctggggcggaagaggctcgcggcgcgtggtccccggcagcagcagccgccgccgcccgcgccgggtcttcggcgcccggccgcccgcccgcccgcctcgccccgcgtctgacccggccgagcgtggaggctgctgttgccgccgctgcccagagcccaggggtatcaaaacgatctcctgaaaaattccaaacgataaatcccgctctcccgctcggctccaaactcctctcttttctgctctaggctcttttttttccctccctctcttgctttctttcgttgcaaaacttggaagttgaaaaattcaccggttccaccctctggaccccgctcgagctctctccaaatcagacttaaggattgttttattatttaattacacaatcatcgctttactcctcctcctgcaaacgcgcattccttttgcaccagcctctccacaccccccgcccccccaccttcctcctcctcctccttctccttctctccccccacctctccct

SEQ ID NO: 223557 - DNA, 1007 bp, Homo sapiens
  chr9:14314803-14315810
  hyper
ccaaaatagctcttctttccgctgccctccccacaccagcacacacatacacacccccgaaaacccgccctggaagaggtatttcggtgctcgctgcggactcttttaagccgcgggaacatccgagtgggagaagcaccgaaaccgtctgagcccgagaaaggaacgagtggaaaattccctcacacccaggccgcccccaggccggggctggggcgcggacactcgcacccggggcgggctcagtccgcggagcctgcggctgccgggaaaagggggaggccgagcaggcggggacctgagcgaacttgggctcaagtagttggggcgcgccggcgtggaccaggggggtgcggcgcccagcccccgacggccccgcccggagcccgggttcgcggatagggagggggtgcgggttcgtcccgggtctgcccaccaggggcccgcacccgaggcagtcgcggcgcgcggcgcttcgccgcggtttgccgccctccccgggggtgccccgtgcacgtggcctcgctctgagcgggaggaccgggccgagccgccgccgccgcctcttgctccctccacctcctccccgcgcccggcttcgctctcctcctcctcctcctgcagccccgctggctggctcccaatccccaccccccggggcccggggcgccggcggaaagcgtctccctacccgcccgggtgcaggcggggcggggccgcggcgcgcccggggctgcggggcgggccggcgggcgcgcgcgcgccgctgcagccctccagaggctgcgggccctgagccgctcggcgcccgcgccggctccccaccgcggcgctgccccgcccccaccccgtcgcccgtgcaggctccgagtgaatgaacttgattccagggattttgaagaaggcggttcgccttgcaccctttctgcaccccccgcccacatacacacaccgccccccaaatccagttttctgcttggggtggatggggacgagggggaagcaaa

SEQ ID NO: 223558 - DNA, 795 bp, Homo sapiens
  chr9:14322343-14323138
  hyper
gtggtgggttttattgttgttttagcggggctgctccaggagtggggctgcgccggtcagatgcagccggcacggccccggggtcgcgcgatcgccccttccccgccctcggattggcctggcccgcggcggggctgccccggaaccgccacccagcagcgcacccttccgcgcccggcccgcgctcctcctgcagtcgcctccctggctttctctttctccggctcgcggcccgccccgccccaccctaccacggccggcctgggcgcgcgggaagcgcggctcttcgcttccgcctggcggcgggaaggaaaccgaaaggaggagccgggggcgggcgcgccgcgatgcatattcatcagggcgcccgggacccgggaggcgggagcgggcccgagtgggtgtggcggcctgcgccgcgcggcgcccctctcgagcgtgggtgggtgcgtgggtagcggtggggctctggtctttgtgcggccgcatggggccggagagcggcgagggcgtgaccgtctcgggggctgctgcccaggctccgcgcgcctttgtgcttcccgaccgtgtgtctgcggcgcgccgcgggcaaggggcccctcgccggccttctggagcaggaacccggccgaaaacgccgcggaaagactctaaaacaacaataatgataaagaataaggaattgctgttacttcctcacttcccgccacgttgctggcttcaacttcgccaggccacgtttgtttccgtgtaggaggactcccgaaatgttcctggctgcgcagcgttatcatt

SEQ ID NO: 223559 - DNA, 1002 bp, Homo sapiens
  chr9:15306389-15307391
  hyper
aggccggagtcggttctcaaagtggtttccctccggccaccaccgactctgaggacctgctaggggaagtgtcccggccccgtggagggagagggaagcaccacagcctgggctgcggctctagccctccagccccagcccctggcagccctgccctgctgtcgcggcaggtacccctctactcattgttcctcaggctgccccctcttttcatcaatcgtaagcctttcggttctgccaccaggaaacttccatagaaggtgagattcccaggtcgagggatgattccacgaacacccagagagccagtgccaggacttcagggtcagacttcgtaaagcccaggcgtcgctgggccggcccggaacagctcagagctgcgggtcctatggtcccgcgccctcacgcccatccaagtgctggcaggacgtgggtcctccatccccacgactcgcggggccggcgctccgaacctcggcactgcgtccgctccgcgcgccgcagggaccctcctagctccagcggggacagacctaccaaggccgggcgcccccacccggcgcccgccagcccaccccagagaggggaccaagggggcggggcctcggccgtcctagccgggctcactcttctctcccggactcctgtccagggcttcaggggccgggcccgcaatccccatcggatcgtacctcgtccgcttccagctccgctcggctgcctaagagcgccatattcctcctctggctgctgccacccaaaaaccaagcagggaactcagagccgactcctgctctcggctctgggctcagcccagcgcaaaggagggcaaaaggggacggcccggcgctccctccgggtctcgggcggggcctgagtgcagctactcgatttccccgcccccggagccggcaggccagcacagcatccatttcctccccggacgccgcgccgctggccgggccacttgcccggcccccagcgggcggcagccccgcccaa

SEQ ID NO: 223560 - DNA, 360 bp, Homo sapiens
  chr9:16870775-16871135
  hyper
ctccgggcctccgctctcgccgcctccgcctccccgcccgcccgcgcgcgccctcgccgcggcccctctgcgctcaggtgactgatttacactcgcgccggggtcgcgctcgcgccccgagtcccagccggcacggttccccggctcctcctcgggacaaaaaaaaaaaaaaagggaacggcttgtcccgggagggggctgccctgctcgcgggaggcgggggaccggcgggcgaggtgacctcggcggccgtgcaagccccacaagtttttcctctctctgcagaattgtcgtgactacaatgttgcttcccttttgcaaaataaaagtcggtcgttgtgttgtttgtcctcagaggtc

SEQ ID NO: 223561 - DNA, 180 bp, Homo sapiens
  chr9:16871341-16871521
  hyper
ccagctgtcacacacacacaaaaaaaaattgcggggcgggggtggggagcggagcaaggagaggaggctgcgaaacgccgaggaaagggcgcgaactttattccgactgcagcaaaccgcggcagctctttccttttcgggcactcgggcgtctctgtcccctttgaccagttcctcctc

SEQ ID NO: 223562 - DNA, 180 bp, Homo sapiens
  chr9:16871571-16871751
  hyper
cgcggccgacccggctccccgcgaccctctcagcccagctcctccgcgcgccgctggggagaaggcgagtgaggcggaggaaaacccagcggacagaaacctgggacgcgaacgtgctgggagaaaaggccaaaagttgcgcgcagctgggggaaaaaagtttttctggtggcggagcgt

SEQ ID NO: 223563 - DNA, 858 bp, Homo sapiens
  chr9:17134853-17135711
  hyper
accctttcgggccacggcgcgtgcgtaccccaaggctcgcgctgggcgcattgcccgcgggaagccggccaggaccagagaacacgggacaccgcgggccaaggcgggaaaagcctcgcgcatgcgcggttcggcgttccgggctcgccgggttggggaaagggaggtggagtttccaacagggaacttgacccgttagcagccgcagccatggcggcgcgttcgcctccctcaccgcacccttcgcccccagcgcgacagctgggccccaggtccccacgtgttgggcggggagctgaagtacacgcaatgcgcagcgaggcctcgggttttgccggcgcagcgcgggaggtggtcgcggacgaaagtgataaaatctgggtgggtgaagaagggtcagggggccggcgagggcctgggggggcagctccggctcatgctcccctcctcagcgcgcccatggggtccagacggctagagggcatctcggtagaggaggcgatggtgacccggacgcagctgctggaggaagagctgagcagcctaaaggaggagttggccctgtgtcaggtatcgaggagtctcgcagtccccctttccccaccacagcggggccgggacccgtggggaggcgcgcctttctccctctgccttgggacctaccccgcccagcgacgctccctggcagatgcacaccctgcttcgctcgcggccgggggctggagggacgcggctgcgcccggctccccaaacccgggcccctgcccctttccgaactgcggccagacaggcttcgcctccgcgcccgggtttggttttggtcacttggatactcgcagtcgcatcctctccgcttcc

SEQ ID NO: 223564 - DNA, 1082 bp, Homo sapiens
  chr9:17578728-17579810
  hyper
gagacgccaggctcaaagggcaggagggccgtctgcaggcagcgccgccgcggctacctggaagcccagcaagtcacctgagtcctgcgggtgcctgggctgccaatctgcagcgacccgtccgcagcccccgggggcaggaacaccaaccccgggacaggaggacgtcctcggcccgctgactagggatccgccagcgggtgccgctgagccacatccccgcagttggcgccagcatccaggtaccgcgcgccacagcacctgcctgggcgttcccgcgcttggggcggggcttcccgcgtcccctttaagaggccgcatcacccgcccttgacgtcagagtgtttctccgcaagagcccgtgtcccgctaggctccgcgccctcgcgcccatagccccggcggcggcacgaccagaggcggccaggggagcgcgccgccccgctcggccctccagtccccctccgcctcctccctcccgcacagcagccgccagcgcggcctcctgcaccatgtcggtggccggcctcaagaagcagttccataaagccactcaggtaaggcgcgcggcaggtgcgtcccggggcagtccggggcgaagctgcgaggggcgcgctcggcgctggccgtccggcggcagcttggggagttcggcaccgagcctcgcccgcgccggccgcgccccgcctcgcaagccaaggcggcggctcggggcatccccggtctgggcgtccaccctcggtcccccgcccccggcttggtgcgcgctgccttcccgcgggtccccggcgtcctgcctggtagcgctgctcgccgcccccgcatcatctcgcgcccgtgctgcaggaaggggaccgcggctgcactgctgccgcggcgcgcaggtgccttggcggcgcggtgggagattatgtaaagtcgcctcttcacgggtgaccttgcggagtcggtgcacccggctttcccgggatgtgttggcatgagcggtggccgcactgggggtggcggggcggaggccggcggtttgcgctcctctcccttaccctgttgtcagaaccctccttccccgccgcccgcaggct

SEQ ID NO: 223565 - DNA, 240 bp, Homo sapiens
  chr9:20621170-20621410
  hyper
aatcagaaggcgatgccggggcggtttcccggcgtgggaggggaggtggctgggacccagggggaccgaagggctcctggcgagccccctccccgaaagtaccgcggcgacaggcacacgccgaggaagtctttgtgtacgtgtgtgtgcgtgcgtgtggagcgctgtgccaggcgaaatggaaactacaggcagcctctgctgatgggcacaaactcccgtgctcttgccacggggttc

SEQ ID NO: 223566 - DNA, 780 bp, Homo sapiens
  chr9:20621559-20622339
  hyper
ccgcaacacactttcaagagcccaagtggctccaaagtatctcccacctccccccaaaaaatgaaattcagaaaggcagggcggcgggcggacagccgccgagcctcggctcgcgctcagcacctcccggcgctggggcaaagttgcgtgcggccccgccgctgtcagccccgcacacttcggctcacacacgcgcgccgcggagaacgcaccatcgtagcggccgcggcgctttgcggaggtgcggccgccgaggctgctcgccgcgtccccggactgtgcccgcagctcccggcggcggcggctgaaatatggctgagttattattcgcctccttccaccgtgtgtgtgtgtgtgtgtgagtgcgcgcgtgtgagcgagagggagtgtgtgagtgcgcttcttgtgactgcaaagaggcgaggagggagggaggcgcggggggtggaggggcgagtgtgagcgtgtgtgagtgtgtgtgtgtctgtgtgtctgtgtgcgcgccgggggggggtgggggaggaggggagcggaggctgagggagaggcggcagctccctgcaagccgtaccaacctttctctaattggaaccgcggagcgctggcgctgtctgggctgcggcggcgcagggcgaggaaggaaagtgggggagggcttttattattatttttgcgcgtacttaccgagctagccatgcctgggggcccggaggtttgctggggtgttgtgtggtacccccccctcctccgccccccctcagctgtaattcatgaagaggc

SEQ ID NO: 223567 - DNA, 386 bp, Homo sapiens
  chr9:21031412-21031798
  hyper
aggggtgcctgggcacggtagcgctgcgccttgctggcgggcggggggtgccgcccgcccgcccgccgcagaggggagctcccgcctccaggccctccacccgcgccccctcccctcgggattcggccgagcgccctacctgggctgcagccaggcgggcagcgccaagggccccatgggccgccgccgccagggcttccagcgcggtccaggaaggagtaccggggaggaggcaggggcggccccgcggctgggcgcggaagggcggggcctctccacactcagcagtttacaaaaagaaaaagcccgaggtcgtgcgttggggaagagatgaaaacgaagttctcgaagtttctgcagcactgctagagcgcgtcagggcgcaa

SEQ ID NO: 223568 - DNA, 35 bp, Homo sapiens
  chr9:21032003-21032038
  hyper
gccaggttcagacacgaagcttgtgccgggcgcag

SEQ ID NO: 223569 - DNA, 68 bp, Homo sapiens
  chr9:21802584-21802652
  hyper
aatccagctgtcccggggaggaagaggaggagtcaaggcccgcccctggtctccgcactgctcactcc

SEQ ID NO: 223570 - DNA, 104 bp, Homo sapiens
  chr9:21971031-21971135
  hyper
gcatcgcgcacgtccagccgcgccccggcccggtgcagcaccaccagcgtgtccaggaagccctcccgggcagcgtcgtgcacgggtcgggtgagagtggcggg

SEQ ID NO: 223571 - DNA, 191 bp, Homo sapiens
  chr9:21995719-21995910
  hyper
gccgggtcctgagcgcggtctaagcgaggctcggctctcgtccaggaactcggacgcgggctcgccggctctccgcgcgcgggaagtcgagcccaggacgccgccttcaggccggcgcgctgacccggtgccccgacccggagcctgcggtctgcctggatccgtcctaaacctcgcgggctggacccgcg

SEQ ID NO: 223572 - DNA, 240 bp, Homo sapiens
  chr9:22446977-22447217
  hyper
ctgccccggcttccccagcctcccagcagggttagctgcggtcagcgcactttccacttgggactcccggccagaaatttctcgggaatggagcggtcacagtgtggcagcagagaccgaggcgttagcggccgacctcacttggcccctgggctagtggtggctgcccctccgcccccgtccccggcgttgccggtaccatcggggatgcaggttcccccagcgttcctgcggccgccc

SEQ ID NO: 223573 - DNA, 676 bp, Homo sapiens
  chr9:23821454-23822130
  hyper
gtgttcccgcccagagttcggactagggcgcaccacccctaccctgctagacgcagcgggggcgcgcacagaccttagcctcggcgtccaaaatggaccaggggcaaggcgcggacgccgtccccgcccccacgcccccagcacttgcctgctgtgactcgaagctgcagctactacggctcgtgccgctggccgtcagcactgccgcggaggagtcgctcggggcgagctccgcggagaggcggtggcggcggcggcggcgggaaaggggactggaagccggcggaacccccgccccacccgcgccgcgccgcgccgcgccggcaaccgccctcctcacccggccggctactgcctcagtgacgcccaggcgccgcggtcccgccgtttgtagcggggcgggaaggaggggcttgcttggaagagcgccaggaggcggggccggcggcgagttcgcggcgccgcggccgccgccggcgcgtgccctgcccgaccgcccttcgggtccgtgccggcagggagatgccgggcttcagcagctcagctccgtccctccggacttccgagtctcaccaggcttccccgacaaggtttctctggactcggtggagagcgttgagcgcccagaggaggctgattccaggtgcaagtttgcaaatcccgaggcccggggcgc

SEQ ID NO: 223574 - DNA, 320 bp, Homo sapiens
  chr9:25677513-25677833
  hyper
ggccaagcgccacccggaagtgtccactggtgggggcgggaaggcaccgtagtccaaggtatccgcgggcagggagcgggccagggcgtgcgcgaggtcgggggtagctgggaacggaggaggaggggcccgctcgaggctccgcctctcaccggctgcggcctcggctacagccagggcccagagggctccgagtcccgggagcggaggccggagtcgggttcctgtagaggctgctcctccttgtccccgctcggacgtggtccccgctgctcgaggtgcagctgcagcagggcccggcggtacatggcttccagctt

SEQ ID NO: 223575 - DNA, 480 bp, Homo sapiens
  chr9:25677903-25678383
  hyper
ttcgtgctggcctcttcagggacccggcgtgcctccgcgggcgtcccgttgccgccttcgccggggagccgcaaagcctgacggaagaggctgcggttctcgcgcttcagccgccggttctcgagccgcagccgggcgttctcctgacgcagccgcgcgttctgccggtcccactcgtcccgcgcacggatggcctccaagtggctcgccgccaggtcggcaaaccgctcctccagctgctgtcgggcgccgtccgcgcggcctcgccagcccacgccgccgccgccgccgctggggctgcccccaccacgagcccggccggagcggcctggccctcggccgtccgcagcaccgtccccgccgcagcaactcccgcgcctagtggcgccaccacgcatgcgccacatcggtcccatcccaaccgcgccgccagccccgtgggctgaggggccgcgcggccaggcgcgggcaagttcgggg

SEQ ID NO: 223576 - DNA, 104 bp, Homo sapiens
  chr9:25678513-25678617
  hyper
ccctgggcctgctctctccaggctgcgctgacacacagttcccccggggagtgctttgctgttcagccctccggctgcgcgggaaaaagcgtgtatcctcagct

SEQ ID NO: 223577 - DNA, 900 bp, Homo sapiens
  chr9:27529006-27529906
  hyper
acctccgtgaggcatcgtcagccccgggggcgacctggctgacggtgcggacttcccctacgctgccccaagccgagactcctccctcaggatcaggacgcccaagcgttgtcccccagcccaggcgcacttttgtaaaagtttgtcttcccgccacccacagcccaacacgcaccctgcaggcgtccgcggctggggatgggctcggagtcttgcaccccgaaagaaggacgatcttattgatttatatcttttcaaatcaaggacaaatcaagatcccggggtggaaagtgggcgacccttgttcctgccgggaagtgcacacgaggagccggccagaaacccaggcgccggcaggggtctgaagaggactccagccccggaagcccgtggccggcgggcagaagaccggtccgccgcctcccgcaccttcttgcacccgcgcccaggtgcgccccaaacctcgccgcccgcccgggcgagatcgggagcgagcagccaccgggctgcgccgcctcccctagcttggagcgggttcttactcaccgtggggttttacctccagcccagggcccggtcggctcccttcgccgggtcagctgcagccagcgcgaaagaaaatggtgagctcggggcaggtggggcgtcgcttgccaatccacgcaagggactctgccgccggtgcgcgaggtcccggcgagccaaccggcggacgggcgagcgcctggctccagctgcagccgccgtcgctccggagcagccccctcatgcacccagcgcgccgcgcagccggccggggctcgactgtctcgcggggacgccgagcggggacccctggcggccgcctgcggtatggcagcaccgtggagagaaaagtcgtctttgggatcatcttccctc

SEQ ID NO: 223578 - DNA, 660 bp, Homo sapiens
  chr9:29213107-29213767
  hyper
gtggaaatggagaccgggaccaccttcccggcacccggaagcctcccagcccctcctgggccaacttggctgcctattcagttttcttccgtaaccccacagacacgtcagtcaattccctggcatcaggcaggatattctcagttgcggccgctcctcttgctttctctcgataatgcccctcccccctttctccccttaatttggaaaaatttctactccctgcccgaattaggtggggatgaggcggaaaggtgtaagaagagccactccaaggcacagcttcggaacaccgtctccctgggctgctgcagcgcgaaggtgtctacgctggggaaactttcaggggaggcagcgccggtgcggggctgggcgggcggcgggcggcggcgccaggtgaggaggctttgaggaggcggctgcaaggcgggacgcaggatagccggctggggcttggcagccgggctcagagctcgggctgcgcacacacacaggcgcgcacacccgcgcgcgcgcagctacacacgcacgcccagccctgcgcccgcggcccccggccagtggcgagcgaaaagtcgggagtcctgaggaggggtaggggttccaaggatgctgatgacagaaagagtcaatcaatcctcactagttagcggattgccg

SEQ ID NO: 223579 - DNA, 360 bp, Homo sapiens
  chr9:29213813-29214173
  hyper
tccgttctctgccctgtctggcatttcaactccctagctcttttcttgaagccagttacaccccctcgacacccagcgagaggccaccagactaaagatgagccccgttcccatcgccaccctccaggggccacctccgccccttctgtagtggagaattgaagtggctgcagcagctctcctgggagctgaggggctccccgaggtccttcgaatagaggagcctacacatcgcttcgtgaacataatcccctcgcatcccgtctttacctgcccactcccttcgtaacatttcccccaaggagctcccgaaagtcgcttagatgttttgaaaatgaatttcttagggaattgtagtgc

SEQ ID NO: 223580 - DNA, 518 bp, Homo sapiens
  chr9:34591177-34591695
  hyper
ctggagctcagagacggccagctaggacttcaggacacacagcaaactagctgcgccccgctgagggtcagcgcacagccgcccacacaaggtgtcctctccccgggctctctgggccgccggcctcctgcttcccgtgccgcagaccgggattagactgtggacgcggggaaggaagggggcgttgcgacgggatcttgaggggagcaggacttgcccctgcccctgcggcgaagctctaggccctggcaaggttcggtacaccgggggccgctcctccccagggggctgaccggcctcggcgctctaatccggccggggaggggcggacggggtgaaaattggcgagtggtttggggaacggacttgacctccagatgccctggtgtccctggctcagcctctttctgccaggttgggagcagtcgggaattctgtcccggtccaacgtccccctcggcccccggggacgcagaggctgctgtcggcagagcagcagtccacggctgcggggacaa

SEQ ID NO: 223581 - DNA, 77 bp, Homo sapiens; identical to SEQ ID NO: 201697
  chr9:34646925-34647002
  hyper

SEQ ID NO: 223582 - DNA, 33 bp, Homo sapiens; identical to SEQ ID NO: 201699
  chr9:35072284-35072317
  hyper

SEQ ID NO: 223583 - DNA, 240 bp, Homo sapiens
  chr9:35161771-35162011
  hyper
cgcgtcacacaactgagggtcaaccccttgctccctgcagtaagcctgattagtgggcggagcttccttcaggatcgcaagaaagaaaggaggaaggggaccccgcctcctacgtgctcgcgggggggggcggggtcggtggactgggcgtgagttaattggctggggggcggggcaccacgggttggctccgcccaggcgctcgcgcggatcccgggtggaatgacgggagggagtccc

SEQ ID NO: 223584 - DNA, 180 bp, Homo sapiens
  chr9:35675747-35675927
  hyper
cccaccccaggcgacccgccctggccccgggtgtccccagcctgcgcgggccgcttccagtccccggtggatatccgcccccagctcgccgccttctgcccggccctgcgccccctggaactcctgggcttccagctcccgccgctcccagaactgcgcctgcgcaacaatggccacagt

SEQ ID NO: 223585 - DNA, 145 bp, Homo sapiens; identical to SEQ ID NO: 201705
  chr9:35814690-35814835
  hyper

SEQ ID NO: 223586 - DNA, 139 bp, Homo sapiens
  chr9:36257376-36257515
  hyper
gtttggcttcaactgcggcgctcctacagttgggttaacgagttacctatactgcgaaactgtaccccacccctcctaccagagtagtaaaaaatacgttcttgtgttctaacaattttacaagcgtaaaactgggggg

SEQ ID NO: 223587 - DNA, 523 bp, Homo sapiens
  chr9:36257924-36258447
  hyper
gcccagccttttcacgccaggacagctcgcctgccaggcagttctccaccctctctcgccccgccccgctcctaacgggacagtcagcatcccccctgattggacagcactgttccaggggacaagtcaacctgggcctccctctacatcccctcccctgctcatcagggcccaccccgagccacacggcggagccctgaattgggccaaagaggtgccctatggtgaggcctgcaggacattgggcgagagccgggtccagtgtgggcctcggggcgcggtggggtggaaagcggccggggaggggaggcctggggcaggaggccgggggaggcggccctgggggtgggcaggatgctctcccggagtcccacgccgccgcgcggctctcaccagacgccgtcagaggctccctcccacgccgccaccgcgctcctcgggcgagggacgaaccaagcgccacgaagcaggcagagcgcgagcctgcccctcggtttccgcgctcgggcgcgcgggtagacga

SEQ ID NO: 223588 - DNA, 180 bp, Homo sapiens
  chr9:37026263-37026443
  hyper
ctgaaatgtcgccgccggagccttgaaaggctgcagctcgctgcccaagctacgcgttgccggaggcgggattcccaggtgcctcagcccgggcggccaagtgcgttgtttcaggtcccctgcctgggatccctgcactttgcaaagttagctgcgcggctgcagaggtccgagatcctt

SEQ ID NO: 223589 - DNA, 1500 bp, Homo sapiens
  chr9:37026514-37028014
  hyper
tcgccgcctacttactatgcatggatgcaaacgggtcgtgcttacagtgtatttccatcggggcgctccagactgcaggccggcccacgccgccgcctcccggcgccaaggggctgcccagggcggatagggagcctcgccaccaggccaggcactgtgcgagctgggctcagaaaacactgctggagcttcggggtctctctcagagcctccctgctggagaccgcccggagctgcgcggagaggcgggaaatggtgctagcgcacccgggctaggagcgggtgcccaactccggctggcttccctccctggctggctcaagcagcagctccgggcccagcccggggtagctgcggccaaggcgcccgcggcttcgggggcatagcgtaggggcccgcctccgggacagccagcagcccccggccccaggaaggagcagctttgaggaggccgccggaacaatcggcccttgacttcactcagggggcggagagacccgggggctgccaggctggttccgcggcctcgatgcttctgaggtccctcctcgacccctcggtctccgccagatcctttctttctctgcttctccgagtctctggggctcggacttgccccctccgcctctctccaactggctctccgacgtctcggacgaagttgcaaagaacttcctctccggcagcgcggggtcctggcgggtttggagatgcttccgcccctgacgctggggccgcgactccggagtccccgggagcgtgcagccctccaacactgagacccgctgccttcaaagttcccgcggcccccgctgctcgcccatcgctgggaccaggaacggggacaccagcgacggactcttcctcgccggggtgtctacctcgtgccaaccaactcttcgagccccgccgccctccctcgtgggtctgattccactgtctttccgctgcctcttccgggacggccgccgtgcctgccccaggcgtggagtgaggaacagaggagagagcagagggtcccagccaccaaggccgccggggctgccggggctgagatggagccgcagtcggctctgactgcctgcgttgccgccgccgccgccgtcgctagccctccgcctgctcggcgcgcacagtgcgccaccgcgccgccccggagccgctttcaggacccgctgcgtgtggacagcgccgcccggggctcagctccctccgggcgggggcggggcgggggctaacctgccaatcacgctccaccaagccaatcagagtggcgtcagccggccctggcccgaaacaccgccccattggctaagcagcccacaggctccgcctgattagcggacacctgggcaatgggagagaatggggggcggggcccaggcggcggcgccacgttcattgacaaacgcgctggactaaggcctagtggatcgcggctgtggggaggggaaaggggcccacgcagtgcctggagagtcccgctgcgggtcccacgcg

SEQ ID NO: 223590 - DNA, 180 bp, Homo sapiens
  chr9:37035720-37035900
  hyper
gagatttgatttttggccatctccgagtgctcgactctttccctccgcagcccagccccagcccaggcttcccgccctcccgcctcgcccgcgccgggaggcagcgcctgggaggagcggcctgtccgcgcctggagatcaaaagccctcccggaattgacatttcaccccgggctgggg

SEQ ID NO: 223591 - DNA, 480 bp, Homo sapiens
  chr9:37036366-37036846
  hyper
tttgcgtgtgtattttggcttttgtggggctttgggattagggaggggacatcagccgctactccgttcctgcccgcacccatgaagggcagaggattaggccaagcatcacgaatcgtaggttcgccgtgctccgccgcttcgcgctctggacgctcgagaccagcgggaaacaaatgtggttcccgagggggcgcccgctggtcgtcaaaacctcgcgggcccggaggcgccgctgctgggtcagaatcgcagagcccccctcgcggggtaccgaggcccagccgccgtccccttgcccaccctctcccctgtgagtcggtctccccttgcgcctggccagcatgcttcggaccgtccggactcccgcagcgttggcccaaggggcggctcccctcggcggagcaggtgacgaaccacttcggaggacacggaattgacactgcggccctagagatacgggacaaggggccagaacgc

SEQ ID NO: 223592 - DNA, 153 bp, Homo sapiens
  chr9:37036984-37037137
  hyper
catgtgcccacacccgaacacacgcagacaccgccagagagcgagacagcgagcgggcgcctccgtagcagcggcctgcggggcggaaccggagctggcgccgcctcaaggggaaaccgaactgtagtgaccggaaatgtccccaggacagaa

SEQ ID NO: 223593 - DNA, 40 bp, Homo sapiens
  chr9:37998725-37998765
  hyper
aggtgtgagctgccctgcctgtcctcgaaatcctattttg

SEQ ID NO: 223594 - DNA, 1119 bp, Homo sapiens
  chr9:38067788-38068907
  hyper
aagcagcacgccagccccgacccagggtcctaggccgaagctgaagtagagactcaacaccagagcggcgggtgcctcggtttccccgtgcgcaccgtggctctggaacctcgggaagaggccaaggggcaccttaccttgtccttcttgccggccccgctctcctccgcggctgaggcggcgcacttgttgagcagtttcttgcctccgcaggccgtcgggctccaggtgcggccgcccgcgcaggcgccccccagggggtccccggccccaccgcccgcggcgctctccactttgatgaggcggtgcttgggggagatgtagcgcacctcggccggcgtggcgggccgccgctcgctgctgctgcggtagagatgcggagagccggaggacgaggacgaggacgcggcggcccccgcgcccgaggaggcgcagcaacagcccgcggcgcccgacgcggacgaggccgagaaggcgcgctggaccccgcctggctccccgctgccgccgcagtagtccaggcggcacatggcgcgcagtttgcgcagcgacgagccaggcccgttgtaggggtcctcgaagtctcgctccttctgcgcgcggtaggcgcggatgaggtcgctggtgctgccgctgtcgtcgggcagcgagcccgaagaggctgagaagcaggaggcggtggccggaccgcaggacgccgaggcggcggaggaggcctgcggcacggcctgggggggctgcgaaggccgctcgcctcggcgccgctgctcgcggtagtctggccgcggcggctgcggggggctcttggtcttgctgttgcccaagctgaagtacttgtttagccacttggccatggcgagaggccgcctagggccgcggcgcgggagcccggtccgccgccgcggccattcggggggcagcgctgcggcgcaggtccctcggcgccccggccccggcggggggcgtccggggcgcccgctcccgacgccaagttcaagttcttgccgccgccgcctcctgccggcagctctctggctccggcggctgcaacacctccctccgcctagcgccgcccaagctaggaatctcgcgcccctcgtgggcgcgtctcatggggtc

SEQ ID NO: 223595 - DNA, 42 bp, Homo sapiens
  chr9:66494115-66494157
  hyper
ctgggtggctgctggaatgcttgcgctcgaggcctgagggac

SEQ ID NO: 223596 - DNA, 42 bp, Homo sapiens
  chr9:71736563-71736605
  hyper
agcgccccggagagccgccttcgccctcgcccagcgcccgac

SEQ ID NO: 223597 - DNA, 240 bp, Homo sapiens
  chr9:71788601-71788841
  hyper
tagacaggacctaaaactttgaggttttcccagttcgactcttcgtaggagaactgaagctgcctgtgtgaggccctgcgaacctcgccaaaaagtcttcctacaggatgcccccgcgacctcaccggggaaacaccgcggacagtcgggccagcagcgcccggagctcactccaggtctccaaacttgcagcacttcccagagcgcgcgcgctcggagcgggacctgcttgctccagtg

SEQ ID NO: 223598 - DNA, 105 bp, Homo sapiens
  chr9:72874088-72874193
  hyper
ggaagaattcggccccgcagctgccgctgttgcagtcgtccgggcctttcgtggaaggctctatcgtccgcatctcgatggagaacttcctgtaagttgcccgga

SEQ ID NO: 223599 - DNA, 240 bp, Homo sapiens
  chr9:73027854-73028094
  hyper
ctcttttcggaggcgtgtttccccttcgcagccactccaggatggaggagggagagcgggctgggcgcgctgccaggatcctgtctctcctccgggctgtgggaaggactcgacccagattcggtggtcacgtcgctgtcggatcccatatcctcatctggactttccagactgtcgctgcacacggagggggtctggatgggtcggtacttgttcaggtccaacaagctcttggcgatg

SEQ ID NO: 223600 - DNA, 139 bp, Homo sapiens
  chr9:73028899-73029038
  hyper
caaaccaaaccccctccaattggccagtggggagggtgattcaactctgtttactttctccccctgccagtcagaacggccttcggtggagaggtgcgtctagaactgaggcgtgcggccaatccgactgttccgtttc

SEQ ID NO: 223601 - DNA, 624 bp, Homo sapiens
  chr9:74061493-74062117
  hyper
accatggaaagggctcaagtcgcgtgcgaagggagaaaagaaagcaaagactggggctctcccccggccactcaccggcgtctgctgcgacgggagtcccgagcgtttggtggacccctgcttggaacttaaccttttccacgactcggcaaacctgccccggctggcgctccggctgcgtctgcggctctccgcgttgtcctcgcggtcggagcagccccgctccatttccgccgcatccctccacttcttccccatgagaagttcgcctccctcggccgggaaacagcccagcgccgagcgctctcgctggctcctcgccgcgggtctccctccagcctgcgcgcggctctcggttggcgctgcctttgcctccgccggctcctgccagagccccgcgctccgttaccgccgccgccaccaggctgcgcttgcgcccgcgattggctcaactgtgggctggggctgcgagcgccacctgcgcccgagccagctttcttttgcgtccccaaattgctctccacccggcagccgccgccttctctggagagtgcagggcccacgcctgaggctgttgatgcgccgcagggtagcgctcccagcggtcacctcaccctgcccagg

SEQ ID NO: 223602 - DNA, 277 bp, Homo sapiens
  chr9:74639982-74640259
  hyper
caggaactctggtgtgagaccgaatgatgaaagccgtccaggggattccgatgctgctcagggttaaaaaccacagcttgatctgaagagctgcaggggacagcgccctctggaggccacgtgatcacagcagccatagaaaagcagctgcatccagagaaaggagcaagagtctaggtttccgagtcctgttgtcccttctcatgcaaagagacttctatggtggtcaactttagagatcctgacttgatttaattaaaggatattgctggttttt

SEQ ID NO: 223603 - DNA, 720 bp, Homo sapiens
  chr9:77112912-77113632
  hyper
cgggcaccgaggctccccgagtccggccaactccagccagacggggagatgggggaggggagggcacccagcagaaagggaaagaggttgcccaggcgcagttccccgaattcgctctcgcaggtggggctgcaaatggcctgggcgtagaaagttgcgggaaggtgttgatgtctttcgggagttctggagggacgcgggagggcgcttttttggagaggggagacaggctagttggttcttaccagtccttgagttgcactgaatcttttttgcttgtcgctctcgggtgcggaagcggacgcgggatggagaaagccgaaagagggatgcctctggacaggagcagtttggaagcgcccggcgcgcagtggtcgccggccgggtttgggcgcgcggggcgcaccggccgggggcagggtggacacgcgcgggcacacactcgccaggttacgaggcccactaagcgtcctggccagcaggcatgtcccttcgctggagtagcaagcagaagagcagtgctgcgaggctggacgcggctgaggaaacagttagttccccggcacgcggctgaggaaacagttctgcggcgcgcgccttcgtgccggcgctgcgccctggccaggtcctcgtgcccgagcccgcgcggcccagggagtagtgcgaccccggaaaagttgtaatgagaaagttctggaggcttggaaaggccacactgct

SEQ ID NO: 223604 - DNA, 180 bp, Homo sapiens
  chr9:77113716-77113896
  hyper
ggaccctcgcagtcgcaggcggtggcggcggcggcggcgggaccccggggcgagctggggtctgcagggatgcgcgccagggactgtagcgttacgcttgctccggctggactctgggcctctcgaagggctggagggtgggtttcggggagtcacttggtctcctctcctgccttgccg

SEQ ID NO: 223605 - DNA, 476 bp, Homo sapiens
  chr9:79521088-79521564
  hyper
ccgccggctctgggcacccgactctgccctaataaggaaagtgggtgtgccgcccaggagccccggggcgcgccgggcacgctctctggcacgcgcctcgggcgccgtggcgcgtgggcggaggtgcaggggtatggcgaggggctcctccgccaatcgcagggccgtgctgcggcctcctgacgtggcgcgccgaaagctgctgcaaccatggacagcgcccagaagtgcgagccaagtgcaaggggctgctgcagagggaggctctgccgcaggcaccgccgcggtcagcgggggaaggtgggaagagggagacgggtcccaggagagcccccgcctcgcccagcgcctcactggctggctggcgcgttacggagcactccggcggtcacttaatgatctggtcggctggcctggccgggggaggcactcagctagattggcgtgggagggacgaggagagaaagaggggagtt

SEQ ID NO: 223606 - DNA, 600 bp, Homo sapiens
  chr9:79630997-79631597
  hyper
ctgagcgcctgcaaaacttgtcggaattaacctccggggaagtaggggaagaggagagcgcgcccccctccccaccgcggccccagctctgcaccccggcccagtgccgcgcttggaatcccccaggatcctccgcggcggccgcagcccgccactctccaaaacagacacgcgacccgagctccctgtctgcgctctaggcagcaattgcggcctgggccgccgcgtccggctgtggcctaggtggtgggaagtactttctaccctcgccaagcacaacctgaatgcggaagcgtgaggctcggggcgcttcgctcagcctccgagactgttttgtcccaggttgcgtggaacctggctcgccgaggccgaagacactggccaagcccctggcgtcccctggcgctgaacctgaggttgtggcggcgggtctgcgggctgtagcgagctcacccagtgagggcctggctcattttttgtgctcagggttcgcgttatgcgcccaagatttgtcccgggagtccctgaagggcccctcccctcgatcggttcccaggagccgcaagtgcccaacgggcacggtcccagagctgctcccca

SEQ ID NO: 223607 - DNA, 180 bp, Homo sapiens
  chr9:79631837-79632017
  hyper
gctcttgtcaaactgtgagcgtccttggaattctgtggcttcccgaggccaagaggctgtccgctgctcggctctctcaagtgtctcagcggacaaaaatcgcgcagaaactcctatggcaggaggaaagcttccgacatacagtgaaagagaaaacatcttactttgaaaagggcttag

SEQ ID NO: 223608 - DNA, 300 bp, Homo sapiens
  chr9:79633450-79633750
  hyper
gaacgcgatgggtggagagcgcccgaaacgaggtggaaaagggggcgggggcgaggcacggcgccttcttgccccttcttcagctacagacgcggcggcggcggctgagtccctcagcctcggtcatgtgatagtctcgaagcgctagctgcgggggtctcggcgtctcggggaccattacaaaacgcagccaggagagcgcgtcgctgccactgccgtcgcctctcctcctcaagacaagcccgggagaaaggcggcagctgcggcgcggacggctgagcctccccggccagcactcac

SEQ ID NO: 223609 - DNA, 1140 bp, Homo sapiens
  chr9:80646089-80647229
  hyper
atccgccgggcttccttggcctcctcgctcaggcagcacgccatgatggactccagagtcattcttccaaagtgcctccgctgcagccccgccggcaccccctgctcacagcgcgcacacacaccctcccgccctcgctcccccgaggcagcggtggccgccgagcccccgccgcccgggcgcgcgtccgggacgagctccgggaaccgccgcgggggcggcggccagggccggggccaccaggtgggccgggggcgcggtgggagcggatagtctgggccgacgggagaagagaggcgggcgcgggaggcgggcgctggctcggggggcgcgtgagagaaggccgccgcgcccggcctcgctcagacgcccgcgcctccttccccgggaacaggcggcccgcctcgccccccgagccgccgccgccgccgccgcctgcgaggctcccctacgccgtgcgcctggcggcgagagctcattcaccggggtgtccccgcagcgagcggccgccgacggctccccgcgcccggcgcgcccgctcctcgccgccgcctgacacggctcccgggcgccctcggccctgtccgcgcccaccgcccggctcgcgcgcagacccggttcccgtcccgcccggcaaccgcgcgctcctccgcctccgcctccgcccccgcccccgccagacgcccaccccctgccccgattgccaggcgcggagcggctgctcagtgcgagccctccccctcgccacacacacacattttcttctttctctgaactggagcacagatccgggagggaggaggcggcggcgaaaggaggaggaggaagaggcggaggggatgggcgcgggaggagggagccgggaggcggtgccgcccggcccctcctggaaggctttcctgggctcgcggccgccgcggcgcgcctcccagtgcggctctcgcctcgcccgcgcggctcccgggctgggccggcccccgcgggctctgcggacgcctactgctcccgcaccctcggcagagtccgcgggcgcagcagtcacggccgcccccggccgaagtcggggccagacccggccgccgacgcgcagcccgagccggcggccgccgttgcgtgccagggccgcagccgacctgcggc

SEQ ID NO: 223610 - DNA, 1059 bp, Homo sapiens
  chr9:82185618-82186677
  hyper
gttttctacccgtgccccgtcggcctgctctgttcagtaccgaccgtgttcggggttcacgtggcccagtcggcaaagtttctttggaggtccagcgtctctgattcccggatcttcagccccacccggagcccccacggttactgccccccgcgacccccgatggagcgtcgggatgcgctttctctccgagtgcctccgggggtggagggagggaggcctgtttcggaactaaatggcaatcacagcccccgcggggcttggagggacgagctccccgcccaccccgcggccccggccccagccagcatctcgcgactccatttctggctctaaacaagaacggggaccgagtcgcgttcacacggaaaattatgccggctccagcggcgcgtaaaattgatgtgaaccgaacgaagtaagatcagcgtgatcctccccctcttgtctcaacaggggtttcggcgcgttacacaaggccgagcttgtctctttaaggagacattggaccctaattagtccgcattcctggcgcggctgcggagcgaggggccgaaggtgtctgggttgggagacgggtgggcgggaggacgagactcggaagaagatcttttgaccagcccccaggctcaccgctccctccaccctctttattttgccgccaccaccaccaccaccaccaacacctaattctgaagatgcagccagggcagcagcaacagcagcagccgccgattctcccagccccacgttactttgattgacagctgaacaaatgttttcccggttcgaacgctcgcgctaaggaacgtcagccaaggcgaagctccgccttgggcgggccatctccgccccgcctccgccaacctcattcctcttcgttaattggtcggagctacaggcgacgcccggcccccacgtgggtttcagctgggttggctcctccccgctggcttgccatttgtcagcagtgaaatgatgggcactaacacagaacggcgattaatgttcagccacctctgattggttggtggagacgcctaccgcaacgggggtggg

SEQ ID NO: 223611 - DNA, 105 bp, Homo sapiens
  chr9:82187755-82187860
  hyper
tgcgggcggcggggcgcgggctcgccgggtgctgggggattccccgcgtcgccccctgcgcaccgagttgtgtcttttggccggaggggcgtggagagccgcccg

SEQ ID NO: 223612 - DNA, 323 bp, Homo sapiens
  chr9:82187924-82188247
  hyper
ctcggagggggtgcggagaggcaattgagttgtagccattttcttattgttgtctttgaagcccctggaagccgcgccgagccgtttgcggtccccgcgccgcgactcctcgagggggggtggcgagcgatgaaggaggcgcgactccgcgcccgggcggggagggcgccctcggcagcggcgctgctgggctggctgcggtttggaagtgcggggcgccggcccctcgcgccgcgggccgccggggcgagcgggcgaacgaacgagccgagagggtggcggccgcctccctcctcccccggcctgaccgcagcccgacgcca

SEQ ID NO: 223613 - DNA, 89 bp, Homo sapiens
  chr9:82188485-82188574
  hyper
tctttgcttgcgtgcgcgatgaccctcaccccccgctaacgccgcatagtaggttttctccgtctccctgcttcgcctgtgatgtgggc

SEQ ID NO: 223614 - DNA, 240 bp, Homo sapiens
  chr9:84303026-84303266
  hyper
gcgagaaggtccgccgggcctcagaagccaccagtctccctaccgcccgggagaagcgcctccccaacgatcctggccccccaccaccacccagccgcgcctcaccgggtgccggctctgcgggaacatcgctctggcggcggccggggctctgttccccggcaactcaattctccggtcaatttccaactttaatcccgccgaggaaaattaagccggaaagccaagcagaagcgggga

SEQ ID NO: 223615 - DNA, 240 bp, Homo sapiens
  chr9:84303313-84303553
  hyper
gcgcccgcagctgctccggctcccgctcccgtcggtgcgggctccggccctcagggccacattagtgggcgccccaggcccagctgcttcaagaacctgcgcggagacgtcgggcgctcggggactgtgcgcgggggcagcgctccaacccccggcctcagctgcccgggcggggaggcgggggcgcggtgactccgaccgcactcccctcggcgatccgcgtgcgcggcgccagtcctg

SEQ ID NO: 223616 - DNA, 327 bp, Homo sapiens
  chr9:86152304-86152631
  hyper
acaatcccttttcctttctccgaaacactcagacttcacacattcctttcgaggtagctccagtccggcgcagcgcgcgctccatccctcaaggctggcgcccagggcagcccggcctctctcactctggggaaacttcgccaccgccccacgcggagaactaaagaccaccggcggagggtgagggggaccgacacggagcggaaagcaggttccgggactgagggcgtctccggagcctgggcgcgggagacagaaatgagtgaacccagctgatgcatgccttctccacgtggaagaagggaggaaataccagtgggcgacatg

SEQ ID NO: 223617 - DNA, 180 bp, Homo sapiens
  chr9:86153080-86153260
  hyper
gctccgaaagtggatcattttcatggtcctcctgcctctcggcacacagtggcaggaggcgaacatgcaccgcggccgtggggagcgagcgggaggctcagggccggcgcggtgctcgcctgcgcggacacacacgctcgcacgcactgtccgggacacctgggcgcggctcagccccgg

SEQ ID NO: 223618 - DNA, 176 bp, Homo sapiens
  chr9:86238306-86238482
  hyper
agcctgctcgcggggcgcccatcctgggaccgcatccgagctccgggttcccgctctaagacggggaggctgcggcgaccgcaggctcagggaggaagccgctcctgaacaggcggctgcggggccgcgcaggtggaggcctagcgagcggcgcggggctaggtttcggggcgcct

SEQ ID NO: 223619 - DNA, 264 bp, Homo sapiens
  chr9:88355780-88356044
  hyper
aagctatgttaaaacgggaaatgggctttaaattatcaacattcacatcgattacactatgatgcatgaaaactccattctacaatgagtaaacgcccaagaaaggaacccaaccaactccaattgccctggtgctcgtaagaggtttataccgcacaaggggtaaaacaacggtagagtcgagcaagcctttgggttacaacagtccttgaacacttgcaattgagaacccgcaattcaggaaggaagacactaaggaaactc

SEQ ID NO: 223620 - DNA, 2068 bp, Homo sapiens
  chr9:89560494-89562562
  hyper
ccggggaaccggctacaccaagttgacttggaaaaagttttgggaagtatccccaaccatcccttctatctgtcccaagccacaggtgcccggcgcggggtcgaggcgagcacgggagtgggacgcgggctctcccgcagccaacggcggggggcgcgagggctaaaagagcggcccaagcagcagcagcaagatggaggcgagtggggtccaggcgccccggggcgccaagcggccgccgccgccgctgctcctgcgcccaggcccatagggcaggtccccgcggccgcccgatgcagcagcgccgctgcccgggcgcggtgggtgcgggacgccgtcgtcgtcgtccagcggctgctcaccacccgcgcccccggtgcgctgctcgtcatcgtagtcctcatcgtagtagtcgtccaggcccccgtccgagccgctgctgccggggccgttgcccagctcggcgccgaagcacaggcgggccatgttctccttgaccgactcgcagatgggccgctcgaggccgtcgcacacgcagtcgttgagcagcgccgccttgggcatagccagcatgtcctcaatgacggtgcggcattcgtccgtgcagcgcagcccgttgaagactttgccgcagtaggtcaggtagcggctcagcgccaggttgcagcggctgtcgcggtcgcagcgccgccgggcctcggtgcagcccatgaccccgcccgcgccggggccgcccgcgccgccgccgctcgtccggggcaggcacggctcaatggcgcgcttggtggacttgcagttctcgtcctgcgcgcagtcacagtcctccagggcgggcccgcggcgcgtgtggttgagctgaatgagggccgagatgcagtgactcgggcagcgccagcgcgacgagaaagaggcggccgaggccgggaaagcggcggcggcggccccgggcgcgtcgcccccgccgtgctgcgccagcaccggcgcgcacgcctcggcgtactggttgtaggcgtagctgcactccggctccccctggcactgcagcagcgcctgccagcagatgaggcggcggccgtgcgccagccccgatccccgcggcgccgagcccagcagctgcagcagcgccatcaggcacagccaggcgcccggcactgtccccccgcgggcctcgccgccgccgcccagcagcgcggccaccatcgcgggcagcggcggccgccgggagaggaggggaaaggagacgaggcgcggggagcggcggacgcggagccggtggaaaagtttgtccaagtcctgcccacttcttgcatgagtgtcttcataaatccatgcgcgccgctggctgatgccccgctggtggcagaaggtcccctttcgctctggctgcggtggcttcctggaaatgaacagctgtcgagatctggtcccgctctcccacccgagagccctccgctcggcccccggtggtggcgggagaggctcactgtcgccccgggggggtgcgggccgcggggccgtggcggggctgcaggaccgcgcggcgcggcgggtgcattttgctccgcgcctgcagatccgttgtgcggccggctgtccccgtgccggctgctcgcgctgcggccgcggcggctccttcctcctgggctcagtgcctcgccgccgccaccgccgccgcggtctctcgcatcgcgccgcttcctggcccggcgtccgcgcgctgcccgccttcccgcggcccggccgccccgcgtcccctccccctccgcccgcggcaaccccggcctccgcagagctccggggagctctttccgggaagcgcggggagaacaagaaagtcggcgctgccggagagcggctccctggcttcactcggcggcagcttctcgggtgaccaagagcccggggagcggatccgctgagcccggctgcagactcgttagcagcgaggctttaaatacaaaagtgggccgggagcccccgcgtggtgccgcggtgccccctcattatgcatgcatggaaaagcaaacaaacaaaaacattagcaacgctcctccggctcgccgagccc

SEQ ID NO: 223621 - DNA, 38 bp, Homo sapiens; identical to SEQ ID NO: 201765
  chr9:90112392-90112430
  hyper

SEQ ID NO: 223622 - DNA, 180 bp, Homo sapiens
  chr9:93955613-93955793
  hyper
ccctcttgaataacccacatcttaaaatgctatttttctccaacaggtcaaaagaattctgcgagttagagcgcagattaagttgctagcgacgggcattgaaggttttagaaccgagaaaatgagccggtggcggggagcgcgtcctcagcggccaggcccggcacggggctcgggcac

SEQ ID NO: 223623 - DNA, 180 bp, Homo sapiens
  chr9:93955963-93956143
  hyper
cacaaaacgtccttctgcgggaagccagcactaggaaagaaaaaaaaaaaaatccgaagtgaaattatgacacagggttttgtaacccgcggtggcgcgcttctgaaacccgagcccggcagcggcttcttatctgcaccgcgttccaggaagcagccggcgtttcggccgcgcaagggc

SEQ ID NO: 223624 - DNA, 398 bp, Homo sapiens
  chr9:93956178-93956576
  hyper
acccgcaggaatgcgaggggcaagacagatcgccggaggagcaggggtcagaagtcagtgtttaaccactcactggctttcggtgaagccagaatgttagcagcgagtcgcggtcgggggccttggggttgcacacgcttgctccaagcaccgaggctcagctgagcacatgcacaaccctctcgatgcagcggaaagtcgtgtggcttagggccgcaccccgaatttcgccgcacccgccgctgtgccatttacaaccccccaccccgccactgctgtcacgtagcaatcaagagtaaaggttatcacaaagtctgttcttcgaaggaaagagttggaatcaaggacttcggacgggaggaagttggtaagttaccgcttcctccctcctgttttcc

SEQ ID NO: 223625 - DNA, 504 bp, Homo sapiens
  chr9:94183485-94183989
  hyper
gcccgcgctgcccctgtctgccccgtgcgggagccggggtccctggctccctggctccctggctcccgcggcccgggcgaacccagagcgcacccgtacgccggccccggccggtccctagcgcccgggctccacgggccgcgcccccacgcggcgcctcccagagaccctcctccctccgggtgggcggcgcagcggggcctcggcgccgcgaggaccccccgcgccagaacaaaggaatgtggggagggggcagggaggagctcaggccactgagcagccccagtataactgccgttcggaggcgcttctcggtcccgacccgaggtccccgcccgccactaccagacccgcccccagccccggattctcgcagaccccaccggcccgcaggagggagcggcgcactgggggccgcacggactcgccattggagatcgcgatcggaaggtggcgccacgcggcccctacaggcctgggactcccacccgagctcgcaaagta

SEQ ID NO: 223626 - DNA, 840 bp, Homo sapiens
  chr9:94711769-94712609
  hyper
gaagcccgggtcctgggaccctcggggcacatctgcggactcgggtcccgggcccagggcgggtactcacattcacactcgcactcccactcgcgaccctcgggaagcgccaccgagaggctcccagccgccgccgcccgcccccagactctggaaacacttaggcgtccccagagcgcggcttattgtaaccagcccgagggggtccggggtgcgggccgggagcggcgtcgggcgagatgcgaatggccctgcctggcgcccctcgttcaggagcatgggcgccggcgcagcggccgggagcatagtggcggcggaagggctggccaagcgagccgtgagctaccgtctgcgcacaagccggaacgccagatcctacctgaagtccgggacactgagagcagaagcgcggcggccgcccagacggccgggatgcacagcagcggccgccgcgggagcgccgagccccgggccatgccgcaggcagtgggggccgggaagccctcagagcttcgggccggggcgcggggtcgggcgccaccacccctttctacgatgcgtccgctcctccttctccctggcgcttcgcaaacgggtccacttcgaggacctcgtcgtcgtcctcttctccggcccggatgcgccgctcggctccggccacggcaagggctggctggggaggttccttggcgcgggctggggcgtcccgccggccgccaggacgagcgcggggggcggaccgcgggcgagcgcgcaggaggcagggtccccgctcgcccgccccgatgggcagagcgaggcttgcgccggcgccccctgccgggggaacgcgcgggcggc

SEQ ID NO: 223627 - DNA, 147 bp, Homo sapiens
  chr9:94712648-94712795
  hyper
ggacctgcctcctgcgcccgccctcgggcctgcgcctcggaacgcttgaacacaaaggtggcgccttgggggcgtcagccggagttcggcgggtctgcccacgcaggagaggcgcccagagcgggtgcccccgactttcgggggcga

SEQ ID NO: 223628 - DNA, 113 bp, Homo sapiens
  chr9:95570901-95571014
  hyper
ccgagcccgcccgcactccccgcatctcaaaaccggggctagaggtccctgtagctgcggccaagccaggcggtctgccctgcggcggctgcacaggggcaggaaccggccct

SEQ ID NO: 223629 - DNA, 360 bp, Homo sapiens
  chr9:95571320-95571680
  hyper
gaaccgaccccccagtcccatcccccatggctacggagggcccctgtcagcggccccgatctctctttggaggaggagcggggcgggagtcacggccaggagggccctcaggccggaagggatgcacgtctgcgattccgagacgtcccgcgcgagcccaggagaacccgcaagccagcagcgcctgcgcccgagctgcagcagccccctgcaggccacgcgggctcgggagcggtttccggagtccgagctggcgctgagctgcaggcgcgagcctaaaggcttagccggggcccacgctgtctgagagatcggagcgttcagctacaggcacgcgcttaacggcttcgtggagctcac

SEQ ID NO: 223630 - DNA, 600 bp, Homo sapiens
  chr9:96717026-96717626
  hyper
tggagcttgcaccctccgcctcccgcctggagggctccgagagacggtcccagaacctgcgctcccagagcagcttcccggggctgcttcgatgccggaggaggctcggggcgcccccgcggttcagctcgctgtctcccgccaagcccggcccgcgaccccgcggccgccacacgtacccaggtggctgtggaagggccgcgccgccagcagcgcctgcacgccgaacttcagcagctcgcccgccgcggcagcggcggctgcgggcgcggcgcccttgggcccgggtggctccgtgaggatctcctcaatcatgaagctgcgatagcggtgcggccggtggtccgcgcagccctcgggcgggccgaagcgcgcggcgcccggctcccccggccgctgcatcgcggcgcccactgctgcgcccgcggtttggcggcggcggcggcgacggcttggctccggcgcggggcccgcgcggggctctaggccggcccgcagctcggggcggcgcgcgggcgccggctcatgccccctcccccgccggccggccgggcggaggcgcagggcgcgggcggggcgcgcggggctcggccggtcgaa

SEQ ID NO: 223631 - DNA, 180 bp, Homo sapiens
  chr9:96717746-96717926
  hyper
ggacccagaagggagggaggcggaagggaggccaaaaaggagggggccacgtgaaagaggccggccgaccgagaccgagggagactgagcggagcgcacgccctggaaggagagagccggagagttcgggaggcaagacccccagagacgagagtcggagggatcaaacgacacaggtga

SEQ ID NO: 223632 - DNA, 360 bp, Homo sapiens
  chr9:96722534-96722894
  hyper
acccggagatgacccggttcttagtggtccaggaacctgaggcgatgctcctggactcgcggagccgccagcccgccgctcccagccctccaggccctggacgggtcccgcctccatttcacacccaccgctcgccagccccggcggctcccgcagagaccttgcatccgagtccagttacgcgaaccagcggcgcctgaggccacacccagagccaggaagtagccgtctgggtgccggggctctgtgggcacggccgcgctgctgggcgcggactgcaaggccgggcggggatggtgtttgcgacccgcacaggcgctctccccccggcgagtgtggacccttcgagaatgctccctt

SEQ ID NO: 223633 - DNA, 443 bp, Homo sapiens; identical to SEQ ID NO: 201796
  chr9:97767419-97767862
  hyper

SEQ ID NO: 223634 - DNA, 405 bp, Homo sapiens
  chr9:97810932-97811337
  hyper
cgcagggacgggagcggggctgctatgtccctcgggcgcgctttgggacgttgctgagtggctactgcttgtgctttcttgcttccaagctggcggtaaaccttttaaattcagagtgattcaagggcataggcgtcggaattgtgatttcgtgcgtgttttatttaccaggccttcaaatcaaaaaggccaggcaaacacacgttctggggctatcaagaaagttcacacgaaggacaaatccagcagggagaaagtgacataccttgcgggctcaggcttgggatttctgcagccacgcgcgcgttcacccgacgggacctcgcctgcactgccgccgggagaagcctgctctagactccggctccaggggagagggctgggctccacagagaggagcagcct

SEQ ID NO: 223635 - DNA, 45 bp, Homo sapiens
  chr9:98079175-98079220
  hyper
gacactggcctctgcgaacccgcctccctccgggaataaaaggcg

SEQ ID NO: 223636 - DNA, 60 bp, Homo sapiens
  chr9:98189305-98189365
  hyper
cggcacgaggcagccgcggggagaaggaatagagcgagcgagaggcgccggcccaagggg

SEQ ID NO: 223637 - DNA, 46 bp, Homo sapiens; identical to SEQ ID NO: 201798
  chr9:98268140-98268186
  hyper

SEQ ID NO: 223638 - DNA, 1283 bp, Homo sapiens
  chr9:98272638-98273921
  hyper
ctgtgcgcggatcgcgaggattcgtcccgacaccgcgtccagtgtcaccaaggcatcccggggattcgcttcccgcggagggggaaaacacgcgaccctttgaggtggattctggagccagacacgtctacacaactaggctttttatttaaaaaaatttttgttttcggaaagtggaatgtgtttttcttacgtttccaagttattacgttcctccctgcggtaggaacccgacccgcaaacccttgatttgcttcactttatttttttttttaaacggggttgaactgcagagggactggcagtagcgagaagtctagtgaagtcgtgaaatggggcggtgtggctttaagatgcgcacggtgtatgttcattgaaaaaaaaagaagaaagaaaggaaaggaaagaaagaaacccagatggagggaaagggggaggagcagggagaaggcggagctccggtggccacgtgaccccgcgccaggaggcccggtgcgcgcgcgcgcccggctcccggactccccgcgcccgcgcggccggggcagagtaggtagggaggcggatgcgccgggccggctccgggcctccagcgcggtctcccgagagcccaggcgaggcgcgcgcccagccggcgcggacggacgtgccggacgcgccgtagtacattcctgaaggcggaccggcccccttacgctgcccaatgcccgcgccgcctccccgcgaccggccaatggtcgcgctcacgagtccctgcccattcagcggccccgcgctggctgcccgggcgcgctgggggctgcggcggggcgcgccggccaccggggcggtccacgcggctcccgcagggggcccgtccgccggctctccccgcccccttccttcctccccggcggtttcccctccccgcttccttccttcggcctgcgccttctccttcctccctcgccccgctccctccctcaatctcccctcccccaccagcctggccaccttccctccagcctctcctcctccccggcttcagggggaggcccttcccccgaccccctaacccgcaaaccgtatgcggtgccggggtcagggcgggatgtcccgaggaagagagggagacggggtggaggtgtttgggggcgttcgcgggatccggagggggacctgagcaccgggccagcgcggaaattcaaaactcagaccgcttaaggagcacgtgattttgtgagtgcctcagggaagggctgcggaaactcggaaagcaggcgggcagcatgcgaggaaaatgacac

SEQ ID NO: 223639 - DNA, 105 bp, Homo sapiens
  chr9:98278353-98278458
  hyper
accaggctgatgagcggaagccaaggtggcgaccctttcaggcgtgaaaatgggagctccggcgaccccctccgtgagaattccccccggagccgttcctcagcc

SEQ ID NO: 223640 - DNA, 698 bp, Homo sapiens
  chr9:98278489-98279187
  hyper
acgcggggctggcctcgggggcgggggcccgggcgtgcgagcgagcgtggaggcgcgggacccgcgctcccgcgcccaggcggcgcagcccacccggctccacggccccggcgcgcggcccgcccctcctgcccggcgctcggggctcgctcctccgtccgccgcgcggggcgtcccgcgtccccgtgtccccgcgccgcccgaggagcacggcgcgcgaggcgaggtggcgtcggcggccgccgcgctggctgcactcaccatagccggccgtcaacccctgctcggagcgcgggtgccgatggcgcggacgctgggcttggatttcacatcaattccttttttttccctggcccccctttcctcgtcctccgctcctccgtcttctcccagtcttccctcgtctcccccttgccttgtcgctgcgggtctctttgtctcccctgtcgtctttttcttctcctccgttttcttcttcttcttctcctcctcctccgtctttacaaaaggaacggaaagtgtaaaaaccccggcgcgctgggccgccggaggctttcggcggagtgcagcgcggactcacaattacaagcctgtttctattaagcagttccatggccctcggcgtgggtggtctgccgcgccataggcaggacctgtcagggtcacgtgacggatccgaaaactttacccctttacaa

SEQ ID NO: 223641 - DNA, 443 bp, Homo sapiens
  chr9:99145529-99145972
  hyper
cgcagcagggcaggcgcgctcaggaagagaacgactttctcaggttgtggcctgagtgtagaaagctgagcgagttctggagggcgcctgggaaactcgaccaatgtgcccagctgagactcgagggtccctgtccccacccgccctgtcccgggcgccgctgaagcgcacggaggacaggggcagccccgcactcccgcagaccccccggccccgggccccgcctcacccgtaggtggtcagcagcgccttgttgacaagcacgatgaggaaggagcaggtcccgtagaagagcgccgacagcagccgggccacccgcgagggcagccgcgccgcgccgggctccccgccagcgccctcggcctcggcctggccgccggccgtcatctcctgcggccccgcggaccccgccgcccgccagccccggctgcgcactggtcccg

SEQ ID NO: 223642 - DNA, 104 bp, Homo sapiens
  chr9:99146049-99146153
  hyper
cgagcgcccgaggccggcgcgggaggaccctgcgcgctggacttcaccctggttccaggcacctccttcggtctccagggccggcaatgcgctggggagttgaa

SEQ ID NO: 223643 - DNA, 218 bp, Homo sapiens
  chr9:99416972-99417190
  hyper
gctgggaaactcacttgtaagaaactcctggggattttggccagatcctctacgtattccttgcagatgtaacacaggaaatgctgaaagccaaaacggcagaaagggcaagttagtaaagcagcaccctcgggccccgaaggatccctgtacttcgccgtgcgtgacgcgagcaaaggcgacgcccgcggggccgggaccggcggctcgggcgcccg

SEQ ID NO: 223644 - DNA, 204 bp, Homo sapiens
  chr9:99417397-99417601
  hyper
gctcccggaacagcgcgccgaacggtacccgctgcccgcgggcgtccagcaccggcagctcggccacggcggccgccaggggctgcccgctgtcggggccgctcggggccgggaccagggcggcggcgccgctaacctgccgcgtgaccggggccggcgcggccatgacgcggggcggccgagggcctgggtccgctctgtcag

SEQ ID NO: 223645 - DNA, 240 bp, Homo sapiens
  chr9:99983468-99983708
  hyper
tcaggagcgcctggcccaggcgtctcccgaaactgaagagtttcctcatggtggcgacttctcagacgccaaccacccgctactgagccgccgcggctcctcgtggcctttccaccccgaccaagttccaaatccgcgatccccctccccaccccgctatccacccctaaatccaagatccaccaccaaaccagcaatccacccccaaacccaagatccacccccaaccccgcgatgtag

SEQ ID NO: 223646 - DNA, 216 bp, Homo sapiens
  chr9:99983792-99984008
  hyper
aactaagccgttactcgcgtgccagcagttgggcgctccgacctctcagaccgcgtgagcccagcaaagcggttaggcgcgcgcctgcagctcggcgctagcccggactccgggagccgctctcgagctcgcgtggacggcagagggcggctgcagctcgggcgcaggcgccgctggcttgcgggttctcctgggctcgcgcaggacatcccggaa

SEQ ID NO: 223647 - DNA, 303 bp, Homo sapiens; identical to SEQ ID NO: 201811
  chr9:100565762-100566065
  hyper

SEQ ID NO: 223648 - DNA, 180 bp, Homo sapiens
  chr9:100610113-100610293
  hyper
aggctgccgcgggggtgactcccgggagatgcgcctagagaggcaggacacctgcacgcatattcgtaacagaggcagaaatactgacggcgaaacctagagagacttgcactccaggcccggggggtgggggggcgggggagaagccttagggagagtggggaggaggccagaggagag

SEQ ID NO: 223649 - DNA, 1140 bp, Homo sapiens
  chr9:100615184-100616324
  hyper
cccgtcctttcacctgcgagtccaagcccttggcagaggcctgaaaagtccgaaaactccgagttcgggcgctgaggtctcccgagccggttcctgaactctccgggcctcagtcgatcggggtgcggagggggccgacccgggggatctccaagcgccctccccgccctgacgctgtggggctcctaccgcgccgccacagctgctcctacctggggaggtgcgcccgggccccggggggcgggcagtcggggggcgggcagggaaccggtgccgccccacgcttcgtggcccctttaaggaggggaagccggcggagggaggagccggtccggtgtgtgcaggggagcgcctcgccagcggtccgcagggctggagacccacgccgtggagaggaccagcctcaggtcgccccgcctgggcccgcgccccgacctcgctgcccccgcctcgcctctctgcccgtggcgcttacggccaccttggcctcgggggcagggcatgggcggcccccgccagatcgcccagcgccagtactaactgccctcgctctggccttcgagcccgaagcctcttctgcgcgcacaacctaggcagtaatcctaaactagcgggcaccacagaccagctgcagccaccccaacccagggatcacttccggacccctcgaccgcccggcaccagcgcgcaagggacccttcagccggagaccagagtccagtcccggtcacgaggccaccgccgctgcccgcctcgagaagcaccacgcgggctgagccgtcggctagcgggtcactcccgagcctctgtctgcaccgcgccagccccagaccacggacgctgagcctccagcgcgtgccagcctgggccgctgggctctcggggccagcccgcgacgatcccctgagctctccgcagaagggccgagcgtccgttccggggacgccaggcccgcccccgccccccgacagccgcggggatccagagcccgggggtgcgggacgcccgcgccatgactgccgagagcgggccgccgccgccgcagccggaggtgctggctaccgtgaaggaagagcgcggcgagacggcagcaggggccggggtcccaggggaggccacgggccgcggggcgggcgggcg

SEQ ID NO: 223650 - DNA, 780 bp, Homo sapiens
  chr9:100616344-100617124
  hyper
agcgcgggaagccgccctacagctacatcgcgctcatcgccatggccatcgcgcacgcgcccgagcgccgcctcacgctgggcggcatctacaagttcatcaccgagcgcttccccttctaccgcgacaaccccaaaaagtggcagaacagcatccgccacaacctcacactcaacgactgcttcctcaagatcccgcgcgaggccggccgcccgggtaagggcaactactgggcgcttgaccccaacgcggaggacatgttcgagagcggcagcttcctgcgccgccgcaagcgcttcaagcgctcggacctctccacctacccggcttacatgcacgacgcggcggctgccgcagccgccgccgccgccgccgccgccgccgccgccatcttcccaggcgcggtgcccgccgcgcgccccccctacccgggcgccgtctatgcaggctacgcgccgccgtcgctggccgcgccgcctccagtctactaccccgcggcgtcgcccggcccttgccgcgtcttcggcctggttcctgagcggccgctcagcccagagctggggcccgcaccgtcggggcccggcggctcttgcgcctttgcctccgccggcgcccccgctaccaccaccggctaccagcccgcaggctgcaccggggcccggccggccaacccctccgcctatgcggctgcctacgcgggccccgacggcgcgtacccgcagggcgccggcagtgcgatctttgccgctgctggccgcctggcgggacccgcttcgcccc

SEQ ID NO: 223651 - DNA, 900 bp, Homo sapiens
  chr9:101469436-101470336
  hyper
cataaagagggtccgaccaaggaggaggggaagcccagattgcaccaccagagcagtagcgcgaccctcctcccaaaagggttctgcacctggactccagcagaagcgcccggagagtcccaggaagccaggatcaagcccagcgcctcggccccgttccgcgcgatggaagaggcgccaaccgagcgtactgcacaggaaatcactgcccccttcaggccgcgtctcagacgctgcggtcggagcacaggggctcgctcggtccggaaaaactcgcaaacccgaccttgcgcggccagcgatcgctcctccagacccgctccgcgcgctccagccccggcctggcggtgaaggtccgctctggggcttcaggcagaacccaaaccgagggcgtggggaggggtcttgggatggaaagcccttggctctctggctccgctccggactgctctccaagtctgtgctccggctgctaggtcggatgcttcaagcctgagccgtgagaaactgcctgcagccgcccggccaacagcagcggcgcggccggacaccactgcacgtccgggacgagaactgccagggcactttctgagcaactaacccgaggcaggggtctcctgaaatcgctctggccacaggcagcgccgggcacgtccaggcagaagcgctgcagagccggtggccccacacttgcccgcgcggagcgggctcagagctgctggcgcgcaccaggcgcccagccacgctgcacgctcaagccccttgggttccggagccttccggacctcaaagcgcggctcggcttccctgggggcctgtgagcaggcccgcggcccctccggccctgggtggcccagtttgcagtcaatgcgcctgttcctcccactcggtacctcgcag

SEQ ID NO: 223652 - DNA, 420 bp, Homo sapiens
  chr9:101569893-101570313
  hyper
ggggcggcacggcggttccgggatccgggtcctggcctccaccgccgccttggggcgcgcagatcgctggctgcagttggcgggcgcatgtgggggcgcacggcgcggcggcgctgcccgcgggaactgcggcgcggccgggaggcgctgttggtgctcctggcgctactggcgttggccgggctgggctcggtgctgcgggcgcagcgtggggccggggccggggctgccgagccgggacccccgcgcaccccgcgccccgggcggcgcgagccggtcatgccgcggccgccggtgccggcgaacgcgctgggcgcgcggggcgaggcggtgcggctgcagctgcagggcgaggagctgcggctgcaggaggagagcgtgcggctgcaccagattaacatctacctcagcgaccgcatc

SEQ ID NO: 223653 - DNA, 770 bp, Homo sapiens
  chr9:101705947-101706717
  hyper
gcccatcccgcttgccccaacgaacgcgggcgcggggctttcctcgcaggttacataaggcagccgcgggtggaggcagcagaggcgagcgcacgtccgtcgagggggaaaggggcgtggggaggcggccggggcggccggtatcccccgggcgtgagtgcgcagcgcgcgggggagcgcagggcgcggcggagtcgggtttcagagcgcgggtgactcggggcgcgggccgggagccgggattctgcccgccgccgccgctgccgagcgccgcctttgttccctgcaggaagggcgagcgcggcggccagcgctcagcgacccttcgtcctccgctaagctccaacgctctgctcgactagccgcgcgccttccggggctccgcagacccgcgagatggcaccaaggtaagacccgcttctctgcttcctcgcgtcccgggcccctccaatactcttgcccgcctcaccttttctccctcgggcacatcttgcaggaggaacaacgggcagtgctggtgtctgctgatgctgctctcggtctccacgcccctccctgctgtcacccagacccgcggtgcgacaggtaagcaacccggtcggagggtggcaccggctgcctccgcgcccgtgggggaagtcggttttggcggcggacgcggctgcgatgcgtgcctcattcctggacataaaagggagtcttgccactcagtgcgcactggcggtcccgcgggcggctacctcctggcagtgcaggggttatagctgtga

SEQ ID NO: 223654 - DNA, 74 bp, Homo sapiens; identical to SEQ ID NO: 201819
  chr9:103190036-103190110
  hyper

SEQ ID NO: 223655 - DNA, 282 bp, Homo sapiens
  chr9:104248323-104248605
  hyper
gagagagcctgggccgagcagaggatgcgggtcacaacgaccctgcaggagctcacgccccaagacaccgcgagcgcagtgcgacactagcgacgccggagccaagggccagaaagagggcgagacacacccaggtggatctaattaaccctccctcttggaaaaagaatgggggacgatgtccagggccctggatctagtgtctgtcgctgaccttgggcagtccctgccacgcttgagcctcagtttcccacccgtaggccgagctgaccgtctccatcg

SEQ ID NO: 223656 - DNA, 360 bp, Homo sapiens
  chr9:104248619-104248979
  hyper
ttctgctggtttttcctggtcctgggagggacgccttcctctgcccagtcgccctcccccagcccttggctgcgaggtcgcccgcagaaacccaacactgctgccgcgctctcggcgcgcccggcgaacctaaggtgtggacgcgccgcgagggtcccctgcttgcgggcggccattaggcgccaggccccttggcgcttcggccctgctaggctcggcgagggtcttacccagactggcacgcgccccgctcgcgtccttctattgacctgtcagcgcagctggcgcaggcaagggccagggaggcgcccccgagacactcaaccatccccgcactgatgcgggcccctgctgccctgg

SEQ ID NO: 223657 - DNA, 749 bp, Homo sapiens
  chr9:108418383-108419132
  hyper
cacaagagagagttggtctccggaagccagggcgcggagagtggggaggaaacggtgggagtccccgtcgggaaggggcccccgggccccgcgagacaaagggcggtgtcctataaaggcggcggcggcggcggcgcggtgtccaggcgagggcgcacacggccggcgagggcgacggctacggcgacgacgcgggctctttgcgaggaggtgcgtggactccggggggacatgggcgcaaccagggccgggctcgtgggcctgcgggtctctcgctgagccatactcacccgggagagcaggaatgcggcggagacttggtagcggccaccgagccaattcggtgggaagaccgggggactttccgcggggcaggggcggtggctcagctccgggggtgctaggccgactctctagcgtgttggcgggcccgcgtcgcttttatgcgtgatgccggggacccccttgtaccgctctcggcggcgcatctcccagagcccttcaaggagctcgcgcgtccccgagcgactcccggacacctggcagattcgaaacttcagccactagatgctttcctggactccctaaatacttaatcattaggcaaggcaatggtttgcaagggggagcaaaagttataaaaagaaaaagggaaaggcctggaagcgaagcgggcaagggaagaagcttgggcagagtattcgagatgcgtccaggctgcacggtgcaggggtcgggtgcatcttaga

SEQ ID NO: 223658 - DNA, 300 bp, Homo sapiens
  chr9:112081590-112081890
  hyper
cccgggacgcaggcccaggcgccgccgccctgaggtgccccgccgaccccacgcacggtgcccaagggagaaagtcaggcgcgcctggccccccgggcaccccggggtcgactcccagcgccccagcaaagggctctgccggtgcaaggcaggcaggtctgagacagccgactctagagttagctcccaagtcaccctacccgctgcgaggaggctgcggggcagatggggctcagggaatgggaatggggtgtatccagaagggatcagcagagagcagaaatggtctaacccccgcct

SEQ ID NO: 223659 - DNA, 180 bp, Homo sapiens
  chr9:112082103-112082283
  hyper
ggcggggtctcgggacttggggaccgtgtgtactggggagggggcgaggccccaaggactaggtgggcgccagagaaatcgcaaccccgcggcgcaatgtgccaaggagggggcacgggccaaaggtggggccccggaagagaccgggacggggtggcccaagaagaaaaagggttgagg

SEQ ID NO: 223660 - DNA, 1138 bp, Homo sapiens
  chr9:112082364-112083502
  hyper
ggagctgcctccaggggcgcgaggtgccagtgccccagactggccccgtcactcaccggcaggtccacgctcacttcggtcccgtcgagcaggaagacgcggcagtagagggtggccttggcggcgccggcggcggagatgtgcacggccgcgccgccggtgagcaggggcccgccgcccgccgggaacacgctgcccccgggcgcggcgggcagcgccgaggaggaggcggcggcggccgggcccccccgtggccccccatcgcgctcgtcccccagcccggcggccccgcgccccgccgcgccccgcgcgtagcgctgcatggagcggcggccaaaggtccggcgcaggaaccgcagcatcctggctgggggcgccccctgcctccgccccctgcgctgccgctgccgctgccgctgccgctgcgccgccgcccgggagcgtcccgcgacgccgtcagtgccctcggccgcccgcgccgcctctcgcgggctacggcccggggcaagcccgcgccgaggccgaggccgcgctctagccgcctgcggggcgcgccggcccggccagcgccggctgcgagtggccgcaggcgggagggcgcgctcggggccgtcccgccgccgccgccgccgcgcgctctcccgggccggcggcctgcgcgggctgccgaggggctgctccggacgggcggctgcgggctgccagggggctgccgggggcgcgggaggcgggctgcgggctgctcccgcgccgcgcgccggccgagggccagccggagcagggcgcctgcgtggtcctggcgcgctcgctcccactcgccgcgccgcgcccggggcccgaggaggccccgccgagcgcccgctcccaaggcgccttttcctgcgcccgcagcccccgcctcccacctgggaggctgcacctccagccgccgccgccgccgccgccgccgctgccgccgggactgcagcacgccctcctccctcggggctgcgccgggtaattgcaagccgggtctgtgctgccccctgccggcccgagcgccccctgctgctgtaggtgtgctcacgtgtgtacacgtaggtgagcacacacgtgtttccggcgcccagagccctggaggcgccgagtgcccctttgc

SEQ ID NO: 223661 - DNA, 207 bp, Homo sapiens
  chr9:113017456-113017663
  hyper
cagggcacccgaggcgggcgaggacccgccctcctctgcttcccgcaggtagggaggggtaatcgcagggtaggcgctggcgaggggtcttctaccgttcgagcagtatcaatttcctccactcacttttctgacgctgcatttaacaaatatttctggagtggctacattggactagacactgcgcgttaggctctgggtttccca

SEQ ID NO: 223662 - DNA, 192 bp, Homo sapiens
  chr9:114937755-114937947
  hyper
tcgccgctcacattcgcaaagggggacagacactcatcggataatgacacagctggacgcagagccccggagagtgctggggaggaaatgttgcggaggattcaagccactcgagggctcagggaggcacccccggggagaggggtgaggggagcaaggggcggaaatcttccaggacgtgaaagggagctg

SEQ ID NO: 223663 - DNA, 401 bp, Homo sapiens
  chr9:116111661-116112062
  hyper
tacgcatacaatcgcgatttcattcaacaaggaatttaaagagacctgctgccccgggcgggatgggagcgcgggttgggtgggaggaggcgcagctgcggggcgcgctggcgcaccgggagggccgggggcggggtcagccaggccccgcccgccgccacctgcgacaggtggagcgcacggggcgggcgcacggccatgtccgccgagggcgcggagccggggccggggtccgggtccgggcccgggccggggccactctgccccgaacacggccaggctctgagctggttctgcggctccgagcgacggcccgtgtgcgccgcctgcgcggggttgggcggtcgctgccgggggcaccgcatccgccgggcggaggagcgcgccgaggagctgcgggt

SEQ ID NO: 223664 - DNA, 569 bp, Homo sapiens
  chr9:118916363-118916932
  hyper
gaagaaagtcgaggcgccgaggctcccaaagctggcagctccgggtggcggtgcaggggcgaagggggggcggggggaaccgtcggacatgcggctctggagttgggtgctgcacctggggctgctgagcgccgcgctgggctgcgggctggccgagcgtccccgccgggcccggagagacccgcgggccggccgacccccgcgccccgccgccggcccggccacctgcgccacccgggcggcccgcggccgccgcgcctcgccgccgccgccgccgccgccgggcggtgcctgggaagccgtgcgcgtcccccggcggcggcagcagcgggaggcgaggggcgccaccgaggagccgagcccgccgagccgggcgctctatttcagcgggcgaggcgagcagctgcgcctccgggccgacctcgagctgccccgggacgcgttcacgctgcaagtgtggctgcgagcggaggggggccagaggtctccggcagtgatcacaggtaggtgagggcgcctcggcgggcgctgcaccgtccctgcggccccagaggctcgcgggtgtctgg

SEQ ID NO: 223665 - DNA, 180 bp, Homo sapiens
  chr9:120177258-120177438
  hyper
ggcggtggcgaaggaggaagaggaggcagctgcggagacggcggacgccgaagcgaaccaggacgcccgagctaaggagcggagagagccgctcgccagcagcccccagctccgggctccgcctcccgatcggccctggaccgcccccccgcgccgcctcccggggcccagccgcccgtc

SEQ ID NO: 223666 - DNA, 52 bp, Homo sapiens
  chr9:120177964-120178016
  hyper
aatggacagaggggcgtcgaactccaccgtctaacgccgaccccacaactga

SEQ ID NO: 223667 - DNA, 105 bp, Homo sapiens
  chr9:124131788-124131893
  hyper
cgaggaacaaaagccgggaaggagagttctccaaaacgcagaggaaagcggagggggaaaaatggggcagaaagtggagctagaaagagaggtaagaagaaagcc

SEQ ID NO: 223668 - DNA, 600 bp, Homo sapiens
  chr9:124131999-124132599
  hyper
cttcgagagagtgagtcgggaaagaaggggagtgggcaaagggtgagatgtggggtcccggtccccgcctcgctggctgccagttccctctgcgtttcctagtccgcgtgcgtgacacgagatagtgcagccctggcatggggcttggcatctggcggccgcgagataaccagggcccgtgcgatgggaaacgtgccgttggcagcccgccacccctccatcgtgacctcagtctgccaaacagggttcgtgatgctcagtttactagggaggagccgcggctttgagatctcgcccagcccgaagcagcggagactggccaggagcccggctgtcagacctcggagcgcacgctgcgggcgggggctcggtccacgggggagggtcaggggacgcgggactcacccttgaaggagtcggggagccgctgggcttcggagtcccgtgtgtgccgcttctcggccatgctgcccgagacgcagtcgcactcccccgtcctcgttgccaaacccggagccgccgggaatgccctgaggagccagaggcacaagacccagattgccgccccgcccccaatcgaggtcccgccctcgtgagagt

SEQ ID NO: 223669 - DNA, 181 bp, Homo sapiens
  chr9:124622036-124622217
  hyper
cctgtgtccaggccacggccaggcaatagccctgccagagtgtctgtcccagccctgttcaccagctgatcccgtacacccttctcctgaagtcttccttggccctccctggatgaggagctcctccgctgagttcccggatagcttctctgagcttctctccctccgagccaggcatcct

SEQ ID NO: 223670 - DNA, 446 bp, Homo sapiens
  chr9:124981571-124982017
  hyper
gttccctcaggaggcgcagagcaccttcgttgaatccaccgctcccctaagcacaggcggttccggacctcggaaacgcggcttccccagcggagtgcccagcccagaccacggtctctgttccccgtcccgcagtaaaggggagaggaaacagctttgcccaacccagcctactccccctcgaagagccgaccccgggttccgccacccggctggtggtatccggattgggagcactttctggcctctgaggggaggctggcttccgattatttgtgctgcgggaggagggggagcccagccgcgcgtagagaccttactacgggccggggtcctgggcctcaacgttgcgccacctcggcttcgtcgcaacccggtgaggtggggactctggcatccggttttcataggaggaatcgaaggttcagagccggcgagtgatttgc

SEQ ID NO: 223671 - DNA, 744 bp, Homo sapiens
  chr9:124990418-124991162
  hyper
ttgaagcagctatattgacacggattcaggcgcctttcgagggccagtcggagggaaacccggagcaaaaagagagcgagatcggggcgaaacgggaccaaaaagagaaaagagaggcgctcaaggggaggaaaaagcaccctccagcccctcggcgcgccgggtaccggccccgcgtcgggattctcagcgctgcgccggcacaacccccggcgcatcggcgctatcagcgcctattcagacggacaataccggcctcgcctcctcttgattcgcctgtgtctttactaaatcgctttttgagaaattcctccaacatttgcataatgtgttcccgctttccgcgaccccccccccccgctcgcgcgcgcgctcccacactcacaagcacacactcacaggcgcaccctcgtacccctccttcctgcaaccgcccgccaccctgctcggcccggctgggtcccggaccctgcccgaccccggcccgggccgctcacccagtcgttcgccggctcacctggtcggtggcggggccgccctcggccggcagccggcagccctcgggcaacgccggggcggcgttctcatgcttccagtacatgggccggggaacctcgggctcagcgggcgcgcagcgcggagagctgcgccgagggggaccacagccgcagtgggagcagaggctgctgcaggagcaggaggagagccgaggcgccggccccgccgccccgggcccggcctcag

SEQ ID NO: 223672 - DNA, 629 bp, Homo sapiens
  chr9:126762044-126762673
  hyper
ggcagctggcaacgcggggcgagcggggagccgcgcgccgcagcccgggtggccgctcccggcgcccggctggccctgattgatttgtcagccgaggcaagaaaaacggcccctctgatccgcgcgcccagtcctcggctccccgggcgccgggcctccctcccgcgcgcctagcccggctccgggccggccccgcaggctggagcaccccgcccgcctcaggagggagccctccgccctccggcccgggccccggcgcccctccccggccccgcgcgccgcgcacctcctccggctcggcccggcccgcccgagggccctggggctgccaacggccccctcacccccgctgggcaccgtgcccgcgcccccagccctcaccctgccgctcccccctagcccggcacccccgccccccgccccccggccctggcccggggccgcccgcagagccggccacacccgctgcggaggactcaccaaggtaaggaagcgcctcggcgcgccccgggggcctggagggctgcgcgtggtgcggggagggccacggcaggcacccgcggacccggaccgggaaccgccgctgccactgagccgggagcacgggagggccccgtcgggccgggagg

SEQ ID NO: 223673 - DNA, 900 bp, Homo sapiens
  chr9:126770446-126771346
  hyper
ttggtgccgtatttgagaaataaaccatcacagcgtcacagcaaacacacacttctgaacgtcttcattttgatttaatggtatatcagcgtcaactatcgcttcctctgctggtacacacggcctgatgccgcgggaggagggtgcccatgtttatcaccgagtgagatgactaattacaccttgtcaatcaccggctatgaagacataaaaccagcgcgcacaatgaagtagttgcctgcagcgtcaattagttggcgattctgaggttattgcgtggccctgctttggccgcctctaataacgggacagagcgccgggcaccgcgcactgatcaatcaccctccttccgcggccgcccggctccctcccctctcccccgccgggtctggcctcactttctccgggcggcttgcgcttcctccctccgcggccccggctccgtggcgccggcagccccgggagccccgggaagtttgcgcgcggcagctccgcagccggcagccgggagccccgcagccttcggggagcgccggggctggtggcccctttgttggaggaggcgtggagggagcgcttttgttctgagttagtcacggtggccggctggaggctgctacctcattatgcgccgggtctgcttgtctgcgaggaagcagatggtggggaggtaggcagcggcgagagtggccagacctgaattccgttcacctgtcacctcccacaaaaggcaggttcgggggacttaggcattcgttgccactttctgggggagggggaggtcgaggggccgccgtttccggcgcctgcgaaggttccgtacctgtcggtgcccgctccccccaccccttgcctttcccttggctgcagcttctcgcaccgcgtaaatgtcactcacgt

SEQ ID NO: 223674 - DNA, 214 bp, Homo sapiens
  chr9:126780759-126780973
  hyper
cgctacttagggccggctcctttccctttttctccactccccttctttccccttttctctactcccccgccaataacggcttcggaaaaggcctcccccgcagggaccgggtctcccggagccccgggattcagctcggccaccggaccctcgccacaagctgcgcctgtttccgggactcgctttcccctccgctctccctatttcttgctgt

SEQ ID NO: 223675 - DNA, 573 bp, Homo sapiens
  chr9:127215312-127215885
  hyper
ggtgcgcgcaccaccgccgtgctggtgttcgacgagaggacggctgaccgggcggcgcggctgcggagccctctgcctgagctggcagcgctgaccgcgtgtactcacgtgcagtgggactgtgcctcgcccgaccccgcagcgctcttctccgttgccgcgcccgcgctgcccaacgcgctgcagctgcgcgccttcgccgagccggggggcgtcgtgcgcgctgcgctggtggtgcgtgggcagcacgcgcccttcctcgcagccttccgcgccgacggccgctggcaccatgtgtgcgccacgtgggagcagcggggcgggcgctgggcgctgttctccgatgggaggcggcgcgctggggcgcgggggctgggcgccggccacccggtgccgtccggcggcatcctggtgctgggccaggatcaggactctctgggcggtggcttctcggtgcgtcacgccctcagcggcaacctcaccgacttccacctgtgggcgcgggcgctgagccccgctcagctgcaccgggcacgggcctgcgcgccgccctcagagggcctgctcttccgc

SEQ ID NO: 223676 - DNA, 127 bp, Homo sapiens; identical to SEQ ID NO: 201874
  chr9:127534416-127534543
  hyper

SEQ ID NO: 223677 - DNA, 467 bp, Homo sapiens
  chr9:128651896-128652363
  hyper
taatattcctgtgtaagtgtcgcacaaaagtaaacccaaagagcccgcacatgacacggaggctgctccatttacattaattatgcagtcagggcggtgagaattcgctgtcagccagcagggcgggggcgcgccgcggcggggagcggggccgggccgcggggcctcccggcgcgaacgcgggagggggagccggatcgccgtccgccgctccgcggctccgcgctgcgagaacaatgggcgcgcccgacgcccgcccgcgctcgcgctgcccggcgcgccccgaaagccgcggggcagagcgccctgagcggtcccccgcgccggcggccccggctgcgccccgctgtagcagctgaccttagccggctgcggccgagagaacgcgcgttgcccgccgaccttgtgccctggggtcagcacccactgcaagtcagaacctctccgtggtcccaaagttagtgctt

SEQ ID NO: 223678 - DNA, 658 bp, Homo sapiens
  chr9:130158818-130159476
  hyper
cgtctgaccagtctcgccctccgagaggagagagaggcggcccaggacggtctgcttagaggctctctcccctgcagagctgggcccaggcataggtcagacgcctccaatacagtccccagggcagcgattaaagcggagcaggaactgcagacccgaccgggcaggacaggtgcagcttctcggagttgggggcgggaagtctcgggctgaggcccacgtgcttcgccttcgccccgcctctaccctcattggttgaagccagattgagaggaggtgccagaaaaaaaactcctccctccaacctcattggccagctcagttctgaggcagctctctggccccgtctatgggctcgcactacactccaattgggtggttgttctcccagacggaaactccgccccacctgtaccttggaccgctccgccctaggggcggttccagcgcgcttcgctaatcggttctatgctcccattggtctgctttaatgtgaagggcgggtcctagctgattcgctagccccgccttgcgttcctattggctgctcctgctctgcggttccgatcccgcccagcaccgtcccccaccccccgccgcccattggctgcgagaggccggtgcgggccgcactcgcagggcccgtggcggttcaggc

SEQ ID NO: 223679 - DNA, 137 bp, Homo sapiens
  chr9:130331122-130331259
  hyper
cgtccaggtgcgtggacagcacgtcccccatggccaggaggtgtcgcggcccgatccggccgacgccgccgctgttgcccgcgctgctcaggcggacgccgctggcgccatggagcccggcccgccctgcttccccc

SEQ ID NO: 223680 - DNA, 158 bp, Homo sapiens
  chr9:130374196-130374354
  hyper
aggaaagacaggacccgagcggggtttcaggcagatggagcgcgtcggtagcctgtggccagggatcccagcaccgacgggaaagaggaggcctgggtaccctgcgccccgggcgcgcgcggcgcgtgaggtgagggggagggcgcggctccgcacca

SEQ ID NO: 223681 - DNA, 36 bp, Homo sapiens
  chr9:130374657-130374693
  hyper
ggagccgggagactcgcgcagcgccatggcccccat

SEQ ID NO: 223682 - DNA, 224 bp, Homo sapiens
  chr9:130616612-130616836
  hyper
gagggagcgtgccgcggtccatgctgtccacgtgggggcctgtgcgctgggccttatcctgtgtccagtggcagggctgcgggcgggcaccggggccggcgtgggctcgcacggggacccgaggggagcaggcggccggagcgacggcgtccctgctccagccttctggggtggcggccgaggggtcaggagaagtggacacagggacgcggggctgggctgga

SEQ ID NO: 223683 - DNA, 368 bp, Homo sapiens
  chr9:130639768-130640136
  hyper
acggatcacaaccacggatacacagccgcacagcccccagggagccccgcaccagcacgcccccgccctcccccggtgccgctgcccctccccgcagaggcgcccccccagacacgcgcgggcacgcactgacctggggaggggtgcgggtgggcgccggggccagtgcgtgccctgcccgtcctcgcggcggccggcaaaggcgactatttataaggctgtcagcgcgcggcatgccgggagccggcgttcccgaaggcagggagggcgggaaggagggagggagagcggaccagggaccgggaagcggggcgggaccgagcccgagcccgggtgcgcggcgacaccgcacccggcaccgtgtgccc

SEQ ID NO: 223684 - DNA, 449 bp, Homo sapiens
  chr9:130674574-130675023
  hyper
tctggtcgcagtaggccatcatgcgctccgtgaaggtgtacacctgcaggccggggtacatcctggtgagctgcagcagcgtgcggtaggtgcggccgccgagcacccggtccatgtgcctgccctggccccacaccatgtagagcgtgtctcgggccttctggaagtagtgtgaatagttgcgcagcagcagcggcacgcttgtgtgtgagacgacacgcagggtgctgcgctggcccacatccgcctcaaagcccacggtgggcgcctggttcatgcggaacacgcactcggcactgtcgatctcagcacccaggcctgagcccagcatttggccggagctggacaccacggcacagctgcggcagggctcgcggaccagcggctgcagggcaggcagggagaaagagacagagaggcatgaacacgcagcttacaccccctgcagc

SEQ ID NO: 223685 - DNA, 140 bp, Homo sapiens
  chr9:131183034-131183174
  hyper
gagggtgcactgccccgccctctccgggtctgcctcggccccgcccgggccccaggccccgccccctcccctcggccggcccgagagctccgggggccgctgcagccgcccaagcgcccgccatgcgcgctgcccgcgcc

SEQ ID NO: 223686 - DNA, 240 bp, Homo sapiens
  chr9:131709487-131709727
  hyper
agcaccactgcaaacactactgccgcctctgccagcaccgatccactcagcggagccccaggccccggggccggagatgggcactctcgggtcatatctctagacctggggcttcacggaggccggggcgactacggacgccctagacttcgggcccctcagccccgtcaagcagagggaggcactttcacccggccagcaaccttctccctccgttctccagcagcgaggagggaactc

SEQ ID NO: 223687 - DNA, 600 bp, Homo sapiens
  chr9:131842975-131843575
  hyper
ggcagggggtaccagggaagccttcattcagggcgcaggtcccagccgaaccaaagctcccaccaaagttcaacacgcccccaaagccagcgcctgattggcccgccctgcccacaagctgaggcagcctcaccttctgattggctgttatgctccctgttcggtgctggaaccctccccttctctgattggccagatgcctacctgcgctcgccccagattgggcgccagctggggcggctcgttggctcccaggggccccgctctctgattcgccgctcgggccagcccccacggcctgcacgctgaatggctgcgccgctacctatattggcctccgattgggtgcacggcgcctccccggcgtgataggtcaggaccaccgcccccctggctccccattggctgctcgaagaagcccggtctccgggtaagatggcagcggacggacagtgctcgctccccgcttcatggcggccggtgaccctcacccacgtcgaatatcctgcaggtaaaaggcggtcccggctccaaggacgccttcccagggacggcctctcagtcccgggcgctccggcctgctcgagcccgcggaggggg

SEQ ID NO: 223688 - DNA, 264 bp, Homo sapiens
  chr9:131940269-131940533
  hyper
gagctgtggatcttgcgcagggagatgctgatcaggctctgggcgtccagggcgcactccatgctcccgcggagacggcggcggagcagccgccgccgctgctgctgttaacgcttctgctgtttctgcctccagccggccgccggggcgcgccgggcaggggtaacggagtccgggtcagaggttcggctgcgctccgaaaggagccgccaccatgcgccgcgcgccacccgcgggctcgcgctccccagacggcgccaaagc

SEQ ID NO: 223689 - DNA, 300 bp, Homo sapiens
  chr9:131940596-131940896
  hyper
agaagagccaataggagctctgagagtctcctgagtgacaggcgcagcccgccccggggctactcggctggccaatcagaccaaggcggttcctttgtgctattcaaataccgaacggaccccgggcctccaacgccgctgctgcctcgaatgttctcctggggctgccgcgccgcgcgggactcggagccgccggggccgcagtctgcagcataggtcgcctggcagcggccacgttgaagcccgcggctgccctcgccttaggtcccgggagccgggggtcggctcacctgagtgctg

SEQ ID NO: 223690 - DNA, 292 bp, Homo sapiens
  chr9:132145469-132145761
  hyper
atcagccgactggccgttggcctctcaggactgtcacttggaagttccttctccaagagatggctattgccaaagtcatctgtgcagtgaccactgcagggcctgggcgctcccgggagccgcagcgcagggacagtccgtgcagacgggtggcgggggaggcgggggagggcaaaggcctccactctgcaggtagcccgggcctggtgggcgaaaggactcaaacgccagagctctctgaccctcggccgccagggttcaaggctgggcccagccgcgctttgccggggtc

SEQ ID NO: 223691 - DNA, 34 bp, Homo sapiens
  chr9:132222864-132222898
  hyper
gcgcgggcctctgtgcgccgcgagagggaggccg

SEQ ID NO: 223692 - DNA, 480 bp, Homo sapiens
  chr9:132245325-132245805
  hyper
gccggcgcccccaggcgctgcttcccaggagctcggctccccgggatggaagggactgatacccagttaatgggcgtggagcctgagcccctgagggtcgtcgctaacgggggtcgctcagcagggccggcctccgctgcctgcccggggtgtctaatcacctctccgatcctttgcccggatctgagcttcgtcattcacgcccctcctccctggcgactttgggcctggtgacagtcccccgaccctcgcagagccaggggcacagtaggcgccttagccactggcagaatttcaccggcgctctgcccgacgcccccagccccagggccgggcgtgggtggaagtgtctggaagggtgggttcaccagggctgggcacgtcagcggccccgtacagagaatccggtgcctggggtctctggagggggtactcagagtatccgaggaggagactcctggatgctaacagagcccccag

SEQ ID NO: 223693 - DNA, 56 bp, Homo sapiens
  chr9:132250698-132250754
  hyper
gtgaagcccgctcctcgccggcgaaaagcggggccgggctccggggcctgggtccg

SEQ ID NO: 223694 - DNA, 707 bp, Homo sapiens; identical to SEQ ID NO: 201901
  chr9:132258223-132258930
  hyper

SEQ ID NO: 223695 - DNA, 847 bp, Homo sapiens
  chr9:132330680-132331527
  hyper
ttagtttcctcatttgtaaaacggggatatggcccgtctcctagagtgaccgggaagatcggtggtatcaacgcaaactacagcccggcagcttccaggcgaactcacttctcaggacgcctctcctgctgtcctctcaaagcgggggacgaagccaccaccacccagtttacagatggggaaactgaggctcagggagatctggaaaccttcccgggcagctgggctccgaacccagggctgcgagcacaagggctggctcccgcccccggccctggtccctccttccccggggcatggcccggccgtgccaggcgctcggtgacagcccccgcgggggaggccgggctgggaaaggagagggcagcgggcgggggcgcctggccgcgcggggtcggccgcgggtcgatacggcggcaggatgaatgggagaggggagcgcgggcgggaggaggagggaggaggagggggaggagggagaggccggagcagggggagggcccgcccccgccgccccccaggcccccgccccgcccagcgggcttggccgggtctgcagccctcagcgccaagcgcggccccgcggccccaccgagggatcgataactaatttcaccgcggcagccgccccagttttttcccgataattgcgcgccggcagctgcgagcaaggcccccagcccggcgcgcagccccgcccgcgcgcgatcaattgacaccgccaccgggcggcaggaaaactcatttttctctccctccccggctccgggtgggcgcgggctgagctctgccaagggccgggggctacgcggggccggggccggggccggggccggggccaggccag

SEQ ID NO: 223696 - DNA, 104 bp, Homo sapiens
  chr9:132331553-132331657
  hyper
ggcgggggcgcgggcgcgggtgtgggaaggaggcttgcaaggaatccgaggaggcggggtgcctcagtttcttcactctaccacaggggcgtggccgaaggcgt

SEQ ID NO: 223697 - DNA, 522 bp, Homo sapiens
  chr9:132382255-132382777
  hyper
gggtggtggggtggtgggtgcggggacacaagggaccaccccccaccggaaatgactcgggcccgccccccgggccccgcggggcctcactcagtggctccggctcctcggcgcacttctcctggagctggtgcaggaactcacggaacctgctggggaggagctctcctaggaaggcgcccaagaagtcggggtcctccctggccacgcgcctccgggggcgctcgcgctctccaggccctggctgcctgggcgccgattcccgggacgcgccggccgacagcaggggaggcggcagcagggaccgcagcagcccccgcttccgcacggcccgccgggtcgcggtgagcaaggcgggcaggcgcggcgggaggcgtccgacgcccaccccgggcttggcgtccccttccggccaccacgcggcgccgccccccgggatcctccagtccccggagccccgcgcgcccagagccgctcggagcgcgggcggggtcagcttgggcagccgcgggtcgctgctgc

SEQ ID NO: 223698 - DNA, 201 bp, Homo sapiens
  chr9:132804284-132804485
  hyper
gctccttcccgggccgccgcactgcccatcccctgcccagtgatttccccaggaatccggggacggcaggaaaagagctccatccacagccagcccctcgcctttccggggacggccctcagccctgagggctgcccgtttaccgtgcgcatcccccggccaagcatccccgcaaggcgcccctcaccgccaactttcccc

SEQ ID NO: 223699 - DNA, 240 bp, Homo sapiens
  chr9:132805427-132805667
  hyper
cgccgctccacagcaaaatggcccgaggaagcagcagccgcggccgccgcagcgcccgcccgccctacacccggagagcgggggaggggcgggaggggaggggcggggccggtctgacagctcgcgcacgcgcgcccgccccaccccggcccggccccctcccccgggctcccccggccgggtccgcgtcgccctggggtccggaaggacgcggagggaggtgtgagggacggcgggacc

SEQ ID NO: 223700 - DNA, 274 bp, Homo sapiens
  chr9:133308611-133308885
  hyper
agaaggacgggcagcgcgtgggcggaactgcaggggctggcagggaggtctgagttacgcggatgggccacgctccgaccgcacccccgagtccgcctgtccgtgtgtctgtgccgcccgcaggacgtgcttccggcgctgctcgcaggactgcggcacgggcggcccctctacgctgcagtaccggctgctgccgctgcccctgggcgtgcgcgcccaccacgacgtggcccgcctcaccgccttctccgaggtcggcgtccccgccaaccgc

SEQ ID NO: 223701 - DNA, 210 bp, Homo sapiens
  chr9:133534647-133534857
  hyper
gcctcagtctcccccgacccctgtctcgccccctctgcttccagaagcctgcgcctctgtctctcccaccgcccggtctcctggtgtccccggcgtctctcccgtcgttcccgccgccttgatcagcctgggctgtggcgctggcatcgctggcctggggaccggggtgtgggcgatggaagggggttcgagaggcgcaggggaggggct

SEQ ID NO: 223702 - DNA, 498 bp, Homo sapiens
  chr9:133535058-133535556
  hyper
ggccgccactccgccggcagccccgcgcaggcctggccccgagtcacgtctgttgaaaccgtttttttcggcctcgcccccacccgccttggcagccagccgcgcctttgtacgcgccggcgggggcgccctggaaccctgaaccgtcttacggggaacgggggtggggggaggggagcggcgcgggccccacgcgaggaaggaatttcctgggccactgcgaaagattgaggctcagaaagccagagagagacgtgcgaggaggaagcggagagggtgtgcgaagctggagagggagtcggagcgccagcgaaagaggggagcgctggggaaggaggaagagaaggagagggggagaagagagacgcggatgctgggcgcgcgacggcagcgggcggaggaggggagcggccgggaacctgcgcgcaggggaagccaggacggagcgcagcaccggcaggggagggttgccgaggggctgtgccgaggagcccgggt

SEQ ID NO: 223703 - DNA, 180 bp, Homo sapiens
  chr9:133538095-133538275
  hyper
gaccctcttagccaaggcgcgtccgggtggtggaggggcgtctatgccaacaggcgtttggacagggtctcgctcatgggaggtcagctcgctgttcttccacccaagtcctccgcgctgaggagaaggtctagggagtccacacagtccagcggagactaatccgtgagcctgacccac

SEQ ID NO: 223704 - DNA, 104 bp, Homo sapiens
  chr9:133538383-133538487
  hyper
cctggggtccgaggcttgaggctgacactggggagccgcgaagcctgcaggaagcggggccttccgctgggctcagcagctacctgcttcgggagaggggatcg

SEQ ID NO: 223705 - DNA, 105 bp, Homo sapiens
  chr9:133538728-133538833
  hyper
tttctgagggacttcgctctcaggcacgcctgctcccacctaggaagggtctcgggacccctttcaatccccctatatcccgtaggaaattcttttcccagagac

SEQ ID NO: 223706 - DNA, 104 bp, Homo sapiens
  chr9:133538927-133539031
  hyper
gggaccagccccagccccgacggccgctgcggccccgcctcggcagccccgtgagcccgcggaggagtttcgcacccgaccgtgcacagcgaccgagttggcgc

SEQ ID NO: 223707 - DNA, 240 bp, Homo sapiens
  chr9:133710615-133710855
  hyper
ggcgggcgccctctccgggccctttgttaacaggcgcgtcccggccaggcggagacgcggccgcggccatgggcgggcgcgggcgcgcggggcggcggtgagggcggctggcggggccgggggcgccgggggggcgcgcgggccgagccgggcctgagccgggcccgcggaccgagctgggagaggggttccggcccccgacgtgctggcgcgggaaaatgttggagatctgcctgaagc

SEQ ID NO: 223708 - DNA, 429 bp, Homo sapiens
  chr9:133814206-133814635
  hyper
gccagcccaacgcccgccgctcgcgctgcgcgccgtccccgctcccggctccggcgcctccccggcgcgctcctctctctcctccctcgtccctcctccctccttctcaatctccgcatcttttctggtctcggactctctttgctttttattgctcccctcggcctcccccgacacactcacacacacgcgcgcgctcacacccgcggacttggatactaaactccgcctccgaaaagacctagggaaaggaggccgaactggcccccagataacgcggccggccggagggcagcaaacagccgcgggcggcccggctcctgctggctcccggaggggcctgagagccccccggcggcgcctctgcacaaacttcctcccggaccggactcacacaagtcaccatgcgcggggcgggccccgagggcg

SEQ ID NO: 223709 - DNA, 297 bp, Homo sapiens
  chr9:133814876-133815173
  hyper
tgggcgtcccagtccgcgtccgcagacccgtgccctcgcgcccgcggtcggaaagcccacacgacgcccccttgcccgggcggcccgtgggcgaaatgggggtccccaccactgccacagccgccggcgctgtggtcgcgagtaccagccgctccgcgctcggccgcgctcccggccgatcgcccgcgctccccggcgcgccccgcgtggtcccagcccccgccttctcctccgccgggaggggatttgtgccaggagggggcttcttagttgccccttcccaccagcagcactttt

SEQ ID NO: 223710 - DNA, 752 bp, Homo sapiens
  chr9:134151924-134152676
  hyper
aataaggaaggctctgtccccgcgcggccgcgccaccctcgcggcagaagcctgacttcctgccctccggccttccgcacgcgctccctccgggccccgcacccgcacccgcccggcgcggtcgaatcaattgcagagcagtttgtgttcacccggccgaggtcccggcgccctcggggcgagcgccgacccgcggcttccaggaggcgagctcagggctccggccgctcgccggtgacgggggagcgcggcgcgggtccccgtcggcgcccactcgcgggcgcgggccggacgtccccacgcaggggcgccgcgtcccttcgccgctgtcgctgccggccgccgtgcagggtcccggggctgcgctccggccgccgccgcctgcttcgccgcggccgccgaggacctggtgggaggtggaagggacagcgcgtcaaggccagcctcaaagttaagccgaactttgctgcggggggcgcgcgggggcggcgacgcgtgtgcgctgggcgcgggctgcggagctgacggcgcagctctgggcggtctccccggaggcggtggcccccgccccccgcgcccgccccgtcagtggcggccgcacgaccgcgcgcaccagcgaataatagccgcccgtgacatctccgctgataccgtcccggacgggcggggtggggggcgagcggctgccgctgcagggggcggcgagcacttgccctgctctgtccccaccgccgcgccgccagcgccaggtg

SEQ ID NO: 223711 - DNA, 700 bp, Homo sapiens
  chr9:135036860-135037560
  hyper
cgggaggcgatgtttaggcagcgaccccccagaggctgccggggccaccctggccacgggcccgccgggacgcccctgctcgccgcgcccctccccgggccgtggcgcgtcccccgagccgcgcaatatttccttcctgcacctttaagaagaccgttgctccgtggtgggatggtgtgttaaagccacacagaggaagttacgcagcccggatcagaccgagagataaaagccccgatggtgatcgtgagtgatggcaagaggatttagcctcggcattaacttggagcggagtgcaggggggcagtgaagcgcccgccatctggcccgcgccgcgccggggggatgccccggctccccgacgagacgccgcgaagcccacccgggccgggggctgcccggcgcccgagcgcgggtcctccccgggccgcccaggggggccaaaaagtttgcacttgttagcggcgacctcccgctcagcccgggcgggcgatgcgggcggcgcgggcggccccctcccccggcccgcgtctccgggacggctgcgggcggcccccccggcggccggagggctccctggccccgatctgacggcggcggcggcggcggccacagcggcgggagcggcgcggggaaggagcagcggctcgcagccctcggcccgcgcccccacccagcgccagcccgaggggggaggcgc

SEQ ID NO: 223712 - DNA, 672 bp, Homo sapiens
  chr9:135285314-135285986
  hyper
ccgggctctgttggcgtcccgtcgccaaggagacgggccgttgcattcgtcctccaggggtggtcttggttttctttcctctcccagtctgcaacgcggggcccaggagacgccctgaggatcccgcggggctcctgcattgctccggggctctttgcgatgaggggccggcgcgagcggggcgcgcctggctccggaggggtcctggcatctgagtttccccctcaggatcccggtggtgcggcccgggccgcccggcaggcccttcggagctccaggctgtgcccgacgtggggaagcgcgcccaaaccagcccgcgggccggctccccggcgacctcaaggatgccagaggccaggagctccggcccggacctcacgcgatggaggaagcagcagcagcctgtgcgccgcacggtcagccaggtctgcccgcccccgcggcggcccctgaccgtggcggacatccgttccggcatggagaacgagcggctgggggtcgtgcgggactccatgtttcagaaccctctcatcgtcaaggtgagcaccccacgcccaccgcgctttcgctgtcgccggctccgggcacctgcgccgccgggggtccccacccgcagcgccctggccccgcggcccggggtccgagcgcagcgtgggaagctccagctctggt

SEQ ID NO: 223713 - DNA, 619 bp, Homo sapiens
  chr9:135286199-135286818
  hyper
agataggtcgcacacgcccagtctaagtcgtggctgccagccctcccagggtaaaggccgcctctccggttccgctgcacgcctggggtacgtctatgcagcggtggctccgtgtctgtcctggaagcatcacgtcgaatgttcatttccgttcgatcatactaatttcttacccaaattacaaccctaagagaaaaaaagcataatctttggcctaggaggctccgcagacaagaatgagggagctgcggtttcgggctggatcactttcccttccattacacttccctcctccccacctttagcctcgcttcccgctgatgggaaaccaacactgctgtggcggccacaccttcccgggggccactggagaagtcaggctgaggcttgggggtcagggagcaagcctcgaggcgaatttatcttgcgccgctggagggcagtgcgcctttaaaaatgcgccccgcgtcccaggtgcgggagtggaaggcgcaggtggtaaccgtggattcaacaacaattatttgtgtgaccgccaggcgctgagtagagcccagaggtggtggtggcggtttgtttttgttttggggaaaagggaacccgtgctagaattaactga

SEQ ID NO: 223714 - DNA, 161 bp, Homo sapiens
  chr9:135395349-135395510
  hyper
gactaacgaacgagtgaacgtagagttgagatctcattcatgaggtgcactgcccttctgctgtccccttcctccccctgaaatgtccttgggccctcaaatcctgtaccattccccctcccccaggttaatccactctgctacaccgcaacagtgtctgg

SEQ ID NO: 223715 - DNA, 422 bp, Homo sapiens
  chr9:135462500-135462922
  hyper
ggcctcgggcgctcccgccgccgtcctgttcccctcagggttcatgtcctgttcccggggccccagaggtcccgtctgagagcggcccccgcgagcttgggtgtcgcggaaccaccgctgtcggaagccgaggttacacaaacgccacgggcaggagcgggagggcaccggcggcggctgcgaggccgggccctgacatgccgctgtgtccgcagtgaaggaggagggcgaccgcgagatctccagctccagggacagtcccccggtgcgcctgaaaaagccacgcaaggcgcgcacggccttcaccgaccatcagctggcgcagctggagcgcagcttcgagcggcagaagtacctgagcgtgcaggaccgcatggagctcgccgcctcgctcaacctcaccgacacgcaggtcaagacct

SEQ ID NO: 223716 - DNA, 266 bp, Homo sapiens
  chr9:135464627-135464893
  hyper
cgacagacggccgtcgggttggagctgctggcggaggcaggcaattactcagcgctccagcggatgttcccgtcgccttatttctacccgcagagtctggtttccaacctggaccccggcgcggcgctctacctgtaccgcggccccagcgcgccgccgcctgctctccagagacctctggtgccccgcatcctcatccacggactccagggcgccagcgagccgcccccgccgctgccccccctggccggcgtcctcccacgcgc

SEQ ID NO: 223717 - DNA, 105 bp, Homo sapiens
  chr9:135906451-135906556
  hyper
gaggcgggagcgacgcatggtgtgcgtggagtacccgggagtggtgcgtgatgtggctaagatgctgccgactctgggcggcgaggaaggcgtctcccgggtaag

SEQ ID NO: 223718 - DNA, 104 bp, Homo sapiens
  chr9:137273993-137274097
  hyper
tgagccaaggtgtagatgctgggaggtaaggttaccctccccctgggctggcgtctgcctccccgcctgctgctgcccctgtggccggccgcatgtggggagga

SEQ ID NO: 223719 - DNA, 360 bp, Homo sapiens
  chr9:137967489-137967849
  hyper
ggccagagccggagcgcgtccgcgtccacgcagccgccggccggccagcacccagggccctgcatgccaggtcgttggaggtggcagcgagacatgcacccggcccggaagctcctcagcctcctcttcctcatcctgatgggcactgaactcactcaagtacgtgcatccaacgccattttcctccctgccaggcgcccggcccggcccctcgggagccccacaaagtccgggaacggctctggctccgcgccgccccgcgcccccggcctgggcgcccgaagtgccggggttggggagggggccagggcgctaggctggacctgggtgggagggaggggtgcaggctgaccggagacg

SEQ ID NO: 223720 - DNA, 151 bp, Homo sapiens
  chr9:138372138-138372289
  hyper
gggagctttggcccggcccggggcggccgctgccctccgagaatggccgcggcccggccggcctggagactgcggttcacgccctgcgccaggcggagcttccgggagggtggccgctctcccgggccccaagctcgctagtcctcggatc

SEQ ID NO: 223721 - DNA, 682 bp, Homo sapiens
  chr9:138606161-138606843
  hyper
ccaggccccggggccgctttggagggagccccgccccctgcccctgcgcagcccccgccctagccccagcccggcgcagccggtcccgcgcgcccccgcccgcatgtgccgccaggcccgcccccgcccggccgcccgcccgcccggtgggtcgcggtggccgcgggctgcgctgcgcgggccgggcctggcgggccgggggctgcgcgcgtccgcgagggcgcccgacgcgggctgaggggcgctggcgtgtgcccgcaggcggccctgcgcgggggacggcgcgctcctggacaccgccggcttcaagatgagcgacctggactccgaggtgctgcccttgccgccgcgctaccgcttccgggacctgctgctgggcgacccgtccttccagaacgacgacaggtagggaccgggcgcggggtgggggctggggtcgccgtcccggcgccgccgcacgcccggagctgtccgcggtgctgacggccggtcccgcgcgcccccgcagccgccggcgcccttcaacttttcccggcttctggggacgcagaagtttcggagggggtgcgggcagggggaagcatcttctcgggagggggtctccggaggagggcgcgggatgctcggagctgcggagtcttccagagcccgacttggggcgcggaggcggagggcggcctgg

SEQ ID NO: 223722 - DNA, 1532 bp, Homo sapiens
  chr9:138986159-138987691
  hyper
cccacaggtttaagcggctccacgacgagagtccaagaccaaacttcccccagagcctggcagaggggctgggaggtgacctctgacctccgaccccacacgatcccagcaagagaagcaggaaactccgtcggaaggcctcggtccgccctggccgtgcggggtgcgcggcgggccccgggctccgctgagtttcttagagaaggagctggggccccccgacctcagctccgcagaggcacagaagctggcaagaggcagagccccctccccctgcggccggaccccagtttctccccaggctggggcccgagtgggggaggcgcgggaggcggtgacgacccacgaacgggcccacctggaccgggagggcgaggcgcgggcccggctgggccaggcagctgcgcagatgcgccgggaggggtgggtacctccgccctggccccgggccagtcctgccccggcttccccacccggagggctggatcggccagtcgggtccctggggaggccgcgcgggtccccagaaatccagggaaacccagcaggcggcggggagcgccccgggacgcccggagccggggtctccccgaacgcgcggcgcggcgtcccggcccggggtcgcgggcgcctccgccgggaccccccggccccgcccggcccccctccgcgggctcccgaggccggttcccgcgcgcacgcccgggccggcgcggaactcggccgcacccgccccgcgcggccggcactgcggcagggggctcgcgccaagttgggcggccgcggagtttgcgggaagtgcgggcccggcccgtgggacgaccccgcccggcggcgtaacccgggggcggccgcgcgcgccaagttggcggtacctgcgggcgcccggcccggtccggcctgggcagctgcggcgcgccgcccgcggcaggaagtgcttggcgtcccggcgctccggctcccatggactttctccgacctcgcccagcaccggcggccgcaccgcggcgggggcggggcggcggcgggggaggtgcccgcgggccgttaaagggacagcgcgccggccgcgcgcgcgcgcgcactggcagccaggtgggctcccggggtcggggctggggtccgggggccgggagggtccccagtgggggccggcggggcgtggggaaccccgagcgctggggaggggaggcggcagctcctcgcccctcgcgcgtcctccttccggagctgccggcggtcgaccctgcgcgggacacccggcgggagccggacgccgcggcgcagaggacggagctcggcggccgggtcgggaaaggacctggagcgccgccctccgccctccccgggccccggcctcggccggactcgctaagcccgggagagcccccgggcccccctaccccgcccccggcgcgcgccctgcccgcggcagtcgcgtccgcacggtgcagcctccgggatccgggcgggggaagtgcgcgcatccgcagccgccctggacgctcaggcgggccgtgaaagacgaggat

SEQ ID NO: 223723 - DNA, 448 bp, Homo sapiens
  chr9:139024426-139024874
  hyper
atggagctgggaaacgcccgctgcggggtgcctgggacccccgaaggcgtcgggagttgggggcaaacggccgccgccggcccgcgtcaggcgcccggcctcgctggggccgcggctcggctgggtccccccactccgggtccggctgaatctccatcctccctgtgcggctcctgcaccccggcgaacctggctctctctgtgcctcagtttactcctgaggtccgctgagcaggaagtgcagccctggctccgggacctcagcccgaggccggcgctgctgcggagcacaggcctcctgaggccgccccacgcgcaggggcgctgcagagcgcggagcccgggagctcgcaccgcctgttcgtggggtccctggggtgcaggggtggaggacataggagtgtgggggtcgtgggcagacccaggcgggacgctgtgccagtgccgc

SEQ ID NO: 223724 - DNA, 1079 bp, Homo sapiens
  chr9:139090400-139091479
  hyper
ctccatgggaaattcagatccgcgggctccctgggacccctgcgaccccgccgacgcgcgctcgtccccccccgagctccgcgatccctccgcctaccggggaaggagacctcagcgtcgctgtcctgcccctcctgaacgctgtccttgtccgacttggagccgccgcgggagcgcttcatgttgcggaaatactgcccccagcgctgccggccggcgtccttcttcagcctcttctccttggcccggcggttctggaaccaaacctgggggcggggcggggtgagcggccgcccggctctgcgggggcccccaaggccgcgggcgggagggaagcaggggcgagcgctgacctgcaccacgcgcatgtccaggcccgtctcggacgagagctgctcgcgcacgtggcgcgccggcttgggcgaggtgttgtaagcgctcttcagcgtctccagctgcttggcggtgatggtcgtgcgcggccgcttggccgtggcctcggcctctgcgcggcgggcgagcggtgaggcgcggcagcccctccggccccggccggacccccagccctcccaccccggccggcgcggggacgtcggggcctcaggtgcccacccccatcccgccccacaggcttctcggaaggcgcgggcgctgggagcgattggcaaaaacgggcagcacccgggctggggtggagggggcgccggcggagggcgggttctgccgcgggggcgggggcggcgccttccctaaaatcgcacctccacggcgcccccgccttcagccttggctcccttctccaagcaccctgatttccccgcgggctcccctttattctaagggtgtgggtatggcccagccttcgcggccaagaatttagggcgataattccgaccaggggcgaaaagccgcacacttcggaccgaacgaagcggttcgggacgcgggtctgtccgtgactccgccgttcccggcctcggcttcctgctgcctacaccgccctagcccaggcccccttagtgagcgcttggggagagaatttccccggacgcccccctgggcgtggcctcagccccatt

SEQ ID NO: 223725 - DNA, 360 bp, Homo sapiens
  chr9:139093542-139093902
  hyper
gctccctcgacctccggcggaaaaaactgggctgcgcctccccacgcagtggcgggaaaccggcgatgaatgcgccccgcatccggcaaaaccgcagctccgggtgcggagcgtcgaggacccgctgcgcgcccggggtccccatcgtgggcagcgatcgcaggcgaggacccggctcggagcggggcggcccgacaggccgacacagcgcggattcagcaccgcggaccggacagcgcctcggccgcagctcgccgccggcgcccgcgtcgggcaaaagccgccccagcccaccccgcgccgcgcccgcgaccccagccttacgctgcatggcgactccagccctggcgggggctcctg

SEQ ID NO: 223726 - DNA, 311 bp, Homo sapiens
  chr9:139096714-139097025
  hyper
cacccccttcctcgcgcctctgccgcccttgccgtttctgtcctcagtgtcctgctggggcttaccccgagtcccgcccaaggtgcagacggcggcggccccgggcctcgctcggtcgcgctcgagccccgtttccagcagcatcgcggccaccaggccgagtggcgcgagacgcgctcctcctaggtcagcgtcccctggagggttcggggctcccaagtcccgccgcgtcgtgcggggcagggagcccgggagccactgggcctggcgctgtccgcggtgctgaaggaggcgcccgctgcccgccccgc

SEQ ID NO: 223727 - DNA, 56 bp, Homo sapiens; identical to SEQ ID NO: 201930
  chr9:139294771-139294827
  hyper

SEQ ID NO: 223728 - DNA, 149 bp, Homo sapiens
  chr9:139334259-139334408
  hyper
cggagtcagcccggccgggacccagcaaccgccgccgcggggccgcgcccggtccccgccccgcgccccggccccgcccacagcggcccctggcggccggaggactgcgccgcaccggacccggacgggtctcccacgcccctcccaac

SEQ ID NO: 223729 - DNA, 279 bp, Homo sapiens
  chr9:139401222-139401501
  hyper
ctgggtgccacgggcgtcgcagggattggacaggcactcgttgacatccccctcacagcgctcacccacgaagcccggcgggcaggtgcagctgtagccgcccacctggtccacgcaggtgccgttgttaaagcacttggggctccgggacacggggtcaacggggggattgcagtcgtccacgttgatctcacagtgcacacctgcggggccaggtttcgtcagtggcccaagcccgccacaccccggccctgccgtgccgcgtgtccgtcccggaag

SEQ ID NO: 223730 - DNA, 145 bp, Homo sapiens
  chr9:139440760-139440905
  hyper
tgcggaaggatccggctctggcggttgccgcgctcggcgacaactggcgactgaaatttgcatgtgaataagcggaggagcccggggcggaatggggagggcgaggccgcggacagccgtgtgcaccgtgcgctgggccgggcgg

SEQ ID NO: 223731 - DNA, 105 bp, Homo sapiens
  chr9:139580674-139580779
  hyper
ctgcccctggaaccacggggaagggggcctctggggccacaatgcccccaccccaggccattgcaaaagccactggctgggcagtccaaacagggcagggagaaa

SEQ ID NO: 223732 - DNA, 277 bp, Homo sapiens; identical to SEQ ID NO: 201936
  chr9:139580993-139581270
  hyper

SEQ ID NO: 223733 - DNA, 144 bp, Homo sapiens
  chr9:139581731-139581875
  hyper
gaactcggccgcgcggctcagctgcaccagcagcagcagcaacagcagcgccgcggccagacacggccacagctccatggcccggcccggcgcccgacggcgccgccagctcgctcccgctcccgctcccgcttctcccccgcg

SEQ ID NO: 223734 - DNA, 457 bp, Homo sapiens
  chr9:139606529-139606986
  hyper
gaagggtcggaccccggggcgggctgcaggctcggccagcccagggctccgcgcgtctgaccccatcctgaggacccaggggaaggaccagccctggctctgcggcctcgaaccgggggcgcgcgtggggagccctgaaccccgcagcctgcgtagcgcacggggcctctctccagcgtgggaagagcccccgagacgcccaggagcccgacaggcgcgcccccggccccggctccgcctcccggcccatcccgcgcgcccccagcccctcccgcagcaccgttgcatgaggggcggggtctgcgggtgggcggggcctcggtgcccgccccctcctcagccgagccgggggtcgaaggcgggccgcgcgccaagccccgcccccgcgcgcctccgccgcgaccctcccccgcgcgcccccgccgcgccgccgtcggccgacagaaaggcgcgcgcc

SEQ ID NO: 223735 - DNA, 480 bp, Homo sapiens
  chr9:139607054-139607534
  hyper
ggccgggccggggctgaggccgagcgagccgcggggcccgcgcagccccggccggagcccaccatgcggcggctgcggcgcctggcgcacctggtgctcttctgccccttctccaagcgcctgcaggtaagcgcggtgcgcgcccgccgcccccggccgcctctgcctggggaggccgagctccagccccggagtgggccgagtacggagcggggccccgggttcggacacgaagggttcatgagcccggggtgggcagcggggagggggcgagtggctccggaaggacgggacgctgggggaggggcggtggcggcgacaggagggtccgggcgcggggatgctgcggcctggaggccctcgccccgacctgcaggcggtccctgccccccaggcccagaaaccacaccgaagtcctttcttcttttctccacttaaaaaatgaggtgtgttattctgcggtagaaaacttgggacgca

SEQ ID NO: 223736 - DNA, 502 bp, Homo sapiens
  chr9:139948402-139948904
  hyper
gcggccagcagcagcggcggcagcagtgaccgcaccttcccggccatgggcgggcgggcgcgcgggaggacgatgcgtggacccggagagtgcggggagccggaggcggaggcgggcggggccgcgggaccgcggggtaggggccccggggcgggacgaggggcgggaggccgggcgggcccgcccatcaccggccacgcccacgggcggacaggtttcgcctccgctcccaagcttccgccgtccggcccgcgcaggtgagagacgcgggcgcggctgagtcaccagcaccgccccccggctcccgggtctgagcccgggcgccccgcggctatggcccaccttccccttcccgcccactcagcaaggggatcccccggccgtggaggcaggagacctggcgtgggggtgggcgggcgaggctggctcggagggtcctgtgctggagagccgcgcttttcccgggcccgggaaaggaggccagactcgcttgcaggaatga

SEQ ID NO: 223737 - DNA, 780 bp, Homo sapiens
  chr9:140024264-140025044
  hyper
ggcgcctgcgtctaccccgcgcgcagtcgccacggcaacagggcgggccttggttctgcttcgggcgtggtcggtgcatggtcctccagcactgttcgccccgcgggtctggtcctgggttcctttcgcctcctgtcgtcggacggcaccggctttgcccacggcctcgcggggagacgcagacacccgggacccggggaggcgcccgggcgccgccgccatgttgtcagggagcgcccgctcccagctcttcggttccgggacccgcggcgcggggatggggctgggccgcccttggtagccgtcctgggctgggggccaccctggccgcgtggtcaccggcaagaagcccagggcctcacccgggcgcggcgtcgcgggggccgagggaaggaccggaccctcccgaggtcgcggacccggccggctggggcgaggctggggtggcccctaccccgagctaagctggccgcgccgcatctcaccgtcgccggggcccgagcgctgcgcctggaccggcgccgagcgagggggccaagcggccggctggacccacagtccccgcgccataggcgggtcggggctttcagactcggctccagccctcaaacctggtagccttggaggtcagcttgagatgactgcgcttcctgcgcgcgttgtcctccccagaaacgctcaaaatggcaaagcggcgtccgtggccgccggaggcctgtgttctcccctgccgaacctcacgcgcggcccctccctcattttcttctggccaggctgccc

SEQ ID NO: 223738 - DNA, 794 bp, Homo sapiens
  chr9:140033285-140034079
  hyper
aagcgggcacgacgcgttcggtcctattaaaaggcacgcaagggtgcgggctgcacgcggtgacacggacccctctaacgtttccaaactgagctccctgcaggtccccgacagcacaggcccctgtcccaggacccctccaggcacgcgctcacacgcacacgcgcgctccccggctcacgcgcgctccgacacacacgctcacgcgaacgcaggcgcacgctctggcgcgggaggcgcccccttcgcctccgtgttgggaagcgggggcggcgggaggggcaggagacgttggccccgctcgcgtttctgcagctgctgcagtcgccgcagcgtccggaccggaaccagcgccgtccgcggagccgccgccgccgccgccgggccctttccaagccgggcgctcggagctgtgcccggccccgcttcagcaccgcggacagcgccggccgcgtggggctgagccccgagcccccgcgcacgcttcagcgccccttccctcggccgacgtcccgggaccgccgctccgggggagacgtggcgtccgcagcccgcggggccgggcgagcgcaggacggcccggaagccccgcgggggatgcgccgagggccccgcgttcgcgccgcgcagagccaggcccgcggcccgagcccatgagcaccatgcgcctgctgacgctcgccctgctgttctcctgctccgtcgcccgtgccgcgtgcgaccccaagatcgtcaacattggcgcggtgctgagcacgcggaagcacgagcagatgttccgcgaggccgtgaac

SEQ ID NO: 223739 - DNA, 600 bp, Homo sapiens
  chr9:140196228-140196828
  hyper
ccctcgggcccgaacgagttcacgttgaactcgcagttggtcatgttctgcagcagcgactgcagctcctgcgtgttgcccttgcgcacagcctcctggaagatgcgctgcgtctgcggcgcggagcaggtggacagctcggcctggctcatgctgccgccgggcgcgggccgcgggccgggccggggctcagcgcgggcggcggctgcggcgcgggcccccggctgtctcggggcgcgcctcggcgcatggagggcgcggcgtccccgggccccgcacgccgcctctgggcgctccgggcgctcggggccgggggtcgccgccgcggggaccccgccgcatccagccgcgcccgggtgggcgacgggggcgcgcgctcggctcgcgggggccgggcccggccggggacggcggcgccgcgcggtcccggtccctactcggttcggctgcggctcccacgcggtcccaaggcgcctccccacgcgccgcagcactagctcgcccgccgcgccggggcgccttttaccttctttatatttgcataacaatggcagcccgtgacgcgcgcgccggcggccccgggattgggccgcgcccaca

SEQ ID NO: 223740 - DNA, 480 bp, Homo sapiens
  chr9:140196914-140197394
  hyper
gccggcagcgcctgggcgggggaggccaggtggccgccgggggggtccagctccgtcgccgccgccgtccgcgcgccccccgggcgctccgcgtctctttgcggtcgtcccgccccttctccctccggccacccggggaattccaagctccctcagcagccagacccaggccttgcccggtacccgagcgcgaccgccaggtggccccgagggcggcctctcccgggcagggggttcgcgggcatctcaggcccgtggcgaaggagagacccctctgagcggagaggcgcgcggcgaccccggccagcccgcgcctccgggctcaccgtccacgcgggtggcaactccaggccctgacgtggggccttcagccacgcgggtccttcccgcgcgcgggcagcctcatggccgccggctcagcctatgtgtgccccaaccgtactgatgcgaggggcctccggccggccaccgcggcttcta

SEQ ID NO: 223741 - DNA, 387 bp, Homo sapiens
  chr9:140445746-140446133
  hyper
ttaatttgggcaccgcgagggctcgagtccccccacaccactgcccggcctgcgggggagcacagacagcccgggccctcccggctgcaggtcccgggctttccccgcgcggttgccggctccgcccagaggagccgcgcccggcggaggggtaagaaaggcagggtcgcggcgtcaacgcggcggccgtctcgagtccagggcccgcgtcctccccgacctcccgacgccacctcacggcctcagggggactgggctcccgggaaaccgccggccacctggcggacgaacacaggcagtggcgggcagtggagacgccagggaccaccgcgctgagagcgatcactcatccgccagccccgccccgcgagccccgccccgcgagcc

SEQ ID NO: 223742 - DNA, 122 bp, Homo sapiens; identical to SEQ ID NO: 201948
  chr9:140473437-140473559
  hyper

SEQ ID NO: 223743 - DNA, 128 bp, Homo sapiens
  chr9:140703838-140703966
  hyper
agccagtccctgggatgtggcggcggccctgcgccctcggagggaggcggggcagagctcaaatggaagcagagcctgcggggtggagaccgcacccctgcaggggtctgccttgggccccgagcctc

SEQ ID NO: 223744 - DNA, 240 bp, Homo sapiens
  chr9:140704205-140704445
  hyper
tgtattccagaaatataccaacagacataaaccaagtgttcagtaaaggaaaggtccggaagctgagtgactgtgggggaagggtccggaggcggttccgatgccgccctgtgtggaccgtcggtgatgggtccggaggcggttccgatgccgccctgtgtggaccgtcggtgatgggtccggaggtggttccgatgccgccctgtgtggaccgtcggtgatgggtccggaggcggttcc

SEQ ID NO: 223745 - DNA, 824 bp, Homo sapiens
  chr9:140772631-140773455
  hyper
gtcgtccgcaaatacgcgaagcgcatcaccgagtggccatatcctgccgggcggggccgggcggggccgggcggggaccggggtgggggccggggccggggccatcttcccggtggccgggagggcgcgacctggggaggcgtcgggagacgggcgaggggggtacggagcgccccagggcccctcggagcggcgggtgcgggagcatttccgtgagtgcggcgggcgcggggcggagcccctctgctccggactcgtccctccgcacgccgggtcctggggatcctggtcggtgcacagtgcgcggctagcctggagggcaccgagggcgaagccgcgtccgtgcaggtgcgagcgctgtggggacgcggccgtgcgcgcgcctggctgcaggtgcctgcgtgtgcgggctgagctggagcctggcgctgcgcgtgcgtgcgctcgcgatgcgggctacatgcatgttcacgtgcctgtgtaggtacatgtggctgcgtgtctggagggagcagcgtgcgcctgcgcggggtctccctccagcctcgcctgggggcgctcggccccctcccctcggggccctggagtcgggcggagccgggccggaggcgctgtccgcggtgctgacggccgcccgggtgtgccgaggggctggcggcccagactgcggaggccccgcctcgcggccgcccctagggatgggggcagggagtgagggagaccaggccgcttccgccaggagaggggctccggacccagttgtctcagcccctccggagacggcctagcggtggctgctgcactgggctctgctggcgtcggcc

SEQ ID NO: 223746 - DNA, 1002 bp, Homo sapiens
  chr10:3109010-3110012
  hyper
ctgggggcgggggtcgaggaagccgagccccgaggctcccagcgccgccccaggaggaatcttgcgggccactagaagctgtgcgcgcggccgggctcggcccccacaacggcccgagcggccgggcctgccgcgagcctccgcgtccaggtggggtctccgcgcccccattccacccctccccgccatcggcgctccccgcaactgcggggtttccacccgccccggcgctcgcgcccactcacggtctccctcgcccccccgggagatgctcccggcgttctatcccgccccgccctggcgcgccccgcaaacgatgtgaccccggccccctgcggtctcccctcctccggacgctgcccctgccccacctgtggcgctcccgtcatctctagagcccccaaccagagtcctccagcccacccgcgaggctcgcgcacctgcgatgcggccccactagcagggacccgcccacctgtggcgctacccctgcctctgccgcctcccgcaccgctagcgcggcccccacctacgacgacccccgcgtagatgctcctgcccacacccgccccagccccggcccctgcccctagccgcgcccgcgccccctcccccgcagcccctcccatacgctcgggccccgcccgtcaccgcccattggcgctggggccgggcgggggcgcgggcggggcggcggttccgagtcaggcgcgcgcgggcagggtccccattgcctgctgcgcacccggacgtgcggctcccctcggcctcctcgccatggacgcggacgactcccgggcccccaagggctccttgcggaagttcctggagcacctctccggggccggcaaggccatcggcgtgctgaccagcggcggggatgctcaaggtgcgcgcccccctcccggcggcgagggagggacggacggacggagctggggagaaccgggcgaaggcgatggggtgaccggagagaagaggggggaagcgatgggggggacc

SEQ ID NO: 223747 - DNA, 977 bp, Homo sapiens
  chr10:3110383-3111360
  hyper
ccgcacgccaccccctagaatgtcgaggaagaaacggctgggtccccgcgcgcctcctgtcgcctcgtgccctgcgcggcgtgggcggggtcctggctgctgcaatgcgggacgcggcgggggtgcgcggggttcccgcctggcgtctccagggcggtccggcagcccctcgcgtttccgctgggagatttttaaaaagggtttcctgcgctcgcatgtgctgtcgccttccggctcgtgacaaaaacgaaaaccaaaatgggtcccaggccctccccgccagcctccgcagacgggaaggatcaggaagcggggactccgggatgtcagcggcgccgcggcgcgggctccgggcttccctgccctgcaatgtggaagctgctctctaggaggggcccgaggctgggcccacggacgcgggcgcgccgggaggatatttaacattgaagagcggaaggtggcggagactcggcgcgccccaggccccgggtgcacgtgggggcgccggtgcccggatgatggagtgtcccgatccgtgcaatccctggcgggtagatcggcgcttcccaggcgaacgcaacctgggagccttagcgatcgcgcaggctggagacgcggcgcgccccgagctgggttttgatttttgttttcccggttcctcctgccgcagatgcgtggaaaggcccggatggcggatttcctcccgtttcggggccgcgcactgcacagggttggagcggggatgcaccccctgcccactgcgcgggtgaccttcccttcgcccttgagcgcgcggggcgggcgcgggtgccgcaggttgaggcgctgtgggcgccgccccgcccgccacgagcgcctacgtgatgcccggcccgtcgtctccacgagccccggccccgacacccgtgcgccgcgcgctccccaggcccgcagcgcagcctccccaggcccagcgccccccgcgggagacccgggtg

SEQ ID NO: 223748 - DNA, 58 bp, Homo sapiens; identical to SEQ ID NO: 201960
  chr10:3862675-3862733
  hyper

SEQ ID NO: 223749 - DNA, 157 bp, Homo sapiens
  chr10:5488421-5488578
  hyper
actctcctcctgggcgaaagctgagaggcctaggtgtgcccagctctcagttaactgaagtcacgtggtggtggaccccgcccccagggcccggttggctgtggccccgcccccgagccctggggtcggtgcttgctgcctgcggctctcagaagcc

SEQ ID NO: 223750 - DNA, 540 bp, Homo sapiens
  chr10:5708105-5708645
  hyper
accgtgggcgtttcccaggctctcccccgccactgggcaacggccccgcacgcgtcccgcaccttccccagggcgcgcggcgctcggtgggtttgcggttgcgaaaccccacacctggcgagccgcacggactgcaaccccgcagtgcgctggcctgggacaaggcaccagacatgagagcccgtctgggatgcgcggcaccactgggaccctgctttcaccgcggcccaccccgccaaacgcccccgcccacggagccagcgcggggcgcgccaccacctccccggcgcaggccatcggatacgcggccggcctcaggagccggcgccgctgcctcgctctgacctccgcggcgcccgcacgtacccacgtcgcccaggaagcagccgtccgccgcccggggctccatgcggctcaccggcggccgcgcggcgactctgggcgccgggacctgggccgggccgcgcggggccgctgggcggggccagtctgcgctgggccgcgcgtcgtcccgaggcgaccgagccgggagttgtagtt

SEQ ID NO: 223751 - DNA, 893 bp, Homo sapiens
  chr10:6621840-6622733
  hyper
ccttcttccctccccgcaggccccctttcgttcaggtgagaaggaaaagggagaagaaaggaggaagcgcccccaggccggcggcccccacccggctaaggtcgccagcatcccgcatcccgtgcgacctgcgtcccagaaacccagcggggaaattcttcccggtgcgctcttgcgcccgcttggttccatttcctactccgcctgctcacccggcagccctcaccccttcccggaggctctccgaggggcccgggtagcccttctcgccacgggtctcggcccctccagcccgctccctcccggcggcggcgcggggcgcggggccctacctggagcgagcacggcgccgctgctgcccggtggcgctgggactgcgcggggactgcgcggggactgcgcggggactggcggggctggcggggctggcggggctggcggggctggcgggcccggcgcactgcgggtgcgcctagaaggcggtgcccgccagggggcgctcgccagcctccccgccagcccggcctcccgggacccggcacctctagccagggacgcgcgctcggtcccccgccgtgcgcccccggtcccgcgcccaggctcccgcccctggcctccttaccagccacttgtcgcccagctgcgaactggagcgggaggcggcggccggagggcccaggacagccccgggagggcggcgaggcggagcaggagcgccccggctccggccacattctcagagtcaggaaaaggggcgagaggccacatgtctccctctcgcccaactgaaaacgaaacggcgctccagcagattgggtggaaagagctgggtctcttttctctgtttttcacgctagaaagggcttgtaaacattgttccttttaaaatgacc

SEQ ID NO: 223752 - DNA, 1920 bp, Homo sapiens
  chr10:7449992-7451912
  hyper
tgtaatcaactgtacatccgcttccacggcacggcctcgtgcaaaatcgcgggtttcggggccttggagcaaattgcgcttgtcagcggcgacgtcaggaggacaaggggaggggttcgcggctgaaactgcagcttcgcagcacagagccattttaggctgctccccacctcgcggggcccatgggaaagccggccccgggagggcgcgcccaaacgcaggctggaggagccacggacgcgtcctggccggcgtgtcgccatcgttcagcctcgctgcccaggtgggaggggtcacctgccgcggggtctccaagccagtgccgcttgctcccggcccccacccactgacagcacggcgtccgagtgaccctgtctagcctcgttctgcgctcctgcaaaccacgttgctgcgctaactacaaacctggccaacatgtctttgtaaccctatcatttaaaaacgcttccaggcacctggccgctgccagatcaggttcgcgggcccggaggaggtcctcccacctgcccccgccagccccggggaccgtgcgcggcctccgtgtggcccccgcccacgaggtccctcgggcaggaaccgccgcgcgacctctgttcagcggccgcgtcctggccacgggcgacccctgtcgggaaccctgttcccggctaagctgcgttcccgcattccggtggctctcacccgagctcgcgtttgctggctttccctctggctcctctgcctgaccccgattttgtctccgaactccactcccagatcctccccgccctggaacgccgacctttcccccgcacttcgccgcccactcacatcccccggcgactgcccggcctccatgcccgccaagacaagaagatgcccctctccgatgcgccgagagggttcctaagccgagcaagggacaatttcttccccaaacgctgtccccatcccccaccttccctagagcgcgaaacccaaaagtaaggaaggcaacccctcgcctcgaccctacgtgcttgtctcccagagccgcgcgctcccgcccttctgccccaccccaccaccaccaccaccactttggtcttctccaagcttcggtcccggtcccccacctcccaccccagagcggcgtggaggaaagcaggagcccactattaagtgcagcgcgccccctgcacacacgaaatccggctggcgtctgcagcccgattgcacccaatacccgggacagttagtccttttaataagcacctcctcgccccacctactcggggatctacccgcgcaggatccagcacacacaaggcgagagctagctcgtctcctagaaagacaaaataaatcactccctctgccctcatgtactttacaccacgtgtccgcagtttgtcacgtcaaatcatggcagggtctggttccaagacgcacacacacattcggggtggttctctttgacacacacacccaaaaaaactgcgcacacgcaggcctgcacactaatccacaggcacacacgacagttgcgtttcggtgccctggtccgggccaggggcacttctccatccctttcccccctagcaatggacttgacacacagactctaaccacggaaaaaaaaaaccggacagcccattccttctttttttccccacttaattcgctaaagcgcttcctggggtagccaaagagagtcgaaactaaggggtggaaacttcagctgggttttttcccacctcaaaacctttattttcagtttttaaaagccaccttagcccgccatattgaaactggcacggtttctaaagactccttccccgcagttgtggcgcttccaagaaaacacgagtacggatcaggctctggatgagtgtccggccaccgagaatcagccacttcccaccctccaggatcccccag

SEQ ID NO: 223753 - DNA, 480 bp, Homo sapiens
  chr10:7452133-7452613
  hyper
actttaaagagaaaataatgaacaaaaagaccatcctcgctggagcacgctccaaaactactactgccaattttatttcagttgctcaggcaaatgtttccaagggagcgattccgaatgtctgcacgatttttacccccatgccggtctccgattccccgtcctcaccatctttttctcccacccaaaccaaaagaaaggggagaccccagcgcggaggagacgcgggagcgcggggtaggtagcagcggcggctgcgtcgctaaaatgagtgcagaaacgaggaaggtgggcggcgggaggggacaggctgcgcccggggaaggaggacactttgcaactccggacggactcccgcacggctcggcttttccgagcccggagacgcaggcgaaggggacccgggaagcaaaaatgacaacctggagcgcacagaggagtttgaagcttcgctcaagtgcagtcgctttcttctcctgc

SEQ ID NO: 223754 - DNA, 480 bp, Homo sapiens
  chr10:7452712-7453192
  hyper
tttttcctaggctggaaaaagcccctgaccagcgcactcaacctgcgggccgaagggctgctctccggccagcctgggcgccggggacagcagccggcgcggcgtcctacctggtgaagttcgtcctgccctcggcgtggacccaggccccggtcgccgcccgggagggcaccggcctcgctcgcttgctcgctcgcccgcccttgcccgctcgctccccgcccgccgcctccctcgcgcgcccgctccggtcctccggctcccactacagctcattccaatatggcatcctctctgtgcgcatgctcggcgctcttttttttttttttttttttttttttttaagattttgtgtgtgtgtgtatgtgtgtgcgtgcgcgtgcagcgaactccttcaacgaccttttccagcgcttgcaaaatttcttaagccaattagcctgcgggacgtgatcggctccttccccagccagctccgcg

SEQ ID NO: 223755 - DNA, 180 bp, Homo sapiens
  chr10:7453241-7453421
  hyper
ccacgcccacgcggcctcctccccaccgcgctccccttcctcctttttgtgagctccctccatacatgatctgcagaaagttcccatcgcgggcgtttccgcacacccctccgcaaggacaactgggcaaactcccgtttccctggctgcggttcgtgagctgggtttccaatggctcag

SEQ ID NO: 223756 - DNA, 105 bp, Homo sapiens
  chr10:8075799-8075904
  hyper
cccagggcaaggctcgccggcttcctttccctcccaactcccctgctctaggccactgcctctggggtggggcgccgagaaggaggccctggggacctacccccg

SEQ ID NO: 223757 - DNA, 360 bp, Homo sapiens
  chr10:8096529-8096889
  hyper
tttgggttgcagtttccttgtgccggggatcctgtcccctactcgccagcgccaggctcctcccccccggcgcggatgacactagaacctccttaagttgcgtcgcgccacagctgtctgcgaacactgagctgcctggcgccgtcttgatactttcagaaagaatgcattccctgtaaaaaaaaaaaaaaaatactgagagagggagagagagagagaagaagagagagagacggagggagagcgagacagagcgagcaacgcaatctgaccgagcaggtcgtacgccgccgcctcctcctcctctctgctcttcgctacccaggttggtactggtgactttttttttttttaagtttg

SEQ ID NO: 223758 - DNA, 480 bp, Homo sapiens
  chr10:8096965-8097445
  hyper
ggggctgagaggacggtcccgggaccggtgtccccgagggagggacttgccctccaagtcgtaacagtcagccctgggacttgccctccaagttgctcagccagccccggctcccgcgagccgggctgcagggacgtccccgagagccctgcgggctccgcggccgtgtccccgcgctcccgtgcgggtctcgggtgcgctgggcgggcgggcggcgcgaggggaggttgtgccactccagcaactcaggggctcatccaggtctcccattctctcccttgcaggtgacccgaggagggactccgcctccgagcggctgaggaccccggtgcagaggagcctggctcgcagaattgcagagtcgtcgcccctttttacaacctggtcccgttttattctgccgtacccagtttttggatttttgtcttccccttcttctctttgctaaacgacccctccaagataatttttaaaaaacct

SEQ ID NO: 223759 - DNA, 104 bp, Homo sapiens
  chr10:8097512-8097616
  hyper
cccgaccctccgacggcaggagccccccgacctcccaggcggaccgccctccctccccgcgcgcgggttccgggcccggcgagagggcgcgagcacagccgagg

SEQ ID NO: 223760 - DNA, 1387 bp, Homo sapiens
  chr10:11059422-11060809
  hyper
ctaaacctcctatatcctttcggtgatcgcccttagttcctgcccgggcaagcacaccacaccgaggagcatcgaagcgaaccctcgggctgctcgcctcccgcggctgggctctgggagcgcggctcgggtatggaagtggagcgggctttggcgcctgggtggccctaaacctactccgagcggccacggcggcctcttgccagggacccccgggcgggggagcagagccaggcggggagcgggtttgccttcgggggcccaggggaccctgagaagtctggccgtgcccgggcggtgagcgcggaggcggcccgccctgtgtccccgcggggcggagccgggttcggggccgcgctctgggccggcgggcccgcaggggttaagcggcggcgggcgccccgcgagctccgcccccgcccgccgcacctggcgctcggcagccggccgccccggcgctggatttcggaggggattggcggagcgcgaggagagaatgtgacaagtgccggctcggcggccgccgggggaggccgcgcgcacctgtccctgcccgtctcgcgccgcccgcggccgctcggacgcgcgcagagccgccccccgccgctgccgccgcgtgcgcccgcgaacatgacttctgccttcaagctggatttcctcccggacatgatggtcgagggccgcctgctcgttcctgacagaatgtgagtggcgccgcgtcccgaggccgggcgagcgggcgtcctcctcccagagtcggcggcgcgaaggggacgggcgtcgcccgcagctcccgggcgcgactcggccgcttcggatccgtcgcctccctcggccttcggaggccggcacgggacgcgggaggagggagcgggtgcggacgagcagcgccggcggtgcagggcgcggggcttcccggagggacgagcggagcgcggcgtcccggggaccgggcggggtccgcgagtccgggtgaggaccagcgggccgagcgcggcgtcccgggtccccgcggggtgagtgggggacgggcggggtccaccgaccggcgcgaggacccgcgagcagggtgagcggggcgcggcgtcccggggtccgggcggggtccatgagtccaagtgggaccggcgagccgggcgcggagtcccggggtccggtggggcgggcggggaccgggcggggtctgggggtccgggtgaggactgagcggagcgcggcgtgacggggaccgggcggggaccggcgagcgggcacggggtccgggcggggtgcgcgcgtgcgagtgtgcacgcttgtgtcatttgaaatgcggggctgacggagctctggtggccggggggaaagagctcttcttaccaaattacccgctcatctgatttaatatttg

SEQ ID NO: 223761 - DNA, 572 bp, Homo sapiens
  chr10:11865425-11865997
  hyper
ggcggcgtggacacctgagtcccggggtaggggtctcccgcgaggtgagtggggccctaggactccgggcagggctggagcgacgggagggcgtcctggcggcggtggcggcgctgggctctggctgggacgccggcgggtcgggcagagagggggcgccggaccctgccttggcgcgctcctcgctctgactaggggagcccggcgccgccgccgcagaggccacccggtgcccgacccccgaccccggggcgtcgctgcctcctcggggacctcggagtcggggcgcggcggggagcgcgctgggttccgagtctggggctatcctgggggctcaggggtggaggcgggtttcccagccttgggcgcagagggtccccgctgtccccaccgtccgtcccccaacccgggacccctgtcctttgcgccgtgggaccccatgcggcctcggggagagggtgcgggtccgacacggcgggcggagccacctgttccacccgggcccccaggtcctggaatcacgcggggatgtgcagggtctgcccagcccagcgcggcgggagggactaaaa

SEQ ID NO: 223762 - DNA, 579 bp, Homo sapiens
  chr10:12390698-12391277
  hyper
cttcgaggggactgcggggcagacgatcacttctttccactgagtctctgggaggagacagggagatgccagaaggggccaagcgtgagccagggcaaccaggccggccaggcccgccggccgctccagcccagcaccagggcgcccgcgcggctgccaaacacccccgggagttttgctcgcaaagggaccacgaggcagctgctggcgcgtcctgcgcgtacccgcccagaggctccccggcttgctcctcgcgggtctgtcccgaaactgacgtgaaaccgatttggtgcaatgcgaatgagctcccgcccgcctccgcctccatcccagccgccgccgccgcccgtcgccataacaaccggcccccaccccccccaccccacgccttgcccctcgggtcccccgggccacaggccacagcgcgggaaggcgccccgccctcggcgccccgcatccggccgccgcgcacccccgcccgcccggcgcttccgagccacgcagaggcgccccctcccgccggagacgggaaagccccggcgcccccagactgggctccgtttccagctcccggagggg

SEQ ID NO: 223763 - DNA, 360 bp, Homo sapiens
  chr10:12391495-12391855
  hyper
tgggggggagcgcggcgggcggcagggagggagcgggagggaggcaagaaagtagcagaaagtgaggctggcaggcggcggcaaaggagccggcgcgcggcggcggcaggaagtctgtgcccgagaacagcagaaataagagccagggagggaccgcggccgcggcggcggcggcgagagcgaaagaggaaactgcagaggaggaagctgcgccgcagcccgagccgcccggcatccccgccgcctctgcgcccgcgccgcgcccccggcgccccctccccagcgcgcccccggccgctcctccgcgccgcgctcgtcggccatggcccgggagaacggcgagagcagctcctcctggaa

SEQ ID NO: 223764 - DNA, 180 bp, Homo sapiens
  chr10:12392222-12392402
  hyper
tgggctgagcatggtggggatggctgtttaccggctgtgtgcgtttactcgccgtgtgcatgggcgcaccgcgttggcgagacgtggtcacgagaagatcagcctccagtcgttcccatttctgtccttacatcatgtatttctatggaattggcatctgcacgtacgaggtgtaggcaa

SEQ ID NO: 223765 - DNA, 241 bp, Homo sapiens; identical to SEQ ID NO: 201985
  chr10:13341387-13341628
  hyper

SEQ ID NO: 223766 - DNA, 900 bp, Homo sapiens
  chr10:13933369-13934269
  hyper
gcgtgggactgaggtgcccaaggaaagtaggtgtgtgtgtgccgaggggagggttgcagaagaaagcacagtatgtgccccacgtgggatttgcatttaaaaactgtaacatacgcgaaataaacgactccaggcccccagtaaagaagcagcggcgcgtcccttttccccggcccagcgtgaaaacacggaaggcgaagggctgccgtcagtcgcctccctgccaccgcgaccgggaaacaaagacacattaccttttattttttgcgcttccaagggatccgaggaacttctggctgcaagcggctggtaccccggaacgggcgtcccattcgcccgggcgaaggcccttggcctactaggcggccttggcgcccgcagctggcgagcccccgccccgtccccgccgccgcccccgccgcgggccctcggcgtcagcccatagcccgctcgcgcctctcgcgccgagcctggcccggcgccagtgagccccgccgccggcccgcccctcgcccgcgcccggcccgccgcatggtgcgcccagcgcgccccgagccagtccccggcgcgctgctaggtcgggtgctaggcggccaccgcgcgccaccgccgccgccaccgcccgccgcccgatcctggacaacaatgcgcgcccccgcccccccagaaagccagggacgcccccagtcgccgccagagctggctcggcttcccagcccctctccgtggcacccgcaggcgagacaaagttcgctcccggtgaggctgcgcgcgtccaaagcgtgcgggatgcccagcacggaggtccccaagcgggggacccctggctcccccacaaaacccacccaaagccaccgctcgaggccctctcctaccctgagagcccggagacagcagctc

SEQ ID NO: 223767 - DNA, 71 bp, Homo sapiens
  chr10:14646262-14646333
  hyper
ggctccctcccagctcgctcccggcgcccgcggcggcgcccagcggcccgactgctcggcggcggcccgag

SEQ ID NO: 223768 - DNA, 100 bp, Homo sapiens
  chr10:14646654-14646754
  hyper
gggaaagtgggaaggcggccgcgtgggtcacagccacaaagctccggggcgctcactctccttttttctcactccctcgttccctcgctctctccctcta

SEQ ID NO: 223769 - DNA, 960 bp, Homo sapiens
  chr10:15761221-15762181
  hyper
acagactctgcataaacagacctcgctgtggtggcggttttaactggcttgggtcttctgggtcctgttctctcctttgtaggatgcgtgcgtcttggtacctggaacacccaggacttgcgtgttctatgcaagtggcatgtctctagctcaaaattcacaaggcacatctagcatggcaggggagagaaggggctggtggcggggagagggacgggaccccgggcaggcggcaggacggggatcccaggctgcggggggactccgcggcagagccgctgggacctgacccgggagcgccttcgtccccgcgcgcacctccccgggtcgggcgacttacgtgcgggcgtcgggtatgtggaagtccacggcgtagccgaagtagctgcccttggggccgctgtacactgtgagcttttccacgtccaggttgaacgcctgacaggcgggggaccacagcaacatccccagcgcggccgcggcgcagcagaggggcgcgatcagcggcgcctggcttccccggggaccgcggctggccccgggcgacatctccctccgccccggtgggtggctgctacccaggagcgcgagccgaggacccctgcggggcaaggggggctggtggaatctggcggtccccagctgcccgtgtcccgggtcggtgcgctcggcgcacccgtggtgacagtgcccggcgtctgctcccacccgcccgcccgcccagccggctcggggggctggcccaggggctctagccctcctccggccgcgggcagggaccagctctctcgcggcgcctcctcgcggctggtctagagccagggactcccgggcggcccagctggtggctggagcgctgggtgcctcttcgggctgcccggatttctattgcagtcccatctcaaggacaatcagtttcgtctctgtcacctcaagctatttattgctttagaagcaatg

SEQ ID NO: 223770 - DNA, 1860 bp, Homo sapiens
  chr10:17270191-17272051
  hyper
gggggcggggactctgcaagaaaaaccttcccggtgcaatcgtgatctgggaggcccacgtatggcgcctctccaaaggctgcagaagtttcttgctaacaaaaagtccgcacattcgagcaaagacaggctttagcgagttattaaaaacttaggggcgctcttgtcccccacagggcccgaccgcacacagcaaggcgatggcccagctgtaagttggtagcactgagaactagcagcgcgcgcggagcccgctgagacttgaatcaatctggtctaacggtttcccctaaaccgctaggagccctcaatcggcgggacagcagggcgcggtgagtcaccgccggtgactaagcgaccccacccctctccctcgggctttcctctgccaccgccgtctcgcaactcccgccgtccgaagctggactgagcccgttaggtccctcgacagaacctcccctccccccaacatctctccgccaaggcaagtcgatggacagaggcgcgggccggagcagcccccctttccaagcgggcggcgcgcgaggctgcggcgaggcctgagccctgcgttcctgcgctgtgcgcgcccccaccccgcgttccaatctcaggcgctctttgtttctttctccgcgacttcagatctgagggattccttactctttcctcttcccgctcctttgcccgcgggtctccccgcctgaccgcagccccgagaccgccgcgcacctcctcccacgcccctttggcgtggtgccaccggacccctctggttcagtcccaggcggacccccccctcaccgcgcgaccccgcctttttcagcaccccagggtgagcccagctcagactatcatccggaaagcccccaaaagtcccagcccagcgctgaagtaacgggaccatgcccagtcccaggccccggagcaggaaggctcgagggcgcccccaccccacccgcccaccctccccgcttctcgctaggtccctattggctggcgcgctccgcggctgggatggcagtgggaggggaccctctttcctaacggggttataaaaacagcgccctcggcggggtccagtcctctgccactctcgctccgaggtccccgcgccagagacgcagccgcgctcccaccacccacacccaccgcgccctcgttcgcctcttctccgggagccagtccgcgccaccgccgccgcccaggccatcgccaccctccgcagccatgtccaccaggtccgtgtcctcgtcctcctaccgcaggatgttcggcggcccgggcaccgcgagccggccgagctccagccggagctacgtgactacgtccacccgcacctacagcctgggcagcgcgctgcgccccagcaccagccgcagcctctacgcctcgtccccgggcggcgtgtatgccacgcgctcctctgccgtgcgcctgcggagcagcgtgcccggggtgcggctcctgcaggactcggtggacttctcgctggccgacgccatcaacaccgagttcaagaacacccgcaccaacgagaaggtggagctgcaggagctgaatgaccgcttcgccaactacatcgacaaggtgcgcttcctggagcagcagaataagatcctgctggccgagctcgagcagctcaagggccaaggcaagtcgcgcctgggggacctctacgaggaggagatgcgggagctgcgccggcaggtggaccagctaaccaacgacaaagcccgcgtcgaggtggagcgcgacaacctggccgaggacatcatgcgcctccgggagaagtaaggctgcgcccatgcaagtagctgggcctcgggagggggctggagggagaggggaacgcccccc

SEQ ID NO: 223771 - DNA, 1500 bp, Homo sapiens
  chr10:17495333-17496833
  hyper
ccccttgattcaaagaccattcacatccaggcttagagggttgagggagtgtgaagggtgcccccccccaaccccgcgccctcttcaaacacacgcacactcttacactcactcgcgccgtcccagcctgcctactcccaacgagtccaagccggtgcagccgcgccccatgcccggctcgcagctcccgagccccagtccgcccgcgctgggcgccgctgtacctgttagtggcgcgcggtaccgcggtcgccgggctccggagcgtcctcagcgctgcgggggtgccgtgggtggcctccctgctttcctccaccagaatcctgcacagccggggagaaaacttaagttgctacaccccgccgggagctgttggctgaaaggctgggagtcgcgctccttgcctggcagggagatctcgcactccccggctcccaggccaggtccccagccccagagttggaagagccttagggcgggaaggaagagacagcaaggaccagaatggggagcatgagatcctgatgcggaacccgacggcaggtcccgctccacagctgcctcgcccacagcgatgcgcgctagagcccccgcagccctgaccggtccctctgctccccagccgccgtccaccggtcggagggtcgcctccctgcgaccccctcccccactccactctcaggccgtcgccgcccgtgggctgctccccgccgcggccaaaagtctccgcgcccgaggggaagcgatgggcggcttgggggtccgggggcgccaggcggggcgcgcggcgcggggcgcggccggcgggtgggtgggttacctggcgcggccgggcgcgtctgccgggcaccagagcaggcgcagcagcagcagcagcagcaggctggcgagcagggcgagcagtgcgccccccggccgcatcctgagccacaggcgccgccgccaccgctgctgccggggcgaagcacagcccgggcggccccgactcgcggctcccgccgccgccgccaccgccgccgtggccgcagccccgcgcacccacagcgttcacaggcggcagcgaggggcgcccgcagcccacccggcagagtctccgcggcgggcggagaagaagccgcgttcgggctcgccccgggctcccggccccggcccgcggagcgccgcgatcggctggcagatgacgattcgccgagctcgccgcctgtcctcccggaggcgctcggagctgctgcgggctccggtcgccgctgccactgctgctgccgccgccgccgcgcggggtcacctgaaggttggggcgcggaagctcaactccgtgctgattgggctccaagttttctgcgccctcgcctcgtcccgagtgcccgcgaatcccccggacgcccacgcagaccacccagccacaccacaactctgcctgcggagagaggagaggagaaaaaggggccgcttcaaaaactttcaaaactgtgcagtcgcttggctggatcctcccacgca

SEQ ID NO: 223772 - DNA, 420 bp, Homo sapiens
  chr10:18429439-18429859
  hyper
ctcccgagcggctcgcttcgcccgatgccccggccccgtcccgcgcactgagcgcctggcagcagggcgccgagtcccggggcgctgcggggcgctgcgccgagaacggccgggcctgagccctgggcggcccccagagccgatcagagcgcggggaggcgggggcgaggaggaggggacccgccgccgggggctggctgcttcgctccgagccgacttttcgccaatggtccaaagggacatgtccaagtcgcctcccacagcggcggcggcggtggcgcaggagatccagatggaactgctagagaacgtggctcccgcgggggcgctcggagccgccgcacaggtagcgagagcgcggcgccttctccttcctttgtgagccgccgggcagggcaccgacctcgggttctcccggcg

SEQ ID NO: 223773 - DNA, 49 bp, Homo sapiens
  chr10:21785701-21785750
  hyper
cctctccgccgtgcgccaccctgagggctcccgcgattgcatcttcttg

SEQ ID NO: 223774 - DNA, 43 bp, Homo sapiens; identical to SEQ ID NO: 202008
  chr10:21785786-21785829
  hyper

SEQ ID NO: 223775 - DNA, 153 bp, Homo sapiens
  chr10:21805907-21806060
  hyper
ggcagtccttggcgccgccgcgcttgcgcttgcagcggtagctcaggctccccgggcctccggcgcccgccgctgccttgggctggggcccggccgccgatacctggtaataggcggcggcggcggcggcggcggcggcggcagcagcggcgg

SEQ ID NO: 223776 - DNA, 271 bp, Homo sapiens
  chr10:21814235-21814506
  hyper
aaaggagagggattcgtattgaaatgcatttgctttggggtacgctggttatccgcaagtctggctttgtgggtctgcgtggctgaataagtgaccaagtgccttcggcattatataaacggatcgatgtgtgcgggagtccccaaagccgtcgagcacgtgaaacgcgactttttactgccctccaagcggcgaccaagccccgctccaccccaccccgcctcaaaatccgtatattacctgccctgttacagtgacacatgtttatgtt

SEQ ID NO: 223777 - DNA, 886 bp, Homo sapiens
  chr10:21815634-21816520
  hyper
ccagtcccaggaggcgtaagataaaacctctgatttgctgcgtgctgccgggcacattctctgccctctcgtccgaaggacgagtttaaaatggagagtttaaaataatagcatttacaggaggaaataaagagcgaggagatggttctttggccggttttaagacatacatgctttttttttcttttaatacaagatgtcttaagggttaaaagcgttctagggtttgctgtatttccttctagatttggggtttcctgaggaaatcttttccggagggaaatagcaaatcaacattaagatggaagcgagacttctcagccacttttggaaatgaagggggaaattgtaaaaatacattcagaaaagggcgcgaaggcggcggctgaggggaagaagctggagtcttgggaggaagcgcagtgggttggaatcgggggaaggagggcccgctaggtccgggcggggaagaaggcgtgcgggcggcggggcgtgcgccgggccgggcagctggaggaaggcgcggcgggactggcgagcgcgaagaggcaggcggggaaggcctcggggggcgggggccgggcgcggggccggcgcgccggaggaagcgggacctggctcctcgcgcccgccgggccgcccccattgttctgccctagcaccgctgttagccgagcacgtcctgaccgagggaggggccccgcgggccaacccgacccccgtcggcgcctccccgggctcctgagctccggccgggtcgggtcgggccggcgcggcaagttttgatggtcagactcagccagcgaggggttcccagctgaagacctcggaggaaggagcctttacagcgtgctgcgaaattgaaggaagccgggcgagcctgcaa

SEQ ID NO: 223778 - DNA, 142 bp, Homo sapiens
  chr10:21824264-21824406
  hyper
agggatgcggggcccgttgcaccccgagccagaaggctcgggccctgccgccgccgcccggtagctgtctgcggaggagatggcggagtccgttgctgaccatgcgggagtggcggggctgctgcagcgcctgtggggtggc

SEQ ID NO: 223779 - DNA, 104 bp, Homo sapiens
  chr10:22032852-22032956
  hyper
gagcccgttgataaagcagtactcacacttggtagagagagattcttcttctttatacagttagctttaactagaggcatatccatgaaagagaagcccaatct

SEQ ID NO: 223780 - DNA, 1488 bp, Homo sapiens
  chr10:22540630-22542118
  hyper
acctgtttaaaatcacgccacagcaacgaatcactgcaaaagcaaggttctaacttaaaacaaaaagagaaagtattcgcttctgcggagaacccgagcctcctcctgggcgggcgacgctcggctgatgggaccgggccgcgcaagcctcggatgcagccgggtggggggcaccaggcgctaggcgaaggagcgcaggaccaaaggagatgcttggctcctaagataacacctttaaaaagaagaagaagaaagaaagaaaaacaaacaaacaaactcgatacttagcctcacgatccttgccaccccctccctgctccgccacccacacacaaaataaagtgagccgggcgggggagtgcgcgccctgaaagggaacaagaagcaaggcgcctgtgacacaaaatggagaaagaggaaccgggagtggaaaggaagaaggaaaaccgagtaaaggaggttattcataagaacaggaaaggggccgaggggtagagaacacccgaaggaaagcgcaggaggccctcgtgagagggcaagggggaaaagatcgacgaagtaagagcgaaaagaggaaaggaaagaaagactttctagatgcggagtctccattttcagcagcgccatattcgcttttcctctcgccgcttttggctgggttttgtgtgcggcggtggacaggcgccagcacatttctgcagcttcagcagctctgctcagacacctggggagggccgcagggcccgggcgggggacgcgcgctcttggcccaggcccgggcgcggccccctccccggcctggcggttcctgcgcagcgccagccccgcgctcctctaggctgcaaagggggcctccgactcgggcccggcccggaggggacacctcactcggggccccgcggcagcccccaggggacgcgggccctctagtttcgcccacggtgtggctgggcatgcgtgccaaggggatgcgtaaccgagaaccgaaaaagacgaacttaaccttcggggaggaggagagggcgcacgctgcgggtaccggggcttgggggcgctcctggaggtgacggggtcacctccacctgcgcggggccactctctgggagccggcgatcgatgcccgccgcggcgcctggcccaggcccccaggcctctcgcggctcccggaaaaacgtccgaggtcggggctcggccgggagccccaagcgggtcccctggcctcgggacgccagtccgggaggcggccggaactccggttttcgcggttctcagcgatattaggcgcggccagtgtctgaaagctcctcggggttacgtcctggggcgactggaggcggctcacgactcagaaagtcggggcttctcgccccggatccccaccgctggcgtctgtcgaatccccacctcggtcctcgggtagaggcgcaagcgcgccccaagaccattctcttcgcgcccacccccgttattcttcactttcacttgaca

SEQ ID NO: 223781 - DNA, 325 bp, Homo sapiens
  chr10:22614720-22615045
  hyper
gcgccgccggatccgcccctcgcatcccggcccccgggcgtccgccgcgctcaggccccggcccaggccgactggaggtgctcctcctgcggccccagcacccggctccggaaatgccagggatgcagggagggcagaattgttttccctgcgcgtcgcgtaaaaacgtgccaggttctgcttgctggaaccgtctaaaacaaccggaaccccggattttcacttgcagattcttgaggaagttttataataaattcggagacctggaacaagccctagtggttggtaaatatccgcggggattgtgtggcgtctgcagcagcct

SEQ ID NO: 223782 - DNA, 537 bp, Homo sapiens
  chr10:22634092-22634629
  hyper
ccaggctcccttggcgcgtggggctctcccggcgcttggtcccgacccgcgccgcagtcaggataccacggcaatctggggtcgctttgtaaggagctccgacctccgggcagtgcagggatactcgacggcgcgcgatgtcccggcggctccgcgagcctggcgcgctgagagccccagcagtccgagtcctcgagctcgggcgtcttcgcgccgccgccccgctcagtgcgcccaggcaccgcggccgtgacgtcacgcccgggactggccgttgcagcaagacggccgcgttccggttccggtaggttgcccgggagacgcgggtacacagagaagcggctcccgtcggaggccgagtcgtcgccacgatcgcccccttggtggactcgcaggccgagcggcttccccgcagagctcgaggagggcagacggcggcgggggcgccatgagtcagaggcaggtgctgcaaggtagggccgaggcgggcaggtgccctaactagctggcgccgaggagacccgggtgcggtgggct

SEQ ID NO: 223783 - DNA, 300 bp, Homo sapiens
  chr10:23002025-23002325
  hyper
aaattcacagctcgtttaaactttcctggctgagccaacagctccgatcatgtttcctgatcctatcgaagtggattaaaactgcaggagtttctcgctgtcagatcagcaggaggctatttcagaccctcgaaccgcagtccgcatagcccgcagcggcgcatcctccaatccccgactgtgcgtgacgctaacctttccacgcgttctccagcctttcccacaccccccacagcgggtgcggccaactcgggaccccctccgcccgcgcccgccgggacccccgcctgctgtccccgc

SEQ ID NO: 223784 - DNA, 128 bp, Homo sapiens
  chr10:23002401-23002529
  hyper
ccccgccaagggctctccagcccgcacagcggcagggcgatgcgggagaagcgcagggatgccgcccgacgccagagccatatttacatcggctgctgctttgccaaaaagccgacttgtgcccagta

SEQ ID NO: 223785 - DNA, 153 bp, Homo sapiens
  chr10:23461904-23462057
  hyper
agacagtaaaaaatgtgtctcgtccaaacgcaccccctctccaagcccattgtgaagtcagtcgccaacaaaggggacgtgtgaatattcaacaccgactctttcacttgttttttccggaatccctgagtcgactcaccccctctccttttt

SEQ ID NO: 223786 - DNA, 480 bp, Homo sapiens
  chr10:23462116-23462596
  hyper
cgagcgaccatataatttgatttgccaggcaatctgcagagcgatcgcacgtcatttataatgttcattgagcattttgcctaattgtgtctgtctctgaaagggcagcgcaccccctcccgaccgctagcagcacaagtggcgacattcccatggagcggccgcgccgcagcttgccgcattcagcgcggacggcctggccgcgcgcttccccgcccggacgaccgggcgcgcctgacactaatagctcgcggctcaggtacgagcgggcgccgcatttgactcaattcaattcacaaccggccgcgcttgcaggtgtcgccttttgaaaccgccattcaggcggccgctgttcacttctcgctgcgccgcgggttctgtagaagcgcaagaatggggctgattattccggtgcccacatgccgcccccacacgcccccacccccgtccggcgcaagacttcccttggccaaaagaggc

SEQ ID NO: 223787 - DNA, 840 bp, Homo sapiens
  chr10:23983442-23984282
  hyper
cccctcggcgcccgtttgcagggagcgagctctggctcctcacaggatccagacgcggttcccatccgtccccagccctgcagggcacacgcgcgcgtgcacacgcacgcgcttacactccagctcacactcgcgcgtcctcactccctgcaccccaccctccgcgccgctcctccgcggggtggggggtggtgggggtgacgtcaggactgcagtccagaagagagcggctggagagggctgcgcgcttctcgccaagcaagcgggaggcgcactggggccgccgccgttcccgcgctcctccctctcctctgcacccactgtcacgctacccgcccgcgggggagcctcgagagcctccaggtgaattgaaagtcgtttccgggggaggacggagagggtgctgcagtcctggcatgccctgaaactgcaagtcgggcagaaacgacccggcggaggagcagggcgcgcagcgccctgcgcagcatccccgggctgccagaagaggccaccactcggctggcagccgcgagcggcggccgaacctcggccccagactcgggcccccggcacgctcgcccgggagataccccttccccctcttgcgcatttcgcagctgcgctggtgtggggcatgagagcgaggtggctccaggtctccgcggagcagctgccagtgggagagcgaggagaggcgagggggcggcagcctcggcccgaagtaagtgcagcagaagtttgcgtcggttgccccgccgctcccccagcgcgagtgggaggcacatctcccctccttggataaggaaaccgaggggagacttacaagggagccttgcgcgg

SEQ ID NO: 223788 - DNA, 456 bp, Homo sapiens
  chr10:23984536-23984992
  hyper
ctaggatgttgcctcgtttttcactcggggctgcgaagagggcattgctctttctgatggctggaagacaggggcaaggagagagagaaccggccccgagacgggctggagggtggggacactggggagtttggagctgggggttcggagtgggaggtttgggtcttctgagacgctccagactctccggaggcggcagaggtcgaggcaggaggcgaatgtgacgcttagggtcgctacggttgatgttgggcgcctttggaagctggtcattaattcttgtcatcgggaggtttcgcggagggcgacagcgcccgggagcagggtgacccccacagcggccggccttccggctggctgccctccccgctcgccgctctccccgcgccgctgcgggtcctccgagaccccggactgtcctgagctgcttcgagggcgggcgagaccctgtctgtt

SEQ ID NO: 223789 - DNA, 180 bp, Homo sapiens
  chr10:25011198-25011378
  hyper
tagagagatcctaggaaaacgagaagttaaaggtcatgaactttctccaggcgcctatcactgtcttgcccacatgtccacaccaagttcgcgtttcctcccgagcaaaacaaacaaaaaaaaattttaacgtaaacaaacaaaaagcctataaattcgagggggtgtttaaaaaagaga

SEQ ID NO: 223790 - DNA, 164 bp, Homo sapiens; identical to SEQ ID NO: 202016
  chr10:25012546-25012710
  hyper

SEQ ID NO: 223791 - DNA, 895 bp, Homo sapiens
  chr10:25463329-25464224
  hyper
atttaactaagcatgcaagacgccaacaccctccccctcagtacgtccaagtttccttcgctctgagccaccgaatctctgcttctcccccctctgccgcccaccctacgccacccacgcaggtttccgagtcatccggaacgcgagtgggtgcgaggactcggcaggctgcctcccgcgcccccgccgcccgcgggccgcctcgggttcagcactggacagctccctccccggccccacaaatggcagtcggctgattgacagaggagccgaccaaacagggaacaagacgacttgcagccgccctacaagggtttggttgcggccaagctgcctctttaaactggctttcctcccccgaggagggagcagggagagagggtggagtgtggtttgcggccaaacctaaaggctgcaattaaccagccgcccggccttcgctactccggacagacgaacgtcttaaaggacgtcttcgctcctcgggagtcgcggctgcgctcgcggtgcgggtctgggcgcgcgccccgcgcctccgggcgaagcggtcgaggaggagccagtgccgggaggcgggaacgacctgcggcgggtgagactatggagcagcgtcttcggcggccgcggcggcagcagcagcagcagcttctgaacgcgcctcaatgagagcggcggtggcggcagccgggccgagagacggactcgggctgactccagccgctgggagcgcgaggccatgtaacccgctcggctccaggctgcgaggtgcgtaatccccagccggcccctcgcgcagcgggcacggccagcgctgccacaggtgacttgatttctgcgacggtagcttagccacccggggccaatctcgaaacattcttattttcaagtcctttgg

SEQ ID NO: 223792 - DNA, 360 bp, Homo sapiens
  chr10:26504940-26505300
  hyper
gcccatcagcgggtaggagcccttcccccgccgtcccctccccaggctcgtgaacggcgcctgatgcccgcccggggcgcgagctctcgaggtcgcagtgacctcagcacctgcttggaggaaaacggcgcgggaaccccgcttccttcccctcagctggagccagacctcaaacaaaaccccaatcgatgcacacagaaaactcctctgggccacgcttcccgcctcgccgaggtctccccagtctgcccctcgctgacgctggcgcgcagcggctgtggcagcacccgggacagcggccgcccgcacttcccgcctctggctcgcccgaggacgcgctggcacgcctcccaccccctc

SEQ ID NO: 223793 - DNA, 540 bp, Homo sapiens
  chr10:26505410-26505950
  hyper
ccctttccctcaaatgctctggggctctccgcgctttcctgagtccgggctccgaggacccttaggtagtcccggtctcttttaaagctccccggcttccaaagggttgccacgtccctaaaccctgtctccagctcgcatacacacacgcacagacacgcacgttttctgttcctgcgtgacacccgccctcgccgctcggccccgccggtccccgcgcggtgccctcctcccgccacacgggcacgcacgcgcgcgcagggccaagcccgaggcagctcgcccgcagctcgcactcgcaggcgacctgctccagtctccaaagccgatggcatctccgggctctggcttttggtctttcgggtcggaagatggctctggggattccgagaatcccggcacaggtaggaaggagaacgggggcctgcggcgggcgagttttgcggtggtctggggtttgcggaactacggagaagacgaaggaggtttttccacctgcaacaggaaacttcttcgggcgcttctccctgcttttgggct

SEQ ID NO: 223794 - DNA, 300 bp, Homo sapiens
  chr10:26727531-26727831
  hyper
ctcggagtcctttacgcatatgtttgtctgtcccactgtctctaaccaggggccttccttgcacctcggagcaaagcagctcggatagcgccacacgtctgcgcgctgcgtgggaagggcagggctgacagcacttcctccccggggcagcgacctggagcccgggtgcggcagtctgcaccgcgcgtcgctttcccggccggagtctcgccgccttcccgcgccccgcagcgccccgcagagcagtcgaggtaagtggcgctcccagtcccgggagccctgggagcgccagcacgggcc

SEQ ID NO: 223795 - DNA, 180 bp, Homo sapiens
  chr10:26727894-26728074
  hyper
gatctggcctcgtgaacgcgtgcccccaggcgtggccctcgagcgcagcgggtccccagggtcccctccgctgatctccactctggacccggctcgcgagggtgggggtgtgagggtttggggttcgggtttgctttttcccgagctattgcaacagatttgacagatttcctgcccagg

SEQ ID NO: 223796 - DNA, 163 bp, Homo sapiens
  chr10:28033466-28033629
  hyper
cgcagagttacagccccaaggcgcgcggcggacttcgcccgccccatctcctcgcctcgcgcctcgggacagctcccgtttcctccgagcggcctcagcttcgctgccagcgccccctttgcccgtccagccgcggcatgggctgctactccactaacacacg

SEQ ID NO: 223797 - DNA, 180 bp, Homo sapiens
  chr10:28033750-28033930
  hyper
gacatttaggaccacgcgtgaccaccgcgatcaaacgacggctacggtctgtgttcgtagggaagtgaagtcagacctctgctggatgtcgtgtgtcccctaggactgcgtcctcccgcgcagacaggtacgtgcctggggtgtgcacatagcctcggtgataagtgtcaaagagaattt

SEQ ID NO: 223798 - DNA, 1320 bp, Homo sapiens
  chr10:28033955-28035275
  hyper
gtcaagactcgcgttggtgttttcttttaaaatcatgcccttagggatgtgtgttcatgctgctttatttgtacaagacacccttccccggcccggccttctccgagccaccccagcgcgtcctcctagatgcgacgacgtgtttttcctagcgaagtcatcacgaggttagccacctcggacacttccccggcagccccaagcccacgcagagatcgcagacacagacacccggcgcgctgtaggtctgcaggcagcaggctcagaggcaagcgatggcaaaggtccgagcgctgtcctgtcgcaaggggtccgggggcgtgtgaaccacacttgctgaccctcccaggactcccgcgcgcggccacccgcgcctcttctcaaatcacttaccccgattcactccagactgtggccggggaggtcactccctgcagaagtgtccccctcccccaacgccggcgaataattttaaagcaaaggaggcgcggccaggtgggctcccaagctccgcgcagacccttgggccagccttggccgctacccgagcgcctctccaccagaccttggagggaagttgggggaagggcgggagagcaccggcgcccagggcgcaggggccagagcgagcctggcgttccgccgcagccggctgagactcggcgacgcgggggctgtacctgtggctgcggggccgacggccggctgcagggcggctggctctcccgcctcgagactaggcgcactcccatccccgccgcatgttctccacgcgggctccagcgcgctcaccaccgccaccgccgtcgtctcggctttatttacccagcccggcgcgcgccgcccgggaacaggaatagcgaggccttctcatgtttcctgactgccggtcccagccggcgaacatcctgcgggcgcggtatccacgttcccgggcgggtggagaggaagcgtccgcgcccgcccggccgcgggggctgctgttaacccctagcagaggagccgctgccggggagccccgggcccgccgagtcctccggagccgggcgcggctcccagatccgccggccttgcagtcgtggagcagacggggcttttcccttcgcactttaggagagaaattggagaagctgccgggagcgctcggctccggctccagaagctgagaggctgcggtgcaaatcccgtgtcttagctggcccgattgccggaaatttcactgcgcgtggctaggcgggagaggccactgtgacgcgccctgtattttcctctcgattagctggagggaagttagagctccgttttgcacctacagccctg

SEQ ID NO: 223799 - DNA, 392 bp, Homo sapiens
  chr10:28035353-28035745
  hyper
gtcaaagccaggcacacattcacctccggggcaagggctggtgaggctgccctcgccgctgggtatagggatgggggaaagcaaggatgggatgagttcagcccaggtggccaacccgcggtggcccaagtgcagaagaggaagcgcgcccaaagccaaggatctgcacgcagcaaaggagatggaacttagaagaatcacaagctgggacacagggcaaagagagagaatggctaccagattctctgattgatgatactttgcttcctaacattaccgcaaatataagtagcgaaagcggcggtttaggtgcaactgcaagctcagagcttctggcagcccagaagatccccaaggtgccaacacgaagctgcctgcgctctcgccgaagg

SEQ ID NO: 223800 - DNA, 152 bp, Homo sapiens
  chr10:28966149-28966301
  hyper
cccggggctgggctcccccggcgcctcgcgaaggtcactgacgcgcaggcctccgcaagggggagcgcgggagacggcagcgcaccagccgggcgccccagccgggcgccccagacgccggcgccgctcggagccgccgggcaggtccccca

SEQ ID NO: 223801 - DNA, 188 bp, Homo sapiens
  chr10:28966598-28966786
  hyper
aagggagccagtggccgccgacgggggaccgggaaacttttctgggctcctgggcgcgccctgtagccgcgctccatgctccggcagcggcccgaaacccagccccgccgctgacggcgcccgccgctccgggcagggcccatgccctgcgcgctccgggggtcgtaggctgccgccgagccggggct

SEQ ID NO: 223802 - DNA, 61 bp, Homo sapiens
  chr10:29738072-29738133
  hyper
gaggcggcgctggagttggagccttggcttctgctgtgagcaacagcgccacctgctggcc

SEQ ID NO: 223803 - DNA, 600 bp, Homo sapiens
  chr10:30024183-30024783
  hyper
ctggggcgcgggagccaccgcagctccggccacttgcggctggtgtcgggaaaggaaccgggcgatgtcgtagttctgatcactggcgcgccactccccgggccacccgcctccccgccatgctctcagcgtaacgggcagccgcgctaacttcccgaaactccgcggagagaaaccctgccccggcccgctcctccccgaggcgcgctccggggacggaagtgggtgggagccgcggccgcgccgcgcctttgttacggctcggggaccccgcgggccgagcgcagcgccccgtcgcagcggcccgggcacccgccggcctccacccccgggaggcgcccccgttcccgcttcggtccccggcagggcctcccgcagccagagcgagactgacccgcgcctcccgccccggagcagagcgcagcggcgcgtcctggcgtctgccggccccggctccgcgcgcccctcggccaccgcgcggagggactttgctcacctacccggctcttccacacctcccggtggcaggatcgccgcttcccgccgacagcggctcggcggccccgacttctcagcagcgccgcggccacgccccgcctc

SEQ ID NO: 223804 - DNA, 180 bp, Homo sapiens
  chr10:30024947-30025127
  hyper
cggagagggtggggacacagaggggggccaagcacaagcacccctgcctctctcaacgcgggcaccccttcccaaaacaggggccagtgcgcggggaccacgctgggacgactctcgggggaagcaccagagctgtccccacgccccaggacacgaactcgcgcccggagccgaccccct

SEQ ID NO: 223805 - DNA, 2173 bp, Homo sapiens
  chr10:31607941-31610114
  hyper
tcagcagtgcccacggttgccgcaaaccgcccggtccctagcaacaaggttccggccgtagagcgagagcctctaggtgtaaggaaggtgatgtcgtaaagccgggagtgtcgtaaaccaggtgcggtggggaggggggaggggtggaggcggaggggtgggggggaagggggagggagggggaggaggtgactcgagcatttagacacaagcgagaggatcatggcggatggccccaggtgtaagcgcagaaagcaggcgaacccgcggcgcaataacggtgagtggcggaggggaccggggagcggcggagtcagggggagctgggcagccggggcgcccccgggggtgaggggggcgagccgggctgggggcagccggggcagggacggcaaagtggagtgggaaagtagaaagtagtgctctctgcccccctccgctgccgccgctgccggagccgcgccgcggccgctcgctctccctgaaccgttatgtctcttacctggtctctctccgcctagcggctcccgccgcccctgccgcctccctggaccgttagccggcgccgacgccgccgcatccccggcgcagggcgggcggccgggacgcactggccacttttctggtcccgggtggagcggctgttgcttctttccgcacttttccccactcttgtgcccttcggcgcctccctctccccctcctcctggccccctcagcgcgattctccctcagcgcccaggcccccgggagccgcggaacaaacttgtgcccggcgctgaccgtgcaaagtggcttccgcgcgccgcggccccggccggcgccgtcgctgtcgctcgggccccgcgactcgggccgggctgtgggcgcgcggcaggcgggctgcggcggcggcgggacggggcggccgcgggttgcgtggggtttgtgcgcgcgtgtgcgcgggcgccggctgtgcgcgccgcgggcggacagggttcggccggcggcggtaaagttgggacccgcgggccgggcgcgctcgcgtaacggggattagaggcgcgggggcgcgggtccctaagcgcccctcctccctggcgcctcccgctgcccggcccagagccccggcctggggactccgcggcgagccccgcgagtggggtccacgtttggcggggcgcggcggggcggcgcggggaacaaggcaggaaaggtacccacttaacgccgccgggagccgcgcggatgggggcgagctgggcggcgggtgtgtttgcggagttgttacctgggcttagagaccgggaagcaccacagacagatccccctcccggggcagacgaggtctctgcgccgggatgggccggtgtgcgtgcgcctcgcgcttttctctttcggtttttggggaagttgttacctgggccggacgcacggagcgctgaagccggataatggggcttggatggcgctctgggtctcgggtggaaggagggtgggggagggggcggacggaccgacggacgcgcggggctgctacttgcaccgcagctgcagtgtttattgatttgtgctgctgtgccaagggaaacacacacccctctgcctggcgtgagagttaaaaaaaaagagagacagcccgagggatcgagacctgaacatgtggtggtggttgcacagtcgccttttccagtttggagagacgttgtaagttgattgtatttctggttatctcggggcgatgctatgctttctctccctctcgtgcagcagcgaaatgtctgctgattgttattgtctggacagttcctgtggcgagaggggcgagacttgtccgcccgggggcggcgggagcgcagggagagcagcccccgcctgcgccgccccggtacctgtttgtataataatgggcggcaacggccctgccgccggccgcagcccaggctatataaggaattacacgtacatttcggaccgaggggctcgctttggttcctgcgttatttttaaaacgacttttaagagaggggcaataaatgcgtctataatgggaccgctgcagcgtcgagaaaacgaggaaatacgtgtttaggagaaaactctctcgtgctcccccagccccaccccccgcgcctgggctccctttctccctcccctctgggatgcgaaacgcgaggttttgtaacctttcctg

SEQ ID NO: 223806 - DNA, 240 bp, Homo sapiens
  chr10:35103652-35103892
  hyper
cggggcggggggcgcccgcgaggcccgaccggccgcactttccctttccccgcctccctgcgcctctcctcccccttccaggaagcgccatattgatcccggcgccgtccccgccgccgccccctccccgcccgcgcccccggcccctcaccttggcgatggccttccggtagcgggtcaccgcctgctggatgaggctgaaaactttcatgtggccgtccccgcacggcacgaccaccc

SEQ ID NO: 223807 - DNA, 180 bp, Homo sapiens
  chr10:35105068-35105248
  hyper
aacgcgaatccgtgaacagtctattccgacggcgcagagaaatctcacgcggggatccccacgatgtgccggcgcttaacgcagacgcccgaacccaggggaaggctgcgactccgcgatgagtgacatgcgggcttgagacgttctaaaggaacgtggaccgagttagggaacgtaact

SEQ ID NO: 223808 - DNA, 240 bp, Homo sapiens
  chr10:35929653-35929893
  hyper
cggcactggcacccgggctcgcagggagccgcgccgccgccagggggccgcgccttcccgccaccgccgccgccgcgagctgggggcgccgccgcgtccccgccgccaccgcccctgccgccgccgcggtgcgggggcctggcccccggcgggcggccgtggccgctgcccgaaggcggctgctcgccgggcggcggcggcggcaggcggcgcggcgggctgggcgcggcggtggttagg

SEQ ID NO: 223809 - DNA, 1140 bp, Homo sapiens
  chr10:43249718-43250858
  hyper
ttacaacccggggcgctatccctttggaacctgacccccaactccgctcagtaaccggatttccggaagccgcgacctcgaagcccccagcgtttctccaccgacggcggggccggggctcctggaagcctcggagccgcagctccagcctgcagcgcacgccttggcccccagggagcagagaggcagagtacccccctgcatccggagcatagcaagcatgccccaggctgaggacctgcgacttggtgggacttcggtgcccgcccctccgccactacagggagcagaggcggctctggaagtcggtttagtgcggagaccgcgaccggaggagcgcagaacgctcctcccagcgtcctgggctccgcaggcacaatttttaaaccagaggcgaaatccgagtcccgccgccctccggggagggagcgtggccgcctagccgagccccttctctggctccgcccgcttttgcgccgcgaggccgcctggtgagttccagggccctgtggtcccccagccgccggcgctctcgggtgtcttttggccgcggcaggaacggagctgggcgctcagacggcgccggggtcgtttctgtgcccccgcccggtggccggagccgcagccttgccccttccccactggggcagcgcctgcctttctcgcggccggaccgcgccggagtcccaggccccaggcagcccgggccgcagctgtcatggagaagcccggcgcgtacttggggtgcccggcaggagccccggccgcctcgcgcccttcttctcacccacgactgtggccggcggcggcctctgcttcccggacaaagctggagatgctgctgcggagtcggccctgggacctgcttcttctcttggctccggggcccgcagccgtcggggcccggaagggctccccggggcgttccctcaggagcggtggccagggctgatggggcgtgtacgacgcgggaccccgagcccggcagcagccaagtatggcaaggaccagcgcgagcatctccccactgcggccggggacggcgtggggtgggagccgacccgggacatccaggtgggatcggccaccgctcaggcgctgtcccaggcgaacgccgccaggggcaggctcagcaccgcc

SEQ ID NO: 223810 - DNA, 496 bp, Homo sapiens
  chr10:43361590-43362086
  hyper
gtgtatgcccgccccgaggctccaccgcgcctgtgtgccgggaagcctggctccacaggaccctcaggcactgggcgcgccgtcgctgcagctgccaggagctcctgaggaagtggctcgaggccccggggcgggtcaggcgtagggtgggcccgctgccctcacacccgccccggccgcacacaggaggcgcgatcagcagagtcgttggacaggtttggacaccggctgtctctttcgggcctcggttttcgcgtctgaaataaaagcgcgcatcctggccctggcgcggtgcctctgccgcggtagaggtttccaccatgagcccagtgcgccttccaggctcgagggagagggagtgtgcgtgcgtgtgaacgcgtcacactcttgtgtgaacgcgtcatacgcttgtgaaagacggtgcttgtgcacacgcgtgtgcgtgcgtgtgaacgcgtcagggtacccgaggatgcacacacgcacgtgtgagtgt

SEQ ID NO: 223811 - DNA, 180 bp, Homo sapiens
  chr10:43362112-43362292
  hyper
tctcagcaggctggggacctccttcctctcacccctgagggttttgggggaccagcccccgtatccgggtgctgcgggatcccctgaggcgagcgcgcaccgctgtgctcgggctccggctttgtggggacccggccttcccggcccgcaccacgaggagttccacgcagtagccacgag

SEQ ID NO: 223812 - DNA, 377 bp, Homo sapiens
  chr10:43571919-43572296
  hyper
tcccctgctcagctcttccccgcctcctgcctccggccccagcagaggccgcgctcccactgcgcctctcgcctctgagaaatggcgcagcaagcgctccgcggagagcctggaggcggggcgcccttctctgagtccgcggggtcgcaccccgagccagtcggccagacctgcatcccgcgtagcatccctgccctctctgtgcagcggaaagggcaaaaggcagggactgcaagcgggcgcgcaccgggtaggaagagcggctctgcgtaggtgcgcggacccgggctcctgggttccatccccgccgcgcacctcggggtccgcacccggctcctgccgggcccttttcggccgcaccccgctcccgcaccccg

SEQ ID NO: 223813 - DNA, 342 bp, Homo sapiens
  chr10:43572559-43572901
  hyper
cggaacgtgcgtcgcgcccccagtgtccgtcgcgtccgccgcgccccgggcggggatggggcggccagactgagcgccgcacccgccatccagacccgccggccctagccgcagtccctccagccgtggccccagcgcgcacgggcgatggcgaaggcgacgtccggtgccgcggggctgcgtctgctgttgctgctgctgctgccgctgctaggcaaaggtgagttctgccggccgccggctcccgcaggggccagggcgaagttggcgccgagcagcggagcgggcgcgttcagaagcgcctttctgtttgccgtgggcagcgggctgtgcggtcgccgg

SEQ ID NO: 223814 - DNA, 439 bp, Homo sapiens
  chr10:43600282-43600721
  hyper
gcctggggccgcggcggtgtgcgccccgctctgaccgcagagcccccttcccgaggaaagcggctggcccggtcccggctggtgatcacgcggggcccctgtctgcttggtgcgcaggtgagggtctgcccttccgctgcgccccggacagcctggaggtgagcacgcgctgggccctggaccgcgagcagcgggagaagtacgagctggtggccgtgtgcaccgtgcacgccggcgcgcgcgaggaggtggtgatggtgcccttcccggtgaccgtgtacgacgaggacgactcggcgcccaccttccccgcgggcgtcgacaccgccagcgccgtggtggagttcaagcggaaggaggtgcttgtccgcgcgtgctgtggtctacccagtgtctgtctccggccacagttcgtttctcggtcggtttagtgtccgtg

SEQ ID NO: 223815 - DNA, 50 bp, Homo sapiens; identical to SEQ ID NO: 202066
  chr10:49514479-49514529
  hyper

SEQ ID NO: 223816 - DNA, 780 bp, Homo sapiens
  chr10:50605992-50606772
  hyper
cagaaaccaatgaggtccaaacgccagtctcagttccccatccctgacatcgaccgaggcaagttcctattaaggcccagagatgaccccgggacgagacaggctcatccggcgcggatgagacaggctcagacctgcgcggtctgaggacggcgcgctcgccgagcaacccggcaggtcagaaccctggacagcggcgccggtttccgcacccccacccacccccggctgctgcggagaaagaagccgtaccgggggcccagccggggcccctcgctgctcaggggtgggatccgcccggccggaccccaggcgtccggggaccgaccccaatcctctcccagtccaaacctgcgaaagttactccggacatgcgctcagcgctggcaacagagacaaaactcccttctccgcagtaccacgcgccgctcctacccggccgctgcagccggaaaccatctcgcggcccccgaggagagtccggccgcctcactgactagataaccagccgagctccctcaacacacccacctcgcgggggctctaagccggcttgggaccctcggcctcgcctcgcccggcgctcctctcccggagccgctaggctgggctccttcccgttggcaaaacagcgagtaaacaaacaaccaaacaaccttagaaacgaaaggctgcaccaaactttgatgacgccagccccctttttttccgaatgtctcgacacccgggagaaggtgactaataggtgttcgctacggtccccctccccctaaaaaaggg

SEQ ID NO: 223817 - DNA, 420 bp, Homo sapiens
  chr10:50817578-50817998
  hyper
aaggggaatgtggccaggcagtgcgggagggcggcagcggccaggctaatattcgcgaccccgactggggcgcggcaacttctgccctcagtccccacaagctcccggccgcgattcgcggccgagaaattctgcggaggggccggtgggtcagagccaggccaggcagttgctgagccttcccctcccctcctggcgggagtgtgtgtgcaaggggccagggggcggagtcggagaaagggttgggggtgtccgtgtccagcgctcctccggacgcggctccacaatccagctgcgagaacagatggacgcagcggcggctcacctcgggggcttcctgctcgctgtgcgccgaggtccaggctgaagcggagatcgcaagcctctggctcccgcctctcccaaggggcctcgaggaac

SEQ ID NO: 223818 - DNA, 960 bp, Homo sapiens
  chr10:50818162-50819122
  hyper
tcctgggcctccagccctggagcatctggagagcggacccctgcccggccacgccccgcccccggcccccgccccgccgacgtcgcattagcatgagcgacgtaagtggcccgggcaccactcgggggctgggactcgccgcgtcacagccccgagtggaagggaaaaaaaaagaggaggcggcggaggaggcaagagccgacgcgaggggaggggagcgcagcggcggggctaacgggcgggcaagcgggcgggcggcaacagcatgtccctcggccagcgcgggcggcctcttagcgcggcgggggctgctctgggcgcgccccgggcgaagtgcgcccagtctccggccccggcccctcggcgcgcccgacttcccggccgcccctgagcccagcagccgcgggtcccgggatcggctaagagtagctgcaacgcctcgccggacggagtcctttcctttcccgggacgctgggccatgagctccgcggccacctgaggcacaggggagtctgctcggccaggacagcctccccgaagtcccgtgccctcgcctctgcactgcgggacgccagcgctcggccctggcggaggcgtcctcggaagagcatcggggtgggggcatggaatccgcggaacctgcgggccaggcccgggcggcggccaccaagctgtcggaggctgtgggcgcggcgctgcaggagccccggcggcagaggcgcctggtgcttgttatcgtgtgcgtggcgctgttactggacaacatgctgtacatggtcatcgtgcccatagtgcccgactacatcgcccacatgcgcgggggcggcgagggccccacccggactcccgaggtgtgggagcccaccctgccgctgcccactccggccaatgccagcgcctacacggccaacacctcggcgtccccgacagctgcgtggccagcgggctcagcccttcgg

SEQ ID NO: 223819 - DNA, 420 bp, Homo sapiens
  chr10:50822247-50822667
  hyper
acagcgaagaagagggggcttgggggaggggggaaatggaagagagaggagggaggaggtacaagaggaaggagagaagtgcggccagcttgctttctccagtcgggtggccgcggggacccgggcgacgtcggaggccctgccgggaacccaggctgcagcccccacccccgcgctgcgacacgccccccaccccttccggctcacacccccgcccacactcctgagtggtgcggtgcagcgtcggccgaggcagcagagccgaggagagcaggtgagaagaagggctgggctgggctggcggagcgcggtgccgggagcaagggcggcggtcgggggctctatccagggacagcaccggggccgagaggccccaggactcgtggagtcctctgagtcctgcgcagcagcggccgtcgg

SEQ ID NO: 223820 - DNA, 300 bp, Homo sapiens
  chr10:50969834-50970134
  hyper
tcggagaccgcggttaaaaccgtctattaggctccttggtagtccgaagctgcctatgggtcccgccaggtgcacagcgctgaccctccccatcccccgcacagccctcgcagctccgggccctcccctggccacggaaggcgcggggcagtctgaagtcctcgggctggagaaacccaccgcgagcacccgctcctctgcgcaggaccctggactagccgggtggtacgcgcgcgatgggctgggggtcccgggggaggccacggccagccaaggtcagagccaaggtcacagtctgtt

SEQ ID NO: 223821 - DNA, 276 bp, Homo sapiens
  chr10:50970330-50970606
  hyper
aggtcagggggctgcgcggaaggggtgcgcgcgcgccgtgccaattacctgggtcacgtgacgcagccgcccacgggcgcgcgcccctgagactccgcgcgtcgtgacgtctccatggatgccccgccccgctcctggcgctgtccacggtgctggcggcccaggcccgaggtcgcccacggccgaaggggggactcctctctgagaccgcagaacggggctgaggccctgaaccccgtgtgctcgtcctaaaactaggacgaatgtaccagacga

SEQ ID NO: 223822 - DNA, 114 bp, Homo sapiens
  chr10:52177704-52177818
  hyper
ataaagatttccctttacttcgccgtagtagaattggcactgattgcggtattttaatcggttcacaccgtctgttagtgtattctaatgaaccacagcatctccggagcaaca

SEQ ID NO: 223823 - DNA, 300 bp, Homo sapiens
  chr10:52833454-52833754
  hyper
aacgcctcgggtgctaaaatcggaaaccccaccccctaccccacaaccctttcccaaaggtagtaggctgaaagggggaattcctcgcgggcgccgactcgctcgcatctcctgagaggcaagtttcttcgcaagcgttagccacctgtgtgaggcgctctgggtgggaaaggtggcgtgggagaagcgacagctcggccacaccgctcgggagctttccttagtgaggccggccgtcaaaatacctccagaactcagagctttgatgatgcagagtcccctatgcctcgtacgtcgcta

SEQ ID NO: 223824 - DNA, 105 bp, Homo sapiens
  chr10:54072982-54073087
  hyper
ctagaaagggtattgcgtggtcccgtgcaaggtaagacttgggagcaaaccctgcattcggaagcgttgcgatgtgatatactaatgaggaagtcaggcgctaag

SEQ ID NO: 223825 - DNA, 180 bp, Homo sapiens
  chr10:62703336-62703516
  hyper
cgggtcctccggtccccgcccggcctccccatactggccttcgaaggggaagcgccttctcgtcggcgcggcaccaccccctccctggcgcagccagcctgctaagggtgcctgttgtacattttctcagctccaagttaggggtgcggctgtgcgggcgctcctagaaatctcttgtgc

SEQ ID NO: 223826 - DNA, 180 bp, Homo sapiens; identical to SEQ ID NO: 202090
  chr10:62703652-62703832
  hyper

SEQ ID NO: 223827 - DNA, 222 bp, Homo sapiens
  chr10:62704082-62704304
  hyper
gtgacgttagcagccttcgcggctatttatatccacacgattggatttcattcatgaaaccggggcctggtgtgtctgtgctctgggacacgggtggcaaaggttcctcggctctacgcagacccgacgggcccgggcacggaggcggatcgcccgggacaaaccgacacagagcatgggagaccccggccctttccccgcgctgccgggaggggagagtct

SEQ ID NO: 223828 - DNA, 206 bp, Homo sapiens
  chr10:64028003-64028209
  hyper
ctgcaaaaagacaggcgtccaaagcctggggagggcagcggacaggtgcgcccgcaaacgcgcgcctggaccccggcaccgccttcccaatccggacctcagctgcctgagaaactcgggggttccgatgtccaggccctttagagccccaagagcgcagtctcctaatccctccctttgtttctggccaccgctgaaatagagga

SEQ ID NO: 223829 - DNA, 1110 bp, Homo sapiens
  chr10:64574692-64575802
  hyper
gaagggggtgggtgatttcccggctgctccccatccccggcgccttgtgcctttttctccctccctctcccgctgcgcttcagccgagggctgctggagcgaatgggggatgtagaggaaggagtccgtaggtttccgtgccctcccaatcttctccgcctttcccgacagccgcgcgtccccgcctcagcccaaggccagtggcccggcctcgaggaaggcgcgggggccgcgagagacgactttccacagcatcgccaaggaaaccggcgtcgccggtgcccccgcgggcctccctcggcagtccgggggctgcttcccgccgttgcgcgccctcctccaccacccactcgctgcctccgccggccggagcccccgccttactaaccccctcaacttcgcgggcggcgggcaggtgggggcgcgcctccaggccgcaagaagggagcgctccgagattttcccggggtcggctctgcccaggagggagctaccgacgctttcccctggcgcttctccgccgctcggctctccaggcgcgcagctctccccgagagccccgaactttaccgtcactttgcccctgccccgggagaggggaggtcgaagtgctgccggccagagggcctacgcaagcctcgaaacccggggggacgcctcttccacccccatccctgcgctcgcccggggctgggcgcgccggggcgcacgcacgccggtttgctggcgacctggcgcatctgcccgcgcgccctggtctcagctgtcgcaggttcctcctgcacccacttccagtcttcaaagccagtgcagtcagcaccgtccacctggagccccaatcctctcctgcgattcccgcacacccactgcaccccatccaccacctccgggccgcgcaggtccgggcctgcgaagacacgcggcttacctccggccactccgttcatctggtcaaaggggcctcccagttcggcattgggaaagatggtcaccgacgtggcggcgaggtcctccaccgggtagatgttgtcagacagctggtgcacaaaaccactgagagttactgggattttgtctacggccttggcggtcatcatttgctcctcgcac

SEQ ID NO: 223830 - DNA, 329 bp, Homo sapiens
  chr10:65225896-65226225
  hyper
agaggcggcggcggcggcggcagcgggagacgaaaaaatgaagagggccgcgggaaagtaggcgacagctattcaaagcttttgggggtctacctttgtattcgttgctccctcagaggtggaggtgaggggaaagtgaagtgtagtggttccactctgatcacaaaataaactcctgggttgacgcctcacccgcggtttgatgttcagagcacacagcgcccgccgcctgagttagcctgaattagcagtcccgcagtaacagcagcagagcaggacaacacttctactgaaaactaagccccaaagtcacagcagaaccaaccgtt

SEQ ID NO: 223831 - DNA, 206 bp, Homo sapiens
  chr10:71078140-71078346
  hyper
cgagccctcatttccgaggaatgggaccgccttcgtgcccccggggctgccagtccctagactagccctaggggcttctcgtcccggcggagccgggcggtgcctcctgcctgcgcctcgcacctccccgcctggcacggcccacccgggcacggcgccgccacgcgtgaaggcccgcatcggctccctacgtgggggacgtgcag

SEQ ID NO: 223832 - DNA, 780 bp, Homo sapiens
  chr10:71078387-71079167
  hyper
ccctttccggcgcaggagggagcggccgccgcgtccccgctccccggccgggacgccaccgccgggcgttgcagaggcgcgccgcaaccaatgggcgtggaggaggtgggtcggctggcggctgtcaccctccaggggacgggagcgcggagaccgggagcgcgcgagctgtcgccgcgccccgggccgagggggaggagccgggggaggaggaggaggaggagccgccgagcagccgccggaggaccacggctcgccagggctgcggaggaccgaccgtccccacgcctgccgccccgcgaccccgaccgccagcatgatcgccgcgcagctcctggcctattacttcacggagctgaaggatgaccaggtcaaaaaggtgagcccccgcccgcgccgccgctggtcctggccgcagccttgcgttccggcatccgctcgccgcctccgctgcctccatcctccggcgcccggccttctccgggccagcatcgagttggactgcagggcgcaaggaaagccttcgccttcgattctaccggcattgtcagtgtctctgtgtgtgtgcgtttttgggaggggggcaatcgggcggaagacccccgagaccgggctgcctgctgcagtgtccttgaaacgggccctggatgtcagataggcccccgggctgtgcggggaggtggccggtgggcccttccgcagggcctgttcgggagggtccgagcgccgtgggaggaggtgtgatcatggagatgctggggaggtgatcgagcagcaggc

SEQ ID NO: 223833 - DNA, 420 bp, Homo sapiens
  chr10:71331836-71332256
  hyper
tagtgctaccattctagtattctttgaatgagattatggggtggtggcagagaggaggcctaaaatgagcgcactttgcaatgcccacttcgcgcgggcagcagcaagggttgcgtgcgttggcgcggctcggagggccggggaatgaacccagcctgccgcccccgtggaggcctgggccggccaggggtcagccagggagaagcagaaggaacaagtgcttttgagggccgccgccgtcggccaccctctacggctcccggctccctccctctcccttacccttagcacccacagcccagcgacagacaggtcctttcacagaaaatctgagaaagccagactgcctgggctcaagcaggcggaaaaggtggcccccagcagcccgggtcgctcctccagcgacgcggcgggactcag

SEQ ID NO: 223834 - DNA, 420 bp, Homo sapiens
  chr10:71332285-71332705
  hyper
gggacccccagtccccgggggaaccgcctgggctgcccagctccccgcagtgcggcgccggcggctccagcgcgtacaagctgtggtccgctatgcgcagcgtttgagtcagcgcccagatgtagttgtgggcgaagcgcagcgtctcgatcttggtgagcttcgcgtcgtctgggaaggtgggcaggacaccgcgcagggcgtccagtgccgagttgaggttgtgcattcgattgcgctcgcggtcgttggccttctttcgccgactccgtcgctgcttgctcagtgccaactcgctcttaggccggctgcgtcccccgcgccgtgcccggagcttcctcggggcccctcggcagcctccctcttccgcctctgcgcagttcccccgtgtgcgagtggggctgggcggggcggacgtgg

SEQ ID NO: 223835 - DNA, 105 bp, Homo sapiens
  chr10:71892160-71892265
  hyper
tgttccctcttccccggttcgcccttcccggcctaagcccatcttccttaggaaaacttagcagggatttaggggccaaaccaggagggtggagttttctttgcc

SEQ ID NO: 223836 - DNA, 457 bp, Homo sapiens
  chr10:71892379-71892836
  hyper
cgccagacgcggcgtgagccaggcctctaatccgctcgcccctcttccgggtcccggtcccgcccggggcgcccggggtctcgagagcccgcctggcggcgcgatctcacctgtcggccgcgcccgcgcgctctcgctccggctcccgctcccgctcccgctcccgcttggtcgtcttcccgagttactgacccgaggcgctcccgggcggggcgtgactcagcactcgtgctggtccccgaccccgcggcaacgccccggccaggccccggaaacggtcctggcacgctggggctggtctccgaacggcccgccggactaaccttgaccctgagcgaacggccttgaactttgaaacaaatgctcccatggccagatgtcgcctctccggctcctgccagcacccgcgccccagtcctgccgagccattcagacttggtttaaagtgtcctttcag

SEQ ID NO: 223837 - DNA, 105 bp, Homo sapiens
  chr10:71892919-71893024
  hyper
gaaggaaaacaagcatccccctgttcctctgattttctcgaggacacctttaaagccactggaaccttggagagtggggttcccctcacacgttgggcgcactgc

SEQ ID NO: 223838 - DNA, 650 bp, Homo sapiens
  chr10:72238258-72238908
  hyper
agccgcactagcgacgagggaagaggaactggcttcccgggcagtctcccccgccccaaacttttcctcctcgcggagggtgggcgggcggagggaggaagcgcagccggggaacgtggcgcccgcgttcctcccgcccgggggctgcggctgggctgagtgtgtctttaaatctgagccccccgcccctcgcggtggggccgggactcgcggtccgggcgggggcgggcgcggtgattggcggccgggtcgggtccgcccctcggcgttgggtagcggggcgctggggagcagcgcggcgcgcacgggccggggcgcgcaggtcccgtcgccggtgagcacgggctccctctcgcgtggcctcgccgggtccgcctggcctgcccacctccggagccacctctgcccccgcatgggctggcgaagttgggaggagcgagctggagccagagcgcgcgccgggcgcgccccgtcgctgcctgactcggcgcccgcagttcgggcgcagcacgccggccgcaggagcacggatgccccccggagccgcgggctggcaggtaccgaagtgtcctgccctggggctggcgaggggagggcaaatctggaatcccccgggcaccccccagcccgaggctgctccagacaccaac

SEQ ID NO: 223839 - DNA, 37 bp, Homo sapiens; identical to SEQ ID NO: 202115
  chr10:73113223-73113260
  hyper

SEQ ID NO: 223840 - DNA, 600 bp, Homo sapiens
  chr10:73847722-73848322
  hyper
gacaggggaggggcgctgggctgtgacccccagtactgtttactttccgtgtaattagccggccaggctgcggagcctcgggctgcgacgtgcggcggccgctcccgcagaccccggagctcaatccccgaacccgcaaccccgggtctctgccttggcagccctgcggactcacgtctcggaagcggttccagtgcttgatcttgccgctgtactgcgagatggacgacagccattgctcgtcctccatgaaattgccgggggtctcgccctccttgagccccttggcgtcgccttcggccagggctgccgcggccaggagcagcagcggcagcaccagccgcccgcagcccggggcgcgcatcgtggtctgggttcgacctgggggggtcttgacttctgcagtattttaatgtccttcctcccaccccgctgctggcgaagcgcacgcggctgtcctcagctctcctcccgcggtctgcctccggtgactggcggagagtgggtcgcggctgaaatgtgacctggttaggagatgcacttgtctgaaaaagcccagcactggacgcggagagggagagagaatcagagaggctgcgc

SEQ ID NO: 223841 - DNA, 105 bp, Homo sapiens
  chr10:74032435-74032540
  hyper
aagcaagcctgacccgaggcaaggcccgcctatctggttaggttccttgcccgcccccggggccctgggcatctgatgtaagtttggctccctcttccatcaggg

SEQ ID NO: 223842 - DNA, 294 bp, Homo sapiens
  chr10:74032607-74032901
  hyper
cctcagcaaccactgttagcctctgagcactgctgccaggccagatttcctgtggccccgcctgaatgatgaaacacgggatggccattgcactccctggcttttccagagatctcggtcctcggtcctgatgcaaccgtctggatcttttacacaaagcgctaggcgagcgctgggtgctaggacccggggggcgcccgggcagggaggtccggctgcgctgcctgcagtccgcggggagggcggatgggtctgtgagtccgactgctgtgaatcctcgcttccatccctgca

SEQ ID NO: 223843 - DNA, 300 bp, Homo sapiens
  chr10:74079499-74079799
  hyper
gcggatgcggcctgatggggcaatcgctggcaacgcgccgcgggttgtcagcgggcgctggggggtgggagcccggcgccggcgggccctgcctccagcattggccccgcccccagttccgcagtcgtggctgggtttcggggagggcgcccggtgcggggggcgcccagggcctgcgcacacgggtaggcccgcgtgcccaagcccccttgcagcccaggcgccctggctcattatccatcccggccactggcgttcggttccgctcctgtcgcaccaccccctcactgctctgacaga

SEQ ID NO: 223844 - DNA, 141 bp, Homo sapiens
  chr10:75408169-75408310
  hyper
gcatggctgctggttcgacccgtgccagttcctgggtgctggagtctgcgcgctggcgctgctgttcaaagagctgcacccctcgcccagagacctcactcagctgccctcccagcccagagccctggccctctgatgctc

SEQ ID NO: 223845 - DNA, 294 bp, Homo sapiens
  chr10:77054513-77054807
  hyper
gagagaaagaagggagaccccggagaggaagagggggaggcccgggagggcgcgcggagggggtgtcagcgaggggccgcctgtcagggttctatctgcgcgatgattgatgcgggcccgggtttttctgtcagcctgtcacggcgcaggaatgtttaatgttctcattattggttacgctgttgtgtatatttctctgtcagcaccgcggacccagctgaactggcagagcacttcaaaggcctacgggtcattcatcatccccatgacgctccggcaaatgctcagcttcag

SEQ ID NO: 223846 - DNA, 240 bp, Homo sapiens
  chr10:77160012-77160252
  hyper
gcccgcgccgcccccgttggaggcaaccgaggagagtttggaggagggcgaggggtcgggcttcccgatctgcgaacatgtttgcgccaacagcgccagcgggctcttcttggcatcgagctgcggggtcagacgatggggggggagcgtcacacagagaaagaagtggaaaccctttagaatcctggcttctggggttcaaatgcctctccgcaacagcccacgaagatcctcccagcc

SEQ ID NO: 223847 - DNA, 446 bp, Homo sapiens
  chr10:79396823-79397269
  hyper
caactcctcacccccggcgcgccgcccgctgccccgatccgagagcaccgggagagccgagggaagggaaggcggcgaggggaaggcaggcggggatggagggaggcacggcgcggcgcggagcgaggaggtgggctgcaggggacgccgagaagcggtggggctggcgcagagggcgggcgcccggggcgcgcgttaccttcgtcttgcccccgcagtggcagcacacggtccacaggtacttgagcgtccgccagagcaagatgatgaagaggcccccgaagaaagtcaccatggaggaggccaggaaagcccaccacatgcgttggccccggctgtcgcacggcacctccatggtcaccgggatgatgagcgcatccatcttgggctcgtggaccgaggacgaggaggaagaggaggaggaagaagaagaagaggaagaggag

SEQ ID NO: 223848 - DNA, 994 bp, Homo sapiens
  chr10:79397389-79398383
  hyper
ccatttgccatagctagcaacgggcagccggcgcaggggctcgggggagctcctcccgccgccagcgccaccccaaacacccatcaacagccatattgctgctactgctgccgccgccgccgccgccgcggagcgcgggaggggggcggggaggcgcctgggctcggggcgctgtgcgcgacctggcggggtgcgccgagatatatacagcgagccgccgccgcccgcccgggggggagggggatggagtgcgcgggcagctccccctccccggcccgcgccccgctcgccccgggctgcgctggccccgagcgccgagagccagggggcgccgcgggccgcccgcgcccggggtctgcgccgcccccgggcccgccccggctccgcgcgcggtcccgggtgtcctcggcgccgcgccgcccgccgtgcgccacgggtgtgcgctgcgctcggccggtgacccccttccccgagcgcctcccgcgcggctaacgagccgctctccgcttattaggtggtaactcgttaataatggataatcggccccctccgcccgggcgcccctgcgccagccctcctcccccggctgcgctcggctccggctcgccgcgccagtgcgcgcccggccgcggcaggttcaccgcgtccggccgccggcccgtggccgcctgctagcccatgttctcgggaccccctagtcctgtcgccacgccgctgagcccctcggcctccgctcgctcttcctccttgccgcctccgactcctcctcgtccccgtcctcgccgcccaagcctcttcggcgcgcgccccgcgctccccgcagccgccagcagcagcagctgcagcaactggagcgggcgcggactcaggacgacccaggcgggaggggaggaggctcgccgcgctggctcgcctgggctccgggctgggcaggggtgggcagggcccctcggcagcggcccggcaagcgcccctgacccccagggcgcaaggt

SEQ ID NO: 223849 - DNA, 45 bp, Homo sapiens
  chr10:79686268-79686313
  hyper
ggggctccatggtggcgggccgcgccgccccgccccgccggacgc

SEQ ID NO: 223850 - DNA, 469 bp, Homo sapiens
  chr10:79686575-79687044
  hyper
ggcgcgccccgaggccgggctccagccgggcatgctccccctccccctcagcctccgcgcgcgccgcccgccccgcgagaaaactcgccccgaaagccgggccgcgcgccgcccccagagcaagactacaactcccgggagaaagtcgcctgggccgtgtttcccaggctcccgacagctccggcccggctcggaggccgcctcggcccccgtgcaccccggcccggctcaccggggccccgcggccgccacccgctcccccgtggccacagccccgccgccgccggcccgtccctcctctctcccctccccaggccgtccctccgggaggcggcagcaggggaggaggggacgggcggaggggaggggtccccggcccgcccgctaggcggggacgcggcgccggctggttcccggtcccccgaggcccaggcgcagccgggggtgggggacacggagtcaggcctgg

SEQ ID NO: 223851 - DNA, 115 bp, Homo sapiens; identical to SEQ ID NO: 202151
  chr10:80733746-80733861
  hyper

SEQ ID NO: 223852 - DNA, 115 bp, Homo sapiens; identical to SEQ ID NO: 202152
  chr10:80827233-80827348
  hyper

SEQ ID NO: 223853 - DNA, 210 bp, Homo sapiens
  chr10:80828532-80828742
  hyper
aaaggggaaagagagcgcagagcgcgagccaagccgagcgccggcagcggcggcggcgcggcgcggcgctccactccggcctgactccgcaccggcttttgcgggcggccggcggcgcggggccctttggaaatagaatagccaatgtaatctgacacttcaacttgctcggctccgggcgagttgattcacttactcaccccctaacgc

SEQ ID NO: 223854 - DNA, 105 bp, Homo sapiens
  chr10:80830746-80830851
  hyper
ggcggctgggctggcggggtgagggcacggctcggccagcctttccctcctctctgctctgccacggacatttggagccctctgggtggacagcccagggcatgg

SEQ ID NO: 223855 - DNA, 262 bp, Homo sapiens
  chr10:81002446-81002708
  hyper
cagcgccttcccggcggcctcctcgggcgacagcgctccgggagccccactcgcacaagtgttgcttccaattaattgcctgggcgggggaaggaaaggggcctcgtcgccgcccccgcccggaggctggagtgctgctcgtcgggtcgtgcgttcgctcggcagcggcgtgcaccagcaccacccctgcgtgcaagtttgaaatgtgagctgcctccgattcatactcgctcgcgctccctcgcagcgaagtggctgggct

SEQ ID NO: 223856 - DNA, 144 bp, Homo sapiens
  chr10:81002951-81003095
  hyper
acgcccgcagggtccgcgagcgcggcgcagagcgcgggccgtgggaagtttctccggcgcgccccgtgcgcccccgccccccgcgcgcccccggcccatccccgtccctggagagctgtcgcttgcgcccgggcgcgcggctgg

SEQ ID NO: 223857 - DNA, 146 bp, Homo sapiens; identical to SEQ ID NO: 202156
  chr10:82213597-82213743
  hyper

SEQ ID NO: 223858 - DNA, 42 bp, Homo sapiens; identical to SEQ ID NO: 202161
  chr10:86088147-86088189
  hyper

SEQ ID NO: 223859 - DNA, 56 bp, Homo sapiens
  chr10:87493570-87493626
  hyper
agcagtggtaaaaacgggagaagacacgttaaaatgtgatacgtggatatatgtgt

SEQ ID NO: 223860 - DNA, 105 bp, Homo sapiens
  chr10:88125457-88125562
  hyper
acacagacacacaccggagaagcaggcagacactgtgtccactctaacaggctgacagacagtcgtgcacgcaccaacacacgctcagatggccccacacacccc

SEQ ID NO: 223861 - DNA, 44 bp, Homo sapiens
  chr10:88224613-88224657
  hyper
aaaaaaaagttttacatgtagcatacagacgatgtgatgacatg

SEQ ID NO: 223862 - DNA, 105 bp, Homo sapiens
  chr10:88294492-88294597
  hyper
ccattcctctgatgcgcccctagcctggcccatagtttgggttgtttgggcagccctgcagattccctgagctgaggggcctctctctggagagtgggaaagaat

SEQ ID NO: 223863 - DNA, 148 bp, Homo sapiens
  chr10:90750730-90750878
  hyper
ggcgcgggacgcgtgcgggattgcggcggcagcggcgcacgcgggcacctgggagcggcgggctgctgcgggaggcgttggagactggctcccgggggctgttaggaccttccctcaggcccgggtgctcagaacgctggaggacttg

SEQ ID NO: 223864 - DNA, 180 bp, Homo sapiens
  chr10:91295664-91295844
  hyper
ctcggccttcgaaatgcaccggctcattcagccccgccagctccgccggggactctgcctggccggcaaagaggatttagcgcggggatccgctctaagtactgtggcttggctaggggcgaggggcgcagcggaggagggacgtctcgcggttatgtaatgcaccggctttctgtgtcc

SEQ ID NO: 223865 - DNA, 720 bp, Homo sapiens
  chr10:92617054-92617774
  hyper
agcgccagggacacgatcaggtagttggagggctggcggagcttcttgacgaagcacacggagatcaccaccaggcagttgcccgcgatcgtcagcagcgtgatgagcgtcaggatggagccgatcacaactttctcgactctgccgtagttgatctgttccccacagccggaggcattgtccgggggcgcgtcccaggtgggcgccgggctggctgtcacctcgctcagcaggtgcggcgcccaggagcccgcgaccgggtcggcgccaccgtcggggctcaagtcgggcagcccgcgccccacttctggcagaaggaaagagcggaggtgcccgtagaggtccgggcggccgctgctgttaacgtccatcatcgcgccgccgtgtgccgctgcccatggagccggcgccccggccacgcgcctccggctgccggccccggggcttcacctcaccggttccgctccgcccggcccagccatggggcccgcgccgaccgctggggggcgcctggctctgtctcggagccccgcactccccggacccccggccgctgcgggtaacgcggcagcgcggcctcacggggactccctgcgggaggcgcttcggcccccgacggacgcctgggacgcgcggagtcgagggagctcgggctgggctccgctggcagctccacagttcgcagcagcagctcggctgcgccgagagcgcccgggcggc

SEQ ID NO: 223866 - DNA, 180 bp, Homo sapiens
  chr10:92617904-92618084
  hyper
gctcctgggacgggatacccgggctgggcaggcaccgccgcctctcccgcgcctccctactgtgagggggcggcgctgcacgcgcctcccgggatcccgggtcccctcgcccgggaagctgtccttgccgcatgatagatacttagaacccctccagccgaccccagcctccgcacacta

SEQ ID NO: 223867 - DNA, 660 bp, Homo sapiens
  chr10:93647041-93647701
  hyper
caccccagggccgcgtgaatagcggggaaggtaacgtgactgcggagctcagggccggcccgggaggggcgcgggcctggccagtgggaaggtcggacgccgaggggcgaaatcaccccaccggcatcagaccaccgcctccattcagcggaggaatgtgggcgggcagaggacgcgcggtcccctcgcccggcgttaaccctgtgcgcgccgggagcttcgcccggagcatcgcagcatcgcgcagcgcccggagcccggggccctcacagctccaccggtgcccggagcatctatctccccgcgggcggtgctgccactcgccacgttcacattcctccacgtgcacgcgtgactcttttggtgttatttttaaaaatctcactatttaatcgccatgtttaccttccccagaaccacatagtctcatcgcaattcaaataatttagaaaacattttaagataatcgtggagcccacgaagccagtgcaacgtaggtggcttcccttgctggaagtcaccgcaccgaggccagaagaaggtagccagcgcccaggcaagcgcttaaaactgcagcctcctccacacctttgcacgtggggaaaccgaagcagaaccctgtctctttcacttttcttcccttcgctaagacttttttat

SEQ ID NO: 223868 - DNA, 508 bp, Homo sapiens
  chr10:94448889-94449397
  hyper
cggagcggcccccactggattgaagactgcacagcctctgcccggcgctgtaggacccgggcctccccttgattgctgctcgcagcggcttctgccagcatcctcgcggaagtggcttgagtccgaggcctccaaatgaaaccaggtggagcggccaagagtccgcagcacctgaactccagccatccgaatcccgccgggccgcagctaagggccgccgagcagccctaggaacccagggcactgtcccgctctgagctcgggaaacggccggtgtgacagccagcgccactgttaatccagggagcgcacccaccgaggaggcgtcttaggccagcggcctctgctcccgccgagtcccgctgctccccgcctggaaacagctgctgccaccccgggcccaggcctggacggcgcccccgaatttcggcagaggtgcctcggggccgcggacagggccgctggagcccgcactccagaaggcggtcttcctcgcgcctcccccgac

SEQ ID NO: 223869 - DNA, 951 bp, Homo sapiens
  chr10:94449615-94450566
  hyper
aaggggccagcgagcgcggccccaccccgcggccggcggagcctatcgccgggagcgcggagcgcggataaatgtagcgccgcggcgcgggccagcagctctgcgaggggccggagcgcggcggagccatgcagtacccgcaccccgggccggcggcgggcgccgtgggggtgccgctgtacgcgcccacgccgctgctgcaacccgcacacccgacgcccttttacatcgaggacatcctgggccgcgggcccgccgcgcccacgcccgcccccacgctgccgtcccccaactcctccttcaccagcctcgtgtccccctaccggaccccggtgtacgagcccacgccgatccatccagccttctcgcaccactccgccgccgcgctggccgctgcctacggacccggcggcttcgggggccctctgtaccccttcccgcggacggtgaacgactacacgcacgccctgctccgccacgaccccctgggtaaggcggccgggcgagggtgggggcgaggaagcgccacccggcaggtggcagcgcccgggaggccgagggggcgaagggggcaggcggtagacggctgtggcaaaagcgatggaaaagcagctgtcgggcacgcgcggggacgggaggcgcgcggccggggctgaccgcaccgtgactcagattggttttcctgcaccttgcaggcgtcggggcgcgcgggccggcggtagacctcgcggcgagggcagccgtggaccgcgcgtgttacccggggtggggctcccttagcgggagggacggggaaaggggcgtcgaggcgcccctggccggcccccgtggggcagggatcgcagccgggcccgggtggctacggggctggacctggttcaacaggcttgtgcagtgaaagagcctgaccctttccgttcatacaggaaatcttgagttctcgataggagt

SEQ ID NO: 223870 - DNA, 180 bp, Homo sapiens
  chr10:94833583-94833763
  hyper
tgaccaaggtaacgtgggcagcaacctgggccgcctataaagcggcagcgccgtggggtttgaagcgctggcggcggcggcaggtggcgcgggaggtcgcggcgcgccatggggctcccggcgctgctggccagtgcgctctgcaccttcgtgctgccgctgctgctcttcctggctgcg

SEQ ID NO: 223871 - DNA, 180 bp, Homo sapiens
  chr10:94833999-94834179
  hyper
gcgggagcgcggcgctccccggcgccccctcatgcccacttctctcctccgccttcctcccacagcggaggaagttcctgcagatgaagcgcaggaaatacggcttcatctacaagacgcatctgttcgggcggcccaccgtacgggtgatgggcgcggacaatgtgcggcgcatcttgc

SEQ ID NO: 223872 - DNA, 420 bp, Homo sapiens
  chr10:94834236-94834656
  hyper
gatctggctgcctctctaacctgcacgactcctcgcacaagcagcgcaagaaggtgggggcaggaggcgacggctggacagggagggggaccccatttatgagcggaattccggctgatggatgctaggcgcgggctagcagcttgaggtgggctaggaccctctgccagctccaggttagctttcccagctcggagagtgccatgtgtctggcaggactgggggtgtctggaaggggacggcggtagacgagaggggcggatggaggcttttaacgctgtcccctcctcgggactcaggtgattatgcgggccttcagccgcgaggcactcgaatgctacgtgccggtgatcaccgaggaagtgggcagcagcctggagcagtggctgagctgcggcgagcgcggcctcctggtctacc

SEQ ID NO: 223873 - DNA, 120 bp, Homo sapiens
  chr10:95753358-95753478
  hyper
gtgtgcagagttcccgcccttcccggagccgggcgccccaggagcgctctctctggctcccgccagaaaggatggctcctaggggtcagggccaggggtctgggaaggggtcgcgccgcc

SEQ ID NO: 223874 - DNA, 480 bp, Homo sapiens
  chr10:95753559-95754039
  hyper
gcacaggccgctcccccgcccggccgcccgcggtggcgctagcggcctctcacccggggcgggcgagttctgggaaagcccggcccagggcgggggccccgctgccgcccgcgcagccgccgctgtccgggcagcgcgcacatctcggcgggagcggactgtgaacggcgcgggtccacacggtaacgctgggcaacgtgggcaacgcggcgggcggcgggctcgcgcggcgggaggggcagcggcggcgcgcccgggctctacctcccgggctctgcctcccgggctctgcctctcgggcacttgcctggctcctgcgcgttcctgggcatcggctctgcagctgacacacagtagcggggacacccgacgccgctagcgacaggcgcgcggacggctggtcccagagggacgctgcgcttggggacgccggcgagactcgccaggagccaagaggtgaggaagcgactctgtagctcg

SEQ ID NO: 223875 - DNA, 150 bp, Homo sapiens
  chr10:96122666-96122816
  hyper
tgacacacgtgccgaagtccctacactaccagagccggaaacggccttcagtccctcccaatcctccgccgccggaagtgagggcgggacttccgtagacaggttcgggctcgcgccctctcgcggtgactgtctcgcggccctggaccg

SEQ ID NO: 223876 - DNA, 180 bp, Homo sapiens
  chr10:96162194-96162374
  hyper
cgagtcctggcgcgtgcccgccctcaagcaactgtccgacccagcgggtgggaggggtgggtctgggaacgttgcggcggctgtcgccgcggccccagcacccagagctgttctctggccaagcctgcgcctgtagtccttctttgcctcctggggcggccgccacccacccccagatgg

SEQ ID NO: 223877 - DNA, 1124 bp, Homo sapiens
  chr10:96162479-96163603
  hyper
gcggctttggcggaggcgtcggcgctgtggagccgccggaggaggctgacgaggaggaggaggctgacgaggaggaggagacgccgcctcggcagctccttcagcgttacctcgcggcggccggggagcagctggagccggggctctgctactgtccgctccccgctggccaggccggcgccccgccgccctcggcagccccacgatcggacgcctgcctgctgggctcgggctccaaacaccgcggcgcggaggtggctgatggccgcgcgccgcggcacgaaggcatgaccaacggcgactcgggttttctgccgggccgggactgtcgcgatctggaagaggctcgcgggctggcgcgcgccggcggccgggagtcgcgccgccgccgcccctacggccgccttcgcctggaggggcctggcgacgaggacgcggacggcgcgggaagcccgtccgattgggcctctccgcttgaggacccgctgcggagctgctgcctggtggccgcggacgcccaggagcccgagggcgcgggcagcgactcgggggacagccccgccagcagctgcagcagtagcgaggactcagagcagcggggagtcggcgccgggggtcccgaggagggcgcgccccctgccacctcggccgagaggactaatgggggtgcggagccgcgcctgggcttttctgacattcacttcaactctcgcaacacgttccaggtgagccgcggtcagagcgcccgcgatcacctgcccccggcggggccgccggtgcccttgcccgccgcggagcagggtcctgcgggggcttcggcccgggctcgacggagtggcggcttcgcggacttcttcaccaggtacagcgcaggctgcatgggactcggggcgggtccggggccggggccggagccggggtcttggtgggagtcggagccggagccggagccggagcggagagcttggtcggccgcttccgtgccagccccacacgcgtcaggacttagctttgatttgtcactggaggaagaggaactgggtcggctttgtgtttctataggagaagttgtgagctctgtggacagcgagtctttctgttgccttgtccgcgggaggctgtac

SEQ ID NO: 223878 - DNA, 180 bp, Homo sapiens
  chr10:97051019-97051199
  hyper
gtacgcacggccgcaccgcggctctcgggcccggggcgggtgctaggtgagagggaagcaggtcctgacagcgagacaaactcgcgcctcgtgctttgtaaaacgagaaatttgaagtgctgtgccaagtcagccctctgaggtcggctccgacttcccatttgctttttgtaatcggta

SEQ ID NO: 223879 - DNA, 149 bp, Homo sapiens
  chr10:97321243-97321392
  hyper
gtccactctggcagcgcccggccagcgggcggtgccgggggcggggccgggcccagccgtgacaggaaggggcgtgtgcgcggatgggaggcgaagaagtgtccggcgcccggctcctggcattgtgagcccgccggcctccgccggta

SEQ ID NO: 223880 - DNA, 228 bp, Homo sapiens
  chr10:98593370-98593598
  hyper
gccctctcgtcgtccgctgtcccccacgcccagtcctcggggaggcccagaattccagccccttctcccccaggggaatattcttgggaaccaggtctttcccggcagaatctaggagagtctatccgttcgcttgggcccctcattccctccttcccgacagggtttcgttggaaggaattatgcaaatcctgctttctggtgtccattcagcggcaatttcatgcg

SEQ ID NO: 223881 - DNA, 336 bp, Homo sapiens
  chr10:99259373-99259709
  hyper
ggacgccggcccgtcggggcacggcgcgggcagccaggcgtccccagaactcggagcgagcgaggcgagaacagtcgctccttccaaagactgtgtcattatcgagctgcagatcgtgtctgcgggaatccgacttgcaaagcagcgcaggactctgggaaagaaatctttatttttcccgcaggggtttttagagcctctcggccgtctgggagtctataaaagatggggtgcggggtgagagtcacccttgggattgttgggatccttcccagctttgggagtgagatcgctcgctggtgatcctccaggcccgcgcaacgctttctcactttc

SEQ ID NO: 223882 - DNA, 122 bp, Homo sapiens
  chr10:99447292-99447414
  hyper
tcctgccccagggtgcggcgaaagctggccctgccgggtacacgtgacggatgccccttctcctgggcccgaggccagcgcgcgcggcactgactgccttgcagcgcgtggccctctgcaga

SEQ ID NO: 223883 - DNA, 260 bp, Homo sapiens
  chr10:99474283-99474543
  hyper
tccactgtcgcccgcgcccgggaaccctgacgctcagctcccgcccgacggcagcgccgccgccgcccagaatcccagcccagaatcccgaccgccgcgccggacgcgccgtctcccgggacaagcgcaggctgcgatccgaggggctgacacacactcgcagacgagccgccccgaggcgaaacctcgcggttcctcttcccttccctgctgagactaagacgtggacaggggccgcgcagatccgggggaggctccca

SEQ ID NO: 223884 - DNA, 999 bp, Homo sapiens
  chr10:99530982-99531981
  hyper
ctcttggggggttcgcagagctgtgctaggggagctgcagggccgtcggagcgcgcggggacggcggcggcggcgctacctggaggcgcggtggcgggcaggtgcccgaactgcacggcgatgcagaggtcgttgtccagggggaacttgtggcagtgcagcatctcaggccaggggaagccgtaggcctccatgagcggcgcgcagccggcgcgcacggcctcgcacagcgagcggcacgggtagatgggccggtcgagacagacgggcgcaaagagcgagcacaggaagacctgcgtatccgagtggcagcgcttggccagcagcggcagccagctgctcgcctgctgcttcacttcggccaggctctcgtgctccagcaggttgggcagccgcatgcgcttgtagcccaccgtgtggcagagcggcaggtcggcagggatgtcaaggcactgcggcggcttggagtaggagcggccgtgcagcggctcggcctgccagccatagtagtcgtactcctcgcagcgcgccggcgcccagtgcagcgcccccagcagcagcgccagcgcggccgtccgcacgcccccccccgccgccgccgcccgcatggctgcgccctctccaggtgcgcgccgcgcagccccccgacgctcggtgcccggcggcccaggtgttccggcgtgcgcccccggccctgactctacccagccgccgccgccgccgccgcggaggtcgcccaggtgggtggcagcctgcgctgcgggcgccccgactgatcctggcgcctcccacctcggggctccagcccgggcctcgccgtgcgccccagccaatctccggccgcctggccccagctccaaggcggggaggcagtgggggcggccctcagcccctcccgcaccctgcccgagcgtcccgcccagcgccaggtcttgcgcccctctcccggctcggctcccctgccgcagccctggcctcgcccagcgtttctccccaggg

SEQ ID NO: 223885 - DNA, 990 bp, Homo sapiens
  chr10:99790187-99791177
  hyper
accggtgcagatactcacgccggggtcagcgctcggagccatcctcccgctctcggccccgccgcctaggggcgtgggaagcgggcgctcgctgccgcctctgccgccggcgccgccgcctgcttgctcccagccccggtcccgggctggcctcgagcctcccgccccgacgccgcgcgctcgctttatacaactccactcgagcgcgcccggtcttatgtaaaggctggcggaggcccgcagccaatggcgcggcagctggagccgggggcccggggtggggggcgccggcgcggccaatcgcggccccgagagcccggagagccgggcgtggggagggagcgcctccccgcgctgatttaggagccgggattgcggtggcagcagccggcagccaggctggcccggcgcggcgcggcggccactggggtgggcggcggcgaaggcggcggcgagggcgggcgccccccgcgccccgccactgcgtcgcgtaaccttcaggcggcagcgaggcctggcgaggaggggagagggcgcctggctgggcgctgggggccccaggccggagggaagcgagggtccctcgggaggcagcgcagggaaggaacgcgaagggggaggggagggcggcgagccccaggaccccgcggccacccctgcgcgcaggaccgagggtggaggcgggagcggctgcactgccttcccatttccccccaggatagcgatctggcgtcgccgggccgggccaaagcggccgagcgagccgcgctgatggcgagatttcgactacggagctagagccgagccgatctttatccagcctggggacgtgtccgagcacctcccggggactgctcagtatggagagcagggctccgcgacggcccccgcaggcggggagcgggcgagcgcagctcggagatcaggcgcgcagaggcccaggcggctgcgggcagcgccgcttctaccccaccccgtccccaccagcag

SEQ ID NO: 223886 - DNA, 498 bp, Homo sapiens
  chr10:101294529-101295027
  hyper
acgaaacgcgcctccgcctgctaagggcgttctttgggtactggggctgtctcagggtcccacagcgccaggagccacaaacgttcccaaaagtccagccatttactaccgcacgctctgcgcagccaccaaaaagggtcacggtgctccaggacaggagccgcggtgcggccgggaacagctaaggacgctgttgtttgcttcttccgcagaaagctgccagctgaagaagtctctagagacggccggagactgcaaggcggcggaggagagcgagaggccgaagccacgcagccgccggaagccccgggtcctcttctcgcaagcccaggtcttcgagctggaacgcaggttcaagcagcagcggtacctgtcggcacccgagcgcgagcacctcgccagcagcctgaagctcacatccactcaggtgaaaatctggttccagaatcgcaggtacaagtgcaagagacagcggcaggacaagtctctggagcttgg

SEQ ID NO: 223887 - DNA, 720 bp, Homo sapiens
  chr10:101296612-101297332
  hyper
gagggtcgccagggaaaaggaagcctcgctcgcagtcccagctgttggccgcgcgaaggcggctccttccctggctgcagccagggctaccaacgcgcccgggggcgctgcgctgcgccccactgcggccgagctctcccccttggccgccctcccttctcccccggcggccgcggctttatgcggctccttgtcacttgcggagaatgcctgtgcgaggcctgtgctgccacacggccgattgtgagcgtgccaaggcgggtgaatggggaggcctcagagcgccgcgccattgtggggccgggcctcgctgaaaggcggctccgggccgggaaggtgcggaaagaatggctttttattggagtcccgaacaaaaggtgtggtaggaaggcgaggtcccctgcgcgaacaaaaaccccagcgcgtcggattgacgtcccccccgagctccccattgcttctcagagcgggggctttgtgcagcagtctgctcaacagagggacggagaaatgtgcgggggttttgttccccactttttgtgctctgggggagggggcggcagggggacgggggctgggcgggcagcagggaggggcgcgctgattaggccgggccggccggggcgctgagacgttcagcgggagtcggcggcctgaatgctgggtcattattgctacaagtttagcaatttctcccttacaggagggggtggggctgct

SEQ ID NO: 223888 - DNA, 384 bp, Homo sapiens
  chr10:102430677-102431061
  hyper
ctatttactcctgacaggatcgccgggggcacggctgcgagataaccattagcgcagccgccgataaagcggggaggctgcatttccaaaggctccgcggccattacgggaaagttagtgtgaaacatgttaaattatccccaaagtggagggagcgggggaggcggcgggggagcgggcgcccgagagagccacgagacccgccgcctccgccggggccgggtgactgcgccgtgcccgacacgccgacgtccaccagggggcggccgcgtgcggcccgagcctcggtctgcgggtccggaggatgggctggcggcccgagccttcctcgcacctgcgggcgcggacccacccgaggccgccggctccggctccggctccctg

SEQ ID NO: 223889 - DNA, 511 bp, Homo sapiens
  chr10:102483802-102484313
  hyper
gcgctcgggcgctccgagctgcgcggctccccggggagaccgcagacactttgcggagatgttactccggagttggagacgatgataaatatgataatttgtataaaatctgaatgggtcttgttttcagggagaatgccttggatgatgaatgggcccggctttcagatagatggctgataaaaagtgtattggattgttgagagcgattttaattctcattctgtacctgcagatgccgcggccgccgcgcccggcctcctcctccctcctgcccactgcgcggggcggacgccggcccggccggcctcggcggctcaggaggcttctgaaatgactctaattacagagttattaattttaagaggagggtgagcggggggtttatgattattaatcgagcgcccgagctcggcgggcggggcttggcgggccgcgggctagcggcgctcggagtgcggaggacgcgcggggccccggggcggctccaagcccggcgggctccgcggcg

SEQ ID NO: 223890 - DNA, 180 bp, Homo sapiens
  chr10:102508215-102508395
  hyper
ggcacagatgtccccgctttctccgaaactcgcgtgaggctagcggggcaggggctgcagcttgccagtccgggccgacccgactcggccgctagaagtctctgcgcttggattgctcagtacctgcggctacgggttgatcgctctgggtgcaggatttctagactgctgtaggccagg

SEQ ID NO: 223891 - DNA, 180 bp, Homo sapiens
  chr10:102508543-102508723
  hyper
gggggctgccgaggtctgaggggtcaaagggactcgagtcgggtttgggtcggctacacagggcgccccgagagttattaactcgccagcgaggcctatgccgtgccacctgggcgagacggtgggccccaaccaggctctgcgaggcgcggcaggcaggcgagcccaagcagccggcat

SEQ ID NO: 223892 - DNA, 180 bp, Homo sapiens
  chr10:102586056-102586236
  hyper
acaggagaaagggcgagggggaaacctggaggcctggcctttctcccgcagagggagggaggtagcttccgacgacggctcccaacccacgggccctccgctcaccgctagcggaccagcgggcagtccacctgcgccgcctccatcccctgccgcgtagcccacgcatccaacctcttg

SEQ ID NO: 223893 - DNA, 780 bp, Homo sapiens
  chr10:102586377-102587157
  hyper
cacccattaggggccatgcctcctagaaccggagtggcatctataaaggccctggcccccagcgcgacagggtggacgcgccccaatacaaacccttcgtgggtggccgcgagcgcctccgctgggaagccctgggcgggcaccggcccacaggtcccgcccgtgggtgtgcgagcgcgtcggtgcctcccgcctccccgggctctctccacgcggacgcggtgatcgccccacctccgcccggcccgcccgccacggccattaccctgcccgcgacacctgcgcctgagacccggcgggaggagcgggcggagaagccaccggccggactcgtggggtccgccctggcttgcaggcgtctgatccccactccccgaccctcccgcagggagcgagttctccggcaacccgtacagccacccccagtacacggcctacaacgaggcttggagattcagcaaccccgccttactaagtgagtacgccacctggctggccggcggctcagcgcggccgcgcggcttctgggcacggtcccactcccggcgacccgacctctggggacccggccgggccagggggacaggcttgttagtgcagcactgaggcccggggacccctcgaggacgcccgcacctcctgccctcccgtgccctccctggtcgctcgaaggctctgcgccgccctcgccctcggatcccctggagggtgcgcagccgggcgtcaccagatcgggtccctctcatgccccgtgaacgcaactattctccggggcaactg

SEQ ID NO: 223894 - DNA, 180 bp, Homo sapiens
  chr10:102802733-102802913
  hyper
tccgccttcccgctgacctcgatcctgcgccgttaaatccaccaagtccccctccctcctttccaatatcgaaacccacgaattccctagcgccagccctttgacttcctgcccaaaaatccgcgaggttttcgaggaatcacgcgaggactctcctcctggatcccaagcccaggtttt

SEQ ID NO: 223895 - DNA, 598 bp, Homo sapiens
  chr10:102822296-102822894
  hyper
agggtgcccgaacgcgctgatgccccgagtgctcgcagggcttcccgctaaccatgctgccgccgccgcggcccgcagctgccttggcgctgcctgtgctcctgctactgctggtggtgctgacgccgcccccgaccggcgcaaggccatccccaggcccagattacctgcggcgcggctggatgcggctgctagcggagggcgagggctgcgctccctgccggccagaagagtgcgccgcgccgcggggctgcctggcgggcagggtgcgcgacgcgtgcggctgctgctgggaatgcgccaacctcgagggccagctctgcgacctggaccccagtgctcacttctacgggcactgcggcgagcagcttgagtgccggctggacacaggcggcgacctgagccgcggagaggtgccggaacctctgtgtgcctgtcgttcgcagagtccgctctgcgggtccgacggtcacacctactcccagatctgccgcctgcaggaggcggcccgcgctcggcccgatgccaacctcactgtggcacacccggggccctgcgaatcgggtacgcatggcccggggcccccaccccagcactt

SEQ ID NO: 223896 - DNA, 120 bp, Homo sapiens; identical to SEQ ID NO: 202233
  chr10:102973524-102973644
  hyper

SEQ ID NO: 223897 - DNA, 180 bp, Homo sapiens
  chr10:102977137-102977317
  hyper
cttttgcgcatgcagatttacttcgctcattgccacataactcatccctaaaagccggcgcaggcgaaagcaggcgccgccggcggagccgctgccacagctaccgccgctgcccgcccgagcccccctcccctcctgcgctgcccgctcccagtctctccggcccgaattgtccgctcc

SEQ ID NO: 223898 - DNA, 180 bp, Homo sapiens
  chr10:102977427-102977607
  hyper
aggctggggccgcgccgtctggaccccaggcattgcgaccacgcatgtgtgtgcaccaccgagtgggcgcttgtgtgtgtgcacgctcacgtgcgcgcgagtgcacaggagtatggttgctagtgcgcgttcctgagagggcgaaggggcgcgtggaaaacgagctgatcaccatcctcc

SEQ ID NO: 223899 - DNA, 180 bp, Homo sapiens
  chr10:102977727-102977907
  hyper
acagagccagttccatccagccaaacggcctggagcactcagcgcccagccgggggaactgggaggcccaacacccggctgcagccgagcgcatggctggcctggtaccggtgagaggccgccagagaaagcgcaggcggagccgggggtcactgaacagagactttcagggtcgctggg

SEQ ID NO: 223900 - DNA, 540 bp, Homo sapiens
  chr10:102982461-102983001
  hyper
tctggtccctcagactggagtattacttatcggagctgcgtctgacaccggcccgacacctcgtaaaatagggaactgcgcctctctgcctcaccccgcgccgctcgccaggccaccaagccgggaaaggcggagcgaggggaagccgaacaagcgggatcggccgtccgcgcgcggaggggttcctagactggagagcagaaactacccgcgtcccgggacttggcaagccccgtcgagccccgggacacaacggggaagggagagacaaagccgagccgcctctcctggccagcccggaaccgaaagtgggtccgtagagagcccagagtcctgggggaacagatgggcaaagggctctaggaggtgatggaactcaggcccgaagggcaggcagcccacaggataccaagccttaacgaactacgccagaagaatgggcgtagggcccacagcccctcacacaacccaggccaagctccctcgtacactcagaccaggagaagaaacagacacgcaatacacaagccccgctccctt

SEQ ID NO: 223901 - DNA, 821 bp, Homo sapiens
  chr10:102988115-102988936
  hyper
ataagcagctgctcaggctggaaggccctggcggccggagagggcagaggcgagcagaggcataggggacgaagcgcgcagggcacagggcgcgaggcgctgggtgcaggggaacccagcagctgcgcctaccttcggctgcctgcagaacgctgacctccagccccttaaacgtcttgctggcgagctcctccagcgcgcacagcggcgaggtctgcgagagcagcgcgcggcccgccaggggcaagccgccctgcgcgtgcttgtccgcggcggccagcaggtgcgccgccccgcacagcgagtaacttctccgcacagacggcttgttgaggatgtcctcgatgctgaacggcgtcagtggcttgttggagttggcaggcggaggcaggtggtccagcgggctgcgccgccgctcctcccccggcgccgccttgccgtcctccttggaagtcatctcggccttgttcggggtcccggccggggcggctcgggccgcggggacccagcccgcgggcagctcgggcgccggacggcgcgggcaggcagcggcgggtggaaaggaggccgcactgggcagggcgcgggccgggcgcggggccgattagcgcggcggctgaggaggggagaacagcgcggggccccgggaagagggcgctgacgcgggcgccgctgctgctggggcttccagcaatccggggccggagccggggcgcgctgcgcggggctccagtttcgccaaccccggtgctatttaaaggtgtcaggtggctcggcagtggctcctggccccgggtcctggcggccgcagttggaagagc

SEQ ID NO: 223902 - DNA, 282 bp, Homo sapiens
  chr10:102989956-102990238
  hyper
gctccccaggctggctggggccaccaacggcctgatgatgggcgtctgaagagtagccaggccaggtgccggggctaacggggccggctccgtgcctccctgctgcgctccgcccgggccccggccggggccccgctgccggccccgcctagcccagcgcccggcttgagtgcatggccaggccgactccagctgttccggatgcggggcgggggcccggcgggagccaggccgcggctggggctttgctctcaggaactcgcagggaggccaggcttccag

SEQ ID NO: 223903 - DNA, 444 bp, Homo sapiens
  chr10:103051150-103051594
  hyper
acagaaggacccttcgcgcaggatgtcccggagactcgtccacgctccctagccgggctgcgaaggcccagatctcccagcgcctccatgccgcgtcggccgcggccttgggggtcttccggggacagtggccagccctgggccggtgacctagcctttgggcgcttccccggggctctagggtcccagggcgccagggccaacaccaggaaagccagaaggttccttcctttggggcaggagttggggggagtcgccgtacgcccaccctgccacgcgggaggcctccgggagagggcagagggcgccgggcagggaccaatcatcggcggcgaccggtcactcgcgccccagcgaggagaccctgagatccgcggggagagcacagggtcgcgccgccccctggcggctcaatgacagagttgaggcccggcggctggcgac

SEQ ID NO: 223904 - DNA, 202 bp, Homo sapiens; identical to SEQ ID NO: 202237
  chr10:103348788-103348990
  hyper

SEQ ID NO: 223905 - DNA, 137 bp, Homo sapiens
  chr10:103535381-103535518
  hyper
gccctcagccctcccgcgccggccgcagagtcagtcccggtgcccccgaccggcgctgcccacccgggtctcacaccggcgcgcccggcccccgcctccgcgcacccctcctcacctgggcttggaggcagaggacc

SEQ ID NO: 223906 - DNA, 180 bp, Homo sapiens
  chr10:103535702-103535882
  hyper
ccgcgggccgccgcgggaggacgcgctgagcagggcgcgagcggagagggtgcgggtgcgggaggccggcggcgatcacgacgcggctccgcgggtcccgtggaacgtcgtgctcgccgcgccgcaccgaatcgctgtgcgccgctgccggagccggtggccgctggctgctcgggagcc

SEQ ID NO: 223907 - DNA, 300 bp, Homo sapiens
  chr10:103536080-103536380
  hyper
gggttcgggattgagggtctgggctaggggaggggtctggggacccgcgggaggggcgggggcggccggtctgggcgcctccccctatccccggcctgtcccctcgcgcgctccccggtcccggacgcgcggggatgggggcgcctagggctgcaaactctgcgggccgggagaccccgagcctgggcttccccgaccgcctggagcgcccgagtctggcgggtctgggtctccgcctccgggcccagccgcttccgccgccggctacgcagtggtctccgagccacctactgtgtgtcc

SEQ ID NO: 223908 - DNA, 370 bp, Homo sapiens
  chr10:103985871-103986241
  hyper
gggtggacgttttacgggagaaaaggctggggaagtgggcgggcgatggcctacgacgggacttggggcggggtgtgcgaaacgcctggcaggcgggcccttgagtatgaccaatcagaatgcggactgcgtcccaggggcggagcagaggcgtatcttggtcgagattggatagcggcggggcgcaggaaagaggtcgcgccagcccgggcaggcagctttgcaagtccgcgttatatatcgcagtggctgcgcccgggatagctggctgcgccgccgcgcacatgcctaggttcgacgccctcctccctttgcccaggagttccttctgtcccggctctgttccgtctcgccccgaggttcacgccat

SEQ ID NO: 223909 - DNA, 600 bp, Homo sapiens
  chr10:104170178-104170778
  hyper
cagcgcagcagcaccgggaaggtctttttggctgtccacgcggcgggggagcagtgtggagtgtacccccatccaatccctgtcccgtgcagggacccccgcaactcccgccttccaccccagcgcacactggaggaggggaactgaaggcaaacgcaggggccggggccgcctgctcgcgttttccagagccgggtcccctcccccgccgtgcgcagtcgcgaccgcacgcatgtgcgcatgttccgggagagcctgcgcgtggggcctggggagggggcggtccccaggctgagtcacgagagcccgggcttccgtggcaggagccgggggtcggcaagccccagccctgccctccctccgactctggactccgtcgccgactgggtcctccatccttcccctccagcgacttctaccctgccccgccccccaccttgagcagctccctagggaagtcgccgccatcattgaggccctccaggttcccgatgaagtccccgcaggtcatgcgcttcccgatgttctaaggaagggaacggaggcctgtgagtttggagggcccttggcctcccaggtcctgcatgtctggccaggggt

SEQ ID NO: 223910 - DNA, 1365 bp, Homo sapiens
  chr10:105036451-105037816
  hyper
taactggaaaaacacgacctcgccctcgggaaggctttctgtgcgcctcacctcaggatgagggtgggtgtaggggacacctcccagaaacccctaacctcccagtcggttaaagaagaggggatagggtcaagggatgcgacagagctgtgtggtttccggatgggaaacctcagtcgtttaggcacccctccgctcgagtcacttccgaagcagtcgattcttggggagaagcgctgcggaaaggggcgactccgatgcagatggccctgtcccggcgccccaggtcgtcgcgcgcgcagctgcggtagtcactgcgcctccccgcccccactcctggatgccccccttccctctcccggccagactctgagcaggagctccgcccccagcgcgccgccccagccccggcgccttaaaagccgggcgcaccgccccgccgcgccctgcctgccgcacctctcctttcttctgtagctcgcgttgaagccgcacgtccggccccgatcccggcaccatgagcttcggctcggagcactacctgtgctcctcctcctcctaccgcaaggtgttcggggatggctctcgcctgtccgcccgcctctctggggccggcggcgcgggcggcttccgctcgcagtcgctgtcccgcagcaatgtggcctcctcggccgcctgctcctcggcctcgtcgctcggcctcggcctggcctatcgccggccgccggcgtccgacgggctggacctgagccaggcggcggcgcgcaccaacgagtacaagatcatccgcaccaacgagaaggagcagctgcagggcctcaacgaccgcttcgccgtgttcatcgagaaggtgcatcagctggagacgcagaaccgcgcgttggaggccgagctggccgcgctgcgacagcgccacgctgagccgtcgcgcgtcggcgagctcttccagcgcgagctgcgcgacctgcgcgcgcagctggaggaggccagctcggctcgctcgcaggccctgctggagcgcgacgggctggcggaggaggtgcagcggctgcgggcgcgctgcgaggaggagagccgcggacgcgaaggcgccgagcgcgccctgaaggcgcagcagcgcgacgtggacggcgccacgctggcccgcctggacctggagaagaaggtggagtcgctgctggacgagctggccttcgtacgccaggtgcacgacgaggaggtagccgagctgctggccacgctgcaggcgtcgtcgcaggccgcggccgaggtggacgtgactgtggctaaaccagacctgacctcggctctgagggagatccgcgcccagtatgagtccctggccgctaagaacctgcagtccgc

SEQ ID NO: 223911 - DNA, 817 bp, Homo sapiens
  chr10:106097223-106098040
  hyper
tttaccttcctggtcggtggctttttttttctttttctttttctttttttaagagaaagcgttttggatggggagtcccgccccgggagtcttcaccaggcggccagaatggcaaagtcacagggatggggttgagggtggggttaggggtgaaggggcagagagttatttgcagcccaagagcaagtctgcacagcgtgaggtctggcccactaatagtcccgaaagaggaagcggcggggattttatccggcctgaagcagccccataacttcactaccatgaaccgagaaaaaaaaacttcacgcctattcctcccttacaggaagggagggaaggggaaggggaaaagggggcagcaaatgagcagggcgaaccggcttttctttcttcggtagcgctctgctcagatgtgagaagtaacgggtcacctggccactaggaacaaaaatgtggtcccgctctgggctccgaggctgcgcgcgcctcgaggaggagctgcccgcagccctggctggagcgagcgcccgggacgcatcccccgacgcggcgggaacaggatgcgggaccgcgaggagacaatacgcccgcctgggcacgcgcgctttaagggaagggggtctccaaagtcagcccccacccgggaggagcaggcgcccgcgctccccacaccctcctgcgccccctctgtcggcagccatctccgacacagctcctccgagctcgcgctctccatcgcgcccttcttccttcagcacactaggctgccctgggacttacgattggcttgggtccccggtcccggtccccgccgcgg

SEQ ID NO: 223912 - DNA, 180 bp, Homo sapiens
  chr10:106098388-106098568
  hyper
actggagagtgactgggagagacggaatcaggccagtggagtaaactggagcgagtggacaggggcgcggggaggacgcccttaaaagtcgtcctaagccgcggagcggaaggggttaagtccttaccagtcggggagagttttctgcggcgcgttttacaagtggcggaattcctgggg

SEQ ID NO: 223913 - DNA, 102 bp, Homo sapiens
  chr10:106098946-106099048
  hyper
ttttatgataatcaaatgcatggttgcttttctccgggattaaccgggcacaaaggagaacagtgaccggatactgtacgggacaggcgcggtagtttctgg

SEQ ID NO: 223914 - DNA, 180 bp, Homo sapiens
  chr10:106113454-106113634
  hyper
ctcctcccctttcgaattcccgctagcgcccctagagggcgtgtccgttgccaggcgacgggccgacgcgccgagcgcgggtttccgctcggggcgggcgatagagacagcgcgtcgcgcctttagcttctttcccagactccggcccagctcctgcgatctccacagcagcctctgagg

SEQ ID NO: 223915 - DNA, 104 bp, Homo sapiens
  chr10:106113712-106113816
  hyper
tgtccctctcctactgacgattgtcacaaacggtgattccaatatttccccccatcaacatcttattcccctgcaccctcactcactcccgcgcctttctccgt

SEQ ID NO: 223916 - DNA, 180 bp, Homo sapiens
  chr10:106399509-106399689
  hyper
ggtcgtctgtgggtttagctcatttcccttcagcccacctgaagtctccttcttcctacggtcacgaaggatctcagctgcaccaagcgcgcaggctacactcctgcagtagcggattggggaccagataagcccacgcggctcccgcctgagtaccctcttaactggcggccgacactt

SEQ ID NO: 223917 - DNA, 900 bp, Homo sapiens
  chr10:106399800-106400700
  hyper
ctactctctcgccccacctctggccgggaggtcggggcaaggagaatccctcaaccgagaagatctggcaagtccccgatcccaccggggccttccgcctcttttccctcatcccctaggaggctttatcaggttctaaccgcttgtagtgggggccgtgggtgctcggggcgccaagaggagggggctgccgagagcggcctgcctagttctcagcattgcctctttgaccactcgcaggctcctggaaatgcaaacacagcccgtgcgtgatccgcacgcgaccaaaagccgagcgcacacctcccgcccccgccccacttgccatcgctcacactaacgtgcacacatgctcgtgcaaacgcgcacgcacggaaccgcgcgccccctcacacccagccgcgctcccggcccggctcagccaggtgcccccacgcggcagcgcccggtctgcccgccggccccctgcgaacccctcgcctcacgcccgcctgcctgcgcgcacgcacgcgcacgcacgcattccccacgcccccgcgcgggggcgcaggccttgggtggcggggtttggccgggagccggccgggccagggagcggcgagcagagtccagggtgcatcccgcgcttggcttccgtgcgcagcctccccgcgcggaggcacctggctccctctcggctctagaacgcgaacagttggcgttgagcacacaactcctcctccttctcccccgagacccctgtaccctccccgcgcgccatctcccgcccctcataacaggcccgaagagtaaacccccaaacgcgtccagaagcggctcccaactcttcgccgggagcacgttggaggctggatttcggagagactcgggattggggtctattgccggcccctcctggat

SEQ ID NO: 223918 - DNA, 720 bp, Homo sapiens
  chr10:106400796-106401516
  hyper
ggaatctgattttaagaaagaaagcaccgaaggggcaattattaattttcctcgggtttggaatcaccctctggacaagagaacgggcgagcgggagctaggagggaagagtggagaggaccggcgaggcgcgccagccggagccacctccttcccggccgccccctccccactccccctacacacacacgctcgctcgctcgccggcgcgcgcacaccccccgcgccggacccgcacctcggcgggcgccacacactcggcagcccgagccgcggtagccgcagcgggatggaggcggcgcgcacggagcgccccgcaggcaggccgggggcgccgcttgtccggacggggctcctactcttgtcgacgtgggtcctggccggcgccgagatcacttgggacgcgacaggcggtcccggacgcccggcggccccggcttcgcggccaccggcgttgtctccactctcgccgcgggcagtggccagccagtggccggaggagctggcgtcggcgcggagagccgccgtgctggggcgccgggccggaccagagctgctgccccagcagggcggcggcagaggcggtgagatgcaggtggaagccggagggacatcaccggcaggcgagcggcggggccggggcatcccagctcctgccaagcttggcggcgcgaggaggagtcgccgggcgcagcccccaatcacccaggaacgcgggga

SEQ ID NO: 223919 - DNA, 710 bp, Homo sapiens
  chr10:111767172-111767882
  hyper
agccccagcagccagcgtgggcggccgaggctgactcaaagcggcggctcagcctcgggagtaggagtagggggctcgctcatttagggcgggagacatttccgaggcgcccctcctccccttcgcggtcgggtttctatcggggtcgtttccccctctggccctccggggacgccgcggattcgagctgcacagtcagaagaggacgttgaaaaggcgccaggcagccgccccgaaccaggccctcccggctgccgggcctgcaggcccccaccgctgcggcttcacggacttagagcttgagggcgcggagggggctgcgggggcgggaccaggactcccgaggggcgctcggggcggggccagagagagctcggggctgccagaggcgaggtcttgaggaggcggggccgggaggcttcggagcccaagaggcggggccagaggcgtagggggctgcgaggggcggaccttgggggcgtgaccggggggggcgcttggggacctaggggcggggcgttagggggcgggaccaagggacgctcgaggggcgctcggctagtcccgccagagcgcgagccgccagcccgtaacggtcgccagtgtgaggggcgggagggaaagaagaggggtttaaattagattttttaaaacacagagcaagcgccagaggcgtcggcatcccaggtgtcgccgcttcctgctgcaca

SEQ ID NO: 223920 - DNA, 272 bp, Homo sapiens
  chr10:112327397-112327669
  hyper
tgcaaggtggttccgtccgaggcgcggactccgcccccacgagcgccgccattttgtttggctgaggggagcgagcggcgctttgggggaggggtcgcgtaggcgcctcacctgaccctgcggccgtgcggttgctgctccggggcaggtctccttccaggccaggggcccggaatcatgtacataaagcaggtaaggccttcgcgtccctccaccccgtcatgggccggtaagggccgctccttgaggcgggagtgttgcggcgccacccg

SEQ ID NO: 223921 - DNA, 76 bp, Homo sapiens; identical to SEQ ID NO: 202262
  chr10:112328695-112328771
  hyper

SEQ ID NO: 223922 - DNA, 39 bp, Homo sapiens; identical to SEQ ID NO: 202263
  chr10:112333464-112333503
  hyper

SEQ ID NO: 223923 - DNA, 68 bp, Homo sapiens; identical to SEQ ID NO: 202264
  chr10:112335093-112335161
  hyper

SEQ ID NO: 223924 - DNA, 72 bp, Homo sapiens; identical to SEQ ID NO: 202265
  chr10:112337178-112337250
  hyper

SEQ ID NO: 223925 - DNA, 80 bp, Homo sapiens; identical to SEQ ID NO: 202266
  chr10:112337592-112337672
  hyper

SEQ ID NO: 223926 - DNA, 79 bp, Homo sapiens; identical to SEQ ID NO: 202267
  chr10:112338385-112338464
  hyper

SEQ ID NO: 223927 - DNA, 118 bp, Homo sapiens; identical to SEQ ID NO: 202268
  chr10:112340661-112340779
  hyper

SEQ ID NO: 223928 - DNA, 176 bp, Homo sapiens; identical to SEQ ID NO: 202269
  chr10:112341680-112341856
  hyper

SEQ ID NO: 223929 - DNA, 81 bp, Homo sapiens; identical to SEQ ID NO: 202270
  chr10:112342319-112342400
  hyper

SEQ ID NO: 223930 - DNA, 165 bp, Homo sapiens; identical to SEQ ID NO: 202271
  chr10:112343141-112343306
  hyper

SEQ ID NO: 223931 - DNA, 122 bp, Homo sapiens; identical to SEQ ID NO: 202272
  chr10:112343598-112343720
  hyper

SEQ ID NO: 223932 - DNA, 214 bp, Homo sapiens; identical to SEQ ID NO: 202273
  chr10:112343940-112344154
  hyper

SEQ ID NO: 223933 - DNA, 387 bp, Homo sapiens; identical to SEQ ID NO: 202274
  chr10:112349362-112349749
  hyper

SEQ ID NO: 223934 - DNA, 161 bp, Homo sapiens; identical to SEQ ID NO: 202275
  chr10:112350169-112350330
  hyper

SEQ ID NO: 223935 - DNA, 142 bp, Homo sapiens; identical to SEQ ID NO: 202276
  chr10:112350748-112350890
  hyper

SEQ ID NO: 223936 - DNA, 151 bp, Homo sapiens; identical to SEQ ID NO: 202277
  chr10:112352830-112352981
  hyper

SEQ ID NO: 223937 - DNA, 153 bp, Homo sapiens; identical to SEQ ID NO: 202278
  chr10:112356155-112356308
  hyper

SEQ ID NO: 223938 - DNA, 152 bp, Homo sapiens; identical to SEQ ID NO: 202279
  chr10:112357896-112358048
  hyper

SEQ ID NO: 223939 - DNA, 159 bp, Homo sapiens; identical to SEQ ID NO: 202280
  chr10:112359411-112359570
  hyper

SEQ ID NO: 223940 - DNA, 108 bp, Homo sapiens; identical to SEQ ID NO: 202281
  chr10:112360196-112360304
  hyper

SEQ ID NO: 223941 - DNA, 109 bp, Homo sapiens; identical to SEQ ID NO: 202282
  chr10:112360779-112360888
  hyper

SEQ ID NO: 223942 - DNA, 542 bp, Homo sapiens; identical to SEQ ID NO: 202283
  chr10:112361394-112361936
  hyper

SEQ ID NO: 223943 - DNA, 817 bp, Homo sapiens; identical to SEQ ID NO: 202284
  chr10:112362231-112363048
  hyper

SEQ ID NO: 223944 - DNA, 404 bp, Homo sapiens; identical to SEQ ID NO: 202285
  chr10:112363988-112364392
  hyper

SEQ ID NO: 223945 - DNA, 862 bp, Homo sapiens
  chr10:112403651-112404513
  hyper
atgcgcgcggacgtcccgggcgcgctcggtccgcccggcttggcaggagctgcgagaggccgcgcgcaccgtccccagggacagccggaggactcagggctcccgggtggagcgagagcgcggcggccgaccgcgggctgcgtgtgtcgccttcctcacgcggtatgctgcgccgtggaacgctgggctacggaccctgagggtgcactgtggcgggtggcgtacgccgcgctccctccccgcttcctgcgcccagggtcggcgggcagagttcctgggtccagcttggcgctgagcagcccccggccgcagagcagctcccgccggtcgggagacgccccctggcccccgcccccgcgtggccggccgggacgagctggagcagcgggaggaggcggcgccgccaggactgcctcctccccgcccctcgcgtctcctccccgcgccaccgggaaggacaaggggactgggcacggggaccccggccagtgagcgcccgtggcccgggaccgcccctcccttgagctctctcgccgcgatcccgggcgggtctcgccccgcatggtgctggcagcagccatgagccaggacgcggaccccagcggtccggagcagccggacagagttgcctgcagtgtgcctggtgcccgggcgtccccggcaccctccggcccgcgagggatgcagcagccgccgccgccgccccagccaccgcccccgccccaagccggcctaccccagatcatccaaaagtaagaagggagaagggaacagggaccacgggtgcgcctggggacacgccccgagagccccctttgtggcttcatttcccgtccctgctgaacttcgctcgccccccttg

SEQ ID NO: 223946 - DNA, 631 bp, Homo sapiens
  chr10:112431815-112432446
  hyper
actcttcttcctatcttgtccgatgacggctctcggaggctcctggttttgatgtctggcattgcttttacccggtgggcttcagggagccgtccctgccgcgctttgcgtttctccgcgcacttggacagggttctgccacgagggaggcgatgcctggcgccgcgggtgggggcagtggtgagacttcggcccctggtggccggagaggtcgcagcacttgtcagtttatggctccctcggctttccccttcttaatccgctttctgctgagctctccgaataattcaaccctcgtgtttgaaaactagaagcctgagaggtctcagcgagacagtcaaaggggaggctcccctcgccgagtgtcacccgggaccctgcgtccccgctctgcagagaccttctctccgggctgctgccgtcctccctcgcccggcggagcttccgtgatcgtcagccaaagcccccggggcggtgcgccgcaggcggtcttcccgggtgttcgcggaagctgcgcgctcgcgcccccacggttctccagcgacccctgaagatgcttccgtccgcggataggggacgtttcagacctggggtgggcacagcggtccccggtgagatggtcttttctcct

SEQ ID NO: 223947 - DNA, 39 bp, Homo sapiens
  chr10:112838326-112838365
  hyper
cggcggcggcggcccgcagccggccgagccgcgctgcga

SEQ ID NO: 223948 - DNA, 33 bp, Homo sapiens; identical to SEQ ID NO: 202295
  chr10:114709864-114709897
  hyper

SEQ ID NO: 223949 - DNA, 56 bp, Homo sapiens
  chr10:114710115-114710171
  hyper
actcactcaaatccgagcggcacgagcacctcctgtatcttcggcttccccccccc

SEQ ID NO: 223950 - DNA, 105 bp, Homo sapiens
  chr10:114710845-114710950
  hyper
aacttgtaaccctgtttttttctacccccccctcgacctcgccgattctttttctcccccttctcccccttctgcgtggcgtttgcccctcgccctccccacctc

SEQ ID NO: 223951 - DNA, 46 bp, Homo sapiens
  chr10:114711334-114711380
  hyper
ccaacggatcgctctcgcccaccgcccgaaccgtaagtgcctccgc

SEQ ID NO: 223952 - DNA, 822 bp, Homo sapiens
  chr10:114712054-114712876
  hyper
cttcccagattggtcccaccgcaaacttgggggctctgaggcgtccttttctttggcaacccgcagggccgcgagcgccctgggcgccgtggcgggctccgctgcccggcgcactggctgcgggctctcccgggccgcgcagggcagcagggctgagtggggcggggaggcccctgcggcccggattcttggtttgtgtgcagccggaatggactcctccaagcggacttgtgtatttctagggaattttggcgccttgggatgtatggcggggtcggcgctcgccagcttccgtgtaggcccgtcgtgggccccaggggggccagagaccagggtgtgcgggctcaaggaggtgcgggggccgagggaggctggggcgcctctccttcaagggagtgggccgccgatcgccggccacccaactttgggggccccagggcagcgcggggtgccgggctcggggggcgcttcctgcagggtcggtcccgcgcccaaccctgacatttgttaatacggctcatcccctcccccaccggcctgtgccccctgccctcaccctgaaccccctcctcctcatccctccctccctcttctaagaagcctggattacgaatccctggacgcaagacgcatttgtgcccggcttcccggtattgtcattttacaccttctccagtttggtcccctaccccttatttacacacacgacttttgttttttctttttcggtaactctagatagcaatttgaaataatgcacccactgttcagcagccatggattcggtgctaatggccgagggcttgccggacgggagtcgat

SEQ ID NO: 223953 - DNA, 900 bp, Homo sapiens
  chr10:115804427-115805327
  hyper
gtgcaccgtgtgggccatctcggccctggtgtccttcctgcccatcctcatgcactggtggcgggcggagagcgacgaggcgcgccgctgctacaacgaccccaagtgctgcgacttcgtcaccaaccgggcctacgccatcgcctcgtccgtagtctccttctacgtgcccctgtgcatcatggccttcgtgtacctgcgggtgttccgcgaggcccagaagcaggtgaagaagatcgacagctgcgagcgccgtttcctcggcggcccagcgcggccgccctcgccctcgccctcgcccgtccccgcgcccgcgccgccgcccggacccccgcgccccgccgccgccgccgccaccgccccgctggccaacgggcgtgcgggtaagcggcggccctcgcgcctcgtggccctgcgcgagcagaaggcgctcaagacgctgggcatcatcatgggcgtcttcacgctctgctggctgcccttcttcctggccaacgtggtgaaggccttccaccgcgagctggtgcccgaccgcctcttcgtcttcttcaactggctgggctacgccaactcggccttcaaccccatcatctactgccgcagccccgacttccgcaaggccttccagggactgctctgctgcgcgcgcagggctgcccgccggcgccacgcgacccacggagaccggccgcgcgcctcgggctgtctggcccggcccggacccccgccatcgcccggggccgcctcggacgacgacgacgacgatgtcgtcggggccacgccgcccgcgcgcctgctggagccctgggccggctgcaacggcggggcggcggcggacagcgactcgagcctggacgagccgtgccgccccggcttcgcctcggaatccaaggtgtaggg

SEQ ID NO: 223954 - DNA, 505 bp, Homo sapiens
  chr10:116527400-116527905
  hyper
actgcagctttaaatcgtgctgcctcaagccctggatttcttccatagccgagctgcaaaatggtaactagaaaggaggaaaaaatacctcttcctccctcctggccagcccttccacagctcccggcagggcagccagcgcgagcccatcccccacgcctcccagcccagacgcgcggcgggcacaggtgagcggggcgccgactttggcccttaggctcgcccacatccggggatcaaggtcaagggcgagggcttccttcccctgcccccggcccccggcagccccgagcccggggatccgctgccaaagtttcaggccgggctggggccggcgcggctgtcgcagcccccccgccctcccgcacctgttcggcccgccggggtcagtggacggtgcccacctggtccccactcacctctggcggacatggtgcaggcagcgggagccggagctggaaggcgttggacagccccgcagggcgcggggaagaaggcagccccg

SEQ ID NO: 223955 - DNA, 576 bp, Homo sapiens
  chr10:116852172-116852748
  hyper
tgaaaaaaagccccgatgctgcaatatttttcaaggcagaatatcgtcccagatggaggagggagcactgacaagcagaaaaggagagacgtgcggtttcgaggcagcgtctgtaaggggtggagagcgcggggctcggagcctcgcagttctttgttgggggcgcgggcttcgttattcccgaggcagcaatggctccccctcggaggtccctccgcggagaccgcctcgcgcctctcgcagtccccaatccccgcccctcccagccctcgctgaccccacaacgtggtcggactgcggtgcctttaaggcttttgcctgctgcacatgctcagctctttgtgtgttgttggagtttttctctcttaagagaaaaagaagaaataggcaggaggatggggcggaggaagggggaagcgctagggaaaaagcgttgcacttttgcagctgcagacggcggacgggaaggacttcttttctgctgaagctgcgaagcctgtgtcgatctctcattcgtggggctcccggggcgcggggtgcgggtggggccggggtgcccgcaccggccggggggaa

SEQ ID NO: 223956 - DNA, 180 bp, Homo sapiens
  chr10:118764302-118764482
  hyper
gagctgcggggcctgactagccccgacactccgcgttatcctcggtccagagctttcccaggcgcgccggccacggaggacgcttctctgcgggtgacggagctactgcggtgaccacggcggccgccacgtctcccgcccggcttccaactgccctggccccagcgccctggggccgtc

SEQ ID NO: 223957 - DNA, 141 bp, Homo sapiens
  chr10:118764980-118765121
  hyper
gagttcagagaaaaccggctgtgggttcgcagcgtgtgtgggaactccactttggacgcttcccgggggtcgctcccaaagaaccacagaggtagagcgggacgcaatgagccatgaacgcctgggcttcttccctagttt

SEQ ID NO: 223958 - DNA, 798 bp, Homo sapiens
  chr10:118896284-118897082
  hyper
cggggtgcggagcgcgaccacaaccaggtagcaaagacactgtgtggagggcaaggggcctaactccataccgctgaccgaaggagggaccacactttgtctttttgtagagtcctccagacaggggagagaaaaaaatccaatcaattccacataggcggacgtttcttccggcctgggggggcctcggctgagccttccgggtcccctgtagcctgagggtacccttgtcgccccgcccgggtcctgcgggccccagctctgggcttgccgaccagaccgtgatccagacgtccccacccccaccctcgagtctccttccctccggagtccgcgcggcggaaggaggagggactgagtcggggccggccgggcccggagatctgctgctggctggggcggcgccgggccggggcccggcctcgcagcctccgccgccggggctaagtgcacgccgcgccatccgagagcggcagagcagagcaccaaagcggcaaccgcggctccgtaaccaagcccagctgcctctcccggcggcagcggtcgggcaccgatcgcggccgtggggtcctcggcccagtgcactaactggcagggccgtagcccgcgatcggcagctgttctccggggctcgcgttcccccttgggtgcgctcagccctccagagcgcgggagtcccctggccggctcccggcaggtcgtccggcccttggagcgcgcacacctcctcccggagttttctgctcctttcccgggtcggaggccgcagcccgatgcccggccgcacccgcgcagccc

SEQ ID NO: 223959 - DNA, 480 bp, Homo sapiens
  chr10:118897582-118898062
  hyper
caaaaacagaaaggaaaaaaaaagcaaaaaaaaaaaaaaggggggggggcggagaaggaaaaaaaaaagaggaaaaaggggacaaaacccccgacaacgcggcccgtacgcccggcccggcgacaggcaaggggcaagaatgaatgtccccgcggggaggcttcggcggccgcgcgcgggtcagcggcgacgggagagtggcgcgctcgccgagaggcggccagtctggtccaggatcctggtggagctgcggcgaggccgcctcgtcagcacccgcgtcctctgagcacgtccagtgtccccagcctggcgatcaggtagcgaacagcgcaactccgaaatgctgcggctcccgcctgtttctgagacggcgagttgtagttgtccgacacccggggggacgcacactcgctgttgcaattgattacgggtaatttcgcagcccccacgtttcggttacctcatgaatacactaaattg

SEQ ID NO: 223960 - DNA, 1186 bp, Homo sapiens
  chr10:119000427-119001613
  hyper
aaggcactcggccacgcgctgggtccggggaagaggcgcggccgcggccgaggcggggacagggaggcggcagcccctcctgcgcagcgacggcgcgggcgggcggaggccggggcgccccagccccccgcccccgctccctccggccgtgacgtcagagccggacggggtaaactgagcggcggcggcggggcgctggggcggagactgcgacccggagccgcccggactgacggagcccactgcggtgcgggcgttggcgcgggcacggaggacccgggcaggcatcgcaagcgaccccgaggtaacacggccccggttccctgctcgcagggcgcggtgccggaggggagcgggcccgggggaggcagggaggcagggaggcccccagagctacgcgggcggggctgcggggaccccggggcagccggggcgcagggcgcagggcgcaaggtgcacggggccgagcgtgcagtttgggaggtggcacagttgggggcggcggggatcagggcagcgtcctgggggttctaggttgggtctccagattgggtccccgacggcgctcgcgggcgctctttccagggagcgcgggctctcgtggggacgcgctcgaggcaggtgagccgaggctggggcgcccgggggtgtccccggatgccggtgcgcgcggctccctgacccgcccttccgcggcctgggggacgggagaatggggggtccacggccgccttgggtcctcaccgcgcaccgcgcccgcagcggagccccggagccatggccctgagcgagctggcgctggtccgctggctgcaggagagccgccgctcgcggaagctcatcctgttcatcgtgttcctggcgctgctgctggacaacatgctgctcactgtcgtgggtacgtgcggacagggcacccctgccccggcaccccagccccagcgccccttccccggcactccacttacccctgcgcggtcccggagctccgccaaggcccgggaaagttggagaactcgctttgcaaaaaagacatcccctccaggctgccgcgccggggctaggaggagccgcgttgtgtggcttcgctttcctgatgctcgggtcaaaaactgtgacatccgataagacccagaacttatgtttccccctgataatttcccgcatcctcttgcctgctttcact

SEQ ID NO: 223961 - DNA, 144 bp, Homo sapiens
  chr10:119256210-119256354
  hyper
ggattttccagcaggtggcagccgacgcacgccagagacagctgggcgcctacactttgaactcaaggttcttccaattaagtgcaagataaggagcttggagactcatcgcgtttggcttactcctgacgcagacttgcactg

SEQ ID NO: 223962 - DNA, 826 bp, Homo sapiens
  chr10:119302473-119303299
  hyper
aaaattaccccaatccacgcctgcaaattcttctggaaggattttcccccctctcttcaggttgggcgcgtttggtgcaagattctcgggatcctcggctttgcctctccctctccctcccccctcctttcctttttcctttcctttcctttctttcttcctttccttccccccacccccacccccaccccaaacaaacgagtccccaattctcgtccgtcctcgccgcgggcagcgggcggcggaggcagcgtgcggcggtcgccaggagctgggagcccagggcgcccgctcctcggcgcagcatgttccagccggcgcccaagcgctgcttcaccatcgagtcgctggtggccaaggacagtcccctgcccgcctcgcgctccgaggaccccatccgtcccgcggcactcagctacgctaactccagccccataaatccgttcctcaacggcttccactcggccgccgccgccgccgccggtaggggcgtctactccaacccggacttggtgttcgccgaggcggtctcgcacccgcccaaccccgccgtgccagtgcacccggtgccgccgccgcacgccctggccgcccaccccctaccctcctcgcactcgccacaccccctattcgcctcgcagcagcgggatccgtccaccttctacccctggctcatccaccgctaccgatatctgggtcatcgcttccaaggtacgtgccacgtcgcggaactgcagcgcgccgctcccgccgcatccttcactgcccccggcctgctccgggtgggcgcttggcaaggcctgggcggaggttcctccggctcgcg

SEQ ID NO: 223963 - DNA, 332 bp, Homo sapiens
  chr10:119312662-119312994
  hyper
tgtcgttccagcagcgccccactaactccggagtttggcaaacaacagccgttttgtgtaactgcgcatttttctagaccagtctttattattccagcaatcagcgctggaattactggggcgccgcctagaagcaaccgccggcggggcggcagaggatgccggcctccagcgtcgggggaccgcgcccgaaagccgggctgctttgtggggcctctcgcgcctcgcccgcagcttccggcccgcgccctccgctcgaccgccgattttctcgccccagccagccccgtagccagaggaaagtgggagttttgagaaccctctgaccccag

SEQ ID NO: 223964 - DNA, 418 bp, Homo sapiens
  chr10:120514800-120515218
  hyper
gttaccatgacgacgaggccctcgccggttcctgaggacgcgcgcggagcagtcttggcagtagctgtggactggccagagtgattggaggtgttttcctcgcgtcctccaagtctacggggccttcgcacctctgagtgcctgagagccccggcttttgcttgggacggaggtacgggaccacaagaggccccggggtcgcaggttataaacggatgagaccgccctgggcggcccgtggtccgactgctcttgggtcggtccccagccgtcgcgacacacacgcacaaaatcgagaataaaaaccgaatcacacatagcaggatggcgcaaaaaagaaatgcgtttgagttactcatgtgtttttaaaattcctttacgtttgtatgcactaaggccagcaacccaacttttaaaa

SEQ ID NO: 223965 - DNA, 84 bp, Homo sapiens
  chr10:121271622-121271706
  hyper
gagagcagcggagccgcacgtggtgatgaggggctaagttcgggggcggcggtgctgaacacaggaaagcggctgctctgcggc

SEQ ID NO: 223966 - DNA, 1225 bp, Homo sapiens
  chr10:121301447-121302672
  hyper
caccgtggggtctttggcctatcaagttgcccgagatcgtggctcaggctggcccaaagtgacggccaaggcgaatccttcgtaacgtcagaacttcgctggctcggaccgcagaagtgcccttctccatcctggggttccgccaccctcgcgatcccaccttttggctcctcgcggcagaagcgaaggcccccgacgccccaggcccaggggcccagtcggatgcccgggtccagccgtgctcccccgggcgctcggcatccttccacccacgcccgcagcggaggcggagagcgtcacggagggagaagcccgcgcgccgttccgctttcggaatctggagccccatgtcacctccaaagtttggagatttggggcgctcctttttctcccagaccatcactaaaaagaaaactgcggctgttcctctttcagccaaacttcctccccggggctcccggaggagctctgcgctcccgtcgcggctgggaccgcgaaggtgcggtacccagcggggagaggtggtgcggtcggccggggctccagtctgggaggtaccaccgagccgcgcccgagcacaagagggagggcaggaggccgggcgggcgaaacggcgccccgaccccgagcccgcgggcccccgaagccgcttacctgacggcggccgcttcctgctcagccggctcacggcgcggttgaacatcgccgcgggcgcccgaggaggaagaaggagcagcccggcggcgcggcggctgagccggaggaaggcgaggaggaggaggagggcgaggaggaggaggaggagggcaaggaggaggagcgggctcagcaccgccccggagctctaggtccccgcccgccgccctcctcctagccaggcgccgcgtggcgcgctcagtgcgccctgcccgcccccgctggtgaggactcgcggttccgctccggggtgcccgggcggggcagggcagggcagccccgggtgacccccgatcgcccagagtgtgccccgcgcctgggataaggtgcactggcccagagggagcccgcgccgccgggaacttagtagccccgcggaggcggttagcgcgtcccggggtccctggccctcgcctgagatgccgccccggcccgccccgcccagcttcaagctcccgggcccatcgcggtctcccgccttctccctgtagccccggagaaactggcacggcgccgcgggcgcaccgcg

SEQ ID NO: 223967 - DNA, 43 bp, Homo sapiens; identical to SEQ ID NO: 202334
  chr10:121356079-121356122
  hyper

SEQ ID NO: 223968 - DNA, 498 bp, Homo sapiens
  chr10:122216806-122217304
  hyper
ccggccgcaccatgcgggagctggccattgagatcggggtgcgagccctgctcttcggagtcttcgtgtaagtagtggcgcaccgcgggcagggcgcactgacgcgggggaacaaccgaccaagcctctctgtgccctaacttagtttgcgcagccgcttcccactggggcctgggttcgaggtcccttccccgccaagtgcccgcaacgtgtcctacgggaccaagagagacccttcctctctccttcctgggaccctaggcgcggagcgaccaccgcgcgccgaggctgagacctgctcccgggtctcaccgggcccgcgcctgtcgccagccccgcaccacctgcccgggggatccagggctgcacctctaaacagggacgcgcaccctggcccgtgccctcgggaagtttctccttctgtgtgatctttgaggcccacgttggaagtctttacccctggccccgtctccgattcctccccgctgtgcccagggc

SEQ ID NO: 223969 - DNA, 480 bp, Homo sapiens
  chr10:124134482-124134962
  hyper
tgcggagccggcgccccctctgcgcacgtccgcgccacgcgccacagcacctggaggccgccgggccggctcacctgccctggcttggggcagcgggagggggcggcgtcttcttcccgtgggtccccgattgttttcccgacgtcagccctcagcggcgcccggcgggggagggcgggaggcccgcggcggtcgcggggccgacgagctcctcggcgtctccgccccccgagaaatcccgctcggggcgcggtgcgcgcagctgcccggggattcccggtggcgccggtcggagcgcctccctccagggctgtgcccgcggggcgcgcgtccccgggcatcctttcctggtgtttaatgcattttggcttcaggacttgccgaggccgaagccggctccgccctgggccctgaagtcgggcggtgtccgcgatttacctccgcaccttcggggcaggtggccagaggcagcgttgaaag

SEQ ID NO: 223970 - DNA, 480 bp, Homo sapiens
  chr10:124895135-124895615
  hyper
tcggctgagccttcgcctgcctaatcccatttgccattgtacgcgcccaatcgccgtatactccccgcatttaacttggatgacattttgatttcatcattagcatccggcgccggattgacgcagcctcgagccggggactgctcttgctgcctcctccgcgggagccgcagccgcagccgagccgcctcgatccctcggtgccgcggcagggccgctccccgcccctccgcacccctccctcatgcgagcccgcccgtctgggtcctcactccgccctcccgccgttggatttgcgcccggggcggcccccgactttgcgccccgtagttgagttccgtttatggtctgatttccggcctctcgcctgctcgccccgccgcccgcctgtcccgctccctccctcccggggacccggaggagaggggaccatgccggaacccgggccggacgctgccggcaccgccagcgcacagcccc

SEQ ID NO: 223971 - DNA, 360 bp, Homo sapiens
  chr10:124895671-124896031
  hyper
ctgctcaacggagaccaccaccggccgccccctaagcctcagccgcccccacggacgctcttcgcgccagcctcggctgccgccgccgccgccgctgccgctgccgcggcggccaagggggccctggagggcgccgcgggcttcgcgctctcgcaggtgggcgacctggctttccctcgctttgagatcccggcgcagaggtttgccctgcccgcgcactacctggagcgctccccagcctggtggtacccctacaccctgacccccgccggcggccacctcccgcgacctgaaggtaccgacctctctttgaactttcgttgtccccctgcgcgcccgccccgtccccgccccgcgctg

SEQ ID NO: 223972 - DNA, 480 bp, Homo sapiens
  chr10:124896116-124896596
  hyper
ggttgcgctgcccgttaatccaatcccacttggtgagaaaagaagtggaattggagccccgggcacggtgcttcccgggaaaagtggcctcgggcgtgaatagggaggcttcggacggccggggcttgggacacggcctggaaggagggggtgattccaatgcgcctaagccgaaagggaaccgttctgccggcccctggcgaggaagctgagggaatggaaggaggtggccgcgctaccaccatctgcttgcctgtcctcgggaggagggggatcccaggactcggcgtcccttctctggcccagccgagaaggaggcagcccgcgggaatggtgaggcctcatggcctgggacctggaggccggcgcgggttgagcctgccgtccccaggcgccgggcctcgctcaaggctgtgtcggtgtgcatgtgtgtgcgtccgtctgtctgtctccccagcctcggagaaggccttgctgaga

SEQ ID NO: 223973 - DNA, 1217 bp, Homo sapiens
  chr10:126106654-126107871
  hyper
caaaaagcccccaacgggaggttttcatgctgaaagtcctgttgcccccccatcccccaccatctaattaacctgcacgttactgtaaggaaggttctgcttccgtaattttctttatttcgacagaggctggagaaaaaaaatcataggctggaagaggggagcgatgggcaggccgatctgcagggcgcaggagcaggccgggaggacccagccctccaaggctgcatcagcgcccccgccgcgtgaccagggccaccggtttactgcacagctcccccgtccccagaacgcagcctccccgccaaccccaggaaccaagggtgcccaaaggcctcctacccggaaccccggggcgcctcggggtctctgggccgggtgggccgagtcctggcctccacaggccgcgagcgcagggggcggcggctccgcccggtctggcaggcggggctgccacatcctcagcctctccctgccgcccgcccgtcggccgctctgggctggaaccaggactccggcctgcaagccgtgggtcgccacgcccctgccccctgaagctgcgcgccggccggagactccagggcgcccgggtccgagccgcccgcagagtaaacgggccgctgaagcggggctcgttccccggccgaggcccagcgcgccccctcagccagcatcccccgaacccgggccgcggccaccccgcgcccgcccgcctcccccgccgctgtcagggaaccccggccagggcccgaaccagagccccaggacagcggcgcccagacggtacctgacagcgcctgaggacaaccgggtacacgcggcgtctatgaagcgcaacagtgacgccggagagtcactgcaacttaaaggctgattctgccccgcccccaagacaccctcgccgctcattggctggggcggagggcaggataccaatcgcgtgggtcccgtcctccgccccgccctccggccgcgcatcaaggatctttgctcctcccgcggattcgatccgcgctcgcgcctcctgagcccgccggcctgtacctgagctcaggcccctcggtcgcctcctctggcgggacgagaagagtccttgtccgcccttgctgacgagaagactgaggcccgaaaaggaaaagtctgttgggccccccactgcgcgggccgggtgtggctggaggccgagagacgtgaggctggaccgcccgccctgtgct

SEQ ID NO: 223974 - DNA, 439 bp, Homo sapiens
  chr10:126847584-126848023
  hyper
gccgctgggcctcccgcgggagaaaggcccaggcacgccccggctcccgcgcgcctctgcccaactcgcccggggcgctgggggcagcgcgagggagagaaagaaaggcgcttcccctcggccgcgcggggccgtccggcgccgcggagggctgggaggaggaggaaccgcggcggcccggctgtccctgcgccgcaccgggtccctgccgcccggggcgcgccctagccagcccctcctgctaaactttttctttttgattcgccccacccgaaaagtgcggcccgggcggggaaggtgggggaggcgggcgggccgggctcccggcggcggcgggcgaggaggaagtggtgcccgcgggagcgcggccgggcagaggaaatgcccggcccgcccggcccccgcccgcgcccgccgcccggcccgcccaggccccccg

SEQ ID NO: 223975 - DNA, 240 bp, Homo sapiens
  chr10:126849895-126850135
  hyper
tggctcggggtccgctgctcccctggcccttcatcctcctccgccccttccacgtggggtaccgggcagccggccacgtgggggaacgcgagccccgggtggccccggtcccatggggccccgcccagccagcggcgccaaccagcccccttcccggcccccgggctccaacttcctcctggtgccccgcaccggccgcttctgccttctcaggcccgcggggtcaggcgcgggccggcc

SEQ ID NO: 223976 - DNA, 180 bp, Homo sapiens
  chr10:130008992-130009172
  hyper
ttcctgcggcccctgcctgtcccggccacgccccacctccgccccgccgcgttgcgcgttcccgcggggccccgggcacccctggggccccggggatctctgacgcccccttccctccaacccccgctgcgatcccacaggtggggtgaacagcgcccctgctgtcccacggggcgtctt

SEQ ID NO: 223977 - DNA, 245 bp, Homo sapiens
  chr10:131757092-131757337
  hyper
ttcccggagctgggcggggtggcggcgcctggacgcggcgtcctttgtagacgcagctggcgccgaggcagcccgcgcccccgccgcccgccgcccgccgctcacctgcacatgatctcgtgggtcagcagcacacggcacatctccgggttcttgtcctggccctcgtagacgatggcctgcgcgagggacaagcagaggctggggttacgcggcgcccgcggctttggcgccaaatcgccccg

SEQ ID NO: 223978 - DNA, 286 bp, Homo sapiens
  chr10:131757612-131757898
  hyper
ccgaccccggaacccggggctcccgggccccttcggcattccgcgccgccgccaggccgcgtcctcaggccattgtctacaacgagttccaatctgcatgttgggagaggccgatcagaacgccccgaggctaaagaagcagggaaggatggtcgcggcgcaggagcagtttgccaagggccgagggccgcgcccgccctgccctgcgcgctcccccggctctagcaagtctggcgccccgcggcttcccgcggcttcccgcgttccaaacccaggcgcccgcggg

SEQ ID NO: 223979 - DNA, 180 bp, Homo sapiens
  chr10:131757952-131758132
  hyper
ggtgggcagcgacctggcctctgcacgctgcgggcggcctgggagcccaggcgggaggcccaggagcagcaaccgcacgtgggccgcggcgtcgccagcgccccgcaggagtgccggggccccagggcgcccgagcccgcgcggccacgtgctcctcgccggatgatatttggaaagaaa

SEQ ID NO: 223980 - DNA, 660 bp, Homo sapiens
  chr10:131763069-131763729
  hyper
gagggaggagcgggcaacggactgggaggaggggtgcccagggctccccggccaaggctggacgcgcagctcagcctgatttctaagcagacctaaggctgctgcagggccggccggtcccggtctgagccccgccaggtaccccaagcttcctaccccggcggaggccgccgagtgccgggcagggaatcacgtcggaggcagggtctgccagatgctccctctcccccggtggccgcggcagaccccggcccctggcctgttcttacgcacagcgagtgacaaagaaggctccggtctctccgggccgacgggaagcgcgcccggcctctccggcgacccggagccgggtgtctggctgcgcgacctgcgcggtggccagaccgccctggagccaactgctccaaaaaccaagcggacgccgcgggcgctgtggcccggccctcggagccgccggacccgggtgagcgcgcggcgcgcggcttcccgacctggtttctaggaatcgggagggcagccgggcgcgggcagactgtgggccccgcggcccagctcctgtagccgggactccgcgcccaggagcgcggcccgcccaaaggacgtctgcgcgacacggagcagagacccaggggacgaccaggaactgtcctaggcacttcc

SEQ ID NO: 223981 - DNA, 123 bp, Homo sapiens
  chr10:131763778-131763901
  hyper
attgcagggcgcaagtgtgttgcagggcagcctcctcccgccgggtctggggcagcactcccttttcccgtgaattggcagcgtgtgtacgttaatattttaattaatcgggaaagtcgaagt

SEQ ID NO: 223982 - DNA, 831 bp, Homo sapiens
  chr10:131769491-131770322
  hyper
aaaagaagaaagaaagaaaccggcttctcttctagactattaataagcaatttgtcccgctgaaatttacattgcaaagcggagggcgccggcagccgtggcggcgggcctggcgcgggctccgggggtgcgtcggcgcgggggcggggggggtcctccggccatccgggccgccctcgggggcgatccaccggcggctttgaactcggtgtccttgccgccgtgccgccgaccctcgcccgcacacgcgcgcatctgcacgccagggccccgcctgggctgcgcacccggaggccgggactggcgctgcgctagcgccacccgggctgagctgcagccttttgtggggggggcgggaatccctccgctcccagtgacgccttggactcgcggacccccatccgccccaaacgactgcccaggccttaaattaaaaatggcaacaataagcttaatttttttttcctccttagccgcgccgccccggtccaagtctaccgcaagcgtggagccccgagcgccgcgcccccgccggctctcccgcccgcgcgccgcccgacggagccgcggatcccgggcctagcgtggggccagggcgccatctacgggcgccgcgcggctccgggcggccgccgcctcctccctctcagcgtccagagcccgctcctcctcccgccgccgccgccctcgccccgcgccgcctgccacttatcacaattacccgacgctcccgtgccattttgcttatgaaacactgattgctagttatgcggacttttaagcactatattaaaactttcgaaatgaaggcgctctcctgcctgcgatttt

SEQ ID NO: 223983 - DNA, 660 bp, Homo sapiens
  chr10:133109408-133110068
  hyper
ctgccgggctccgtcctgagggtttggggcggcgaggaccgccggggaggagggcgcgcgagccggaggccagagccgggccgggcagggcgcgcccaggagcaggggagacggcgacccgggccgaggcgggacggggacacgttacctgcccgtggagcgcggggaaggggtgcgcggcggcggcggcggcggagtctggcgcagagggcagcggcagcagcgggagcaccggctcgctcggggccggccagccggggagaccggggagcagcggggccgcgggcggcggggccgaggcgagcagcaccgggggaaccacgacccccgcgctgagccggagcagcccggccgagcccggcaccatccagacccagggcggcggcggcggcggctctgcgtccatcggccagaggagaggctgccgccgccggggctgctgctgctgcagctgccgccgccgccgctggaacctggcgcccgcctgcatcctacatccccgcgctgacggcggcggcgggggcggcgggcgcccgagatgctgggccggcggcggcgcggctccggagcgaactcacttggctccgcggcgcggccgctcgctccgcccctgccccgcgcgggaagctcctcctcctcccgcccgcgccgccgccgccc

SEQ ID NO: 223984 - DNA, 300 bp, Homo sapiens
  chr10:133110290-133110590
  hyper
caccgcgagggaggctccgggctccgcactcaagggcaagcggaagccgaggtggcggcgccggagccaggcatgtcccgctgcccagcgcggggctgagggcgcagacggggaccgcgcgagccgctctctacctggcctcctcggagtccagggcgcggagggtactgggctgcggatccggcgcaggcggccccggacgctgctaggcgcgggcggatttctgttgcacaaatgggccaaacaggttcgtaaggcccccgcgggtcccctggcccggaagttgagccgcgggtgcct

SEQ ID NO: 223985 - DNA, 180 bp, Homo sapiens
  chr10:133110795-133110975
  hyper
tgcacgccgagcttcctgggacccaggacgaaccgggctccaaggaccctcgctccgcccggaccacacgcaggcagcgccggccgagccgagcctgggtccgcactggccacgcgcagccaccgccagacggcgctagccctcccccgctgtagaccctgcttcggaggccgccagcct

SEQ ID NO: 223986 - DNA, 180 bp, Homo sapiens
  chr10:133795409-133795589
  hyper
cagctgcgctcccggactgagcggagccccgcagcccggccggaggaactcacagggcagggcggggccgggcggatctgcggccgcgtcgcccattggccgcgacttggggcctgcgcgtgcgcaggggcgtggggtgcgtgtggcacgtgcggcgcgtgcgcggggcgggtcctgcgg

SEQ ID NO: 223987 - DNA, 681 bp, Homo sapiens
  chr10:133795621-133796302
  hyper
acgcgggcggggagaggggcggggcgaggggcgcgcaggcgcgagggcggcagcgaccgcctgaggtgagccggcccgggctggacgccgcgggccgcgtgacgagtgggctgcgcggtcgccgccgcggcgggcggtgggccgggttctcctttgaaggggcggtgggaccggcggactctctgggcactggctaccacggagacgccgctacgcttcggggcggggcccgtctttccatcctgctagtggggaaactgaggcgcggggctggcggcgtccgtgcggggggcgtgaggacgtgcagggaagcggccgctgcggctccgagacggcccgtggggtcgggacctgcgcccggggcgggagctgcgagcggtgggccggagctgagcgtctcgggacgggaccgcgtccccgggtctttgcccgccccgccggggcgcccctgcgtgaacagcggggcccgttgtgtccggggcgtccgcccgcaggaagaagcggaggctcgagcagagtcgaaagagtctgcccgagggaggcgcggaccccaggggcccgggagaggcgcgccgtccgcctctgcggcaaggggcctccggggtgcaaacgcggtgtggggcgggcgtccccggggtgggacgccccgtccacggggcggagtggcgcttggtcgggccg

SEQ ID NO: 223988 - DNA, 180 bp, Homo sapiens
  chr10:134000143-134000323
  hyper
cgcctccccggggtgcaaaccccgcgcacatcagctggagcaggttgaaatccccacccagcgctcgtccgcgggtctgcgcgggggcccggggtgcagagatcagaccctgcagcggttccagcgctgggggggctttaaagcgaaggagtggctgagggcgggggcggggctgatggg

SEQ ID NO: 223989 - DNA, 938 bp, Homo sapiens
  chr10:134000385-134001323
  hyper
agccggggtgggggcggggcccagcgggggcgggaccggaacggagccgtgcggccccgcgcgctcgcagtctgtctcccgccgtccccacgcacgcgtcccggctcacgcgtccccccgcccgcccgcccgcccgcccgcccccgcttgtgccgcccctaccagagacccccaggagcaggatgtccttccagggcaagaaaagcatcccccggatcacggtgagcccggtcccgcttcgcccggcgccccctgcccgccgcccggagtggggcctggacgccgggcggaccctcctggtcttgtgcgtgggtggggggtccctgcctttgcgtctggtccctgtcctggcgcccgcccttccctgctcggctccttcgcgccccagggtccgagagtccccgctagcgccgcgcagacccccttaaggagcggggcgcccaggcccggcccggcccggccctgcccggccctgccgggccctgccgggccctgcccggccttgcccggccttgccggcttccgggagcctcggctgcgcccggggagaacccggggccgggcggcctgtccctcggagcgctagcggctcctttctcccacggcggtcgggtggcgaggcgggcggacgcggccctttgttggcccgggctggtccggggcgcggggagatgccgttcccggcgcagcccgtgggtcgcccgccccttggacgcactggcgctgcgtcgggagctctttgtccgagacaaagcgatttagccccggccgctctggccggagtccctggtggccccgaacccttccagtaacctgggttcagcgactccaaggaaagcgagcggtcaagggccactggccgggaaccctggcagcccctgaaccttcgagagcagagacccctccccaacacccacacgcaccggcgcgggaggtcc

SEQ ID NO: 223990 - DNA, 748 bp, Homo sapiens
  chr10:134120689-134121437
  hyper
aggtgagcgcctctctaactgcaaagtacaaacgagcccgcacgtgggcccgagcggatcacggaaagcggaaagcagggctgccacgggcggtgggcggaggcgcgcgcaagcccggagacgccacagccgcgggggaccctcgccccgagggcccgggcccagcctgctcctcctgcggcgccgccactagaaacggaggacgcgggcgggcgcccagaactcgcgtggggccgcagccacccggcgcgagcttctccggaagccggggcgccccgggaagccgtcccggacaccgggggaacccctgcgggaaaaagccgcccagccgcgcccgcccctgcaatagcgcgcggcccccacgtcgtccccgtgcccgcactcaccgtcctccttgtcgtcaaacaccggcctccgcgcggtggccgccgacatggacgagcccatcctcttcttccacttgctccactgaaacagggggcgcggctgcgagcggacatcgcccgagtcccgggcccggggctggccagcagcgggcggcggcagggccgagggcgcgtcggagccggcggggcgcgcgcggccggggggcggcgagcccggggacgccgcggcgctgctgcccctgcgctcggcgccactcctcatcgccgggtctgggtgcgcgcggcagccggaactcggggcatggccggccggcagggccgggagcggcagtggtagcgggagcgctcggggccggcagcgc

SEQ ID NO: 223991 - DNA, 309 bp, Homo sapiens
  chr10:134121688-134121997
  hyper
tagggatgggggctgtggttcgccgggacacggggaccacggctcagactagacggcgggtacgagagcgagggaggcagggagcgtccccacgggtatcctggggccccggaggtcggcgtccctggcacggggactgctgtgcccggcacggcggcgggaccttctcgcggtctccgggggcctccctcccctgccttcttcgtgaaaacagccggcgcgcgggcttccgccgcccagtgcggggagccctaaactccagccttctgctttgcgcagggtgaggccgggctgcaggcccgggatgcg

SEQ ID NO: 223992 - DNA, 269 bp, Homo sapiens
  chr10:134209484-134209753
  hyper
gcgaggtcgacaggcgccagcgacccgacggtccccagtggcaccaggggcggtggtcctcaattcccaggctgggaggagccctgcccggcggcgctgggtcgccaggacaactacgcggtcccccgccccgcctccaggcctcgtcaggcgctgcaagtccggctcagaagcccggcccggggccaaggtcaccgcagcaggccgggcccctgcgttctgagccgggtgcggacgtgctggtgctcggggaagtcgggggctttgac

SEQ ID NO: 223993 - DNA, 588 bp, Homo sapiens
  chr10:134210377-134210965
  hyper
cgggctcgtggctctcgggtcctcccgagccaggggacactcccggccagcgtgggccgcgagcccgggcgcagccccctctccagcccgggggtccgcaccgcgcgtccggccgacctctgcgggcgggcgcggcttctcccgggacgcggcggcggcgggcggggtccccgggagcggagcccgcggccgcgcgcccccggcccggctcggctcggctgtggcggccgccccagcggagctttgtgacgtcaggcggccgcggggcggcgtcacgcgcggggctgacccggcggcggcggcggcggcggcggcggcggcggggcgggggcggcctgggacgcggcgggagcatggagccgcgcgccggctgccggctgccggtgcgggtggagcaggtcgtcaacggcgcgctggtggtcacggtgagctgcggcgagcggagcttcgcggggatcctgctggactgcacgaaaaagtgagcgggggcgcgggccgggacacccccggggtccccacgcgacacccgcctccgccgcccggagacccgggacccgcctccgggttgggggtggcgtggccccggcg

SEQ ID NO: 223994 - DNA, 380 bp, Homo sapiens
  chr10:134351009-134351389
  hyper
cgccggtcgcaagagcgccccgcgtaggccccgccccgaaaggaggccccgccccggggcaggccccgcctccacaaggacaccaagtcccgcacaagccacgccccccgcaggccccgccccactctgttcagatctaggcccaactcaggctccgcacctcaaggctccgcccccagcaaggctccgccccaggcccggctccaccccgcacaggccccaccccgagtcaggctccgccccgcccaggccccgccccgggctcggctccgcggggcgggacttgccctcagcctgagtcggcggcggctgcgggaactttcccagcggatctaatggctgcgcgcgggccgctgtgaggcgcggcggcgagcgacggg

SEQ ID NO: 223995 - DNA, 215 bp, Homo sapiens
  chr10:134602330-134602545
  hyper
tctgcaggggagcgggcgacggggaggacggcgggggtgtcggcccggaaggagagccggcctaggccccggtgtccccgcgctgggggctgaggggcgacgggggaactccacagagggaaggagcctgcgttcgccttcggccgcccaggccatagagttcacaaactctgatttatcactgaggtgacttgtcccgcgcagccctaggcgag

SEQ ID NO: 223996 - DNA, 300 bp, Homo sapiens
  chr10:135043985-135044285
  hyper
cccgggagacggagctgctgctggggacgctgctgcaaccggccgtgtggcgcgcgctgctcctggaccgccgccaggccctgcccacctaccgccgcgtgtcggccgcgctggcccagcagcaggtgcgccgcacccccgcgcagtgccgccgccgctacaagttccttaaagacaagtttcgcgaggcgcacggccagccgcccgggcccttcgacgagcagatccggaagctcatggggctgctgggcgacaacgggcgcaaacggcctcgccgccgctccccggggtccgggcgcc

SEQ ID NO: 223997 - DNA, 180 bp, Homo sapiens
  chr10:135044372-135044552
  hyper
ccgaggactgcggaggaaccgggggctgccgagggctgcgggggaggggcgggcgcgccccgcgaaaatccgcccgaccgcctgctccgcgttcccagacgccaccccgctgcccaccgcccgcgaccgcgacgcggaccccacctggacgctccgcttcagcccgtccccaccgaagtc

SEQ ID NO: 223998 - DNA, 113 bp, Homo sapiens
  chr10:135044627-135044740
  hyper
ccgcgcgcccgtccgcggccccgggtccccgccgccacccccggcccgcgaagaccccgactcgccgcccggccgccccgaggactgcgcgccccctccggccgcgcccccgt

SEQ ID NO: 223999 - DNA, 180 bp, Homo sapiens
  chr10:135139016-135139196
  hyper
aacacggcggagagcatcgggagacgcgctggtcacaggagctggcggaggacgctgcggagacagagcccgagggttgagagcggcgacgcggccaggggctccccgcggaccccgcgtcacccggcgggctcggattcgcaacccccaaccccgaggttctggcgggccgggtcggag

SEQ ID NO: 224000 - DNA, 377 bp, Homo sapiens
  chr10:135139247-135139624
  hyper
gaggccaggaagagacctgggcagagccggccggagccccgcggcgcgcacctaccccgggccgggctgcggggctggagacgtcactgcgcgggcgggggcgccgcgctcccggccgccttccgcgccgcctccttctccgccttggccgacggcttcccggggggttcggtggccgccgccgccgccccagcctgggtgggccccttgcgctcctccttggctgcgcggtagccgtccccccaggccgccggcgtctccgtgccgtgcttgcggctcagcgggtaggccccgatggccgccaggatgctgcggtggcgctcggggtccatctccgtgtagtacatctccagggtcagcggcgtgcagatcttgtg

SEQ ID NO: 224001 - DNA, 418 bp, Homo sapiens
  chr10:135148819-135149237
  hyper
atagggtagggccacgccccggagggcccgcgccaggagtctccgcccgaacccccgctcgggcaggacccccgccaggaggagctgcgcttgaggggtccccttcgagccaaacttcaaatccaactcctcggacggccaatttacgtcatcgcgggtttccatggcaacgcagacaggcccgagacgcgtcttcaggaagaaaaagccattgggggcccactggagcctcgcttctggttccgggcccagcgccccgggcggaatgcggggttggaaaggggggactagcctgtgtgtggggtccaacccccccaccccacacaccagaccttccctttgcattgctgcgtcatgggggcctcctcccacggatgacacgcggctcgtggaactggggggccgcctctgcttctcc

SEQ ID NO: 224002 - DNA, 624 bp, Homo sapiens
  chr10:135149869-135150493
  hyper
ccacccccaacccccgtgcgggcagcggctcctcggtgctctggtccgacgccccttctgtcgccctccccaccccgcctccggcggacagagctgggcgggagctgggactggtaccccctccccacctcggagacacccttaactccaggctgcgatcctcgtgccggggccccgccgtcacgggaagcctggagaccaccgccctcgggtccgcggggtcggactggcctggggcagccagaggaggcccgagggaggagggcggccgtgcagcgcgccctgcacactcgcacccgcacacgcgcctcgcacacacgcactcacaccctcatccgcacgcgcgccacgcacaagcgcactcgcgagcacacgcacctcgcacacacacccgcacacgcgcctcgcacccccgcaccccttcgggccccccgcccacattctgcaagaaatgtggaaatagctcacaggcggctccactggcagctgctgcaggacgcggtcggggaggacgacgatgcggatgtggatgcggaggatgcggttccagacgcttcgcggccgggcggggcgggggctgcagctgcgagaccgaggctgtggtcgccatggaaacgcggctag

SEQ ID NO: 224003 - DNA, 180 bp, Homo sapiens
  chr11:314301-314481
  hyper
cctcttcttgaactggtgctgtctgggcttcatagcattcgcctactccgtgaaggtgcgtatggccctggcggaaatccagggggtgccggtgagcctggggctccacctgcccacatgctgcctggggtggggacttgtgtgtccctgtgactgtgagtttgtgtgcacctctgcccc

SEQ ID NO: 224004 - DNA, 105 bp, Homo sapiens
  chr11:327113-327218
  hyper
tgcctcagtgccccacggacagggggtgcgatctgagcagaatgaggtgacgtcactgggtcagcggctcctgtggcatctggccaaggacaatgtgctgagaag

SEQ ID NO: 224005 - DNA, 729 bp, Homo sapiens
  chr11:369470-370199
  hyper
attggttccgcgcgcgcggccggggcccgatccgcggtggcagccgtggatgctgttcggtcccgccgccgccccaggagcgcggagccgggagcggccgggcggggggcaccgcgaggagccgcccccgccgcccaccccgggcccgcggccgagggcggcctgggggggtcgcggccgcacccggtggccgcgcacggcggacaaaggaccatgcggggccgcgggcgctgagcgcggcggggcgggccggggatgcggcgcggggcgggcgggggccgggggctgcagcggcgccgctgagcgcggcctggggcgggcgcggcggccgcgatgccgcggctcccggtgaagaagatccgtaagcagatgaagctgctgctgctgctgctgctgctgagctgcgccgcgtggctcacctacgtgcacctgggcctggtgcgccagggacgcgcgctgcgccagcgcctgggctacgggcgaggtacggcgcggggggcgcggggggcgcggggggcgggggcggcgcggggggcgcggggggcgcgggcggcgcggggggcgcgggcggcgcgggcggcgggggccccggggcgcgggccgggcctcccaccgcacagaggtctcggctgggcccgaccctcccggagaccccgcccgctgttctccgctctgcgatttggggggagggggcgcggttcggctcggcccggacgctcgatgacgtcg

SEQ ID NO: 224006 - DNA, 307 bp, Homo sapiens
  chr11:406793-407100
  hyper
catctctaacccgccgctagccccggaccctcccgcgcctgctccgcaccacggagccgggcctccagagcagcaaggtcaccaggtggcggtgctggcgcagcaggcggagcgccgggtgcgcggggtcgcgcctctggccctcgaaggtgatgaagatgggtctgcgggtgagctccagcagccggcacaggccctccctgcggggcgggaccgtcaggggggtgggtgctacgctggggcccacccaaccccgcgcgggacccaccggaagctgtggctgcaccaggcccggctcaggaaggcg

SEQ ID NO: 224007 - DNA, 75 bp, Homo sapiens
  chr11:407428-407503
  hyper
gcgcggcaggaggtcgcggtcgtccaggaagagcttgtagccccgacgccgctccagctgcggctttaggatgaa

SEQ ID NO: 224008 - DNA, 983 bp, Homo sapiens
  chr11:416532-417515
  hyper
gcgccagctcctcccgccctcagacccagccagcgtcctcggtccgcggccgcccctgcccggtgggttcgacgctcagcacccagcaccctgcgggcgactcccgctcagctcggacgcgccgcccctccgctccccgtgcgcgctgggcccccagcgcctgtcctgaagcaggaacgtgggtaaaaggctgcggccccgcaggccgaggggctctggttcgctcccctaccccgcgcccacctgcgccctgggcgccctccaagtgaggagggcggagaacgaggacgcgcgcgggaggcgggcacgggggtgcggctcggggcgctcggccggggcagaggcgcgcggatggcggaagctccacccggcgccgggcgagctcgggccccagcctgactcttggtccgccctcggcgcctcaggaagcctcgagctgggatccaggcttgggcgaccgaggtgggatccctgcgcgcctcggcgctcctagccccgctctgttctgcgcgagggtcaccaaaaagccgctgaccacgtcgggcagaggaaagggtggcccccgcccccttcgcccactttcctcccttcccccagccctggaaagggccaggacgcgggcgagctcgggcttccgggcgacgcgggaacctccccggccccgagccatttcctgagagaccgcgcccagggacaagcagcgccccgggccccgactccaggcctgcagcggctctgggaggactgcgacctccactcaccttcgcgggtctgatggcgaccgccactcacctgctgccaggacctggggctcgcgccgggcgggggcggggcagctcacctgagccaggtgcgcagcggcaacagccccggcggcggcgtagccccggcagcggcagcaggtgcggccccgccccgcagtcagggcgggggcggaccccagcgtcccgctctgcgcccaaggctggcgctggaggctgcgc

SEQ ID NO: 224009 - DNA, 138 bp, Homo sapiens
  chr11:450011-450149
  hyper
ctgggctccgggatccgtcggcgaggaaggggcgaaggggtggagggactcgggccaggccgccggggatgtctgtggttacctccaagctctggaggccttggcgagacccgcgccatccgcagcttggttcctgcg

SEQ ID NO: 224010 - DNA, 107 bp, Homo sapiens
  chr11:450172-450279
  hyper
ctccggtttcccagcaaccaggcgtcatccttcccagcaagcactgcgtccaacccgcgacgtcggaccacaaggcccagcatgccccgcgcggactacaagcccca

SEQ ID NO: 224011 - DNA, 202 bp, Homo sapiens
  chr11:485908-486110
  hyper
acgggcgcgcgtgtgctcaccgtgcgcgcaggcgagcgtaaacagtgcacgggcgcgcgtgtgctcaccgtgcgcgcaggcgagcgtaagcagtgcacgggcgcgcgtgctcaccgtgtgcgcaggcgagtgtaaacagtgcacgggcgtgtgtgttcaccgtgtgcgcaggcgagtgtaaacacagctggtgccctggtgc

SEQ ID NO: 224012 - DNA, 297 bp, Homo sapiens
  chr11:518712-519009
  hyper
gaaacgcagccagcgcggaaccggacgcccaggagccggccccgggctgcccacgacggggccgccggagaggactcgcggcgccccctcctggatgtggccggcggcgcgcgaggaaggagccgccccgaacgcgcgagcgaggccgggactcgggcgccctctgccggccgctctgagggaccggggcgggggggcgtgtctcccggtcacgtgacctggaaaccccgcccccaaaccgaggggaacttgcggccccaagacgcggcgcgcttacgagggcgcgcgaggcgccgc

SEQ ID NO: 224013 - DNA, 105 bp, Homo sapiens
  chr11:568294-568399
  hyper
ggagggcggcctctgaggggcgccccgcccgccaacctgggatccctcgcgcgtcacctgcgaccccggcgcggggccgtcgccggctctcggcccaacttcagc

SEQ ID NO: 224014 - DNA, 221 bp, Homo sapiens; identical to SEQ ID NO: 202394
  chr11:575604-575825
  hyper

SEQ ID NO: 224015 - DNA, 138 bp, Homo sapiens
  chr11:615658-615796
  hyper
ggaaaggcgacgtcaggggcgggtcaggctcccgggaaagcgaaacctaaacagtggcgcttcgcaccctcctcgatcccaccccgtccggttctcagctccgcggaaccccgcctccgcctccgcctccctccccgc

SEQ ID NO: 224016 - DNA, 263 bp, Homo sapiens
  chr11:694728-694991
  hyper
acgaggcgagaggccggcgggcgcacttgcctgcgaaggctgcggcagcggcggcctcgtcggggccgggcagggcctcggcgcccatgtccatgtgcccgggctccgccgccatcaccgccactgccgtgacccgcggcgtctcccgctccgcctccgagtctgcgtcctcctccgagtcctcgtccctgctcagcaccggctcctccgcctcgcctcctgccgcggccgcggccgccgccgccacagcggccgcggccgcc

SEQ ID NO: 224017 - DNA, 687 bp, Homo sapiens
  chr11:705951-706638
  hyper
aggggctaggcccgcggaggggcacaccaggcgggtgttggggaggacgcagagggctggggctggagcccaggcggggcagggggcggggcggagctgggtccgaggccggcgggggcgcctccatcccacgccctcctcccccgcgcgcccgcccgctctcgggtgactccgcaacctgtcgctcaggttcctcctctcccggccccgccccggcccggccccgccgagcgtcccacccgcccgcgggagacctggcgccccggccgaggcgcgaacagacggacgcaccggcgagcgccgaggggacaggccgagcgcggggcgccggaggcaggtgagcgctgcggacacgggggagcgcgcccgcccgggcctcagtttacccggtggcgatgggacgcggggcttctggttcaggacaccgggacgaacgcggcgtcgcagggcgcggggcacttggagggcggccgggccgagggcgcggggcaaggggctgggggcctggtcgagtccccacctctcctggacgggtcctgctgcagcccggcctgcccccgtcggtcctgggcggcggccggcgagcaaggatatttttaagccagcgatgggtgactcacctgccccgtcctgcccactcccagctctggggcttggtgggggcaatccctgcgtccggagagcgct

SEQ ID NO: 224018 - DNA, 207 bp, Homo sapiens
  chr11:720668-720875
  hyper
tctgtgctgctgctcgtgtgccaggactcggagcagagcaagccggatgtccacttcttccactgcgatgaggtggaggtgaggcggtgccgggcggggcagggtggggccccgccgcgccgcgccccgccctcctggccgcctgacgcccgctttcccaggcagagctggtgcacgaggacatcgagagcgcgttggccgactgcc

SEQ ID NO: 224019 - DNA, 189 bp, Homo sapiens
  chr11:721128-721317
  hyper
tccccttccagcaccgcggcggggattccccggaggccaagaatcgcgtgggcccgcaggtgccactcagcgagccaggtgggccgaggggctggagggggctccacagggctcgttgtggggggctcggtgagcagccgccgtgtcccccatcaggtttccgccgtcgggagtcgcaggaggagccgc

SEQ ID NO: 224020 - DNA, 34 bp, Homo sapiens; identical to SEQ ID NO: 202396
  chr11:832781-832815
  hyper

SEQ ID NO: 224021 - DNA, 1080 bp, Homo sapiens
  chr11:1411187-1412267
  hyper
tgacgggcgtgcgctgggggcgcggggcgcggggcgcgggcctcggcggcggcggcggcggcggcggcggaagccaggtgcccccgcccgccctgtcctctcgacgaggcggaggcgtcgccgcgggccaggcctcggactgccgcgtcggagtggacgcggggggcggcggcgcgggcggacgcgggcggcgcgaagcagcggggcccgcgggggcgccccggccgggtcggcgcggacggcactcggcggacgcgggcggacgctgggcggcccctccctgcccgcgcgcccgggcgcccctggccggcgccgggccccagagcgatgacatcgacggggaaggacggcggcgcgcagcacgcgcagtatgttgggccctaccggctggagaagacgctgggcaaggggcagacaggtgcgtgcggccggggcggggaccggggccggggaggccgcgctggcagcgcgctgggtggggggcgcccgagggaggccccggccgcgaagccgcaggcccggcccgggccccggccgcgaacaatgggcggcccgtgcgcccccgtccgctcgtgcgccccggttccgccgcggatcccgcaggccgcttggctgcggtcggccgggcgcggcccaaggacacgcggcgcggcgcggggcgcgcaggcggacaggggcgcacgggacggcgcccctcgggccccgctgcaggtgcgcggcccgggccgcattgtgcgccccagcgaccgggcccattgtgccgcgggaggagggggccgcgcgggcgcccatctgccgtctgccgcggccgcgctaataggcgtgctgcccgagcagctgcgcccccggcgggactcccacctccgcgcgccggccaccggggcctccgggcaggcccgatctccctccgcggtgggggcgggagagtgcggggacctgcagagggctggacagcgccttgcgctgctccggctcgggctcgggcgggcggagcgtctgtgacctgcattcccacggggcagggagaggccattggtgctgggaccagaagtgcgtgggacctgacccgtggagcagccc

SEQ ID NO: 224022 - DNA, 498 bp, Homo sapiens
  chr11:1592747-1593245
  hyper
cccccgcgggggtgacgttcgggacgtcgggggctcgcgcagatccgcgctggatctcaggcggccctggtgggtcctggatttttgtcccccccccattccacacccaaagaaggagctgcggggagaagggcggcaacgcggcgggcgggcgtgggctgggcccgggtccgccgggcgttgcggggggcggggaaggggcctccctgtccctggcgtcctggacggccgtggccgctcattccggggccgcctcctcctcccgggcgcccaccgggtgccgctgccccagcgcccccgacgcggcgccctccgccccccggcccgggccggtgaaccccatccccggcgcccgcccccgccccgccggcgcctccgctcacctcgctcgcgctcgcctcgggggcgctccggggacccgcgccgcgctcagggcgcccgctcggccgcgccgtccatgggcccggcgggggcccgcgcagccggggcaggggccgg

SEQ ID NO: 224023 - DNA, 117 bp, Homo sapiens; identical to SEQ ID NO: 202402
  chr11:1594039-1594156
  hyper

SEQ ID NO: 224024 - DNA, 1440 bp, Homo sapiens
  chr11:2290955-2292395
  hyper
ctgttacctcataggtcgagggcgctcagtagccccctaaccagctggagaagtcgagtagctcgcgctccgcaggactcagcgcgccttcgcagccgctgtcgtccgacgagtaggcggaacgcggggagccgggctccgagctgcccccgcggcccggggacgaagaagcgcgggagggcgaggcggcgaccggggtggtccctggcggcccgcggggcgcagacggccgcacggcctgcggcctcagccctcccgccagcgcgttgcgcacggcgtcgtgctcggccagcaggcgctgcagcgcgcggatgtactccacggctgagcgcagcgtctccaccttgctcagcttcttgctggcgccgccgtgcggcacgtgctgccgcagcgcctggaagcccaagttcaccagcttcacgcggttgcgctcgcgctcattgcgccgcgctacggccgctgcgccgcctccggtctctgcggtggccggtcgccgccgccggctgcagcgcaacagttccggggacgcgggtctccgccgggcagcgcagccgacagggacggggggcgcagggggcgcggacctgggcagtgtgccgccgtccatcgcgcctgcatccacccgcccgctccaggtcccggcgcgccgcaggaaggtgcaggcagaggaaccggaggcgacggggaaaactgtggcgccccaagggggcttctggcacggcgccgccaggcaactccccagggcacgcgtcctaggtcgtctggagcccggggataggaggcctagtggtggcaggccgtacgcgccagggagcgtgggacgctcgtgtcccgcgcgtgcggccggactctcccaggtctccgcaggcgcggcgcaggcggctggtttttaaatgtatagataaccctcctccgcgccgccgccgtcgcctttctcacgccctccttccttcgcctcgccctcccgccacgcttcgccctccccctcgcgcgatcacattctgtaaggcccaaagcgtgcgcatgtccccctagcccatcccccggacgcagtccacagatccccagtgcgcccaactggcgaaatctgcgagttcccggtgcgccccctgctcccggcaggtgcttagtgcgcccccaaagcaaggtacgcaggtcctgggttgagccttcccgtacccccaccctaaccccgcgcgcagccccgccagtcccaagagccgccagaccttcgcacgcgcagcgcgcgctgtgggagggaaggcgcggccctggcgacaacacggctgttcgggaggcgcgcaagatccccgggggcagcacgcgccgcgcagcccacacccacgccccaccctcctggggccgaggaggcgggggccagggtctcagccaatcgtgggccacccgtttggccaatcgcgcagggcgcggctccacgcc

SEQ ID NO: 224025 - DNA, 937 bp, Homo sapiens
  chr11:2398758-2399695
  hyper
ccgcccgccgcccgcgccgccatgggagtggagggctgcaccaagtgcatcaagtacctgctcttcgtcttcaatttcgtcttctgggtaagggctgcgccgggggccggggcgggagggggcaggcacacactccacgttgggcaggtcccgcggcagcgtgctaggccccgcgggcgcagcgcgggccgcgaagttgtggggccacctgtgggctccaggagcggggtggggggtcgcccggggccaccgcgccccccgacattggggctgagggctgcgagccgagtttcggggcctctgtgctcgggggcccacctctgcggccgggccggggcttctgggggccgccgggcagttcccgctgtggtggtgatgggtgcggtggtcgcgggtcgggacccgagtacccggccgcccctcagctaaggaggggcctgcgcgggtccctggccgcggattccggactgctgcttcgcggggacgaggggggggctcgcgggcgggactcctggcgccccgcccccatgagctcatcaagagccgccgcccctggatggtggggcgggggcgcacactttgccggaggttgggggcgatccgcctcactctttccccagcccagctcactctccaatctgcggtcaccacccgagaccttcctgggggtcgcgcctaaaaggagcgcagactcccgccgggatggcccagaagctggggtgcgcgcaccctggccgtccctgcctgggagccgatctccctctcctcacccagacacgttccagcggaggcctcctcccagaagggctctggaggcctcgcaggagtggggatcccgcggttctgagttggcacaaggaagagagtggcaccaggggcctggagtggatggcagggtccgggagtggggccgctgctttgcaagaggggcccccac

SEQ ID NO: 224026 - DNA, 65 bp, Homo sapiens
  chr11:2554360-2554425
  hyper
caaagcgatgtgttcccagggagcccctgttttctcgtttcttttcgtacgcccagctttgcagt

SEQ ID NO: 224027 - DNA, 67 bp, Homo sapiens
  chr11:2554454-2554521
  hyper
aggaaaccccagcgcggcctcggagggattaggcattctgctgaaccagggatatgcggtgggcctg

SEQ ID NO: 224028 - DNA, 1260 bp, Homo sapiens
  chr11:2905857-2907117
  hyper
gcggggccgggccgggccggggcggggccgtgcggggctcaccggagatcagaggcccggacagcttcttgatcgccgcgccgttggcgctggcggccgcggtgccggccgcgggacgtcccgaaatccccgagtgcagctggtcagcgagaggctcctggccgcgctgcccctggttcgcgccctgctcggcgctctcttgaggcgccgcgtccggggccggggccggggcgggggccggggccggggccggggccggggctggggccggggccgcgactggagccggggccggagccggagccggagccggggccggggccggggccaggaccgcgaccgcgaccggagccgcgaccggagccgcgaccggagccggagccggggccggggctggagccaggaccgggactgggggcggggtggacgccggggccgggaccgggacactaggcagctgctccggcgcctcctcgaggccgtcgagggactcagcggccggctcgaggggcgggctgacagccaccgcgaccgcgacgggccgcggcgccagcagcaggcggcagcgccccacctgcaccgtctcgcggtagaacgcgggcaccgagtcgctgtccacttcggtccactgcaggcgtccagggccccgcagcggcatgtcctgctggaagtcgtaatcccagcggttctggtcctcggcgttcagctcggccaggcgggcctgcagctcgcggctcagctcctcgtggtccaccggcccgaagaggctgcggcaggcgctggtgcgcactagtactgggaaggtcccacgggcgacaagacgctccatcgtggatgtgctgcggagggacgcgtcggacatggcccggggctgcgcaaacgcgggcagcgagagaggagaggacagcgagaagaaggggaaaggagaggaggagagggcggaggccgggcgcaagggagaccccgcgccgcccgactctgcgtgtgcgagggacgcggcggctacctggctgtccggtggtggactcttctgcgtcgggttcgcctgtctcgtccggacggcagccgcgccccctcgatgcctgctggctagctcgctcgctcaggcctggccggcacccctcgagcacagcgcacttggcctgtggaacgcccagcccgcctgcgccccctttatacgcgcgggccccacccccgtgcgcgcgggcccggccgcgattagcataatgtagtattttcagtttcaacaacaccacggcg

SEQ ID NO: 224029 - DNA, 433 bp, Homo sapiens
  chr11:2951691-2952124
  hyper
ggggtggagccggccgagaggaccccagagaccccggctactactccacgtctcccaccttcccgcacccctgccccctagctgcgccctggggtggttacagcaggaagtcccaactctggggtcagaattggcctcaatgacggggctcacgcaaaatgaaaacgagagtcccctgattcaaaatgtatttaaaatgtcaagacagtggcagcagagcgtaaaacccagacctgggaccagccctacctccacctgcccttcagggtcactgtaaaggataaagagacgtccggctcagaggagcgccccagacccggttctgtgaatggcatgcaggtagcagctgcccggtggtcccaccggtgtggccagaggacctggcagtgggcagggatgtggtgtggaggggcagtgccggcagagggcaggg

SEQ ID NO: 224030 - DNA, 180 bp, Homo sapiens
  chr11:3186329-3186509
  hyper
gccggccccccgcggccctcggttcgctccggccctgcccggcggggccctccggatccttcccagcccgccatccccccgccgccctgccgccccccgggccgccgcgctcctacctcctaccgtgccgcgagctcggtgctccgggccggccgggcgcgcgggggctccactggcggc

SEQ ID NO: 224031 - DNA, 242 bp, Homo sapiens; identical to SEQ ID NO: 202418
  chr11:3444553-3444795
  hyper

SEQ ID NO: 224032 - DNA, 105 bp, Homo sapiens; identical to SEQ ID NO: 202421
  chr11:6502787-6502892
  hyper

SEQ ID NO: 224033 - DNA, 420 bp, Homo sapiens
  chr11:6947648-6948068
  hyper
gggcctgcagaaagggacggggctggcaaaggcctggtctacctcaccgatccgggtcgcgggggctcctagggggttccttccacagctggtgcgcgtgcgcaagagtgcgtcgaggttgttccgcggcaatttatgaaactcggagccggcagtgagttgagggttcggcgaggtcagggattcctagttgcagcgtgattaccaacgccagctcccttcactgtccaagacagcgattccgcggctcctctgagaactggcgcttgtgagtgactgaacgggccactggagaggagcggtgctcacgggtatcgttctcgtcagcgggcggtggggacgcggggtcttggaattgggaatcacgcttgagggcgtccatgcggaacgtgcagcttacctcagcttgcttgcagttac

SEQ ID NO: 224034 - DNA, 127 bp, Homo sapiens
  chr11:6948121-6948248
  hyper
cgagctgacgggagggatggaaacgtgggctgcggaagtaagacaagcgttgagagcagcgacagagggcgagggggtgggcggcgggacggctggggtcaggatccagctccgctaaagcaaggat

SEQ ID NO: 224035 - DNA, 438 bp, Homo sapiens
  chr11:7694834-7695272
  hyper
gacgttcgttcccggctctagccggcctccgcgcctctggcctctttccttccggccgtcccgacggagatatttcttcaatactccataaatacaccccgccgcggaacccacccggagtgagacgcccaacacgtcgtcgaactggggttggccgggggccgctccccgccgcgggcccgcagactcgtggcgtcgccccgcagctccgcctggccgacggggaaccggccgagacccggacacgcacgcccgggaggacaaaagcgcgggcggaccccgcaggctgggaccccggcggctggcccgctccccgagaagggccgtggtcggggggctctcactcacgagccgctggctctgggtcagccctgcccccagggcagcgctccatcatgaggctggcggggcgctgagccgtggcgtcctcgctcctgc

SEQ ID NO: 224036 - DNA, 564 bp, Homo sapiens
  chr11:8040395-8040959
  hyper
gctgaagactcccacgccggaaaggagggcgcctctgcggaagggccccgagtggcgacagcggatccgggactcccaagcaagcaggagccggagcagcctcttagcaacccctgtcccgggaaggtttgaaagcagcggtgccctagtgacgccggaaaagatggagcggttgtcatggcgacgcggagcacacctcggaaataaataaataagcgcccaggctgccgcagccgcgcccccgcgggacccgagcgagggggagggggcctcacgggcccgggtccccgcagtcgcgcgtccccgccattggcagagccggagggggtcaccccccggggggcgaatggtacagtcctccgcccgcgcctcggccgggcccgcagcctgcgagccagccccaagcccagcgccgccgccgcccgcggagccccgagcggagccggaggcggcgatggagggagtcagcagccaccggaccctgtcttacagccgctggagctatgacaggtagggcgcccgaagggtggccctgcgtgagcgcctgctgaccctcgatctcct

SEQ ID NO: 224037 - DNA, 180 bp, Homo sapiens
  chr11:8040996-8041176
  hyper
gagcgcccgacccccagggtgggcttgggcacccggaccctcgggcatccgggacccagagcctcgggtacggcgcagcggagctccagcgagggtagtgtccccacacccacggggcagagctgtcggaggagggcacgcggccactgggactagcgagctggcacctctgcccccacc

SEQ ID NO: 224038 - DNA, 630 bp, Homo sapiens
  chr11:8102565-8103195
  hyper
cccggctgcagcgccgccgttagccgaaggtgggagccggcgcggtcacgcgcatggagcgtggatcgcgacgatttcgggggagggggcaagggcgctccgcaggccctgagccggccggggggtggggtctctgcggggcggggcggggcggggcgagggagaaggggcaggccgccgctgccacgcagtactcccgccttggcgccagaggggcgcgggacggtgcggtcggcctccccgcctccacgcgcgcgcacgacccgcgcactcccggagcttcgcccatctcgcctcgccgcgccgcgcaggcagccgctcgcagagccagcagccggggccctggcgtgcagcgcgggcctcggcggggcccagcgccccggcccgggaggatgcggcccggggcggcccgggagctgagcagggcccccgcgccggcccctccgggccccggcctccagagccgcagccaccgccccgcccccgagagacatgacttccaagccgcattccgactggattccctacaggtacgcgggcgccgggccggggcgcccaccactcccgactcgggacgtgagctggctggggatacgcggccggggcgcagggcaccgctgccctccccac

SEQ ID NO: 224039 - DNA, 180 bp, Homo sapiens
  chr11:8190284-8190464
  hyper
gccctctccagtcagtttggtggatatttcggtgaaggctgcagactctcagagtcacccctccctcaagcagcgttctccgtactcttcggcgccgggaagctcagagggagctggcctgctcttaccttcaggtgtcggcggcggctcctgccgcttcccgcgggacaggaaggcctt

SEQ ID NO: 224040 - DNA, 242 bp, Homo sapiens
  chr11:8190524-8190766
  hyper
ggagtacgccatgactgctcacggtggtcgcaggtgcagacgccagccggaaccggaaccggaaccggagcacgggctgccgctcccgaccgaaccgcgggcggcgcggacggcgtcgcgcgagggacaaggtgcgcgaggcgcacgcatcttcacctccactgtcgggagttgacctgctcctcccgcgtggttacccgtcgctgtaaatggtaccctcgccttcccgttcatactaacta

SEQ ID NO: 224041 - DNA, 720 bp, Homo sapiens
  chr11:8615283-8616003
  hyper
cacttaccccacagtaagttcgcttctaaactttcaaaaagtttcacgtcccaagatggggtgaaggtgagacggtggagatgaaccggggcagacagagaccaccccaaataccggacccgggggaaatggggtaccaacggctgggccccaggagacactcggaggggtccgcgggctcggcccggtccctccgctggggggttaccagccggccggcagcgagatacccagaggcccgtttttccaccgcgttgccatagcaacggcctggccggctgcgccccgggccgcccgccccatcccgcgggcccgccctgagccagtgactccagggaccactcaccgcggccggcggactggcgggtctccgacaggtgcgcacactcggcgcaggctgtcgctgagcccggaattctgcaccgggagaaacttttcagcccgcagagcaaccgcagggcagtggacgggggccgcgcgaggacaaacagcggcggcgggtgcaaagccccttctccaagccgcggggttggccgggaggtgccggctgcacaacggcgcccacgtgacccaggtgcagccccaggcgcgcccaagggcagctcgccttagagaaggacctaaaaccccgtctggggcacagaggagcagccacgtgttacgtaaaataaagctttgtagcaggaatatcacagtactgaggtgattgatgctcaggcc

SEQ ID NO: 224042 - DNA, 621 bp, Homo sapiens
  chr11:9025075-9025696
  hyper
atccagggaggaggcacagccgaggggagcgcaagctagaaaagctacgacggaatccccaccgaaaccgcagcaggggtactggaaggggaggaatccgcgacgcagcgaccgcgagccaagggcagcggcgggccgggccgtgactcagtgaaagccgcaacggccgggcctcggaaaacggcgggcgcgaagccgccggggccggggcgagaacggcggcgggggctcaccatgtccttggacgagcccagcttcttgaggccgtccaggggcagcaggtcggcggagtccttgtggatgaactgcaccgcctgcttcatccggcgctgctgtcgcagtgacgccgcctcccgcatgtcggtctccttgcggccgccctcagtgaggagccctgagtaaaacatcgctgaggcgccggcggcccggtagcccacagccccccggcagcctcagcctcgagctcctccagcgccgcaagggccccgagccgcgccttttatagccgagcgtgacgtcgcggggagcagccagtgcgcgcgcggggggcggggccggcacagagtccacgccccgcgcggctccctcgcgtcccgcgtcccgcgtcccgcgtcccctgct

SEQ ID NO: 224043 - DNA, 180 bp, Homo sapiens
  chr11:9025870-9026050
  hyper
ccgctggccgcgggtacctgctcacctgtccacgccgtggccgacccggggatcaccgacagccgggccatgcctcgagtcccgccgcccgcgccgctgctcggcttctcagaaacgcacctccacgccgccagccggggctccagggtccaccgcccgggcccggaggactggcgactc

SEQ ID NO: 224044 - DNA, 407 bp, Homo sapiens
  chr11:9112724-9113131
  hyper
tccgggtccgaggccgggccgaaggactcagggccccagcggtcgtggcgccttggcccggccggcgggtgaggtcccggggggagcagaggcccccgcggagctgcagccgccagccccgagccccgcgcgcccggctctggactccgccggggacctaaacactcttcctggccctgcctgctgtgccaggtgcgcccccgcggccggacactcaccctcctgcggccccgcggcacggccccgacccggcgggacggcccccgccagcagcagcagtggcggcagcagcagcagcagcagcagcaccgcccaggccgccccgggacggttgcggcccgcgacccccatggatggctcagcggttgcgggcagaggcggcggagtgcgggcggtggcggcggcgg

SEQ ID NO: 224045 - DNA, 411 bp, Homo sapiens
  chr11:9596436-9596847
  hyper
ttttaaacgcggcgatcgggcctgtaatttgggcggcgcgggcagaaggagtttaaagaaaaataattgtcccgccctgatcgtgtcgtgtcgtgtggcgtggatgggggaaaggtctggggcatgcagggagactacgcttggacttgggagtaaaggctggccttccaagcatttacagtcctacagactcatcctaagtccaggcagtactgaggcctgtttctggacaaggtcttggcccagcatttgtttttatcgtgggtttgcggtgcccagagtttggccggcctccgtgtgattaggaacatcctaccgtagataaggtatcttaaagaaggaggtgttcagcacctgtgttttgaaaggccttcgagtactgcgcagatgaccacttttaaaactgcagat

SEQ ID NO: 224046 - DNA, 577 bp, Homo sapiens
  chr11:9685464-9686041
  hyper
ggagatgtgtttaccgtcctggctgacactgaaggccaagcattcttgccaccaggcgtggcttgactcgcagaacccacactctggcggctgtgggcgcggcactggaccggcgccggcagcagggcggggcctggcgggggcggggcctggcgggtcaggtgactgcgcggcgggctgtggctgcggaggttgaggggcgtccgaggcgcggaggggctggctgggcaggaggggttggcggggcagcagggccgcggccatggggagcttgaaggaggagctgctcaaagccatctggcacgccttcaccgcactcgaccaggaccacagcggcaaggtctccaagtcccagctcaaggtgggcgcctcctgacccggccccccacccgaccctccccggcgcgctctgtacttcccttgggtggaagcgggacctggcgggccgtgaccgcagggcggggcgggtcggaatgcgcccggtaggcccgcttggggcggagtgggtctgagaccgggatttggtgtttactgcctcccccttgccttcgggccatgccctcggttggatgtgtta

SEQ ID NO: 224047 - DNA, 742 bp, Homo sapiens
  chr11:12029918-12030660
  hyper
cttccaccgcgctgcgcaatttgtgctgcgtgtcctccatcagttcctcaacctcgcggaacatctcattgagggtggcctcctcctgcgggtagctgagagccgggccgggcttgactggagccgaggtcgccgtcggagcgggcgcgggggccgtggggaccgccgccgccagcagcaggcacagcagggtggccccaagccgctgcatctccgctctgcgcccgcagccgccgcctgtgtgtcccggaacgcgatcagaggcgcgcggaccacccccctcgctgggcccgccgccccgccccgttccgccccgccgcccgcccctggcgcccctctttcccgcacccgcccggagacgggaggaaaccgaggcccctgaaaacgcagctcccctacacccgaaaagacgcgaccccacccgctccagcccgagccccgatcgccccaggaccccgcacccccatcctcgagcacaagctgagctctgctcctcacctgtgatgctggagccctcgccagagcaaccgaacccggatcctctacgctaatagctcccaagccccagctcacctagactctgtccccggttcaaaccctagcccctcctcgaccaggtcagagtgcccgacccccacttccacctcaagcctctctcagcccctacctggggtggaccaagcacaggtcagccccctccccttggcgtcgggtcctactcgagcgccccgccccacatcca

SEQ ID NO: 224048 - DNA, 383 bp, Homo sapiens
  chr11:12030677-12031060
  hyper
cagcagagtcgtcccctcccccgccgccgcccctcacccaccccgactggaccgagttgcgctgcgggccggactggatctgctcgctcccgccgggaggccgccgggctgcgggtgcagatgcgggagcggcgcggtgggcgggccgcgggtgcgggagcgcggcggggtgcggcagcgccggtacccgagggagcccgcaagacgcgccccgcccgcccaccaggctccctctccgcccccgccccgagccccgcccgcccaccaggcccaccccgccccgcggaggggccgcagcccggccattggccagccggggcgccggccacctcacgccccacgccccacgccctcctcttctgcctcagcgaccagctctaccg

SEQ ID NO: 224049 - DNA, 300 bp, Homo sapiens
  chr11:12132104-12132404
  hyper
cccggtccaccgcgcggcgcagaaccgcaggcgctcggctggctaagcctgcgccgggccgcctcgctcgctcccagctctgtcagtggcccgcggggcccgatcgctgcgcccgcggccagggccgaggcaggcctgacccggggccgggcagcccgcgcgactttcggtaaggcgggggcggcgctggcctcagggtggggagggcgggcgggcgcgggtggggaccgtgccagcctcggctggactctgcgccgtgtccaacgcccgggagggtcaggtgcggccgcagcatccccc

SEQ ID NO: 224050 - DNA, 1140 bp, Homo sapiens
  chr11:12695555-12696695
  hyper
ctgaggcacggtaggcgcgtcgcgcgcaactcccgcctcggcgcctgccccctggaagaaacccaggcttccagagttcttcgcgcgagcgcagggacttccaagccgcgcagctcccgtccgccccgccccgccccgccccggctcgggacaaagcccggagcccgcgccgggagacggagggcggctcccgcgcgagccacgctcccccgtgggcgcgagactccgcccagctgccgaaagcccgcgccccaacggcgaagcagccgcgccggtccgccccgattccccatgacgtcaccggcggcggcaggccccgcctccagccccgggcggcaggccgcatgacgtcaccgaggccccacccctccggagcgagttcggtcctggcgttcatttcattcctgtcctcattccgaacattcttagcatcgctcgcgccgcgccgcgccgcctgagccgagccgagcctctgctgccgccgccgcggccccgccgcccgccgcgggcgcccaccaagcactttgcagactcgcttccaccctgcgggccattccgcgcggcggggcccgggcccggggcggccgcgtccaggcacaggccatgcagtgacgcccccccacccctccacctttgcccggagcgcgggcagcagcccagcgcgccagccggccccggggcaggagcggtgctaggcaggggtggggtggccgggcccagggaccgggagccggggagggagccgggcaccgagcagagggcgggggaagcggcgccgaagtttgcctcggactcgccgggcgctgcggtggctccctgggccgaggtaagttggcgcgcggggcggatgctggggtgcggggggcgcacggggcagcggggggccggcggcgcgtccctcgcgggccgctctttctttgcgggctctgctttgtgtgcgacggcgggcgggcacgcggagggccgcggccgggcccccacacccgcctccccgcgccccctccgaggtgagcggccgggcgccgccgcgcgacttgccaggacgccaagttgggccgcgcgctgggagcccgcgcggcaacaggcggcccccggccggccgcgccgcgccccccgcgcgccccctctcccgccgcctgc

SEQ ID NO: 224051 - DNA, 105 bp, Homo sapiens
  chr11:13298718-13298823
  hyper
gtctggcactcaacgttcctaaaattggtttcctagatggagccggagggagagagggagtcaggaactgctgcttttcgtcggaatgcccggaggggagaagaa

SEQ ID NO: 224052 - DNA, 473 bp, Homo sapiens
  chr11:13300228-13300701
  hyper
tctgcgggcaggtgcgcgtcggcctggggatgtcgcccggagcccgggtgcgggccggccttggagtcccagagctccgcggagggcgcagcgagcctggctccagctccgggtttgacagatgtcagggaagaaaaggttcccgctcggctattgccgggcgttgacatcccagagagcttcccgtttgcttggaagaagacgaggaaggtagaggtgaacgtcgaccttgtggggcgcatgttagcctccccgaggggtcgcgagagccggcagcggggtgagctcaggtgcccgccggcaggagctggggagggaaggggagtgctggacaccggcgcctgctgtcaagttctcgccggccggtgagagacccgctgccgccgcgcaccccgcacctcctgacccctctcccctctccgcctcggccccttcccggtcacctagcgttgttttggcgctttggcgcttgc

SEQ ID NO: 224053 - DNA, 512 bp, Homo sapiens
  chr11:13689450-13689962
  hyper
tccataggttccctcgtgccccacccctcagaagtaaacgttattctaactcctatcactaccggtaagttttgtagggaattattttggaggaagtggaaggtggaatgaatgggcccacagtcccctgggactgggcgagacccgtggaggctccaggggtccgtagagctcttcgctctcaccgacccgggccacacccgccaagctggtagttctccgaacggatccctcacgcccagcaatggccggagggcccccgggccccaccataatagcgctaagcacgccacaatggcagccccgctgtctcccgcgcgggcctcgctgcgtgctcccaaccttgggagttggcgcccctcccgcgcgacggacagccgggcgtggccctgggcgcgacccgacaggacgccagcagccggcgggggcgctccaggactcgagatgtggggcgcgggcccattggctgagcattcccccgcgagcctcccggccgcagggcccacctcccg

SEQ ID NO: 224054 - DNA, 480 bp, Homo sapiens
  chr11:13690037-13690517
  hyper
aaccgggttgggggtgagaggctaaagcagggaggaggatgactggtcctgcggataagggtgtgcgcgagagccaatcaaaagcggatgtcgaaaagaggcgccgctccagccagtcacgtcgcgaggtgcggtcggggccggctgacgcgactgcgggcctcagccaatgggcgtgccactgcccgtccgctcttcagcagccggtcgcgggcggtggaaaagcgagtgaagagagcgcgacggcggcggcggcggcggcgcagctattgctggacggccagtgggagagcgaggcctgagcctctgcgtctaggtgagaagggggtgcgccagcgggagcggccgggctgcgggctcctcctcgcctggctcgggaagtggttgcgggagctcgggctgcaggcctggccgaggcgggggcgccgaccagccgtcccgcccccgcccccgcccgggtacgcccagaagtgagggcgc

SEQ ID NO: 224055 - DNA, 105 bp, Homo sapiens
  chr11:15671822-15671927
  hyper
agaaccgcgcccccggggtggggcttgggggccgccctgggactcggtggcttctgcccgagcggaggtcagcgaggacccgggaggcagcgcctggatggagct

SEQ ID NO: 224056 - DNA, 900 bp, Homo sapiens
  chr11:17035187-17036087
  hyper
ccggcactcgcctctcccggcggggcgcagccccagaccctagaggggaggcgtgcccagcccgcacaccagcacccgaatccagccggattgcaaggtccagggcgcagagtctgcggcctcttcccccccggcccaggtccccagcgtaggtgcggcccccaccgccttcctctcggaggccgccaaacaacttgggcacacaaaacgttgagtgtggccgcggcgcagcgcgcgccaacgagcccgggccggcgggagcagaggaagggcggggcgcccggcgggaacggggagggaccccccccccgcggcacaggtgcgagcgcggcggccccactcactcactcgatgaagtagctggcgccctcctccgtgaagccctcctcccagccgcggggcaggtctgcggaaacgccagaaaagtcgggtcaaacttgggccgccgctgcgcgcgccccccacccgccggcccggcgcccacctgagcggatcatgtggcccgagttgacgggctccccggtgcgcggatgcagccaggtcgtgcagcggagctggtcactgcgggcagagaggtgcacctgttagcgccgccacagcccgccgggtgcccgcccggcccccgcccccgcgcccccacccgcgtccccgcgtccccgggtcctcgcgccgcacttgatgaagaagacgcggccatcccggcacaccccgtaggaccaatgctcaggtaaagtgtcccgcccgaccgtcgccgccgccatgttcgccgagcgcggagccgccgcggggtgggggggagggggcgggggcgcgggcaggggcggaggcgggggcggtggcgggggctcggcctgcgcgtggcccggcggcgccgcgaggcgctccatccaggcgcgggct

SEQ ID NO: 224057 - DNA, 320 bp, Homo sapiens
  chr11:17036279-17036599
  hyper
gggcgcgcctgggcagcttcggggcgcgcggttggacccgaccaactccgaaaacggcgagcgcccgaacgctcagtaaaccccagccgacccgcaccacagaacttcccgacccgggaactccgcttgtgtgtgaaccaagttaacactcaggttcctgccatattcccagcctccttctcttcccctgtaaggttaatcgagtccacacgggattgttgtgtagattaaatgaagtaacaatcgcataaagtgcttaaccggaccatggcatgtagtaggtgctctatcaacggcaggccgagcgcgatttcattttc

SEQ ID NO: 224058 - DNA, 180 bp, Homo sapiens
  chr11:17498236-17498416
  hyper
gtccacaaagcagccgttgttgaggaccccctggtccacccggtaggcggccgagtggttctcgctgccgcagaaggccaggggcatggcggcgcgggcgcgggctgggctcgggctcagctggctccgctggctccgcgcgcctgccgcgcctctgtcccttgcagctccgccgcccgg

SEQ ID NO: 224059 - DNA, 260 bp, Homo sapiens
  chr11:17498486-17498746
  hyper
tgctccaccacctgcggggccggggggcggcgaggaacccgaccggccctgctacgcttgcgcccaccttccagatgtggaggcgcgtgctcccagatgttgccggggtggcttcgtgagtgccctgatgcacgcgtgcgctgggggagaggggaaaggcaggctaagatggggagtggggtgtgggcacactggagtctgggtgggaaaggagggtggggcgtgcagaagaggagagaagggcccgcaaggcctggagt

SEQ ID NO: 224060 - DNA, 780 bp, Homo sapiens
  chr11:17741464-17742244
  hyper
ctggacccgcgcctgatgcacgtgggcgcgctcctgaaacccgaagagcactcgcacttccccgcggcggtgcacccggccccgggcgcacgtgaggacgagcatgtgcgcgcgcccagcgggcaccaccaggcgggccgctgcctactgtgggcctgcaaggcgtgcaagcgcaagaccaccaacgccgaccgccgcaaggccgccaccatgcgcgagcggcgccgcctgagcaaagtaaatgaggcctttgagacactcaagcgctgcacgtcgagcaatccaaaccagcggttgcccaaggtggagatcctgcgcaacgccatccgctatatcgagggcctgcaggctctgctgcgcgaccaggacgccgcgccccctggcgccgcagccgccttctatgcgccgggcccgctgcccccgggccgcggcggcgagcactacagcggcgactccgacgcgtccagcccgcgctccaactgctccgacggcatggtaaggccgggaccccaggaagtgaggaagttagggcggcgctcgggatatcagggacgcgtttccgagggcggggagctggccttgcgggaggtttgggccaggatccttcccgagagagaggacccccttgtcctgggcagctgtcactggggtagcctgttttggaagtgtgcgggcaagcgttcgagctgccccattgggggcgctattagaacactgcagcgcgaacgtgaagatctttttctctacttatccctacttccaaaatgtaaatttgcgccc

SEQ ID NO: 224061 - DNA, 114 bp, Homo sapiens
  chr11:17742382-17742496
  hyper
caggaattggtgttcgggcctcgagccgtcccgcgggcctgactcagtcgcccttgctgtttgcagatggactacagcggccccccgagcggcgcccggcggcggaactgctac

SEQ ID NO: 224062 - DNA, 180 bp, Homo sapiens
  chr11:17742843-17743023
  hyper
gcctgtccagcatcgtggagcgcatctccaccgagagccctgcggcgcccgccctcctgctggcggacgtgccttctgagtcgcctccgcgcaggcaagaggctgccgcccccagcgagggagagagcagcggcgaccccacccagtcaccggacgccgccccgcagtgccctgcgggtg

SEQ ID NO: 224063 - DNA, 104 bp, Homo sapiens
  chr11:17743180-17743284
  hyper
gcgggagaactgaagtttccgcccccgccccacagggcaaggacacagcgcggttttttccacgcagcacccttctcggagacccattgcgatggccgctccgt

SEQ ID NO: 224064 - DNA, 139 bp, Homo sapiens
  chr11:18610605-18610744
  hyper
tcaggaaagagcaagaccgaaaattgcagttgaatttaggaaggaggcggtaatggaacttcagaagcaaaatttcagggagtagaaaggaaaaacaaagtcaggaggagccttgccggagaagcggagataggacagc

SEQ ID NO: 224065 - DNA, 727 bp, Homo sapiens
  chr11:19366639-19367366
  hyper
ccctggaaggggaccggggtggcgaggccgccgattggcagcgaggcgccatgtgaactgcactggttggctggcgggagggaggaggaggcggtttcccgggtaacgggagggcaaggagcggctgcagcggcagcggccgcggctgagaagcgcgggccggagtgcagtgcgagaccggctggaggaggcggctccgcgaagccggtgtgggcgcaggtaggaaccccctatgctgcctcccccaggtcgggtctggctggactgcccggcggcgggaccggcctgggaaagtttgcggtgcaactgggtgggcaaggaggagaggacttggggatgctctgtgctgagctccggggtccagagcagggtggggactgccgttggggagagggccggcccctcattgagaggctcgggggccacacctctgctgcgggactctgaccgagggccagggcctctcaagccacccggccgcagcatagataccgggcgagcggacgcatagccacccgtgcgcgatgacggccggcgggcccttgttcacagatgcgctgggaaactcttccccagcagatgcggggctgggcgcccggcgcagtgctccgaggctgctctgcgagctcgggggcgcactttcccggcctccagcgacactgcgcacgcccctatccggagtgggtgtgtgtccctctgggcgtacgtgcctgaggctgtgccacct

SEQ ID NO: 224066 - DNA, 126 bp, Homo sapiens
  chr11:19367873-19367999
  hyper
ttggtgggggtggtgtaggtggatcggatccgagccaagccgggggcaactaggccaggcctgcggttcccctggctctcgctctcccacgctccggttagctgcgggcggcgggctagggcgcgg

SEQ ID NO: 224067 - DNA, 1620 bp, Homo sapiens
  chr11:19733825-19735445
  hyper
taaatacttcaaatagttaagtgaaatgtgcagcctttgaaaactggagaggaagccgttgggaggccccccgcccagccggcctggaagagcaggcagagaaatggctggcgcgctcttaaagcgggagacgagcttcggccctgcccaagccagatgggggcagcgaggctgcgggcgtgactccggaagactcaaaccgttaaggtgaccggagcaatttgaaaaaggaaacaaacttccctcgagccgtgcccgcgtggctctggggcggacggttgcgttcgaaagggcatttttcaaaagaagggtttcaggaacgcaggggtgtgggccccccgggaggcgcgcggccggggcagtgccgcaaagcggccaccagcccgctttgtactcgcggccaagcgcggccccagagtttcggcggcggccagagtttaggccacaccctctttgcagtgagacccgcggccgctgattggcgcaccgtggaccaatgggcgcgccggggcggccccggctgtcagcgcgcgccgcagcagcgccggcagcagcctgtcctcccctgcgctgagccccgcagccagcgcagccttcccgggaagcgcggcggccgctcccgagcgcagccctgcccggcccgccagccgcgcgtcccggcgcccgcgccccacggccacagccttgcctctatctagctcacggagcatgtgcagacccgcaggcgctaaggtgctctcagtccgggggccttctgggcagcggtgactgtcaccccaagagagacctttcgggggctcttgccgcacctctgctgcgtcgcgggtgacactgcggtgctcgcgagcagggtggcagctgcctctcggtggagacgtcttgggacccttgcgcccttcttctctccttccttcgctgctgtctcctttccttccttggctgctcgctctttctctcgccggctcagacccgtagcctccggaacgggactcgtgggtcgccgccgcctctgtctcttccaaaggggcctcctcacttcggagatgcagtgacaagttaatatgggcgtccaagcctctgtttcccaggaggaaatttgcaagaggcggcagcccctgagcgcccagagctcttgaaaggccacccaggagaggtgtgagacccggcggcagcatccgtccaggtgggacccgctgagcgccgtggccagtcccccattcccatcccggcaccccaaaggcgcgctcgcccgattgcttcgagttccccgacctggggattttttttttagccgctggtggtgggcgcctcgtgggctaaggcccggcgcctgctctgctacccgcgctgcctttagcggtcgcccccgccgccgctgccagggacgtgctgggaaagcccaagccccgggagaagatgccggccatcctggtcgcctccaaaatgaagtcgggactgcccaaacccgtgcacagcgccgcgcccatcctgcacgtgcccccggcccgggcgggcccccagccctgctacctgaagttgggaagcaaggtggaggtgagcaagaccacctatcctagccagatccccctgaaatcgcaggtgctgcaggggctgcaggag

SEQ ID NO: 224068 - DNA, 720 bp, Homo sapiens
  chr11:20178332-20179052
  hyper
tgccccgaagggcggggttgggggccggtgaggccgggagagaaggcggggagtcggggtggggagagaagagggctatcctgcggagcttcgagggtagtggcccgtgtactcactccctctctaggcctcggttttcccatctgtacagtgggacctaagccgtttccgaacccttgcaattgacgggtgcgccggggaggggtgaagggcgggggcggggggggtgctgtggaggaaatgcgctcacctgcgagtctttcaggcccagcttggccgccagcttcttgcggtcgggcttgctgatgtacttctgcttctggaacatcttctccagcgccttccgctgcacgtcggagaagactgctcgacgcagcatgccccgccgaggcttcccgcgcgcggccagcggccaggagaaggtcccggggatgggcaccacgctggaggaagctgcagggtggggggaggtggcgagtgagtgggcgtacgccccccagtcccaacacggctctccctggctttttgctctgatcccttcatctctttaaaacgctcctttttctccccctggagaataggccacgaacctacaaacctgcgagagtgaaaggcgctttccgcccaaacaactttccctttcaaccgtgcaaacccggattaggtaaaaccacggaaacagagaaaacagcccccacaatagcctgtttcgtttttcca

SEQ ID NO: 224069 - DNA, 286 bp, Homo sapiens
  chr11:20181750-20182036
  hyper
caggaagctggagtggccggaaaatgccgactgcaaggactggggcagcgtcaaggtgggcgtgggccgcaggaggctagggtacccggcggggggcgcgaggaggccggggaacatcatggtaggcgcgggcgggcgaaataacccttctttcagtggccggagggtaaacgcctcgcttcccgcccctcccgcccccacagtgtcctctctcttgggcttagcaaacgtctccaagtaacaatcccacttgggcgtctgcgagtcctccgtggtcctctcgtcg

SEQ ID NO: 224070 - DNA, 1200 bp, Homo sapiens
  chr11:20690526-20691726
  hyper
gcagggactcagccatcatccccctcaggtccctccccacccagttgacagagcgaatcccgagtaattgttttccgagggggtccgtgcgcgctcggtggcgccgcctcggtctgggttcccccgaggaaaaatacccacccgcgagggctcggcggcttttcgactcggcggggatgaactgtggcaacttcggcagcccccaccgcggtgcggaagtaaagagggcaacattggcgactgcggctcggaggggctggagcgcgtgaagccgtgggggcgccgtgcgcctcccgctctctcgtttcggccgcaggtcctgggactccgacttcggtgctccgggtgatagcggctgcggcgcctgcagtccagatcctcgcagttctgcgggcgaaggaggcgaacggaatcggcccccagtggggagcgcaacaagccacagtagccaaaccccgcgctcctgcccgggctcccagacgaacgcagccgcagcggggggccgggccccgagccccacgccgccgccgccgcgccagcggtggggggcgggctgggggcggggcggccggggctgccttcccgggcgcatatgcgagcgcagcacccggcgctgccgagccacctcccccgccgcccgctagcaagtttggcggctccaagccaggcgcgcctcaggatccaggctcatttgcttccacctagcttcggtgccccctgctaggcggggaccctcgagagcgatgccgatggatttgattttagttgtgtggttctgtgtgtgcactgccaggacaggtaagcatgactgtggcggttagagggatccgggaaatgggggtgcccacagaccacggcggcgtggggagacctggagccgagctttgcgctggtctggggaacggcggtagcgtggaccggttcctgggatctctttgccctgctcggagtgacagggtgaaaatagggactcacgggcttgaagatgtccccgttgagtgccccttctcaggggacccggcctcaggggcgcaggagtgaggggcgcggccgagtaggcgcaccctcttgctgctagtaaccggctttccgtcccagggagtcgaaacccgcagcagggcgggcccgcgtgccccgagttcccgaacttgtaaggtgctgtggaaaccactctcgccgacccccgccaggctgggaagg

SEQ ID NO: 224071 - DNA, 360 bp, Homo sapiens
  chr11:27743975-27744335
  hyper
ggctgagttgaatgaagttatgactgcgtttgctctaatgggttatggcttcccaaatgtgagttaacagccccggtgcgcagctaggtcggaaggcgagccgcggagagcggagccgcgggccaaggcagggacgggaggggaggcggcaggttgggcgctccgctgctgctcggtgctgcttccccggagccgcttcctcatcctgcgggggctgccccgccgccggggtgccggggtgagcgcggcgggagccagggctggggtggcgaacctcggagggggctctcccaggaagccctgcggttagcgcccgcgcttccccaccagtggctgcgcaagctgggaagcgaagaggtc

SEQ ID NO: 224072 - DNA, 600 bp, Homo sapiens
  chr11:30606995-30607595
  hyper
gtcactgcacctggcctcgggccgccgcgggagcccggggatcgggccaacacaatgcacccaggcctaggccggggcggctcgaacacatcaccccgggactttctagtaaacagctcgctgagccctcgtccccacccccatccccgccgcccggcttccccagcttctcgccgataccccctcctctcctcctaagaaatcctggcggaggagggagcgaagaggtggggacccccagaggtcgggggactgatggctggagggggtggagaagagaagaggcgcaggatggggagtcggagggaagacacctcctaaaaaagaatttgctttcgctcaggggttgaaaatcagccctccccgagcgccgaattgcccgggaggcgcccgctcgtgcggatgtcaggggcaccggggcagcccgggtccgcagcctccgagcccctcgcacgcgcctctgacaaggcacctctcacccgggctccgctttgtgtgtgcatttttttcccttcctctagtgctcggcaccgggctcccggccgcctcctccccctcccccgccctccgcctcccttcccggggcggattacctttccc

SEQ ID NO: 224073 - DNA, 540 bp, Homo sapiens
  chr11:30607612-30608152
  hyper
ccggggatgccttcagcgcccggcgagcaggcgatccatagccgagcggcccgagccggctggaggagcgctgggggcgcgcgggggcggcgaggggcgcgagcgggccagaaccttcgaccccggaggtcccgccgcaggctggggctgggggccagggggcgcggcgctagagggaggcggggggagaaaggacccgagcagcctcgatctggggagagagcgagcgagggggcgaggagagggagcgagggcgcggcgagccggagggagagcgagcggtgcagtgacagggactgccactggggtcaaaggagcacagctccaggaagcagggcggccgaggcgccgctccgtgcgcgctccccggcgggaccccgcgcccctgcacgcccctcccgcagtccctgcccactcggacccccaccggtgccccgaagccccagggtttcgagaggaggagggagccgagggcgaggcccggtagcctgctggtgctcccgggtcaagcaggcggcaggaagctgagctgcaagttca

SEQ ID NO: 224074 - DNA, 360 bp, Homo sapiens
  chr11:31820609-31820969
  hyper
accaggacctcagattgctgggggcggaggggtggacgctcgtgagtgcgaagttcgggtgtcacttgggtgtgtccagtgtctacaagtgggaatcctacggtttcaaaagtcaggcagggatggggttgcctacactcggtggggtcaatcgctagtctcaccagaggcgggagcgggcctgggggccctctgagctcgcggaggcggcgggttcggggcccgtgcgggcggggtcgcccaggggagcccgggccccgcgcgtcaggaggcctccgccggccgagcggccgcgctgggaaacaagaagcgagcgctttgctccctatcttcccagtgtccgtcctatattgttttctg

SEQ ID NO: 224075 - DNA, 420 bp, Homo sapiens
  chr11:31821107-31821527
  hyper
gagcaattacagagcgacaggattgttcccataacaaattcttgcgagtgacagaagcatcctttgtaccagatatttcgcatactgttaccgattttcccttccctcgcccgactccatggaggcgccgggcatccggagccggtccgagagctcacggatgcgccggcagcctcctcgcagtcccgcgcgccgcccctggccccgagcccctcggctccgttgtgctcctgggagtgagacgccacgtcccattatcccgcatattatctccttgtcacgaggacaacaaataccgattaatcttcggagtaaactgtttcctattcttgaccaagctacctcggggtgtggaggggagcggaggggagccaactgaccctcccctccgccccaccccccccatcccccgctcttctt

SEQ ID NO: 224076 - DNA, 280 bp, Homo sapiens
  chr11:32008880-32009160
  hyper
tccggggggaaccgcgcgtctagggctggaaacccgccgccacagcgggctagaggtcgtccccgcccgcaacatatgcgcgaaggaaagtgctacgaacgtcaaatggccgccccccgccgacgccatctgctctgcgaagcagaaacggcggcagctgcgcgcccagtccctccgcccgcgccccgcgcgccgagtccggatccgccgcccggcggcaccgcggacagcgccagccccggggtggcgggcgcggggctgggggcgctgggaagagggg

SEQ ID NO: 224077 - DNA, 180 bp, Homo sapiens
  chr11:32455912-32456092
  hyper
cagacactgcgccggtctcctggttccactcccgtggggactagcagtcccggaatctctcggactctaaggggccccagacgccctcccggctcttgcgaacagtcaggctcctagctctgcctggctttggaggatgtcgggggccagtgcctgcgtgcactcccactctccggcctc

SEQ ID NO: 224078 - DNA, 720 bp, Homo sapiens
  chr11:32456250-32456970
  hyper
ttgcgaatagcgggctggctctcgaggcagctgggcaggtagggcgcgttaggaaacatcctggcctggccggatgacgcctggctgggcggaggaggaccgaagggcccgtagcgacaggctccggctgtgccagtgaactggccggaaaagtggacagtgaaggcgctcaggcactgctcctcgtgcggctccgcgccgccccagctcggctcctgtttgatgaaggagtgaggcggcggcggcgggggtggcggcggagccggtggcggcgcggggccgcccaacgacccgtaagccgaagcgcccgggggcgcaaagtccagcaccggcgcccactgcgccgcgccgctcacaggcagggcacagccgccgccgccacccagggaggggacggcgggcagcagcgcgttcaggtcccgcacgtcggagcccatttgctgcggctcagacccggacgccccgcggctcctccggccctggagacgttcagcgctggcctcggcggcgcctaacttggcccagatgccgcccgggtcccggactccctgctgctctggctgctgtaggcacccaggcccggagcggagcgtgtgctgagacgccggctccgggacacacgtggaagccgggtcctgcagcaagaggaagtccaggatcgcggcgaggagacggcggggcccgggcgcctgggctgccgtcccggctctgggtgggtgg

SEQ ID NO: 224079 - DNA, 412 bp, Homo sapiens; identical to SEQ ID NO: 202504
  chr11:32851553-32851965
  hyper

SEQ ID NO: 224080 - DNA, 300 bp, Homo sapiens
  chr11:32915258-32915558
  hyper
tccattgtattggaacctgggtggccgacaatgcggtcttggggactccggcgtgtgagggttgcggaggcgggagaggaagagtcgcggaaccgcgtcccggagacactggggggcccgggagggctgggctacgggagaatccccggggcgcagggcagaagagggggcccggcagggcgcgaacgcggctccagggccgggtgacatatgtttgcgctggtggccaagatttaggcgatttttcttccacgcgttcaaagttgctcttaggtttcctccccttttaacaacagcagg

SEQ ID NO: 224081 - DNA, 1005 bp, Homo sapiens
  chr11:33397489-33398494
  hyper
ctccgctgcgcgggagccgccgggaggggtccccctcctgggtctcgagcccggccgggcgcgcgggagcggggagcgcgcggtggctccgcgcggggctgcgcgcgcgcgccggcctcgcctcctcgcctcctcgcccgttccggaggctacgtgctttctttgtcaatgaggcgccgctctgagctgcggtagcactcgcggcccgggaacccgagccggagccggggctggaacccgaagcccagcgaggagcgaggagcgaggagccaggacagcggggcgccgaggctgcagcggcggcgggagggagggacccgagcgcgccccgcggccgccacccccgttcccggcagcctcgccccctagttctgcaggagccggcccgggggagggggccccgggcggcgcccgtcccaccctcgccgccccaatcgcgccggcgcgcggcgacaggcaccgtgggaaccccggcccgcacccgccgcggctccatgcgggcccggcccctgcgcgggtgaagccgcggctccctggagcccgccccgggcgcggcaggacgagcgagccagtcgcgccgctcggcgccccctccctccggcgcccgggccgtggccggcgatgcccggtgaggaccggggcgccgagggctgggctccccggcgcggtgcagagcgaggcagcggcctggatgtgtgaagcgtccccatggctccgcaggaggccaagcctcagggctcaagggaagctgggcccgcgacgcgggggcgcgggggccggcccgtggcgcgtgggcttggtcgggctgcctggggagccgcgcgctgcacgggtgtgaggggccccggggccggcgcgtcccacgatgcgcccccgcggccaccgacgctgctgctgggacttctgctgctggcggccctcctggagcacggccaggccgacccgggtaagcgctcggcggcggggcgtccgcggaggtttctggaggagcggggcggcgggacg

SEQ ID NO: 224082 - DNA, 927 bp, Homo sapiens
  chr11:33890237-33891164
  hyper
ggtgcattaactttcgaggttcacatgtccccatcggtggaccccgaggaggggtacacctactcagatttactccggatttcgctgctctagaaatccctggaggcccagagccagctccgaggtggacggtcggacccctcacccgcccgttatccgcaaggctggcagcggctccacctgcggaccgggaaggcggccgttggggaccccggaggccgccacttggaatgttcccctttccaagaccaaatggacaaagagaaaggaccgagaaggagagggaagaagggagcagagtcaagcccagaacgctctccggactgcacctgcgcgcctccaggctctcctcgtgcctgctcccgtgcaaactttctggcccgtggtggctttggggagcgtcccagtagcctggagtggcccgcagaggcgccgggccgacccctgtccctgccgcccgccgcccagtccctctcccagagcccccggaatcacccgggaggaaggaggagcccagcgctcggcacagggggccaagggcacgccgcgagcgcgcacctggagccccctcgcgggccgcccgggtccccccgacgctccgggacgcgaggccgtggacaccgggggtggcaggggcaggggggccgcacttactctgaagggtccaggctcttcctttcgatggccgaggacattggggagggaggcggggtgccgggcggcgggggcgctccctttgtggcgcggggctggccggctgccggggctcggaccccctcgggtgctcgggcgccgccgccgccgccgccgtcgccgccgctcctgcgcctccgcttgctccggcgctccgccggcgagctcgcccctccgcgctcaaggacagtcaccgcgctcccttcaaacgccaaagagagagagcgaatcacc

SEQ ID NO: 224083 - DNA, 352 bp, Homo sapiens
  chr11:35439842-35440194
  hyper
atgctatccctgcccgctggagtctggcgactcctgcccttgtcccaaaccacacgttttcccgcctcccgggaagcacccaaatctcttccacccttccttagagctagccagggagattccgccttccagggacaaggaccgatcggagcgggcccagcatctccatggcgactctgcaaacctggcgttcaaggccgcgcgcgctggtccttgccccgccccagggccctgtcttggctcattccttccgagccggcaccacctgcaagcccgcctcgggcctggggcgccgcgctccaggcgctgctaccccggtgtctgctcacactatgcccaatcccctattgtt

SEQ ID NO: 224084 - DNA, 600 bp, Homo sapiens
  chr11:35440350-35440950
  hyper
caccatcccatccccagccaagctacggctccgccaccacctccgaggcccgccgccgccgcctctctatccgcatcccggataggggcgccaccaccccgcgcgtgaccccgctttcccgcgggtacagataaaaatcccctcacccttccgtagatgccatggtctggggaacgccccctcctcttcagcactatccggcagctgtgggcgagggagaaagcggacgccggggtgagcgcgaagtgcggccgggagcggtatttaagaggagcctctgcccgcccttccacccgcctccggggtaagccctttagcgcctcaacgggcgcaggaggctcctgcgggcgctaatccgcgtcccggctctccacggcgcgcgacccgcgctcccctccgcccgcggggatggcgcttggcggggagctccgggggctccgagggtggcttccccgagagagcgatgcgcccagggctgcaggagggcgcacgccggcgatgcgcccctgcagccgctgccacctgtgctttgctgcggggctcgcgggcgcggcgagtggcgggagcagagagtggtggcagaggacggtgagcgtgcgt

SEQ ID NO: 224085 - DNA, 180 bp, Homo sapiens
  chr11:35440995-35441175
  hyper
ctgcgctctggctcggcgccggccagggagggattgcaaggtttagccccgccggagctggggatttgcaggcgatccctctctattttcgtcgagagctgacatcacccgcgccgccgcctcgggcaactcctttaaccgccgccccccgcccccatctccagtcgcggtccctcctct

SEQ ID NO: 224086 - DNA, 960 bp, Homo sapiens
  chr11:35640713-35641673
  hyper
cctgcgtgcgctacggcatcaacccggagcagattcagggcgaggccctgtcttactatctggcgcgcctgctgggcctccagcgccacgtgccgccgctggcactggctcgggtggaggctcggggcgcgcagtgggcgcaggtgcaggaggagctgcgcgctgcgcactggaccgagggcagcgtggtgagcctgacacgctggctgcccaacctcacggacgtggtggtgcccgcgccctggcgctcggaggacggccgtctgcgccccctccgggatgccgggggtgagctggccaacctcagccaggcggagctggtggacctagtacaatggaccgacttaatccttttcgactacctgacggccaacttcgaccggctcgtaagcaacctcttcagcctgcagtgggacccgcgcgtcatgcagcgtgccaccagcaacctgcaccgcggtccgggcggggcgctggtctttctggacaatgaggcgggcttggtgcacggctaccgggtagcaggcatgtgggacaagtataacgagccgctgttgcagtcagtgtgcgtgttccgcgagcggaccgcgcggcgcgtcctggagctgcaccgcggacaggacgccgcggcccggctgctgcgcctctaccggcgccacgagcctcgcttccccgagctggccgcccttgcagacccccacgctcagctgctacagcgccgcctcgacttcctcgccaagcacattttgcactgtaaggccaagtacggccgccggtctgggacttagtgtcaccgggaggaaaagagagagatctggggctggggtatggatgatggggggaagggcggtcgcctctgccactgtcagggaccagccggccaacgcccacccgcaaaggtgtctaaaaacttcagcttttcacccacctgcccctttctttcaatcccacgctgtttccttt

SEQ ID NO: 224087 - DNA, 286 bp, Homo sapiens
  chr11:43569008-43569294
  hyper
aagtgggttgcctggcaacccggcagacccgcgggtggacaagctcaaggggcagccaggtgccacccgccccacccccgagcacacgctgcggaattctgacggcacgaagcagagtcacgagcgcagccggagcagtcgagcgggcaggacaccgtcagtgccgggagaacacgcgcgcgtgggtggatggcgggagggtcctcacagccagccgcaccacccccctcccccccacatcccgcaacctggcttctcctcgctctaaatctaggggaacaaaaac

SEQ ID NO: 224088 - DNA, 420 bp, Homo sapiens
  chr11:43600469-43600889
  hyper
ggtgtaattttggttggaaccagcacggattcccaagtcgtgactgcaaaaagtgagtaatgcgcgctggctgcgtcatggctctagtcacagttcattccgaactgagaaggaatcgtgacttcgcctggagacgtcccctacatgggagatggggggcgggggggcaccaaatcagtggggacgggggtgggggggaagacctatccaatgaaaaccgctgccaggggggcatttgaactccgtcgcttgctgtctcgctgtcccctctctgccccgcgcacctcgctccccctcccggccggcgctcgcagtggcgcgcctgctcgctctcccgctaagcgacgagtcttcaacaagttggaggaaggcaggaacgcaggggttaagctcggaaagccgcaattaccaagatcgtga

SEQ ID NO: 224089 - DNA, 536 bp, Homo sapiens
  chr11:43600938-43601474
  hyper
ttgccgccgggcaaacacccgtggggggcggggaggggccggagggagcgggccggcaggagaggggctgcttccagctggctgcagtgcggacgggaccggcgcgctcccgtggcccccagaccgaggtaaggagcagggagtcggcgcccgggtcggctggtggtcggtcggctcactggtagtcggtcggctcacgggtagtctgagcagaacttttttttcccagttgccccgcgccgcggcggcggcgggcgcagaccgcggagcccctctggcgcggcgggcgcgcagacgctcggagggtgtgtgcttgcgtctgtcagtcccggagccgaggggatgccgtgggagggtgagtgggtcgcggagctgcaggagggtgatggatgggcgaagggggtgggtcgacagggacttgaagacagtgcctccaccgtcgagagacgttttctccgggcgtgctgggcgagggtgggagtgtgtgtgcgcgcgcgcgcgcccgcccgcacgtcgattccagggtgccaaagaac

SEQ ID NO: 224090 - DNA, 600 bp, Homo sapiens
  chr11:43602584-43603184
  hyper
ccttgcagccggggctggcggaactctgatagggagatagagggataggacaggcaggcggggaggctccgggtgctggggcgacaggaaaggggtggaggctgggctccgggatccgggtgcccctctgcggtccccttctcgccctccacacacttctctcggggctgagttgggggatcgcggacggtctggagaaatggagacacgagtccaggggcgcggaggggcgggcagcgcgcggagtggtgagactgagccgcgatggaacgcgctggggagacccagcctgttcggctccagggttcggagacatcctgggctgaaggcggcggcgaaccgaagaagccggcatattctgcccttcgcgaatctttttgcggtctgggcttgctgtacataactcaatagccggaagcccttaccccaaaaagcatttgcggagggcgcactcgtcgagaagacggcagccatccagcgatcgccgaagcccgcaccttcccgaagctgctccatccgagccttacccggccctttccccgttttccacggaagattcggccctttcccccgtcctttccgcggtgcccgaggctttgg

SEQ ID NO: 224091 - DNA, 300 bp, Homo sapiens
  chr11:43965021-43965321
  hyper
gggagcggggccgctttcctcgtccttgtaaatgtttattttttaactcttcccagtgcgaactctgctgtgagtgtgtgcggggaggcgcgcccgcgctgagtcggcggcgggtagccactccatgcccttgtccgatggtttgcaactccgattttgcacaccgctccaccgtgccccccagcgcacacccattcacactcacgccaacactctcgctgaacacttttataattgttaggcgtggccgttgggactttgggcgcagcgcggctgctactgcgtctggaggattgatat

SEQ ID NO: 224092 - DNA, 420 bp, Homo sapiens
  chr11:43965486-43965906
  hyper
ggggaggtgggggaggaggtggcagggggatgtcggaccagggagccgggagtggagctacctccacaagcttcggtcaccggaacgaggttgcgccaccggtgcgcgggtcggttgcctgcctccccaagtggatccacccccggtccagtgtgctcctgcgtccctggtctattccccatcgccggcatccgggctgaagtgaagccgcaggaggggcggaggcagagctgacgatggagagctctctcctccgtacagttcacttcccagagctggggtcagggtcctcgccccgcacccgccacagaagacgcatctccctctgcgctgattcctggcggcgggtggggagatgtcggagccagcaatgcgagatgtttgggcgttgggacccgagagtgggctggaggccagcct

SEQ ID NO: 224093 - DNA, 780 bp, Homo sapiens
  chr11:44330911-44331691
  hyper
caaactccaagtcgagtttaacagccgaaacgctccgtgcctaggccggcggacaagaaggagacagaacagatcccttggctccctcgcagcgatcgatcccgtttaccgaccagagtcaccaccccgcccccagcccgccaactcatacctcccgcaagccaccagtttcaagggatgcggaagccaagcaccccgtggtccccagcaccaggtgacccgcacgtgcactcaccgtagcagggaacctgcaaggccgcgctgtggccgctgctgccttcctggagtttgaggctgccgtccgggggcgtcttgcaggcgcctcgctgcaagtaaagatgcggttgcgcgggcggctggggctgcggctgctgctgctgcggctgcggctgcggcggcggctggggctgcggggtcgacggctggggctggaacttgttaaaggagccccgcgccccagctccactctccaggggtgtcgccaggtcctgctgcccagcgccgtaacgggcccggctcttggcgtccccgaatccctgtgctttggcggcggccgacaggaaagttgtgccgaacttgtcgcctccgggaaatgccctaaaaggcgacgagccctcccgactctgcgacaccgggctgtagtaggcgtccatggcagcggccggcgactcgcagtaagagacgcaagtctcagcattcatgcctggcttgcgcaggcggcgggcggggacgcgagcgagggcgcgaggacgccaccgcgcgccttggctgggagtttgg

SEQ ID NO: 224094 - DNA, 240 bp, Homo sapiens
  chr11:44748805-44749045
  hyper
ttggcgcggggtccggcagccgccgctggaaggtatggggctccgcacctccgtgccctccgcacgccgccgccgcgcccccggggacctggggacccccccgcgcgccgccccgggggtgctgctggacgcggcggggaattggggtggagtagggatcccaggacggaagcccggcaaccaagttccactcaaactagcacgcgggggctggggggccggggacggtctccaccccgt

SEQ ID NO: 224095 - DNA, 96 bp, Homo sapiens; identical to SEQ ID NO: 202537
  chr11:45684299-45684395
  hyper

SEQ ID NO: 224096 - DNA, 232 bp, Homo sapiens
  chr11:45825485-45825717
  hyper
gaaccaagagaagtcgatcctcctggtctccccggctgcctggtgagtggcagaccacaggctagacttcccaggccccggccctggaaggggcggggaaccctccccctcactgccagctggaagaatccgagcggtccccgcacgcacttctggaagtgcaagccggtagcgcggcgggccagggatacagccaagtcccgggacgtgccagctgcggtaactgaagccg

SEQ ID NO: 224097 - DNA, 62 bp, Homo sapiens; identical to SEQ ID NO: 202540
  chr11:46264958-46265020
  hyper

SEQ ID NO: 224098 - DNA, 180 bp, Homo sapiens
  chr11:46299158-46299338
  hyper
ggggcgtggcgccttggccagctgggctagccagccaggggttcccggtttcacagagaggaaagtgacagaagacgtgcggagggagacgcagagacagaggagaggccggcagccacccagtctcgggggagcacttagctcccccgccccggctcccaccctgtccggggggctcct

SEQ ID NO: 224099 - DNA, 294 bp, Homo sapiens
  chr11:46299562-46299856
  hyper
cgcccgtttgccagcgctcaggcaggagctctggactgggcgcgccgccgccctggagtgagggaagcccagtggaagggggtcccgggagccggctgcgatggacgccgtcttggaacccttcccggccgacaggctgttccccggatccagcttcctggacttgggggatctgaacgagtcggacttcctcaacaatgcggtaagatgaagggtctccgttcccgttccacccctcggcacccgtcctcgcggcgcgcctgggcccctagaaggacccgactacacatcact

SEQ ID NO: 224100 - DNA, 550 bp, Homo sapiens
  chr11:46412034-46412584
  hyper
gtgcacccacaaggcggaggcccggacagagctcgggtcaggcgagtgcaagactcttgtcctccttctctcctcaccctgcaccctaccccagaggcactgtctagcccctgtgaccaaagtggggacccagtttctcacgctagggtcgggcgggcctcgagggccgtgttttcctaggccatctggaggctcctccatgtctccgccgtggtcgaaggagccctggctctcgggtgccccgccctccctccaagcccctagcacgcagttcctgcagcctctgggcgtgggcactgtgtttcccgagtcctcgacacccctcttccccgggcgagaccggagggggtgctccgcacgcccgtggggtggtttggggtgtaggtcttcggttcttgggcattcactccatggctctgggaaggctgtggcccctggatctgtccctggggcgggagaggagactccagagtccaagggagggagaggcgaagatttggcaccgacattgtgcccaacacttccgttgcggggccggaggagggggcct

SEQ ID NO: 224101 - DNA, 240 bp, Homo sapiens; identical to SEQ ID NO: 202542
  chr11:46413465-46413705
  hyper

SEQ ID NO: 224102 - DNA, 333 bp, Homo sapiens
  chr11:46564032-46564365
  hyper
ggtcatactccagaaagaagcgtctcaggtcacactgaagctcatggcgaatgctgcccgagttgttttggctggagccattccctccatctgactcagttgccaaccctgatgccggaaaacccctcccttctgtggctgaagtgtacacagatgcctgagagccaccttcctgctgtctcagcacagacagcaaactcaccgaagaggcactggttctgggcgggggcatggattccgcctcagagcgggagttcagactgagtactgtccgggtccactcagatcctgtcaacccaggagctatttctcggtgatacctagaagggtggc

SEQ ID NO: 224103 - DNA, 182 bp, Homo sapiens
  chr11:46848281-46848463
  hyper
gcttgccctttgcccgtggtttgacacttacgctccccgggcagggagaggtcagggaagctaaggtccgagcaggatcagcaggaatacccggcaggcggcggcggcggcggcagcagcattggtgctgcggtccgctgggaaacgcctcctccgagggcggggcccggagcgccactgtc

SEQ ID NO: 224104 - DNA, 278 bp, Homo sapiens
  chr11:46938770-46939048
  hyper
aaaagaccaggcagggtctccagacccctccattctgagccccagctcccttcatcggggctgcgaggcaaatggggagactcggaactcccgccacgatgaatagcgatgggtgaatagggctggggttcaaagatcaaagttctttgatctctgggcacaaactagggaaagctgctcaatcacggggtgcacccagggtcgttaagagcccgcggagaagcagattccatcggagccctagtcccacacaacagggggtacgggcaccaaggagt

SEQ ID NO: 224105 - DNA, 34 bp, Homo sapiens
  chr11:46939597-46939631
  hyper
ggagggcgagcgaacgaacgccccggaccttacc

SEQ ID NO: 224106 - DNA, 50 bp, Homo sapiens
  chr11:48002696-48002746
  hyper
gacttgcggggaccccggccggcctcgcacgccggcgatcgatccctttt

SEQ ID NO: 224107 - DNA, 720 bp, Homo sapiens
  chr11:57243667-57244387
  hyper
cacctcttcctccacgggaaccgcctgcggctgctcacagagcacgtgtttcgcggcctgggcagcctggaccggctgctgctgcacgggaaccggctgcagggcgtgcaccgcgcggccttccgcggcctcagccgcctcaccatcctctacctgttcaacaacagcctggcctcgctgcccggcgaggcgctcgccgacctgccctcgctcgagttcctgcggctcaacgctaacccctgggcgtgcgactgccgcgcgcggccgctctgggcctggttccagcgcgcgcgcgtgtccagctccgacgtgacctgcgccacccccccggagcgccagggccgagacctgcgcgcgctccgcgaggccgacttccaggcgtgtccgcccgcggcacccacgcggccgggcagccgcgcccgcggcaacagctcctccaaccacctgtacggggtggccgaggccggggcgcccccagccgatccctccaccctctaccgagatctgcctgccgaagactcgcgggggcgccagggcggggacgcgcctactgaggacgactactgggggggctacgggggtgaggaccagcgaggggagcagatgtgccccggcgctgcctgccaggcgcccccggactcccgaggccctgcgctctcggccgggctccccagccctctgctttgcctcctgctcctggtgccccaccacctctgactg

SEQ ID NO: 224108 - DNA, 51 bp, Homo sapiens; identical to SEQ ID NO: 202551
  chr11:57434928-57434979
  hyper

SEQ ID NO: 224109 - DNA, 210 bp, Homo sapiens; identical to SEQ ID NO: 202557
  chr11:59523106-59523316
  hyper

SEQ ID NO: 224110 - DNA, 49 bp, Homo sapiens; identical to SEQ ID NO: 202558
  chr11:60692121-60692170
  hyper

SEQ ID NO: 224111 - DNA, 297 bp, Homo sapiens
  chr11:60775084-60775381
  hyper
gtggaggtgcggctcgaggcgtcctgggagcccgcgtgcggggcgctctgggacagccgcgccgccgaggccgtgtgccgagcactgggctgcggcggggcggaggccgcctctcagctcgccccgccgacccctgagctgccgcccccgcctgcagccgggaacaccagcgtagcagctaatgccactctggccggggcgcccgccctcctgtgcagcggcgccgagtggcggctctgcgaggtggtggagcacgcgtgccgcagcgacgggaggcgggcccgtgtcacctgtgca

SEQ ID NO: 224112 - DNA, 478 bp, Homo sapiens
  chr11:61062605-61063083
  hyper
ggagcgaaccagcgatccccgaaatggcacgcagagctgagcaggggggcttgggacgccgagaggaggggccgagggccgcgaggggacgcggcggacgattgtggggagggtctctggcacctcgaagcgaaacacacaaaggcaacgccgcccgcctgctgatgcctctccgagaggcgcggagcccggggcgggggcaaagatcagggacccctgggggcggggtttcgccctcggcccacaccccctgccccggtttgggagtcggcttcctgcgaagcgctgactgaaggcgtcagaccgaggccccgggaggaaacagacttcgggaacaaggctagcaccagaggctgcgcgccccgggcatggcccctgtcggtgggacccgagacgccttgttgtgacgaggtgggaaccgtggaaattcgaacccacgacgccaggtcgctgtgccgctgagcagttctaggcctgc

SEQ ID NO: 224113 - DNA, 180 bp, Homo sapiens
  chr11:61276134-61276314
  hyper
tccctccgcctcattggcagccgcacgcgcgtcggggttgccagggcgacgggtcgctaagctgcgagtcagcgcgaaccctagccagtcggcctccggcggaggcaacgggggaggcccgagggcgggcggtggagcgcggcgcgcggcggcggtgccccaagtgggtgcctcctcccg

SEQ ID NO: 224114 - DNA, 916 bp, Homo sapiens
  chr11:61276393-61277309
  hyper
gggcggctggggggcggccggggcggggcgatgcctggcggtggcagtggcggcggccccggccggggcccgtgaccatgggcatcgccgagtccacgccggatgagctgccgtcggacgcagaggagcagctgcgcagcggcgaccagcagctggagctgagcgggcggcggttgcggcggctgcccagcgcagtgtgcgcgctgagccgcctgcagaagctgtatgtgagcggcacggggctgcgcgagctgccggaggagatcgaggagctgcgcgagctgcgcatcctggcgctggacttcaacaagctcgagcgactgcctgacggcctgtgccgcctgccgcgcctcacgcgcctctatctgggcggcaaccggctgctggcgctgcccgccgacttcgcgcagttgcagagcctgcgctgcctctggatcgagggcaacttcttgcggcgcttcccgcggccgctgctgcgcctggtggcgctgcagtcgctccagatgggcgacaaccggctgcgcgcgctgccggccgagctgccgcgcatgacgggcttgcgcggcctctggctctacggcaaccgcttcgaggagttcccgcccgcgctgctgcgcatgggccgcctgcacatcctcgacctcgaccgcaaccgcctgggcggcttccccgacctgcacccgctgcgcgcgctgcgcgtcttctcctacgaccacaaccccgtcaccgggcccccgcgcgtcgcggacaccgtgttcctcgtgggcgagggcgccgtcgagcgcatggcggagcgcgacgagcccacgccccggcctccgccccggcgcccagcgcgggcctttgaggatgaggaggaggaagacctgctcataggcggcgctggttcccgggctctgggcgcccccgggggcag

SEQ ID NO: 224115 - DNA, 712 bp, Homo sapiens
  chr11:61347880-61348592
  hyper
agcgctggcacccccggggcaccggtgctggggagcctcgggtgcctctgagggcactgcccggctcccacaggggcagcggctcctcgctccgccacacacgttgtccttgggctgttgaggggtgggggagaggtccttgtggggacactgcgaagccggtcccagacatccagcctggcagtgtccagactgcgggggaccggggtccgagccgctgccgctcgatcccgcgcccccggggctgggatgacccctgggggagcccgtgcggctccgggcggacaacagccccaggctggggctccgagacggcgtccggcgctgccgctgtcctgcccgccggtgcggggcgccccagcccgccggggccgcgcttacctgggctggccgcctccgggtcccggtacatggtcccctcgtcgccggttccctccgggctcctcagagccgcccgcggccgcgcgctgctccgccgccgccgctgggcatggggccgggcgacccccgggggcgggtccgagggcgggggccgagcgggctgcacctagccgcggagccggggagcgggggccgcccgccagccctcccgcccgcccgcggagcacgctgccgccgccgccgaacagcgccgagccgcctccctccggcctgcgcgccgcgtgtgcgcgccggagcgtgtgtgtgtgtacgaggccgtgtgtatgtgtgt

SEQ ID NO: 224116 - DNA, 240 bp, Homo sapiens
  chr11:61520025-61520265
  hyper
cggcgggcggggcgcgtggggcgggcaggggccgggccagggacgcgcggggggcaagcgcggcggcggaccgggcgggaccgtagccggagcccagccgggactgtcgcgcgggccgcgccggcgatgccgcgcccccgggccgggctgtagcggggccgcggctggagtgtgcgccgggcaggcgggacatggaggtggtggacgagacggaggcgctgcagcgcttcttcgaaggtg

SEQ ID NO: 224117 - DNA, 1761 bp, Homo sapiens
  chr11:61594982-61596743
  hyper
aggttgcagaaaggcgccagaatgtggatggcgcggacaatgtgggatactggagtctcgactgccgcgcgccaaggaagggcgtcacctagccaagccggccctggagttgagtgccccgcagcccgccggtccacccgcccggccgcttgctggcaccctggtggccgcgccggctttgtgtcggcatcaggtgcaaacccccagagcgccgggcgtgcgcgcacgcgccccggagcgcgcggagcccattcgttgcccccaccgggatctcctctaggatctcctccggcgcccggggccggagagtgggggagggaggaggtcggacacgtagcctgcctcgcagcagggctcgactccacgcgggagggcgggggagccggggacccgccgctccagcccgctggccttcgaaagatcctcctgggccaatggcaggcggggcgacgcgaccggattggtgcaggcgctctgctgatcgctgtggaaactcgggcggcggggaacgcgggaggatgtggaacccgaggcggggggagccggaggggcgggcagaggaggtgtcgaggccctgagctcccggggagtttttactggaggcaaaagtccatagcgggagggctgagggaggggcggaggaaggggaccgcttgggggcactgggaagccagggatcctccgccaggaaggcagggacactcccgagcgcaggcgagaaggctgggggagggggcgcggtgggaggagtaggagaagacaaaagccgaaagcgaagagggcccgggctgcacacaccggctgggaggcagccgtctgtgcagcgagcagccggcgcggggaggccgcagtgcacggggcgtcacagtcggcaggcagcatggggaagggagggaaccagggcgagggggccgccgagcgcgaggtgtcggtgcccaccttcagctgggaggagattcagaagcataacctgcgcaccgacaggtggctggtcattgaccgcaaggtttacaacatcaccaaatggtccatccagcacccggggggccagcgggtcatcgggcactacgctggagaagatgcaacggtaagggtctgggggcgccccagccacccttctctgctgcaggcggagtcaggatccctggctccccgtgggccaaacagacctccggcgctgaatggagcttgggacgtcctgtagggaaggaaagtgcatctattgcactcgtaccccctccccaatcctcctcctcctctgggccgactggggtggagaccggatctgggacccggggaggcggcgctgcggtgaaagtcccagcggtggagaacagggcaagcatctaccgcgcgcgccgggacccacgcgtcctccccttcctcggggtttgtctggaggcagggactccccaagaggggcgctcgggccagacggctttggcgcccccagcggggaagatggccgcccctgcgcgccgctgaaaggagcgggagcgcaggcagccaggtgtgggactccgcgcttgtcccgcactctccatccagactgggtggcgagaaggaaagctcgtccccggccggagatcgctcctgctgggactcttgtctaagaagttcctcaatggccacctgggaaaaaccgcccagcagctcgggttcccacgctccagggattatctagactcaccccaagctcgagccggccttcttggggaccggcgtccgggattggtggaaggagaacggcctggggtttgc

SEQ ID NO: 224118 - DNA, 190 bp, Homo sapiens; identical to SEQ ID NO: 202567
  chr11:61659371-61659561
  hyper

SEQ ID NO: 224119 - DNA, 164 bp, Homo sapiens
  chr11:62192262-62192426
  hyper
tcggcagagggcacggaaggaggcggcgggttagagacggagctctccagttcgagcccctccatggagcaacgtggtccggtgggccttgtgccccgcggccactagggggcagcatcgtccacagggtcctggagcggacgcgctgtcggggctgaggcacc

SEQ ID NO: 224120 - DNA, 281 bp, Homo sapiens
  chr11:62313646-62313927
  hyper
gcgcggaaggacagccgagggggcgcacggtgcggggtcgcggaggcgcggaggcgctgggggccgcggtggcgatctcggaaatttcccctccagtaaacatgggatacgaacggagcagcccccgagccaccgccccatgcagggagaggaggtgggacagaggccaccaggcccggaacggggcgccctgccttgcagtggagccaacagtccgccctccggagaaataaagagtggagcaaagcacttcggagcgattttccaactttaaccaactt

SEQ ID NO: 224121 - DNA, 145 bp, Homo sapiens
  chr11:62313969-62314114
  hyper
cgcgtcgccgccccgggtggccccgcttgctccaaactgcttgaatcctcacagtgacacccccaacaacgcgccctgccggagcaccgcaacccacctccccgcgacccgcccttggtgccccggaccccgatggcgccacggt

SEQ ID NO: 224122 - DNA, 105 bp, Homo sapiens
  chr11:62369474-62369579
  hyper
gcttaactctgtcctcgctggagccctgcagctcctcctcgcgccccaaagactcgcgcgccttagcgcttcgccaggttatttgcaagcggctttgcctgtcat

SEQ ID NO: 224123 - DNA, 239 bp, Homo sapiens
  chr11:62473884-62474123
  hyper
gccttcccgagctgcgaggtcgctgtctccttgcgctcgccactggctctctctgcggcaggtttccctccggttaccgtgaccaaaggggaaagacgcctgcctccctgcaggccccaagatgtgccccaggggatgcgctgactgcagcctccgctcggctctcccttgagactgcaatcacagccctccgtgcacaccttcaccacaggccatttcacccgcgaagcggccgagtg

SEQ ID NO: 224124 - DNA, 391 bp, Homo sapiens
  chr11:63258433-63258824
  hyper
gtttggggaggggtgggggaatcctagggaggcggagcgcgtactccccctcggcgcccgggctcaggcccatcccgcctctgcggcctcgccggcccccaggccttgcaggggactacgcccctggcgagttcccagtcggcgcggcccctggtcggcggagccgcggaagcttgggcactgggggcggctcggggaggaaccgcggaggggaaagcgccgcgggctgcaaacggcagaggcgcgcggggtggcgacagtggcgcgggcgcagtgagcgcgtccgagaacagaatgggacgaaacggggcgcttagaggcccgggaatctgtgggtcttttaggcggagaggggcgaaggaggttattcgttttggggaaggtcatggaa

SEQ ID NO: 224125 - DNA, 269 bp, Homo sapiens
  chr11:63767964-63768233
  hyper
cacccccgcccggaatgtttcacatctggggaaaccgaggcgcagagcgggacggccctgggcctggcgggaagtcgcgcaaggaggccggcagggggcgcacccggcccaccctgtcccttccaggccgcgccgccagggcccaggcagggcggctccgggaggcgggggccgccgggacaggaaccgccgcccgagccggggtgacggggaagcttcctccccgacgcccctccctagccctgtcccgggcgcgctgcagggcccgc

SEQ ID NO: 224126 - DNA, 217 bp, Homo sapiens
  chr11:64015094-64015311
  hyper
cgtcctctgcgcctcgcgacccgagtgcgcacagagggggaaactaaggcgcaaagagctgggcagtgcgggggccgcgacttataataataaaggcggtaattgcggctgaccctaggagcgtgcgtcgggaccgccgcccagtcggctccgcagagagggcgccgtgccggggctcctgcacccccgccctgcggctcctcggtccttcacatag

SEQ ID NO: 224127 - DNA, 597 bp, Homo sapiens
  chr11:64059064-64059661
  hyper
gcgagggcgctgcacggagggaagcgcggcgccggaggggttaaccgcgggaggaggggggcttctgccggcgggaggggggtcccagccccggcggccgcccgctccgcccctgccgcctccgcggcccagtcggcaccggcgaggccgtgctggaacccgggcctcagccgcagccgcagcggggccgacagtaagtgcggtgcgggctccggtgcgcgggcaggactcaggggcagggacgccccaggggcgactggccgggcggggtgcccacctctcgcgcgtgggcgcctccgggagtggtgtggccgccggtcccgccgcccgccacgctccgaggcgtcgctgtgcggacgcgggggaggcggtgggagcgagctgcgggcgctgcgcggtggccctgctgtctggcgtgtgcacgctagtgtccacacacgtgtgcgtgggctctgggtgccctggcgcggccggcacgcccatgggggccggggatgccggggcgtctgcggagagtgcaggtggggtgcgtgcgtgcagcggggcggcgcggcgctgcagcctcgggatggagcgtgggcgcgcgggtctttgtgc

SEQ ID NO: 224128 - DNA, 293 bp, Homo sapiens
  chr11:64059900-64060193
  hyper
ggaagcagggcgaggcgagaggggacggagaagccgcggagatgctgtcacagccgcagcgggcgagcagggacccaccattcccctgtccccgccttgcgctgtccggcctctcctccgggtttcccttcggacgcctccgagccccctcagcctcctcctcgagggccagctccccgcacccccaccaagctccacacatttcctcgctcgccccgcttccccctaggcaggcttaggctctctttcggcctcccactcgccttcctttcccttctcggtgccctcctctc

SEQ ID NO: 224129 - DNA, 740 bp, Homo sapiens
  chr11:64409893-64410633
  hyper
ggggccaggctcggcgtgcacagctggggtggggcccgcgggggcccagctgcgcacacgggaagcgccccccgcccccgggccaaccgggtggccggcatctacagtgccacttaccgtggccgccgcgggtgaggaagggcatgcggttgatggcgatgggcacggtgccgtgcttgctgtggaagtggtggacgtggtgggtggtgctgaggctggaggagacccgggccccctcggccgcccccagcagcaacagcagcaacagcggcaacagcggcagcagaggtggcggcggcggcggtggaggcggcggcaggggcccagccagggccggggggcggcgcgggcacccccccggcccgctccccccggggggcatttcggcccgggggcgaccgcctcacagccccatggccgggggcggggacgcggggctgcgcagccccgcgaagcccccctccggctccgagctccgggagcggggtagggatgaagcggaggtaaaccagggcccaagcctcggtccggagccaacaaaatcaactggatcccgccgggaaatcgggggtccgcggagcggcaacgccaaggtccaggatgcctgggtccatcgcgaggagctaggggtctctctgcatcccggcggggtcggagcggcgcagagggccgtcagaaacccgggggagcgcccgggggagggggcatggtgccgagtggagagggaggggagcgcgggg

SEQ ID NO: 224130 - DNA, 1198 bp, Homo sapiens
  chr11:64480266-64481464
  hyper
cacgcgccctcgcccggacacgcgtccccgcagccctggagcgctcgcacccactcacaagccctcgtgcccagcccccgtgcctcaggagcccacacacactccgacccccacgaagcgccccaggccctcacccccgcgcccaggcaccgggcggccgctccccggggctcaccttcgctgcagaacttgccgccgaagcccgtgtggctgcagtcgcagcccacctcgccgggggccagcacggtgcagaggccgccgttggcgcaggggttgcgcgcgggcgcgcacagcgggtcggcggtggcgccgcgcaggccctggctgcccagcagcgcggggggccgctcgcccagcttcaggttggccaagaggccgcggaagggcggctcgtacttgacggtgctcagcgtaagcgccgagaggcgcacgtcgggcgggatgccgcccacgaacaggtcgctggccacctgcatctcgcgccgcttggagcgcacctcggcggcgcgggcctcgccgtccaccgccagcgccgtgcggcgcgcgtcgcgggtcagcagcaccatgtgccagcggtcgtcggccaccggcgtgtccagctgcagcgtggccggctcggcgcacgaaagcgtgaagcgcagccgcaggcggccgtccaccagcagcagctccaggaagtcgcagtcgccgccgtcgtccaggtagagcagcagcgcgcgcgtggcgttggtgcgcaggctgaagctgagctcgccgctgctcgccgcgcccgcccagcgcgcgtagcgagcccactgcccggggccgccgccgaactccaggccgtccgcgcgcgccgccagcgccagcagcagcagcaacagcagcggcggcggtgtcggccgccaccggctcccggacgccatgcctacggcggccccggccccgcccggcccccggcccccgctcaggcttcagagccgcgggcgcatggggcgggagggggccgggcgctccccgcgctgagcggggctcccttgcaggctcacagtgccatgggcccggccgcggggcgaggcgcgcagaggcccagatgccggcttccctcaggcggcggcggcggcgcccctcccccgccgcgggctccgacagaagagcagggagggatgcctgcgggagaacagagaggaaagggttaatgagaacagagaggaaaggt

SEQ ID NO: 224131 - DNA, 1380 bp, Homo sapiens
  chr11:64512278-64513658
  hyper
gccggcctcgctgcggctgcggctcccgcccgctctccacgccgcggccccgctccccgccgccccgcccccgcccccgcgccaggctgccccctcccccctccgcccctgcgcggagctccgcaccgccggctgcgccacccccaccgggggctccctctcgccccgcacgcggcggtccctgcggcagcttaacccctcccctgccgcgccgcccgggaggccagggccgcgggcggggggctgcgccactagctgccccgagggcgggcgaccggaggccccgccgcccgggacgcggaggggggaccgaaacgaagagcccctcccccaaccgcggacgccccagtgccccccgccctgcctgggtgtcgggcggaggaagccgggaggggcaggaagcggactgcggtggggaaggggcgccccgcccagcccccagctcgggttcctgttttcgagacaaaccgttcccatggggctaacccggcccgggaccgggcgtcttcctgcaggcagcgggtggcacaggcctagtggaggtcgggggcgtggggacagctggtccttgagatagtctgggggatgggctaggacaagatgggaatattttggggagagggacctgtggggagcgaggaatgaaatcgtggctatctggagacgcggccttgatgtctgggaatgggggcggggggcccagttcacacaggaggaacggggccccggaagcctggctccccacagggtcgaatggaaaggggcagccgcatgtggcggtgggttctccgcagctcggagactggagacctggatgcctggccaacagggaggaacttgggaggggcagccgcaggcggttggggtccccactagccgggcctaggagagcgggtaacggtttccgaccatttggcttcagacacactcactgtgaaaccaccgaccccaaacctcccttccgaggcgtgcccctcccagccttggggcgggggatccaggaccgcccccgcacctcagtcttggtaatgtaagacttagaaacaggacctttctgttcctcagtttccccataatgagggcctagactaggcggtctgcgagtgttccctgccgtaacactcccccgactttggatccagtgtagccacctgctaagagacccttaaacgccgcagtagggcggggctaagggcggagccaagaaggcgccgagcatcctctgcttcctccccctcctgggtcctgccctcgacagcgcggatcctccgtggtccgggaagcctcagcccaagtcccggctcccagccccggtgggccccacccaggcagacgccccgcccccggccagcgaggctggccgctgacctagtatggaca

SEQ ID NO: 224132 - DNA, 198 bp, Homo sapiens
  chr11:64698945-64699143
  hyper
cactctgacagagcacgtgagtacctctgggggctaaggcagcctctcacctctgcaggcgtgactcctgtctcatctcccacaggtgatccgggggctgctcaaatactggccaaaaacctgcacccagaaggaggtatgaagaagggctttgatgcccgccagagggaggctgggagggctcggcctctagaaggc

SEQ ID NO: 224133 - DNA, 133 bp, Homo sapiens
  chr11:64739232-64739365
  hyper
caggggggactgcacttcggcggcggagggtggagcccggcccggaaacttccctcagaaataaacagaaacgcaaagacaacttcccgagggcccgggccgtcgtgtgccgttacctcagccccaggtggtt

SEQ ID NO: 224134 - DNA, 105 bp, Homo sapiens
  chr11:65082053-65082158
  hyper
cccggagcctctcccccggctcttctagaaccgaaggttttagttcccatgggcacagccggaggccgcctgcgccacccggccctcagccgccagaaccaggac

SEQ ID NO: 224135 - DNA, 91 bp, Homo sapiens
  chr11:65147933-65148024
  hyper
ctggagcccatacccgggtatcccaccgcctatgagccgcgggactctgggagaatcacccaggttcccacctctccgagagctttactct

SEQ ID NO: 224136 - DNA, 98 bp, Homo sapiens; identical to SEQ ID NO: 202592
  chr11:65189906-65190004
  hyper

SEQ ID NO: 224137 - DNA, 111 bp, Homo sapiens
  chr11:65307104-65307215
  hyper
aggagcagaactggtcagcgacgtccgggtccccgggccctggcccccatcctcgctcccggccaactcctccccgactgccttacccgcgccgcgcggcgggcacggtcg

SEQ ID NO: 224138 - DNA, 144 bp, Homo sapiens; identical to SEQ ID NO: 202602
  chr11:65419839-65419983
  hyper

SEQ ID NO: 224139 - DNA, 206 bp, Homo sapiens
  chr11:65548872-65549078
  hyper
ggtgaccaaggtgcggtcgcagggcgcccgcaggaaaagcgccccagctgaaccggtccggcgggcgccgcagggcttggcttcgcttccctgacgcctgcccgggcccccagcccgctcggcttgggggcgaggagccggcgccgcggttgcggccagccaggagcttctgacctttgtttgcccgaggccgcgctggcggcccg

SEQ ID NO: 224140 - DNA, 1920 bp, Homo sapiens
  chr11:65553786-65555706
  hyper
tgaagccacttcctccgtgaagccctccgggcagaaggcgggttctccgacgggtactcggtcgcgcggtccgtgcctccccacacaccggccggggccgctcctgcggccctgcgtgccttttcgcacaaagccggcgcccagcaaacacctccccggctgagccacgagttgcttagccaagcctttgggatcccgcgccgcctgggcccaggcccggttcaacaagtgcggaccgggccgcccgttcccgcccggcggcttcgcgcctccccaggagcctcgggcgcgccgggttgggccggccccagtggggcgagtttcgtgtcatcacccgcggagcgtgccagcgccggtgcaaataacgttgccccctccctcccggctccgctcgctccgaaactcctgtttgcaaacgccagtacgcctggctaggaggtcccgcgggggccgggccggctgggcagccaggggctgagtgcccgaagctcgccccccgaccccgccccgcccggccgccccgcccgggccgcgaggccacctcacccgcagcggaatggaaaccggttcgacaggtaacaaataggtgggttgtcaccgttatttcccaacgcatgcgccgtcgctccccgggccaccccaagctaattagatcagatcaccgccccccacccccacccccccccgccccagccaccaacacacaccgccgcgagccaataaagcgtgaacccgtccgtccggctcgcactttaagacttcccgagcggcggcggggacgccagtcgagccgggagacgcttacctgccgcttccccgcgccgcccggtgcacctggccgcaagggacctcgttctcagggaagacggcgacattccgcggaggtggaaccgccgcgcgccgtccgggctcggaccttccccggaacgtgggggcgccttagcgactccttccctgttgtgcccccgttcccggcgttcagcccggccccgcaaaggtgggacggctcccggcttcagttacggaagcggcccgtgtccagcgacgagggttcgaaaatgccccgcgcgttcctggtgaagaagccgtgcgtctccacgtgcaagaggaactggagcgagctccccgacgaggagcgcggcgagatctacgtgccaggtgaggctccaaccgccctccggcctggggcacccgcggcggcgtcgaggctgcgggcgggcgggcgggcgcaggtccgcggagccaggcggcaggcgcggtgtgggcgccggggctgaatgcggccgcggcctgggctgggtgggcccgcggctctcgacccgggactcggggggcgggggcggggccggcggaagagcgctggtcggggcgggggctgcatggtggaaggggagccgctcccagggccagggggcgcggaaccgcctacccccaccccctgaaccgcggcacagaggaggcagcggggtgtgtcaccgctcaggcgaccctcggctccgacgtcgtaaatccagaaaaccgggactcgcatgaggcgggagaaggcactggagcgatgccactttggggggcggggagcgggctggagtttcggccgagatttgtgttaaaagctcagagcttcagccgctcgcacaggtccttcctcctcccccacaacactggtggccgggtcggagtgagggtcgggccggtggggggcgtgggcccccaaattttcgttgggctccggctgctagtcccgcgcagtgagccgagacggtgggacaggcgcccgctgcgccccgcttgcccttaaagcagaggtgggatcgggtctcacctctgctagaaacgcacttccttcaccttgcggagggcacaattgcatggaaagcagctgcagggagcccaccccacagcggagggccaggcccgggg

SEQ ID NO: 224141 - DNA, 104 bp, Homo sapiens
  chr11:65582976-65583080
  hyper
atctctgtcgcatctattttcctctgggcatgtgacacttccactctttctcttctttagtcctcttccagaagttctgttctgtgctggattaggtcaggagt

SEQ ID NO: 224142 - DNA, 179 bp, Homo sapiens
  chr11:65600724-65600903
  hyper
aattaccatgagcccgttccaaggtccccaggttttctctcgcagcatcggcacccccttgcagccccgctccagtggcgaccgttcgcggaccccggcctcgcttggggcgccctggccgcgggacttgtggagctccctagtcctcctaggctgcttaccccgccgctccctcccgt

SEQ ID NO: 224143 - DNA, 597 bp, Homo sapiens
  chr11:65600974-65601571
  hyper
acccacatccccaccactgcttcccattccctgtccccaccctgccaccctcaccctcttccccttccccttccccttccccactgcctggtgggcgccaaactgggcgagtgcgcacgcgcaggccgcacgtggccgttggaaggaggggcccggaacggcggcacggggttgttgtgggggtcagtcccccggggactggagggagacgcggcacgcggcctctgcgaccctatgaactctgaccccagctcccacactgtcgcctatcaccggcccactctccgtgccgcgtgtcccttaaaagctggggcctgggacaggaacgacagacaatgcagccaatggcgtcacgcgcggtgccccgctacccaatcgaaaggcgtggctgagggaaacgcggtgggaaccgcccccgactccaggcgactccttggccgggcgggggagagcgtccccgtcagctgagagcatcctcactcggtcagttcctcgggcgagttacggggacgacctgcgggagcacgcgggcagtggccggacgctgaagcccaggagagcgatggagacgtatgcggaggttgggaaggagggcaa

SEQ ID NO: 224144 - DNA, 65 bp, Homo sapiens
  chr11:65746278-65746343
  hyper
agctccagcgacacgcccctgggcaccgtggccctgctccaggagaagcagaaggctcagaagac

SEQ ID NO: 224145 - DNA, 270 bp, Homo sapiens
  chr11:66045217-66045487
  hyper
gccgccaactcccgcggggcacacggcagaggtgtggggtcgcgcagccgctgagagggcccccactgcacctggcccaacctccttcagcgccccccaaaaccccactgctcccattcagcccctgtcctggcgtcattgtgtgtcccagccaggtgcttctgccgtctccgacagtgacaagtgcctcgcacttcagcctttgccctgagcgcccgcccgagggggccgagtgcggctgtgccggtggctggagtgccgaggggtgcg

SEQ ID NO: 224146 - DNA, 578 bp, Homo sapiens
  chr11:66079389-66079967
  hyper
ccctaccgaggcctcgcggtggctgtaagtccgtggggccgaggccaggtggcgccaaaggcccatcgacgccatctgcccggctgtccgggcccagtctccgggctcgcccagagaacccgaaatctggacaaacggaaaccgtaggtggaggaagaagagggctccagggccaggttcaagggcatcgtggtgagagatgaggggttcggaggactggtggatctgggcatatcgcgaaggtggtaagggacccaggggtggagtgggcggtgcttgcgccaagagggtgagcctgagtgtgggcggggcgtgcgataagaggctcgctcggtagcgctcttcgcagagccgtatttgtgcgctacgccgcagccagggcgctctgggtgggcgggactccagggcccccaggggcgtggcttgcatctttcgtgggcggccccgggggcggggctccgtgtaggtgaaccgctacctccgctcgatgtgtgaggtgtgacagtcctacgagggcgcagttcttccacttttgtgagcttgagagggggcggagcttgtagctggggacggagcct

SEQ ID NO: 224147 - DNA, 180 bp, Homo sapiens
  chr11:66176338-66176518
  hyper
cgggcgccgggctgcacccccttaccctgggcagccgcggggccgtgacgcctggcggagggggcgcgcatctcggcgcgcgccggtcttcgcagtggctcattcatcgccgccgaggcacgccgttgccatggggacgtgatgcaggcgcggggagcgggagggagagggaggccccgg

SEQ ID NO: 224148 - DNA, 105 bp, Homo sapiens
  chr11:66176616-66176721
  hyper
tggcgcctttttaaggcaactggcggagtggcggctccaccagagcctgggagctgcccccgcccccgagccgcgagccccgcgccgggccggggagtccccggc

SEQ ID NO: 224149 - DNA, 694 bp, Homo sapiens
  chr11:66885462-66886156
  hyper
aggagacatcttcccggccgggcctcccgcgcccgccacggcccagggcggcagggtcgggccgggggccgggggcggcccgcgcacccctccgtggggggcgccccgactcgccgggggcggggtcacgtcccacccgggccgccgggggcaccggcgcggcggaaagctgagcgtggccgaggagcgggggcttcctgggccacctcgccgggcgcctccggccggcggtgggcgcgccggccgccaccgcccccgggccgtcgcggagaccgcttctgcgcctggtacctgtggacgcccttgttaagcgcctgcagcacccccggggagccgagcccaggacagacatgctactcctgtttcctgccccttcggagcgacgagcagtgggtgaggcggggccaggccgctgcaccgaggagcccccgggcccagggcagacgggccccgtggcggcggcgccggggcctgcccgggaatggcgggcaagccggcctcggcccaccggccggcacgcgaagggagggcagccggcggccatgcgccccttccctgcgccctctcgccctgggcaggcctgagccgggagcccaggtcccgcgggcccagcccggcggcttgaccccgggagaccctgctttgaggcgggtatcggttgccctggcccaggcctcccggccctcaggttgtg

SEQ ID NO: 224150 - DNA, 105 bp, Homo sapiens
  chr11:67141093-67141198
  hyper
tttaataatcccatccgccaggcccactcgcaggtttttttcgctcggtttcggattttttttttttttcggtgtgggacattctgcaaactttttttttttttt

SEQ ID NO: 224151 - DNA, 234 bp, Homo sapiens; identical to SEQ ID NO: 202629
  chr11:67210770-67211004
  hyper

SEQ ID NO: 224152 - DNA, 104 bp, Homo sapiens
  chr11:67407021-67407125
  hyper
caccactcgtccactcggcacctcagctcagccctcaggtgctcacacaagctgtagtctctcggcaggacggtccttgcctcctcgatcgcccttcgtccacg

SEQ ID NO: 224153 - DNA, 95 bp, Homo sapiens; identical to SEQ ID NO: 202634
  chr11:67777602-67777697
  hyper

SEQ ID NO: 224154 - DNA, 386 bp, Homo sapiens
  chr11:67889354-67889740
  hyper
gtaacatttcccagcgctgccacaggcgcgtctcgccctgtccaacgcggagcccgaagaattactaagaaaccgaggtctgaaggagggaagaggtgacgggctcgaggccacacggtgggccaggctgggcccggctgcacgccggctaccggggcccagccctctgcacgcctcccgcagcctcagtttccctgtccgtggtactgaggatgctcgggcctagaagttcagggctggaggcccagggaccgtcgagggaggggcatcatccccgccatggggccgccgcaactgcccagagcacaggccaaaggtgcgtgccacggggctactggcgttgtggacgctgcccctgcctccccatcccccgcaggaaacagcct

SEQ ID NO: 224155 - DNA, 441 bp, Homo sapiens
  chr11:67895653-67896094
  hyper
actggcagcccgtccgtgtagccttggccgggcccccaagcttcttagaatgccatctaagaaggcagagggggatgagcggcggcggggaggaggggcaggccttgggaagatccactgggtcacagggaagcgaaggcggaccctcctcccccagcgctactgcccgggccgaattccaaggccagcggctgcccgctgagaaggaatccggaccaacgggattctggcttccctctggcccctcctggcgagagcggcgccgggaggagggggcctcagaaggggcgggcaggggcggggcccgcggggtaggcggagctcccaggaaaacagcgggcggggcctcgcgcgaggggcggggttggcggcgaggcgtcccaggacccccattcctccctccgccccggggcttctggggagcggcgcagcttgactgcc

SEQ ID NO: 224156 - DNA, 110 bp, Homo sapiens
  chr11:68080104-68080214
  hyper
agccgcgcgaggagccgccgccgccgcgccatggagcccgagtgagcgcggcgcgggcccgtccggccgccggacaacatggaggcagcgccgcccgggccgccgtggcc

SEQ ID NO: 224157 - DNA, 165 bp, Homo sapiens
  chr11:68080741-68080906
  hyper
gttctgagcccgggcgcggggcggcctggccggtggcgctgctcctgtgagccgcgtggctgtgggtttccaagcggactgacacctgccaggtgcccgggcgacccgaatgccccgtgtggccgccgggtccccagatagtgtccatccccgggtcggctacgc

SEQ ID NO: 224158 - DNA, 680 bp, Homo sapiens
  chr11:68606633-68607313
  hyper
aacaaaggaaaaaatgcaaacgatcaaagtgcagaagcagcccttggcccgcgcaggctccggtttccgcctcccgccgccgctgccaccgcccctgcgcctttagatttcgggcagcaagtttaattgctcgcttggaaagcgtcctcggaagggcaccgccagcaactgcggcttcgcgccccgccccttcccccaagccccgggcggcgtcacgtgacggctgagaaaagtaggggaaaggtcagcagcagccccgcccccaggctggcgcgtcccaggcgctcggatcctgttccacccgccgtgcccacagagaccttccggagcgagttggcgcgcgtccctgtggccaccccagcgacagcgggagaaatgcaacgcacctctccgtgggaaggtcgagccctgcggtgcccagctgtggggacagctcggtgctcagtgcttctgatgacagatgctgcatccaacgagccagaaacgcaggcaccgcgctcaagagcccagggcgcgtctaaaaggggctcactgtgaagcctcagtgaaaactgacggtgtttttatgaatgagcactcggggccagggttgggtaagggcaggccctcgttccagggctccccggaggcccaacttgaccgctcggtgaccactggtccggggccggggccaaacgcag

SEQ ID NO: 224159 - DNA, 253 bp, Homo sapiens
  chr11:69331403-69331656
  hyper
gagtgagctgctcccgtgctgggaagagcttggctcaggtccatgggaacatggcggcattgaggccatctttctggaagaccacttgtgtgagtcacccaccttcttaaaactcttcagcagctgaaggtgataaaaagtcatgattaaacatgatgctgagtcaaagaagggtcaggaaggaccacatgttgtgtgattccactcccatgaaggtctagagcagggaaatcctcaccggaaacccacagtc

SEQ ID NO: 224160 - DNA, 31 bp, Homo sapiens; identical to SEQ ID NO: 202643
  chr11:69477505-69477536
  hyper

SEQ ID NO: 224161 - DNA, 720 bp, Homo sapiens
  chr11:71954875-71955595
  hyper
gcgcagttggaggagccgagcgcggggcagggcggccctgccgcggggaaagcgggccgcagggggctgtattggaagccgccgggctggctgcaggcgccaaagtcgccgtaggcggacgcctccatggccgccacgcacgagtcgtacgaattgaggtaggagtagtccatcggcccggggggcgggggcgggggccgggccaggccgggtcggggtcggggtccgggtggaggtcggaagggaggttcgagcgccaggctccgaggacccgaggccagctctgagcgcccgagagtccgcccgccccgtcgcggccgcactcagcccgggtgcaacgcaagtgcagccagcccggcccgcgcgccttttaacgcgcaggaccccgcggaggggggcggggcggggcgagctccgaaggggcggggcctaggaggcccagacaccgcccaaagccgccccgacccccaccccgaagggtccccgccgccgtcttagggctcagaggtgtggagctgggatgcgcgggaccctatccccggagtccctatcctgccccaatccggaccagaccttcggtctctacacagcgtccgaggccagagggtcccgacccttttcccgggcctccccacctgcggccccgcggaagggaggggaggcaggcctggcggcgctcgtgtgaagaagttaattcaattcgctctgataaccgagtta

SEQ ID NO: 224162 - DNA, 324 bp, Homo sapiens
  chr11:72301342-72301666
  hyper
ggtccctcaggcgccgctcagctccgcgccgggcccgccgccggctcccgggatcgcctaacccgcccacctcccctccaagttctgcccggccccgccctcgtgacctgtccaggccgggccctcaccgcacagttggaggatcttgcggtcgcggtcggtgtacgccgccccgcccttctggtcttccgccgtcccctccggggggttctggacggctcggggagcctccctgggcccgcgctgctgcaggacctgcaccctccgcagggcgaccagggtctggggcaggccgagcggttagcgcgccgctcgccccaagct

SEQ ID NO: 224163 - DNA, 139 bp, Homo sapiens
  chr11:73088003-73088142
  hyper
tgggtgacacggcgcgtgaggcggcctggccgggcgaacgtgtggctgggacactgggcggtgacgccgggccgagcgggcgacacagaggggctctgtgtgtgggagacaggcagcgtgtgtgcgtgtgttgtgtgag

SEQ ID NO: 224164 - DNA, 285 bp, Homo sapiens
  chr11:74022460-74022745
  hyper
tcaggtcccgcagccgcgcctcctccccgcgcaggtaccgcctcagcagccccagcagccggcgctcgggcgccagggcgcgcgccacgctggtcagcgccgagaacgtgtcgccccgagccgcagccctttctgggtctcctgtcccgagcgccagcaccgccagcagcgccgccagccgcgccccaggacccatagccagcgctcgcgaacttcccctcagacagtcctggccgcgcggcggcagccgctcccgccctcgcctgccccgcccctgtctccgcc

SEQ ID NO: 224165 - DNA, 600 bp, Homo sapiens
  chr11:74441796-74442396
  hyper
cacattccaggggccgcatccctcctctgcccacccagcctcccggtctacttacgggctcgagcgtgggagtccagggggaaccagagcagcgcgagtcccagcaaggaggagaggaccctcacctcgggaaccatcctttccccagggtcaggccgctggtccgggagcggagtcgggaggaagggagacgaaaaggacacggaggcacaggggccacagatcaacccacagaccccaggaggtctgctgctagagcggggtcggagaagggccaggaagcagcggtgggcaggaaaggagggcaggaagggaggtctaaggtgggaagaagagaaaggtggaaagagaacgcggggaaaggagggagagatggagagacgaaggaaggtccagcagaagggagaggcgatcaaagaaagggggaaggtgagagggagaggaggagaaagcagggagaggaccggcgtctgccgagcgcgcagcgccgggcgaggcgcgcgggaccagcgggtgttgcgggcgcgcgggctagaggcggccggcgccccctgctcggtgggctcggggtcgggccgcgggggcctggggcccggcggg

SEQ ID NO: 224166 - DNA, 370 bp, Homo sapiens
  chr11:74953064-74953434
  hyper
tggtgctctacctaaaccgccgcggcatccagcgctggatgcgcaacctgcgcgaggcgtgccgggaccagatggagggctaccactaccgctacgagcaggacgccgacccgcgccgcgcgcccgcgcccgccgcgcccgcgggctcccgcgccacctccccgggctcggggctctgagcggcgcccccgggctcggggcttcccttgcctggcccgaagccgtggagatgagacacccgcgagccccgagctctgagaccttcccctgactcggaggcgctaagccgtaccctctcgttcccgcctccgagagctcccaccgtcaaagacccagagatagccggtccgaatccagaaaccccgcctgc

SEQ ID NO: 224167 - DNA, 458 bp, Homo sapiens
  chr11:75062529-75062987
  hyper
gtggccgcgaacgcagaaccaggacgcaatcggagcccccgcccgtgtcctcgccgaggtcgcccccacgcgccccccgccgggcggccgccctgcactcaccgggtccctttgtcgcccatggtccgcgacggtcgcagggaggtccgcggcgtcagcgcccaggctggaaaatccccagccagcaggaggagcgcgggccagcccgctcccggctccctgctccgcctcctccgctctcccggccgccgccgccgcccccgcccccggtccccgcccgccgcccgccgcgtcgagcagcgcagcgcccgggccgcggccaggggcgtggaaccgcgcggggtgtgtgcgtgtgtgtatgtgtgtgtgtgtgcgcgtctgcgtgtgcgcgcgccgcccagcgaggcagggcagcgcggcgggacgcgtcagggccccaaggtcggcgtttgtggtgg

SEQ ID NO: 224168 - DNA, 947 bp, Homo sapiens
  chr11:75140922-75141869
  hyper
taagcgggcgccagtagcggcaggcgcacgtgctccagcaggcgtcgcagctggccgcggcgggccggcgcgtcgtggcgcacccagcgcatggccgcttcaaacacggcctcctcgcgcgccacgcccagcgcggggtccgccagcagcgccaccacctcgtcaggcgccagctccaggaagtcggcgtggcgcgccacctcggcgaaggcctgacgcaggacgcggccgcagcgctcggccagcggggccagcgagaaggcggcggccacgcggcgcagcgctaggctgttggcggcgcgcaggcggccctcgagaaagcgcacgcaggcctcgcgcaggcccgccacgcccagccgctccgccagcgccagcacggccgccgcctcgtcctccgcgcgcagccgcacgcccgctccgtacacgtagtcgagcaccacggccagcgccgccgccgccccggccgggctcgtgcctggcgcctcgggagctactggcaccactggcaccacggccgggccgcgctcgggccgcccggccgcgaacaagctgcggaagtaggcgctgcccgcgctgagcgccgcgcggtggcacggaaagtcgcgcccgccggcgcgcagcaccacgtcggtgagggtgccgctccgccggtaggcgttcagggcctgcagcacgcgctgcgcgtggcacggacccgcgcacggcgcttcgcagcccggctccgactcctccggcgcatggccttgccgcatcctgccggggagagaacacaaacagcgtcggggaagccacctggctgcgcccgggagaggcgacagccctcatccgtttatttcctctcttgaccatttgttcagcgactctcccctccgttcagcatccaggttccttacggctacagtgccccagccccgcctcaccagcgcgacattctgccctgcctaccc

SEQ ID NO: 224169 - DNA, 660 bp, Homo sapiens
  chr11:75379519-75380179
  hyper
cgttttctacccccgatcagccggagctagttcgccctcctccctcagcgagcacccggggagagctgtcctaggagagtctgtagagtccctcgattaccggtcgcaaacgcctttgggagcgcagtctgctgcgagcgccgaagggtgagacgcacggcgttcccgagtccccggcgagggtgtctgggacgcgcccctccctgcggctgcggcggcgcacagacctcggtcgagcgaggcgacgtgaggagaggtggctacaggcttaagccatggcgcagaggaggggccgggcggtgtggccgcagggtccgcggaccgggctcgagtctccttcctgccggcgtcctagtgcagccggccacctagcagggctgggaggccatcacctccagcggagaccgagcattgctgcctccgccgctgcccgcgaggatgccgcagccgccgccgccaccgcctcttctcctgggaagcgaccccacccttttctgcagctctcggtctccgccgctgcccgcgaatgatgctgcagccgctgccgccgccgcctctgcctctgctgcagggaagcggccccacccttttatgctgctcagcagtgagaaaaaaatccaggaacgatgctgactgaaagagtgctgcagaaaaaaacaa

SEQ ID NO: 224170 - DNA, 134 bp, Homo sapiens
  chr11:75480048-75480182
  hyper
atagccgcctactccggggtcctgcgcggcgagcgtcaggccgaggctgaccggagccagcgctctcacggaggacctgcgctgtcgcgcgaggggtctgggagatggggtgagtgccacggcgcaggggttat

SEQ ID NO: 224171 - DNA, 253 bp, Homo sapiens
  chr11:75921931-75922184
  hyper
ccactgaccggcggcgcccgccgctccagagaacttagtactctgtcgagttacaaagggggactcgctcactacagctggtgtttactaagcgtgcgtgctgcgtgcctgcgacacgcgtggggcccgggtaaggcccatctcgaatcgtcgcagcaaccaggcaaggagcctcaactggcagggggaagtcagacttgggtctcagtctggagccggggcatccttaggtgttggtcgcgcagcgtggtta

SEQ ID NO: 224172 - DNA, 180 bp, Homo sapiens
  chr11:76381523-76381703
  hyper
gcgcagtggggatggcgggaggggagtgtttggggggcgtcccttgggaccagcccccgccttgcgctcgctagaggcgcgcgacagtgcgccccccgagggccggccagcctcgcctgcccggcggctcctacctggctcagcgcggccgcagctcctctcccgggcagtctcggcaca

SEQ ID NO: 224173 - DNA, 539 bp, Homo sapiens
  chr11:76381776-76382315
  hyper
ctcagctgccccaccggagcccccgcgctccggctgcaatttaaatacctctcccgccggcccgccccgccacgcccccctctggcgaggccgtggggtcctagcgcctggccccgtgcctcggtttatccggagccggcgggggcggagtggggtggggcggcgaagcatcttcaccaccctgggacctcggccgggaaggggcgggggcccagtgtggggggatgagagggcgggagggagaggggttgcagaggaagcgccgtgggagcgaggcccatcccagcggccgccgcacgtgcagttcgcggccccgcggggtccggaggggggcgcggtggctctaggagccgcaggtccacagaggaaatccggcctggccccgatttcccagctgctggcgccgccgcacttaacgcgggggcaaacaggcgaggtgacggcggggctgaatgcggaaggaaatgacccttcgctggccctggggcggccgcggagggggttccccgcaccaagccgtccactctggtgggtcctgg

SEQ ID NO: 224174 - DNA, 300 bp, Homo sapiens
  chr11:77184465-77184765
  hyper
cccgcccaggcgcccggccccgcaacgcgaaataaatgggcccagacccccactccacccgtccccacccccgcgccccagccctggcagcccgggacgcgaggggtactgggcggtaggcccgctctcaccttccgcgctcgctcagctcctctcggctcctcctcctcctcccggcggtgggtgccgcctagccgggagtgagggcgcgagtgtgcgcgagctaccgcttcactttctccctcctgccgccgccgccgcgctgcccgtggcggggctcccctcaggacaggggaactg

SEQ ID NO: 224175 - DNA, 300 bp, Homo sapiens
  chr11:77184969-77185269
  hyper
gtctgtgggggaggactgcagagcctgtgagggaagcgcgatgggcgagcgagggggcgggagcgtgtgggggaagccgtgagggggcgtctactgtgcagccaccaccttcggctccggctgcagccgcgggagggcagcctcccccgcccacagccgcgctattgtacgccgcccggcaggcctgaccgcctagttcactggctcccctactcctcctcctcccgcctcctcctcccctctgccctttccccttctccccctccccctcccccactccccctccccggcgcggcggcg

SEQ ID NO: 224176 - DNA, 180 bp, Homo sapiens
  chr11:79150873-79151053
  hyper
acagtcacactcacacccgggagccctccaagcgtccatctggcggctgcagcctcagttggctcctagacgaacatcaataccgcggccgggcgcccggtgaggagaggcgggcgccccgcgggttgcagagggcgaggagctggggtcgcatctccaggatctgagctccaaccaccg

SEQ ID NO: 224177 - DNA, 480 bp, Homo sapiens
  chr11:79151385-79151865
  hyper
ccctcctcctgggccaggggagcaagcaaacatctcccggagccctcggcagccgcgtgagctacccgaaccctgcccgggccagcagtgcagagggcgatggagctggcgaggcgtcgccgcggtccccaaggcgcttttccgtagagcggatcacgccgccttaccgtggctgcaggctgctaccgccggggaagcggcgaggacggcggcagggaggcaaggcgccgcgccggtggctcctctctctctcggcggcgcggctcctctgctccgcgagccgtagcggggcgcccaggaaggagcaggtccgggctctgcgctcagctccagcgagaccaacaatagctcccgcggggagcggagccccagcgagcctccagccgcgcgcgcacgaccggctcccgctcccggccgctcccggccggcgtccctgccagcactgctgccccacatgaaacagctgcaatcccgaggctt

SEQ ID NO: 224178 - DNA, 1560 bp, Homo sapiens
  chr11:82443402-82444962
  hyper
ttcccatcgttcttcagatttaggagaaacccacggaggcgcggcgctctccacagccgtctctaatgaagggaagcgtgcctcgaagtcagtcccggtgcgccccctcctcccccggcgccccttcccaaaccccgtcggatctccaaaggctggaataggcggtgcggctgtagcccgcgctgtaatcgtaggacacctgatggggcggcggcggcgggggcagggcgcagtctggaaagaagggggcgaaagaggccaaatggccccgcccgtcctccccgccgggagaatccgcagcggcggggtacagggggctcaagggctcgttcaaggtcaagccgccgcggggggcagtcagggggctctttttggtcggggagcagcccgggacgctccagggctcggggtacagtaggtttcccaccactgccggcggcggctcaaagaggccgggctccagctccgggggtccccgcagtacggaggctccggcggggaacacgtcgagaggctcggcggcaagcaagactgccgcctccgtgccggcgccgtagtcgggccccagcagctcaaagaactccacggcctccgcgcccttctccaggtcgcccaagctcacgtccggccccgacgggccacacccgccgccgcctgcccgggacggctccgtgaagaaggacggaggcagattgcgtgcccgcagcgggaccttcctggcccctgggatcgccgtggcccccgcggggcctgccacgtcccctcccgcgcccccagtgcccgcacctcctagcccggccgccggcgcagccacctcaccccccgccggctcggcacccccggggacgtggcgcagcgagtcgaagagcgcggccagacttcggctttgcaagctggcggccgcggcggcctgcgacgcctcccgccggggggcagccttgccgtgggccggggccgcgactgtcggggcgctaggggcggccagcggccgtttggctggcgtgtcggcggcgctcggggagggcgggccggggggcgcggcgcccatgaggccgctgcagcgcttgatctgcttctgcaggtacttgcggtggttcaccttccgcttcgacttgcccggcttgtccagcgccagcttgatgttgctggacgccgagtcaatgaagctgagtagatcgcgggtggcctcgcgcacgtcccctccttcggctcccgacagcagcgcacccgccggagccccggtctcatcgtcctcgaaacagcagcccttgtccagggctccgaaggcgccccctagcccgtccggggagcccccgaagccgaagggcacgaaagggtgcgtgctgaggagcgccgcctgcaccgccatcgccgcggctcccgggctgtccgcagcgctgcccgtgcgcccccgccagctcctgcccgccgcccagacccagctcccgccccggcgcggcgcgcgcggcgcagcctactagttccgggcctggctcgctgcgctgcctcccgggggagctcattaggtcttgtaagcaaggggcggagggagggagcgcg

SEQ ID NO: 224179 - DNA, 215 bp, Homo sapiens
  chr11:86510900-86511115
  hyper
tgctttgggccccacgcacagcactgagtgctgtaaggaaatgcaaagcattggtggccctgccatgggaatacaggtttctgttctttggaggcaccggagaaactaggagttcggtcagcaccttaaggcgctaaaagtgtacgtgggggtggggcgcacacaggttctgaaccaattcttcaaatttgcccagggctccccatacaccaggt

SEQ ID NO: 224180 - DNA, 662 bp, Homo sapiens
  chr11:86511379-86512041
  hyper
cagggacgctcggcctcaggccctctgggctgctccaccctgctccggccgcaggcgagcggcgaggggaggggggcacggtttatgtgcagtggggcgggcggcgtccgcgcggcttccccgaggccggaggcggggcgggcgggcctcgggtggcgcggggggcggacccgccagctgcctgcgctgctcgccagcttgctcgcactcggctgtgcggcggggcaggcatgggagccgcgcgctctctcccggcgcccacacctgtctgagcggcgcagcgagccgcggcccgggcgggctgctcggcgcgggtgagtgcgggcaccgactggggcatccgcccgggcgcgggagaggcgaggcgccgggaggagcgggacaaagggccgggtatgcgcggggtagggtaactgcgggctgccggaggcaccgcaggacttcgccagggcagtcctcggggttccaggacacgggctgggggcctgaaggagctctggggagacggcgggggctgcaggtcatttggattcatgcagtgtcacccatgaaacggatggggaaagaagatcctgctgtcttgggtgcaggatgttggttgggaagcagagagagccggctctcggcaagctgtccttcggcgggggcgatggctacacccc

SEQ ID NO: 224181 - DNA, 283 bp, Homo sapiens
  chr11:86513414-86513697
  hyper
ctgtaattcttaaacgattatgtgattaggtctgttttgccttaatagggtctgtgattcaggaaaacgagaacaagcccgactgcagagtattcacagagcttggttcattcttaagcatttgctttaggatttagcatgatttcaccgttccatatcactgaccactgattccatggaagaccctttgtcatctctccaaatggtgtccaaaacctgtatctttgcaaactttcctgccgtttctttctgtcattactgtttatagcggctgcaggaattc

SEQ ID NO: 224182 - DNA, 240 bp, Homo sapiens
  chr11:86666276-86666516
  hyper
cagctgcgcgcgactgtgtgggattttagacgtcccgggccgaggccgagggacaggctgcgagggtcatggctgcaggcggcgagcccacaagccggcgccggccgcgtccgttcggcgtctccgcgaggccagccagcagccagcgctgcgcagctctcaccgccggagccctgcgcggcgctggaggctcgcggcgcggcggcggggcgggacggacagcgggcctctccaatggcc

SEQ ID NO: 224183 - DNA, 180 bp, Homo sapiens
  chr11:92931081-92931261
  hyper
ccctgcccggagggacccgcgcctggtgcccgcctccctgccccggcgctccccaaccgcgcggcgaggagcatgcgcagtgggacagcccggctcggcgggcaccgccggcgaggggcgggaggggccgaagacccgaggactgctgcgaggccgggttgggtaacccgagaggagggt

SEQ ID NO: 224184 - DNA, 445 bp, Homo sapiens
  chr11:93063608-93064053
  hyper
cgggacagcgaggtcgcgctcgcgcggggtgaggttggaggcagccgaggagccgcacagggcagcgcctgccgccgccgccgcgcccatcccccactccgacggccacgagttcgggccgcgacgtccccatggcaacacgcggcggcgccgcgcgcggggagggagaggcccaactgcctcgttggtcgcgcggcgggagggcccaggcggcgggagcgcggcggcgggtggcggggccccttggggcgggcctggcggggcgggaggtgacatacgcggtcctgcgccctcgcctcagacctctcgggcgagcgcggcgcagcgcaggtaatggctcctggccttcccggccccgcctcgcccctgaccctcacccaaaggccaggctgcgcgggtcctcgagcgggacaggggaaccccaaaagggcggccgctctgcggg

SEQ ID NO: 224185 - DNA, 1167 bp, Homo sapiens
  chr11:96122355-96123522
  hyper
aacagtccacaatttcgcaaagtggatcctgccagcatggtatccgggataactatattattcattaaaatccgttaacaatgaaggttaatgcagcaggaatgagtggtagacagtggaatagatcctctcaggaattaacacccggaagggtgactttcatgattacaaacctctttggcgggacgcaggaacccagcgcccgctagcccactagtccgtcactctgcctccaggagggaggggcacagtagctaggaaaccggaccctcaggccaagcttcgcgatgacgcgcgcaggacgacggaaacccccagaccccaaaagagctctgcaccgagaaaacaattacaagggtctggaaaggccagaaacccgagaaatcaccaaccgagctccctacatcagttccaagcacctccccaaggcggaaataacgggcaccgcgcccactgcagctcagctgaggagggttagaggcgcaaagggctgaggggcgttctccggcccacccaaagagcgcccgcgggaatttttctcttagtccgcgaggaggcacggcttcccccgcccctctcataaaccattagcaccgggagcgcgagcgagtcccagccgggagacagccccgcaccgccctcgcgctctcacctttcaaagcgcctccacctctgcctccgcctccgcccctgccccggcaaccagctcaggacaagcgatgctcctcccccccttccggggaccaagggaagtcccgcctctgggtggggcgaggggtggggccaggcggcgggagggatcatcttccgggagcgtggctaggggcggagcgactgccgcgcgatagtcagggagctgtgcgggtcctggttgcaagagaggtggggagaggggcctggcgggttttgagggactgggaggactgtcccggctaaagctggcgcgggaaactggggctgcgcggcgggagggccctgctgctggggaaggaatctaatatatccgttcccctgaggaagggtgccagtccttgactcctaggctcttcggctctctgtcgtaactttggggtgtggcaggggttagtgacgcgcggttacccgggatctggacgtgcaggaggttcgtggccacaatgggggtatagtctttctcacggctgctgg

SEQ ID NO: 224186 - DNA, 840 bp, Homo sapiens
  chr11:100998017-100998857
  hyper
ctgtgctgtgtcccgctgcccaccctctccggccgccccggggagcgcagcggtgcgctggggctggggctgagggttggcggccgccgccgccaacggaaccgctactcccggacgcgctgggcgtgccccgtcccgggccctcacctcaggtagttgagatagggcgggtagacctgcggcaggccctccttgagcacggcggcctggtagccgagctgcgggagcccgttgaggccgagtgcagggtagagcgcgggggccgccccggcggcggcggcagaggcggaggtggagggcaggccgtcccgcgggagcaggcagccgctcgcgcccggcgccttgcagggcggcggcgcgaacgggccctgctggggcggcgcgccctccgctttgtacaggatgcactccagggtcgaccccgaggaggacgcagacgagactgaggcactggcgggtgcggccgtcaccgccgcttccccgggtctggatggggtcgctcgcggcggcagcgggggcggtggccccaacgggaaatccgggaaggctgcggggttggcaccggccacaaggtaggaacgcggggagcgcgcggaggcctccgcgccttcctcctcctcctttatctttagagcgggcggctggaagtcgctatagagagggtacgcgtcgtccttgggctcggcgtcgggcgggtacgcgcagtcggggaagtcgcctacagcgaccggggtggacgaggcacagggtgaactccgcggcggggcaaaggcgctggcagccccggccccgccgtcgtaactttcgtcttccagcagctgccgagtgcgggctgccaat

SEQ ID NO: 224187 - DNA, 711 bp, Homo sapiens
  chr11:104034455-104035166
  hyper
ggaaaaacatagaaagaacaataacaatagcaaacatgatttttttttcagttaaaaaataaaatgagtctcttaccatctcgcctgaggttggcgttgcgcaaagctttgatggatgcgctctgcggggttgcagaagtgtcccgacagctgcaaaagtttgcgcagattagagtgtagacaaagatgagccggtgcatttgggatcagcgactagagacagcgtcgctccaagaaaaagccgggttctgctcccgggaccgacgccgcgccgccctgcgctctcgccgcctgcgctcgccctgcgctggcccgggtcgctgtgctaatcgccgagctctccccaaacttcctgcatgctgaactttccgagcgcgtgtgggtgccgcacttccttgtggtgctgagctgataaatggtgacgggacaaacaacaggttgacgtttgtttgttcgccccctccggtggccggcagctgcagcacaggctgcagggggcgggcagcgccgaatctagcggggcaggcgagcggagcagcagcgttctccagccccggccgcggcccctgagaggcgcgcactcgggctcagagcggcggcgcgagcacctcagctccccagtttcccaggccgggcctaaacctgctctgccactgagcatgcccagtttaatcgccggccgggactcttcccaccgccctgggctttacc

SEQ ID NO: 224188 - DNA, 660 bp, Homo sapiens
  chr11:106888278-106888938
  hyper
agtgctgtagtcccctcttccgccctagcctaggggatcctctgtcgccggagccactggaaccctaggccgtgcagggtaaggccgggccgccccccagcggtcgggctctgcgctcgcgccccggctcgcccagcgccaactttacagatccgcgttctctcccccgaaggcggtccccccttccgccccccgctcaccgagggcgccgtcaggcggctgatgctctcgcccagcgagtccaggttgacccgcctccggcgctgcaccctcctggccccggcagtggcagcggcggcggcggcagaagcagccggggtcggggccggggcggcggcagcggcagctgcggccgggctgggctccagcggcccgggcgggctccggctgccattccagcagagcctagacagggggcactccccctcctcctccgggctggtctccaggtagtcggagcccagggagctgaaggactcggacgaaatcttccttcgagacatgctgccggcggagctgcagcggccgaggcggtggcggcgaggacgcgagcggcggcggaggcggcggtggcgggaccggcaagcgacaacgttaagcgcgtcggggccgcggggcgctgcggtcgcgcccggcggggcgggagtccccggggccgcg

SEQ ID NO: 224189 - DNA, 180 bp, Homo sapiens
  chr11:106888995-106889175
  hyper
cccgggctcggcggcggcgccgggctgggctgggggccgccgccgcctctgctgctgctcgcgcggcgccgcctcagcgcccgcctcggcgcatcgccgtgcgccgcgctcccgctcacggggaggctccgagagtgtgtgaccgcggtcggcggggcggggagggctgcggcccaagca

SEQ ID NO: 224190 - DNA, 829 bp, Homo sapiens
  chr11:107799223-107800052
  hyper
aaaggacagttcccgccgccgaacttagcccgcgggtggggcggcccgggagccagcggggcacgtgagcgatggagaccatctggatctaccagttccgcctcatcgtgatcggggactccaccgtgggcaagtcctgcctcctgcaccgcttcacccagggccgcttccccgggctgcgctcccccgcctgcgaccccaccgtcggcgtggacttcttctcccgcctgctggagatcgagccgggcaagaggatcaagctacagctctgggacacggcgggacaggagcggttcaggtagggaccccggggaccttgggcaccgcgccgccccctcagcccgcccggacgccccttccccaggcgtccgccccgccggccctggtcgggagaggctctggcccttccctctcgaaagtgcaaacactccattctcgcttcccctttgcccctcctcttccagggacgacttcctcctccgcaatttctcacttctttctttggcgcccatttcctgcgccccctttccatctttcctttcccgcctgaaccggggtcgtcctcgccgccccctcttccccaactctttcagcccctgtgggtatttttatcccctccggctccccggctgccttcttcccaaactcggcttccctggctgcgcacagcatgacccgaccaccctcctccaagcaggcgccccttttcctaccctaacccagcggctcccacgctgtgtggccggggagaaccgcgagggagggttcccagattcgtgatggatcctttagcttcacagcaaggagcgctccaacccaggttcctgca

SEQ ID NO: 224191 - DNA, 420 bp, Homo sapiens
  chr11:108368803-108369223
  hyper
gccacgcaggccgcgggcggactcccgggcggcggggacgcgcggggacccggccgcgggacgagggaggccggcggctggacactacctgcgggagagcgagtgaggttctggccctccgagttgaccgcctgcaggtagaaatagcggaccggcaggacgacggccgcctgcagcccgggcccccacaccaggctccgcggcgcgctgaccagcacctccggggcccccgcggccaccagcagggcgaggcgcagctgcagcagcagggcccgcgggaggcggcgcatggtcggcggggcacaactgcggtccagctccgcggcggcgaggaggggccggcagcgccgcggaccgggcggggactggggcccaccgcggggcgggtctttcgggcgggaaagattgcggcgcaggctc

SEQ ID NO: 224192 - DNA, 180 bp, Homo sapiens
  chr11:110582950-110583130
  hyper
ccatgaagaaaatcttcaaacaaatcccagcccaggaggaggctacacgatcatgtccgcgggctgccggccggaggggcgaggacgcgcgggcggaggcgcggctgccgtgctcaggcagggagccgagctccgggtgctcgccgcgcgcctcccgtcggggccatgtacctccgcctg

SEQ ID NO: 224193 - DNA, 720 bp, Homo sapiens
  chr11:110583213-110583933
  hyper
ccgctccgggcgccctgcgccggggcccgcccccgcagccctcctcagccctcctccagcctgggccctcctagcctcgtcccagcctgcggcgcgcctggcgggcgtctctctatatatgttagcacaccggccaccggctgaccttttcggtctgtgactccgcgtgggtgcagcccgcaggagctcatcggcctgtgtcacgcacgggggcctctagtgcacggacacgcgcctctcccgccacctgcccactcccaccagaccccatcccttcccgcgccgtgcccgcggcggaaggcgcccctgcagcgcgtgcatccgcggagcggtggcgacctcagcctgagcagaggagttgcagtgattcctgcctcgctttcagcggactgcggagggaatcccccaccccaccccactggggatagggtggcacgtcgcagagtgtcgcagctgtacaaatttggaagcccacagcatcgcctgacctcttgtgcaatcccgaacgctagcctgttcgggtaaccctgagtgggcttctgcagccggtcatgtcagcggcccctgcacatttgcacccgcggtttccgctgtctgcaggctgcagagacgggggcattccaaacgtgaaagagcaatgaaggaaaatgcagacagagcgaggacgccgaaatttggctaagctattgagaaggctacaatatgtggaagtgtttatca

SEQ ID NO: 224194 - DNA, 840 bp, Homo sapiens
  chr11:111411125-111411965
  hyper
agcgggagaggaggggtgagatgtggtgctagttttaggcacactgtgctcgttatcagattgcctaggggcccgactgaagtattcctccgcccagcgcctcgggcaaacgcgggatctcccagggaagctcggagggggacagggagctggttcccctctgcgactcgcccctctctggctggccgagtgtctggcgccaacctcgctggaggaggctgtcgggggcgggccagccagcggggctgccctcctcgcagtgacgtcccagggggcggaggggcgaccgactgactccgcgccctcccccccgcctcccgtgcggtccgtcggtggcctagagatgctgctgccgcggttgcagttgtcgcgcacgcctctgcccgccagcccgctccaccgccgtagcgcccgagtgtcggggggcgcacccgagtcgggccatgaggccgggaaccgcgctacaggccgtgctgctggccgtgctgctggtggggctgcgggccgcgacgggtcgcctgctgagtggtgagtgcgcgcgctggggcgggggctggtgccggggtgggctcactgcaccccagctgctgctgaccctcttctgggtcgccacgtatgggactagaaggccgtcccatgccccactcccagacgcagcccttcggagtctcttgcgttctgggggcagtcgcacggcgtctgagacccacgccagttcccggagctgcgcagttccctgcgcgtcctggaacgctcgaagcccgttcccagtccagagttatgggggtgggttggagaatgtaggagaggtggggcagtgggcaaacctgccccagtggg

SEQ ID NO: 224195 - DNA, 180 bp, Homo sapiens
  chr11:115373171-115373351
  hyper
gcagcacgagggatctctttcaggaacattttattgaacccatccagtcagaggcatcacctgaaatgaagttgtaaccacaccggcatcggctgaacccaattatctcgtaactcataaattaagaattcacagaggaaaaacacataaacaacatccggagacagtggcatggaggaa

SEQ ID NO: 224196 - DNA, 1260 bp, Homo sapiens
  chr11:115373483-115374743
  hyper
cccacacatcccccgtctcctacagcgtgtctcctgcggtgtttacataactgtgtgtcctctagcgtgtaaacaaaaggcacagcccaagcggagaggcgcccctgaagcagcaccgtggccccaacgctgtgcccgcccgggcctggggctccgcaggtgggggctgagctctcggcgtcctccgccacttgttgctcccgggtcctgcagctctggagctgcaaggaggggctttgcaggctcagagccctgctgcatcccctcctgcatcgccgctcgcaccccgcggccccgtgccactcggtcccggcgcccgcctggagcctgcagcaggggccagaggacgccgcgcggctgccaagcgcggcgaggtggcgggaagggaggctgggtgcagcacagccggcctctccgctgaggaagagctccggctcccttttgttagcaaaagcaaacactgccctcttctttcccgaccgcgccaacgcgcccggcacacgggcagccacacatcgggctccagccgagtgctcggtgtcttcagggaaggcaccgggcgtgcagagccgcccctgggcaaattcccaagactgctcttcacgcagggagcgcgcggaggcccgcagggtgcccgcctggccgcagaggccgcgacgccccctccgccaccctcgggccgccgaaagaacgggcagccgggaaatcccgtgtccccactcgtggcagaggacgctgtggggcgggcgggctgcgggctcccggcgccttcccgcagaggcggcgacagcggccgccccccccgcggggccgggccggggaactttccccgcctggagccgggccaaaaagacccgcagcagagccgagggggcggagggctgcgaacggccggagggaaacacgagaggcgtgcagtttggggacaggggagaaaggcagagcgcgttgggggaaggggcaggggagatcagacaagtctggggatgtcctggggaccggggagaaatcacgccgcgggcggctgggagtcagccaccaggaggcttcggggatggagaactgggggggccctctggagaggtgggggcgaatggacagccctgggaggtgggaggacctgcaagttacggggagaacggcgagtttagaagggtccggaagggttgaggttgtctttgaaccatccccttcccccatgctttacagcccccgggccccccattctcactccactctgcaccccgcgccaagccgggg

SEQ ID NO: 224197 - DNA, 1080 bp, Homo sapiens
  chr11:115374771-115375851
  hyper
gggactctcattcacacttagccgggcaggggagaaggggctcacagatgccctcagccccttccctctcagccctgagtttcctctccacactccctccgcttcggatgtaggaagtggggggaggttgtcatggaaacgtttcccccctctgtggccaaggctactggggtgccttcggagatttaggggccaaccggtcggtgcccacacctacctgtggggatcagtgccgcggcggagaagagcaacagcagaagccggagccggagcccgggaggcgccgccgccgccgctgccgccgcacactgggatccgctcggcagcactacactcgccatgtcgggcacctgcctcagactggcggcgttggctgcctccggagcccgagcggacagctaatgagatgctaatgacatgcgctggaggcggagtccgggcagaccaatcacagcgccgcgagcccaacccggctctcggagggcctcgctccctcccccaccccgccccctggcgctggcgttcggcggcgcgcccgcgccacctaggggcggggccaaggggaggggcgtatgcaaatatgtttatgttaaaattcgggttttgctttccccggatcaaggaaaaagtgttctcccgggcgcctggcgtgcaaggactcgggctccagggggcgggtctagcttcttgtacacctttattaggaatgtttatagcaatcgctgtatcagaccgacgactggagaatctcccttaagagggtcctctgtcccgcacaccgagtgcatctggcctagcgaaccagacgttgcaaatttccgtcactcaccttgcaccgaaggaatagatctttgggaacgggggctgtgcgggagtggagagtaagaaggcaggtccccggattgacaaaacaatctgggagaagtgcatgcgtgctttgcacgtccggcggagcgggagagcccgctcaacagcctagcggtagactcggggatagttggagaaggcagccgtagagtcgggttctgagattttccagtcggtctttttgcggcagaatctcgggaaaggtagatcgag

SEQ ID NO: 224198 - DNA, 876 bp, Homo sapiens
  chr11:115630443-115631319
  hyper
tcccgcctctgcatcgccgccggccccttcacgcctctaccttgggcgggtttggggtaagggccgcgcagaccctaagggaaggcccgaggtcgccggagctcctcctctcgcggctgagtgagggtctgggaggccagatgaagggagctgctcggctgagctgcggaccagcgcgagagcagcgggcagtggcggaccagcgccagggcagggcaggggtggacagagggctctccccacccttccctcctccagtgaaagtaccagaagagatggcggccgctccgccgagtgtcattaccgcggaagcagcagaagccggcggcaggagcgggcccgagagcccgcggccagtggcctgcgcaccccgcgcccagcgcccccgccgcgggtcatcagtgtcagcgttgaggggtcccggggagcggttgcagggcggcggcggcggccgggtcatcagaagcacagtggagccgccccctgctttgggaggagcaaaagagcctctcgcttgcctcccgctcgagctccttctcctcttccttttcctagcgcttctctccctccctcggcggggtccgcagagacagctgggcaggcggaggctgcgcgcctctcgcacctccacgcccaccctcccgccgcccccccctcggcctgaaagatctgcgtccacaccaccctgcacccagggcccgtcaggttttgcagaagtttgctgagggtcctcacagggggtctcccaggggaaggggtggagggctggaggggccgcggtgggaagaggtggcagacgccgcctggcaacggagaccctaccctttctagaaattcagaacgcagagaaaccagtgcccagccctgctcttcagc

SEQ ID NO: 224199 - DNA, 615 bp, Homo sapiens
  chr11:116450735-116451350
  hyper
agcagatcctagaccgaggaaaaacagtcccccaacacagccccgggtgggcagggggcacggtttattttagagccggcgactcgcagcccagggagcggcgctaaaacccgcggacccggcgggcgcagcgggtccgaggagcggcgggggcggccggcaaagttaacttggcaccaccggcgcttcaaagcggtgcagctgtggctagcagagccggcgccgctttcttctcgccgcttccttctccccgattaatcagcggctacagccgtcgctttgatccccgaaatcaaaccctccgtctgatgggtgacttgatgttatgctaatccaagctgattgagctgagataattacacttcatccaggtttcctgggagttccgaataaatattgatgcacatctgtcccccgctcaggtgtagaggggagctttgcgctcgcaacagtttccgcccacccggcagcgcgcgctccgccgcccgccttcgtccctgcgcccggaggccacgagccgggcgtttgccccgagcctccccgcgcagggcccgcgaggcgcccggggaaagcgaccaagacctggagctttgcggttcgcggcccgggttggag

SEQ ID NO: 224200 - DNA, 54 bp, Homo sapiens
  chr11:116706357-116706411
  hyper
gagttgttgagatccggcaggaagtccctgctccagggccaaaggccccacccg

SEQ ID NO: 224201 - DNA, 300 bp, Homo sapiens
  chr11:116706460-116706760
  hyper
agctgcttcccactttggaaacgtttattctgagcaccgggaaggggggcggcggcgggcgcctcactgggtgttgagcttcttagtgtactcctcgagagcgctcaggaagctgaccttgaagctctccagcacgggcagcaggccttggcggaggtcctcgagcgcgggcttggccttctcgctgagcgtgctcagatgctcggtggccttggcgtggtactcggccagtctggcgccgccgttctccttgagagcctcaaggcgcgcggccaagcgctggcgcagctcgtcgctgta

SEQ ID NO: 224202 - DNA, 300 bp, Homo sapiens
  chr11:117186684-117186984
  hyper
cggtcaggggagatccgcagagcacgggagcaggggagaggctgggatccggagcccgctacatcggcacggcggcggccagcctgggcagcgggcgcgggctcccggcggggctgggaggggcgggcatggcgggccggtggcggcttccctggtccccccggcgggcggcggcgcgggcaggggcaagggctccgggctcctgcggctgcgttggctgctcaggccaccataatccagctcgcggctcgcagctcccgggcgggctggggaggcggaaagacttgtggcggcggctgt

SEQ ID NO: 224203 - DNA, 250 bp, Homo sapiens
  chr11:117352704-117352954
  hyper
gttgtccttggtggcgatggcataccgcatgacgcggtcagggtcgatgactgtgtcccccttctcccagcggatgatgatgggccgctcaccccgtgccgtgcagtttagctccttcgcatggcccttgatggcgatggtggtgttggggtgggaagtgatcatggccgggactggggggcggaggcagagaaggcccagtgaaggtcgggagaccagcctggaggaggcacgcgtgccctgcgcagaa

SEQ ID NO: 224204 - DNA, 480 bp, Homo sapiens
  chr11:117666997-117667477
  hyper
gacttgtccccaggtccaactggccaggcgcggaagcggagaatctcgcatcttggggcgcgctgcccgaggtggccacggtggcgcaccaagccggggctaaagccggggcagaggggtggggtagggccgggggagggtgacctctgggtttggagaacaaacttgctatccgagggacctccagctctcgggactctcactatccccaccctgcctccagccaatgcgcggataagcgccatgcggtgcgccaacattcgcgccagggctggggtccgcggcgggagagggacgcacggacatagcggaggaatcagccgccgagtccgaggcctgaataagcaaggactcctaggtcaagagtcacggcctgaggacccctcgactcggagggcactccggggtcccagtgccaccaagccgcaggaagagggcaaggggctgggggaggggtccagggcagaactgccgccgtgc

SEQ ID NO: 224205 - DNA, 559 bp, Homo sapiens
  chr11:117667570-117668129
  hyper
tgactctcactcggcccctgtcagggtgcctgcccctccccgctgcgccccacccggggccttgcaccccggtcggttcccccacgcacctggagcccgccgggcaccccgcctcgccgccagccgcgccaccctggccccgccgcctccgccgcccagccgcccgcgcaggtctcacctttgtgtaaagagtccaggagcaggaggaaagttaccagccacatgccataaagaggccctattctccggggaggtggtcctgtggccggccgtgcggcagcgcctctcccccgctcagcgcgctcccagccgcccgcactcggcgccccgctctctctgctcctcagcccagcgctcggctgcggcggcggctcctccctcctcggctccccggctcctgtcatccgcggggctgggctaggcggccgctctccccgcccccccgcggcaccccgggtggtgagcgccgcgcgagcccggagcccagacggaccccagccccacaagcccaggaacaggagcggcggcccgggccagaccgccccgacccggctccgct

SEQ ID NO: 224206 - DNA, 276 bp, Homo sapiens
  chr11:117856650-117856926
  hyper
caccggcgtcctggcgcctttgccctcaagggcctgcaactacctcctccccattcggagcggccgcggccacatccttaacgccaagccggcacgccaggcaaaagcggctcggacgccctcaccccaccttccgcactcagggccgaggctgtgcctggccacctgcttcccagcacatgcacacacgcgcgcgcgcacacacccacacacacgtacccacggccggccgggctacccggaccactttgatccgaaggcactggaggcccagag

SEQ ID NO: 224207 - DNA, 137 bp, Homo sapiens
  chr11:118662851-118662988
  hyper
tgcgccgggagaggacggcgggggaccggactgtgagggcgtatcttgggggacctgtctaggaggaaccgggaggtgaaggcacaactgggggtgaggcgggggcaggggccgggctgtgagagtgcgactgaggg

SEQ ID NO: 224208 - DNA, 145 bp, Homo sapiens
  chr11:119039968-119040113
  hyper
cagtttggtggaggagctctggacctgtaggaacaccgcccctgtacgtttcctgcagtgccccctccttttctcattgccctggagacctgggtgatcaccggagaactgccctcggccccgcaagtcccgtcttgactcagtg

SEQ ID NO: 224209 - DNA, 236 bp, Homo sapiens; identical to SEQ ID NO: 202736
  chr11:119103176-119103412
  hyper

SEQ ID NO: 224210 - DNA, 83 bp, Homo sapiens; identical to SEQ ID NO: 202737
  chr11:119142431-119142514
  hyper

SEQ ID NO: 224211 - DNA, 106 bp, Homo sapiens; identical to SEQ ID NO: 202738
  chr11:119144575-119144681
  hyper

SEQ ID NO: 224212 - DNA, 130 bp, Homo sapiens; identical to SEQ ID NO: 202739
  chr11:119145547-119145677
  hyper

SEQ ID NO: 224213 - DNA, 142 bp, Homo sapiens; identical to SEQ ID NO: 202740
  chr11:119146702-119146844
  hyper

SEQ ID NO: 224214 - DNA, 102 bp, Homo sapiens; identical to SEQ ID NO: 202741
  chr11:119148462-119148564
  hyper

SEQ ID NO: 224215 - DNA, 562 bp, Homo sapiens
  chr11:119148861-119149423
  hyper
ttttttaatcaaaggaacaatatgaattatactgtgagatgggctccacattccaactatgtaaaatatgtgctgaaaatgataaggatgtaaagattgagccctgtggacacctcatgtgcacatcctgtcttacatcctggcaggtacggatctaaacagcgacttttttcagctatgtaataaccttggaaaattcggtattatatagcctttactgatacaaggggtggcctggcttttggggttaggtttaaacttttacttttttttgatctctaggaaatgtattttctagtagattaatattttaagtattttcagatgcatctgttactatcttttgcttcttctgcaggaatcagaaggtcagggctgtcctttctgccgatgtgaaattaaaggtactgaacccatcgtggtagatccgtttgatcctagagggagtggcagcctgttgaggcaaggagcagagggagctccctccccaaattatgatgatgatgatgatgaacgagctgatgatactctcttcatgatgaaggaattggctggtgccaag

SEQ ID NO: 224216 - DNA, 492 bp, Homo sapiens; identical to SEQ ID NO: 202744
  chr11:119155748-119156240
  hyper

SEQ ID NO: 224217 - DNA, 126 bp, Homo sapiens; identical to SEQ ID NO: 202745
  chr11:119167631-119167757
  hyper

SEQ ID NO: 224218 - DNA, 86 bp, Homo sapiens; identical to SEQ ID NO: 202746
  chr11:119168098-119168184
  hyper

SEQ ID NO: 224219 - DNA, 175 bp, Homo sapiens; identical to SEQ ID NO: 202747
  chr11:119169061-119169236
  hyper

SEQ ID NO: 224220 - DNA, 100 bp, Homo sapiens; identical to SEQ ID NO: 202748
  chr11:119170361-119170461
  hyper

SEQ ID NO: 224221 - DNA, 130 bp, Homo sapiens
  chr11:119227108-119227238
  hyper
cgggtggagatgggcgccggctcctccgcggcgcgggcgtccaggcggtgatgctcccagcgagctccagagggcgctgtcccctcggaggcgcgggcgctgcggcgggaagcggcgcagcgagggtctt

SEQ ID NO: 224222 - DNA, 254 bp, Homo sapiens
  chr11:119587838-119588092
  hyper
gcactgagaggtgggcgccgaggactgatgctctctccctcttccatcatcaccgccccttcaggactggccacgaggcccatcatctgacccctgggagggtggggaacggtgctgtggtcagggcagaggcaggccgggagcagggggctgtcgcacacgttcccccaaaggcctatccatcacgccagtggagaccatcagagtgctctgccggcccaggacactgatgactctccaggcaccataaagac

SEQ ID NO: 224223 - DNA, 269 bp, Homo sapiens; identical to SEQ ID NO: 202753
  chr11:119598243-119598512
  hyper

SEQ ID NO: 224224 - DNA, 236 bp, Homo sapiens
  chr11:119599089-119599325
  hyper
ttcactccccacaatccagtcgtgcccgccatccggctcccagccccggggaggcattggatgggggtggggacagcagaggtgagcgctcttacctgggaggaagaatgcggtcaagccgagagcgagtccccaccagcgtccagcggcgcccgcaagccccatccgagccatcgggggccgggggtccggcgagaggggcggcgagggcagcgctcctcgcgcagcagaaacca

SEQ ID NO: 224225 - DNA, 57 bp, Homo sapiens; identical to SEQ ID NO: 202755
  chr11:119600032-119600089
  hyper

SEQ ID NO: 224226 - DNA, 105 bp, Homo sapiens
  chr11:120110624-120110729
  hyper
ggcgccactccgggcgcggtgaggaggtgctgccaggctgggttggagcaggcaggtgttccgcgggatcgagacccgccccggcagcacccccggccccctccc

SEQ ID NO: 224227 - DNA, 333 bp, Homo sapiens
  chr11:120110803-120111136
  hyper
ggcgtggccggcggcccccgccccgcgccgcgtgctcacctggggagtgtggcaatcctggcggcgccgagtgttgcccgggccggagcagcggagcgcgcgacagtggcggcgacggctccggcagcggctcccgcggcggcggcggccgggaactggaggaaggagaccctggcttcgcaggggccccggctggggcagaggcgaggggcctgggggggcgctggctttggccccgcctggggcaggatggtgaatctggagtccatgcacacaggtgaggggcggagggaatgagctctgacaggtgtcactgcgcgtgggcaggggtga

SEQ ID NO: 224228 - DNA, 562 bp, Homo sapiens
  chr11:120195958-120196520
  hyper
cctccgccgccgtcacagcctcgtcctccgcctctggctcctccgcttcctgttgccgcgatccgggccgggagctgcgggcgcccgggcgcccgaggcttcccggtgcgctccgccaggtaaccgctcggcgcgaactgcccggccggggtgggcacggggcccgcgcggcccattggtggggaaggaggcggcagagggcccgggctcgcctccgaaggggagcgggcctcctcctgcctcggacgcccgaggccttcctgcgccaggctgcggcgccagcgggatgcggggataacggtgcctggctccggctcttggtccgggcgtggccgagcgtcgcaggcaccgccgcgcggagatgcgatcgccgtccctgcgaggccccggggcccgcgctcgccgccagccacgcctgctccaaggctcctcctcgccagtctggccctggaacgggagaaaccaggagaggagccttggacctctgagccgcgatggccttccaaatgcccttccgttctttggcaaaaaccaagagcaaaaagccgaaacccacacaggg

SEQ ID NO: 224229 - DNA, 142 bp, Homo sapiens; identical to SEQ ID NO: 202758
  chr11:120206447-120206589
  hyper

SEQ ID NO: 224230 - DNA, 274 bp, Homo sapiens; identical to SEQ ID NO: 202759
  chr11:120207766-120208040
  hyper

SEQ ID NO: 224231 - DNA, 557 bp, Homo sapiens
  chr11:120382097-120382654
  hyper
cccctagcctctgccgggcgccgctccccagccgggcgcctctcgctcggccccgggcccccgggcagccgcaagtttgcccccggccgcgcggacccgcgcccgccctgcccgcagcagcccccgccgttcccgccgcccccgccgcccccgcgcctgggctcccgggcgacgctccgaggggcgctggggggcgcgtgcagctgcccgcggggctccggcccggccccgaaggggcgcccccccggccggccgtgcgcggggccgcagcagttccccagctgcccgccgggcggcgccccgcgcctcgctgcgctcctcccgcgctccccgcgccgggctcgctcgcagccggacacagactgccttcagctgcgggcggatcgggctggagccgccacggctgctgcggaagaggaaaaacggccaacagcagccccgcggccggcccggcagcgcccggcccccggctcagcccccggagtgcggagccgaccaggtaagggcagcggccccccgcggcgcccccggcccgctccctgcgctgcccccgcgcc

SEQ ID NO: 224232 - DNA, 105 bp, Homo sapiens
  chr11:121323530-121323635
  hyper
attccaggtaactcgccgggtgcagtgcgtattaccccagggtgtgtgcagagagatgtagtttccggcaggtataggaggggtgcagcttcattttacatctgg

SEQ ID NO: 224233 - DNA, 105 bp, Homo sapiens
  chr11:123228762-123228867
  hyper
tagctgcaaggcagcggcgcttctggcgttggtttccgcactaaacttgatggtctgattttaaaggttgattttaaagaaactgtctggttgtatgtccccgag

SEQ ID NO: 224234 - DNA, 586 bp, Homo sapiens
  chr11:123228906-123229492
  hyper
ggagaatccaggctgcaggcttcacccagagagggagggtgaggggaggagagagacggagagaggagagagggggaatgaaaggggagagagagggaccaagaccggcgagcgggagacaggagcggaaaccacagaggtagagtcagggccgacactgaagaaacgtagatgcacagggaggggccaatattagtgtacagagagaaagagggaacacggtgcggtgacacctagcctcggagacagtgggagctccgagcccacggagagcgggggagttccgcttcctcccgccccagcggctcccgccccgcctgggcgcagccggccgtcccggctccgagggtgcagcgcgcccgggcgcagcgcgagtgcgtggagccgggctccagcacgaccccgccgctcgggtttgggtgtcctcaggctccgcgctcctcctcccctcctccagatgggactggctctcctctttgcaaagccaggctcgcggggagacgtggtgagcagtagccagcagctggtgtgccgtggacgccgctgaccgccgcgcgcccgaaccgggtgtccacatgagtgcctc

SEQ ID NO: 224235 - DNA, 1296 bp, Homo sapiens
  chr11:123300824-123302120
  hyper
gtcgagtccctccccgagggaatccgtgtacagttacactagcggtcgctgccagtgctagcccattcaggatagcccccctcaccccgcccccagcccccgctcctcctcctccttttttgtttttatccagtgtctcgcttcctctctctctctctctctctgtctctctctccctttccctcctaccactgcctcttcctcccgctctctacctccctgcagcgccaagccggctccccaacctggtctgctgaacgcaaaccgctgagagtttgctgcaccgccccctggggcccctggctgccgagtcccgctaaggcaaagacgccagcaagcgaggaagcgcagcggaagaaaaacaagcgggcgcgcgaggggagccccaggagggctgccgagtggctggcaggcggctcccgcccctcccgggtggcctcgccggcggctgacggcccggaggacgcgcgctccgaaaagttagactccgggcggcggcgcgctacgccgcgtcccctcgcgtcccttcctcgctgcgctccgggaaaggaacttgttccttcggccccaggattggggagtgtgccgcggggccgagggtggggaacagccagagggagacgcgaaccaggccgctggcggagggctcagggggagcgcagaggcgacggcccccatgccggcggccaacatgatggagaaccggccgctgcccgccctgcaggtgcccgagccgcagggtgcgcccgagggcagcccggtctggtccagttcgtcgacccccacgcttcgccgccggcgcttcaagatgcgccgcatgaagaacgtacaggagcagagcctggaggccgggctggcccgggacctgcccgccgtcttggcccccggcaaggagttcctgcagctgccgtccatcgagatcacgccctccagcgacgaggacaccccgtggtccaactgctccacacccagcgcgtccccgcgccgaaaacgcttcctcctccgcaagtggctgagggtgagggagcggaaggagtgcagtgaaagcaggtacgtccccgttccgcccgtctccttcccttccctcccgtcctctccagagccgtccagggccccggggcattctgggggaaacgtcctgggggagaacaggagcccgtcaccagaggcgcttctggagggcgctgcgcctggtcccagggatggtggcattcagcttccacgcgtgccacccgctccccaactcagggtgaggggcttcatgttgcacgacacgtttacgtggggctttacgct

SEQ ID NO: 224236 - DNA, 991 bp, Homo sapiens
  chr11:124709075-124710066
  hyper
caaagtcccgggtcacctcggcctggaatccatctaactcagctgcaaaccagaagacgcggcctgggaggggcgtagagccctcccccacctccccgggctgggtgactgtcaggccgcatctgctccaaatttatggctcctcctcgggccgccgccggcctctccacggcctctttaccaactgcagccccagctgagacccctcccgcggggagggagggaacacgaagcgcggccggggctgggggcggggagcaggtgtgaagcggggtggcagcggcgcgcggtcaccctccaccgcgccgcggagacccggcgtcacccccacgcgcacacaatggcgcgggggccaggccgaggacggcccattagcggctgatggaggaggcgggagcccggcgggccgcctaatccccgcacgcggacacctgggtgggagcgcgggcgagtggagggcgcgcctgcacgcaggatcccgggctgggcaacggcctagaccgcctctcgccaaacctcccacgccagcgccagtccgacgaacaggagctggtccagcgaacaataaaaggccccggggctggggagggatggaagcgcccttggagcgcgcaggctacgggcgcccccggcagcgcccccgcgccttcccctcccgccccgcggccgctgattgcctattgtgcgtcccctctgcggccgcccgcgcgatgcactctgcgagctggccccttcgtttctaaatgagcagccagcgccgcagacacgtgccaagggaagggtagttcactgcgtggggcggggggacatgcaataagacaagagaccgcacggaaatagctccgtgcccgtctgctgcactgtccttctcacgtgccttcggacaaggggactttcactctctcccctcctctgccccaatcgctctgtctccctgagactgaccaccctcttctctaacccgaactccgcaggggagccttcagccttt

SEQ ID NO: 224237 - DNA, 180 bp, Homo sapiens
  chr11:124735663-124735843
  hyper
cctgggatggggatgaggtgagagggcggcgtggaagggaaggagaagcgctcctgtcccgaggtccgggattgagtggcgcctcccagcgcctccctgggtcgtggggtctaagggataatttggagcttcgagcacatgagtgggggtacccgcgggaggtcgagggcttgggagaag

SEQ ID NO: 224238 - DNA, 551 bp, Homo sapiens
  chr11:124735954-124736505
  hyper
gcccagcgcagggagggcagaggagggggcacagtctcccgccggcctcggccaagccaggtcactcggtgacccacccaggcagctggtcttcggaaccccgaagtttcccaagaactcacttaggaccagaggaagccaaaatgctggatgtgtttgctacggaggggataggggcggcgatcattttaaggaaacttagaagtttgtctttcagcggcgggactctcagccggcccaccccggcagagctgtggcgggcgggcggagctggcggcgaggtcgttaccgctaattacggtgattaataaatgactgggacagcgcgctctcccctagcgccgcggggaagctgcgggagccggccgccgccagcctgcggagaggccggagcgcgccccctgcctgccgcatcgggaacccccgctttaccgggcgctttcgcgtgtggttccctccaggtgcacgcggtccccatccctctgcctcgacccactcgagtctagtgacgagcactgtgctggggactcgaaggtggagagaaaggagac

SEQ ID NO: 224239 - DNA, 556 bp, Homo sapiens
  chr11:125773966-125774522
  hyper
tcgctaacctttctgacatcttgtgatgtggaggcggaaatttccagggaaaccgacacggggcgtaaagcgcggcggggagtccggggggctcccgcctggagggctgtgtgagcggcgggccgcggggcggcgcggggggcgctctccactctgcggaagctgccccctctgccctccggtccgcgccctttcgccccgctctctgccctccgccccgctctctgccctccgccccgctctctgccccccgccccgctctctgccctccgccccttccgcgcgccacccagccttccagcgcctgcgcgccgcaccgcggtggtcgcgggcgcggacgcggacgcctgccccctaaggaagcccattggccagcggatggggccagcaccgcctcgcgccggtggtggaagcacgtgctgggggcgggagcagcaatcgcagccatggcgtcgttactgtggggaggcgacgcaggggcggcggagagcgagcggctgaacagccacgtaaccgccaccgagccggggggccacagccgcgggggtggagctcc

SEQ ID NO: 224240 - DNA, 498 bp, Homo sapiens
  chr11:125932494-125932992
  hyper
cctccagacctcctgcgctgcagccggctcggaaagccacccccaggtcatccccccgcgcgcgcgcggcggcggctacggtggcggcggctgcgatccgaacgggcccctccatgcaccgcgcagggcagaggagggagcggcgcctcgcacgccggggctggggcgctgggcagggcgggcgggcgtggggtcccgggtctcctcgcacctagccgcgcgagccgggctcccgggctcaggggaggggagctgaggggcggagtcaccggggcgcgcccccgcggctgcgctcctccccgccggggagcgcgggcacgtaactcggagggtgctgggccggcccggagcacgcgagcagcgggaggagggaccggggaatgactgacggaggcgggccgtagaggccgctgtgccccgccggcccgcacccggccggagtgtgcgcgcgcagcctgccagatcagcggcgggggcacgggccgtaccaagtgacgg

SEQ ID NO: 224241 - DNA, 105 bp, Homo sapiens
  chr11:125933223-125933328
  hyper
cccccgaggccccgccctagcctcgttcgggccccgccctagcctcgttcgggccccgccctagcctcgttcaggccccgcccctcgccccgccccgcccctcgc

SEQ ID NO: 224242 - DNA, 318 bp, Homo sapiens
  chr11:126225867-126226185
  hyper
gcgcgggtcggggtggggctgccacagccctgcggagctgctttccggggtccctttccctggaccagattttcgcgggaagccggatcctctccgttcccttggagtgagcaagcgggacagttctgcggaaagtttccgcccccaatcccccagccctgcgcccggactgaagcggcggcccccacctccagcatcctcgagcgatggtttctcccacaactaccccggtcaggtccagcacttgggagctgactgtgctggaggtgacaggctttgcggggtccgcctgtgtgcaggagtcgcaaggtcgctgag

SEQ ID NO: 224243 - DNA, 998 bp, Homo sapiens
  chr11:128391755-128392753
  hyper
ccccggcctctggccgagagcttgggtgggggcctcggccgtcgccactcacccggggaggggaaaagctccagatcgactttttccgtcttgatgatggtgagagtcggcttgagatcgacggccgccttcatggtgccaggagtgggggacgtacgggatggtagcaagtttgcagttactgttgtttttctttttaatgaggattagtaacagggggaaggggacgggggaaatccgactttcttcccaaaaatctcaaattcccgctgcctttctttcccccgcgcccggacggtgcgcgcccggcactccaggggaagttggcactttgcggcgaagtgagcgcgctcgggtcccagcctcgcccgcgccgcgcccgctcctcctgcccggccctcgcccgctccctcctctccgccggcggctgcctcgttcgctctcgatctcccggccgctctccctccctctcgccctcccgcgctctcccctcctctttagggcgtttctcgcggcgccgcgtctcggccgctgggtccgcgcgccctgggccgggcgatgtccgcttgggggagcgaggggcggggcgtcggggcagggcggggagccgggggcggggccgagcaccgcggccaatctccgcccgcggcccaaagcgaaaggaagggctggcgagcgcggggccgggccgcgaccgcggaggagcagtgcgtggagccccgggcctcggagcccaggcaggggcgggaagggccgggagcgggtgtgcaggctgggtgcacaggccgcctccaccgtttcgggaaagtccgtctgattctccacgcattcttgagggcttggtcacccgctctcgccccctcccagtagcagcatagttttccaagtgcgtgtacatcattcattcacaaagactgacacacaggacgtgaggcatgtggatgaaggcgagcgtgcaggcaggcgcaggggattcgtgagcccgtgtcctcaaaggg

SEQ ID NO: 224244 - DNA, 720 bp, Homo sapiens
  chr11:128562993-128563713
  hyper
gggcgactcttgcctgggagtcagtgcttgggccgtcgggtccgggtaagcgctgggggtttggctcgagaagatgcggataggtggcctagggcgccgcggatctccgccctctgcgggcaccgggagcccagggtcgaggcgcgccgccccgaggggccccttctcctaacaatgcgcccggaatggagtccgcgccctgacagcgcgggtcagcccgaaaccgcccagaatccgcttcgatgagtgggtgagccgctctgggagtctgccgcgtctcggcagcggagggcctgagtggaaaaattcttattggatgcactttttaatggttggtttgcctcggttttcgtccgagtcttccccggcagtaggcgctgggttacccgcagccctagccaactctccctccataccccccctaccccacccccaaaaagtttgtctccggctggaaaaagcattaatgaacgtatctgtgggaagaaacggaaagtgaatgagtcaggagggccaccttcggccaaccgcctcaggaaaagcaaagaagccaaaggtctttggctttggattttgggggaaggtgatggggggaggttcagacttcgggaatcagggcgcggacgctgggcgtggaccccgtcattgttcccggctagctcttatctcccaggagcaagtatcctgtgtgcgcagcgcatgaatgtgtctgggcatctc

SEQ ID NO: 224245 - DNA, 1282 bp, Homo sapiens
  chr11:128563895-128565177
  hyper
tcctccccgattcgcaaagtgaagtcacttcccaaaattagctgaaaaaaaagtttcatccggttaactgtctctttcgctccgctacaacaacaaacgtgcacaggggagtgagggcagggcgctcgcagggggcacgcagggagggcccagggcgccagggaggccgcgccgggctaatccgaaggggctgcgaggtcaggctgtaaccgggtcaatgtgtggaatattggggggctcggctgcagacttggccaaatggacgggactattaaggtaagcggcggggcaacggacgcgggcggcggggaccggccggggaggcgaagcggcgggcgggtaggtgcggggcccgcgtcccggaagacgtggcctctctcccttccctccgcgccccggcttcgcgccggctcctccggcgctcgggtggcgagtcctactcgcgggccagccggccaggcgcccgcattgagggcgaccctcccccgaaatcccagcccccaaagtggagccccggcccccctcccacctcgctgcccgccggggctgcaggaggggacggcgggaaaccgggggaccccagggtacggaacggagtcaagggcgagagacctcggggtccaccactcccaccgacacccggggctcccgtggccccagcgctaggcactgggcttcctctccgcagaggcggaacacggcgggggcgggggctgcagtcgcccgggctcgggtccctgcctggtgggccctggggtgggtaagtggcctcgttgcacgagggtaggggtgcaagtgagtgtgtcgggggatctatctgagcgggctcctccagatggaagcccctgtttacatgtcagcgctttcccttcctctcggcactcagtcgcccggctctaggcgctggagagccgccggctccgcgggactcctgggccggcctcgccgcctctccggcggggaaccttccccagcccccgtccgcacagatccctagcgccccgagcccccgcccttcgcgcctaggcgtgcgccggctccaggaccagggctcctggagctgtcgcctccgaaagggtcctgcgtccttcggagccgcctccgttgcaggggccggctgtgagcccgcgccccgcgcccgcccggccattcccaccccagccgccgccgccaagcctgggtctaggttgcaaagtgcaacccaggcggaaaggtgagggtttgggttcgcgtctcacttcagaaaagttgactgctgtctctgaaagggttcgccaagtag

SEQ ID NO: 224246 - DNA, 1140 bp, Homo sapiens
  chr11:129148675-129149815
  hyper
ccggtgtccctggagcccccactcggccgctcccaggagtcgcggctgccgcccgccttgggcccggggcggagagcgctgcggcaggccagaacgccgtccgaacgcccggctcgcggaggccgcggggagcgcggggcgcgggcgcgggaggcggtgggcccgcagcgccgtccgccccgggaggccggggagatggggccgggggcggggggacaaccgagaggctcctccgggagcatgcgatccggaaccctcactctaaaaagaatattttaagaaggaaagagaggccccccgcagccttccccgcggggcctgcccacgtcaccggcgcccccggccctcccgcgcgcccgccttaccgagccccgcggccccgccgcgccgccgcggcgtccctgcgccccgctggccgctccgtgtctgccctccgcgggccgggcccgacgccctccgcccgccgccgccgccgccgagcgccgcccgcgccgccgagcctagcgcctggccgccgagggcagccgcgggggctcggccgggcgtcccccgcgccagcgcctcatcccgcctcgcgccccgtcaggctcgggggcgggggcgccgggccgcggcctccaagtccccacctccggcacgcaccgcgctcgccctcccgcggcggagtcggcccccggggacgcgggtcctcgggctccagagcctctcaccctgacgccttcgggccgcccccgcagcgcccccgcccagctggccggcgcgtgcccccgccggagcccgccgcccgcccagcctccgcctcctccgctccgcctcctcctgcacccgcgacgcccgcagcggggagaagaggcgcgccgccgcggccgcgggcacgagcacgcgcgaggagggcgggcggcgggcggagcgcgcgcgcggccgagggggcgggggcgcgccgaagcctcgcctgctgttgtcccgggagcgcacgtgcgctgcggtggggcgccgaggggcgttcggcgggtgcccctaggggactgggggacagggaacgcgaagtgggtagagacgctgcctgagaggtcccgacgtaggctgttgcctcggccccggcattgtgctgcggtgcaaaaataaaaaaccggccgccgc

SEQ ID NO: 224247 - DNA, 147 bp, Homo sapiens
  chr11:129765560-129765707
  hyper
gggcgggtcctggagcggctcgggagagcggagggtcggcgagggtgcctgcgcgcggctgggcctggggatgcaggttccagcctgcttgcgcgtctcacctgatttaggagcttccagaggccccagacagtgcctgtctttgcc

SEQ ID NO: 224248 - DNA, 238 bp, Homo sapiens
  chr11:129939594-129939832
  hyper
ccgggcggggggcgcgcggttggaccgggcgggaggagcaggctcttccatctcctgattgggtctggaccgcaagggggcggggtcttgaggggttctgcgggccggcattgggagccgcagaaggagggcgtggtaatatgaagtcagttccggttggtgtaaaacccccggggcggcggcgaactggctttagatgcttctgggtcgcggtgtgctaagcgaggagtccgagtgt

SEQ ID NO: 224249 - DNA, 53 bp, Homo sapiens
  chr11:130083121-130083174
  hyper
ctgttgttcaggtcgacggccacacggtggcgatgttgcgccgttccagggcg

SEQ ID NO: 224250 - DNA, 180 bp, Homo sapiens
  chr11:130319509-130319689
  hyper
gtctatcccgcggtacgtggagacgctggtggtcgcggacgagtcaatggtcaagttccacggcgcggacctggaacattatctgctgacgctgctggcaacggcggcgcgactctaccgccatcccagcatcctcaaccccatcaacatcgttgtggtcaaggtgctgcttcttagaga

SEQ ID NO: 224251 - DNA, 285 bp, Homo sapiens
  chr11:132864081-132864366
  hyper
ggcgggagtccccgcgccgcagcggctggtgcgctcctgccaggagccggcgcgcgcgggagcacgtccggggcttttacggccggaactcgggctattaaaaagcccaggcgcgattttctaattaaacttttgatacaggaccacacaaaagactaaacctaccaggtcagcgtgagtacacggaggaggagcctaggagagaagagggaagggctggggaaaaggggcggcctcaccggaggagctgctgggggctcgccgtgcaggcgcctcgtgggtacc

SEQ ID NO: 224252 - DNA, 440 bp, Homo sapiens
  chr11:132952553-132952993
  hyper
ccctcggcacggcacggccctgtcagctacgaagccgggcgaggggctcaaggcccctctggagaccgcttctcccccgcggcccgtcccgccgctgcggaccccatgcgcggcctccccgccccggcgcctgggcctcctcgcggcccgggcggggcccaccaacccggagaggtcgccagcctgcagggtgccgggggcccctccgagccgacctcgtcccaggcagacgcgctgcccggagaccgccgcaagggggcgccaggggccggggcggacgtcgcgccagtgcctcgccgggaccgcacctcgtccgcgcggccgccagagggcgcccgtcagcgccggagcccgcggcggacgccccagccgagcccagccactgcctggtggagccacagggcacccgcccggaaacaccgcctgcgccccgacggcac

SEQ ID NO: 224253 - DNA, 267 bp, Homo sapiens
  chr11:132953060-132953327
  hyper
cccgccgagcgggccgcacagtcactggggcgccgctcgctttgctgcctttcccgcgggtgcactgagcggcgggagcgggagccgcgggctttgcctgagccgggcgcgcgctgtggtctcactcccagacccgacccctctgagctgcccctctccgaggccccgcgaccgcatgcgtgtgtgctcccactgccccagcctgagtcccggatactggtgcccctgtctcgggtcgctggctgcggagagggctggcctgaggga

SEQ ID NO: 224254 - DNA, 1860 bp, Homo sapiens
  chr11:133825558-133827418
  hyper
accctccaggctccgctcccacttccatacaagggccgagagccgggggtgccacccagaggcttgtaggtcgctctgcccatctccaaagcaaaagcccgcgcgctcacgcacgcatcacccaactcggtggctccccccttgcgtctcccccagctcagacccaggaaagcggaaagagaaaatcccccctccgctcggattcacagcgtggggacccccccttccccgcccctcccctcccccgccgccgcccccagccagctctgcctcgcagcctggggagggcggcgtggggcccgcgcggctgcggcgcgctcccggggaacttttgcctggccggggcccaggtgcggctgagaggcgcgggggccggcggggtccagccaaaagcggacacacctcgaagctggcctcatcaatcctcctctcaccgggcgcccctgctagggggatccgacctccagctgccaagatgtgtgggcaggaggggcgcgagcggagcgatggacgcccgcagggccgcgcgaacccggggccttagacgcgggtgccgccagtcccagggatcctccgggtcgcgcctccctgcaggcgctcctcgcggcgcggggctctagcgtgctgcagcctgcccggagaccgcaaactcccgcagccagagtttcccgcagctctgggaggcggccgccgggcaggaggcgacgggctaggcgcgccggtgtgcaccgtggggcccgtggtgggcgaagtcgacccaggttccactgcgtcctttccccgagtgcccggcagcccgtgggctctggccccttcccgcccgcccctccagcccacggcccccaggccctccccggcaatgctcccgggccgcctggcccgcgtcggagcccaagcctcacccgcgggaaggcgcgccggggagctggggaaccggggggccaaggagccgggaaaccgaggggccgggcgcgaggggccgagggcgccgggaggggcaggggagggacgccgcacttcaactcaccttcagccgcaagccctcgggtgccgatcacacttgctatgaaagtggccacataccaaatcatagtactaccgcgccagcccggagcctcatcctatcgcaaagtgctcccgcgcccgcacgcgcctcgcgcccgagcgcccgcctcgcgcccgcctcgcgccgcctacgccccgcgccggtgctcctgcagcccgggtggccagctctccatccctcctaggctccgctcggctcggcgcgcgcctccccggccccggcgcagcggcacctgcactactcgcccgggcggagcgcagccaggtccacggtgaagcctagccgggccgggcctccggaaccgcccccgccgcccgcctattgggcgccgcccgcaagccgggggtccgattggctcagccttccgcccgtcgcggcgcgaaggaggcgagcccatttcaaggtgcgttgaagtgtggcgagcacagagccgcagaatcatgcgcattgccggggagaaggtggtatagcgtctctgcccgcttctctctcggctcacactgcgtggcaagtttctggtgagggaaatggtagcttctaacgggaccctggcgggtctcaattaccccggacaggtctgagggaagtggagcccccgcccactcatggaacccaacatccggtttccatccggcaaaaagcagttcccgagaggaccatgctgattctatgatggggaaacccaggagccggcggcccgggagagccggggaacgtccttcgccggagatcttttcaaagaggtcacgcgccgcctccccaccccgtctccctccgcacccagacacgtcccc

SEQ ID NO: 224255 - DNA, 726 bp, Homo sapiens
  chr11:133938736-133939462
  hyper
atacttctttactctcctcccgccaagttcattgaaagagaacccatgtgccggtccagagcatcgctgcatccgtaagcagctagacctcagcttcctctgtcaccatggtgccggctcggctgggcccggcggtcgccatggtaactggggcgggtcgcagggtcctggcaggctgggcgcatgcgcgcggggactacaagccgcgccgcgctgccgctggcccctcagcaaccctcgacatggcgctgaggcggccaccgcgactccggctctgcgctcggctgcctgacttcttcctgctgctgcttttcaggggtgagtttgcgcgtttccgctgttgggagactagggtctgggggcgacggaagcagagcgggccgaagctgctggagccggtccgggcgaggatagcggtcctggctccgagggctcccggggtcccgggccggaggggcggcgcgcgcccgcgtccccgcagccagggctgggactcgggcctggctagggcgggggccctgggacgcccggcagttggaccggggcggggagctaatttgggatggggggcccgtcccaggcagtgagtcggtcccggacagccgtcggaccccgggggcgggctcttctcgggcggggtcctgtgctgggcggtgggctcatcccccgggtgggctcctcccaggcggggtcctgtgctgggcggtgggctcatcccccgggtgg

SEQ ID NO: 224256 - DNA, 104 bp, Homo sapiens
  chr11:133939508-133939612
  hyper
gggtggacccctcccgggcggtgggcacggccctctggagggagcgcggcagctgcggcgtgggcgctggaacttgctggaagaccctgcgcagcagtgctgtg

SEQ ID NO: 224257 - DNA, 1200 bp, Homo sapiens
  chr11:134145568-134146768
  hyper
aaccgagtccatcgccttttccctctgcgcagcctctatcccttcctgtgtttcgcatctcaataaacgtccccgccaagtgacttcagcctgaaacatgcggcctcccggactcctctctgtgtcaccgacctcttgcgctcagttctccggagctgccggtttaacctcgcaagtcttcccggaacccgtgccctcctcctgggcagcgttaccaccacgagcgcctacctgagaggacgcctgttctcatccagcctccaccctgcagccgagcaatctccgtaaaacgaacacctggcttagtttctgctggaaaccgttgaatagtccccactgtcttctggaagggtctgggcagctcggcgtggcgtccacggccccaccaggcctctgcctcctgcaggtcccgctacttcgtcaccaaagcgcccgccgcgctcgcatctgctgtgaggctgtgctcgggccgctcccgccgagggaacggccctcccaaggctctgcgccccaattctcgctcgtttgccaagaggtagccgtgtcggggagctagagttctccggggactctctcctgcccctcgtggccctctgtggaaccctcgttttaggatctgcacgccgtttccagtcgcgcgcgcggcacggagaccgcccgctgtgccccgcgctgcgctctctccgcccctctcccgcgcaggcctccctgtgccagccggctgtcgacccaggttaggaagcccgaggtcggggcgttaccccaagggccctcccgcttcccctccgagggcagagaggcgtccgcgcccggacgcactgcgggaacacctggagcgccggcggagctcggctgtccccgcgggagggagcccgacgcgcatccttgggacccggacccggcgcccgcgcctcgggacggatttctgcctcggctgcaggcgcagcgcgcagacctgagcctgccccgcggaaccggggctcgagtcccggcccgagcgcggcgtcggggccagcggagaggggcggaagccgcaagggaccctcggcgcctcggcctggccgcgatgaagtccccgcccctcctcaggtgacggatcgccgctgccgtcccgggctgcccaccaccccggcgcgtgcccgggagcctccaccctccccgggttctgtggccggccacgcgccccaggcacgcgccgcg

SEQ ID NO: 224258 - DNA, 159 bp, Homo sapiens
  chr11:134281377-134281536
  hyper
ggccgggaactgacgactgagagcccgggccgattgttagaagctgctgagaaccagctcttcccctaatcccggtcgacgagggcaggctgtgccgggttttgtttcgcagcccctcggcagcagcgcctcccagcccgagctcggttctcggccccc

SEQ ID NO: 224259 - DNA, 281 bp, Homo sapiens
  chr11:134281599-134281880
  hyper
cccagcgcgcgcccgggaggacatggcgtgggcaccgatggggacgcagaaaggggctctgtgcgcggcggggcgcccgcgggggcgcggggagcactgacctgcggcgacgagtccggagcgtctccggtgcggtccatcgcgggcaacggcccctacgccccggccccggcgcccctagaccgctgccctgggccgcgtgcggctccctccccggggactgtcgggctccgggcccccgggggccacttcatagccgcggggtccgcgcgcccgcccgc

SEQ ID NO: 224260 - DNA, 180 bp, Homo sapiens
  chr11:134282478-134282658
  hyper
catcctggctgctcctggcgcccagcttggcagcctctctcaaagggtgattgtttccggccgggctgctgcaggagggcggggggcggcgctctgggaccgagaggccgagctgggaagccggtgggggatgcggctccttccttggctccaggcaccccggatgggaggtggccggtg

SEQ ID NO: 224261 - DNA, 180 bp, Homo sapiens
  chr11:134282734-134282914
  hyper
tcaccccagcctccccttccgggccggtgcacccggcgttccggagagaggcccgggaggcctgcgtgggcggacgggcgcggggaggccgggggcagcgggatctccaggagtttcccgggcctctgccgcggtgtgttggtcggcgggggacggaggccagtgagtgggcgcgcactt

SEQ ID NO: 224262 - DNA, 391 bp, Homo sapiens
  chr12:569750-570141
  hyper
gcggcggcggcggctcctgcgttggggggacccgcctctcatcccatcctcagacccgatttcccacccatttctccctcaggtgcccggcgtcgccccgcgcgtactcggggagagctgcgggcgggggaagccgcggggccgagcgcagaattcccgagcccgggcctgcccgccggccacgtgggtccggggcaccctgggggctcctcgcgtctcccctcggagagcgacccggagagaggctccccgcccgtcccgccgagacgctggcggagaccgggcccctccagccgctccgggcttgcggttcccggggaggaggtccgtggggtccacgcgcgagctagggattcgggtgcgggatgccctcggccgtccacacccaggc

SEQ ID NO: 224263 - DNA, 209 bp, Homo sapiens; identical to SEQ ID NO: 202807
  chr12:694940-695149
  hyper

SEQ ID NO: 224264 - DNA, 322 bp, Homo sapiens
  chr12:708936-709258
  hyper
tctcctcctcagcttggttggacctgcaccccagcacgcccggggggctcacattcctccccgagatgccgccactgattcaccatggtgccagtgtcccattgcccgtctcgggcacaggagtagccgtgcactcaggatacctctgatgccaaggtttgagcagctctggcccagcccgcctccttctgcccagctgccagggccccgatactcagccctcccctgcctggtttctgagtctgaggaatgtgcccagaagcaaattggcgctgagattcacatttactcctttactccttccgaacgcctgagccactgg

SEQ ID NO: 224265 - DNA, 347 bp, Homo sapiens
  chr12:1639108-1639455
  hyper
gctcgtgccaggatcgcggggcgcgggtacgggctccttgggcgccccgagggggctgctggccggggtaagagccgcggtttcttcggaggatcgggtcgagttccaggagaagggggcagcaggcgtgcggcgccgggagaagggggccgggcggcggagactccccgtccgcacccccgcggcgaggcccccgggccgctctgcttaggggccgagggagccgggcgggaggcaggtgcggaggtcgcggtcccagcgcctgggaggagccctcgggagggtgtcgcggcccggctggtgggcaggagcgagccggggccggcgcggctgtcgggggcggggag

SEQ ID NO: 224266 - DNA, 180 bp, Homo sapiens
  chr12:1639529-1639709
  hyper
gccgcggccgccacccgccccgcagccaacttgggccgaaacttccccgggtcccgcgctccggagcagggcgcgcagcccggcgagatcgacggcggcctcccgagcccgcgcctcgggcccagggcctccctccggatcggccgcaggctgcgcgcccccgaccgtccccgcccgctg

SEQ ID NO: 224267 - DNA, 300 bp, Homo sapiens
  chr12:1640254-1640554
  hyper
gcgtcgggtcggggcgggccggggtcaggtcgggggaagggagtcgccccgggccggggcggcgaacaaagctggggaccgccgggccctcgcgcgggcaggcataggaggctccggggtcggcggcgcaggcggggcggcctctgagcttcgcgctcactctcccgggtctggtcgggcccagccccgaccctccgccgaggtctgcgccggcatcgaggaccccatctgggttactttacccgccggacgcgggtgggagcctgcgtttctgcccggaccgcgcaggtagagcccgag

SEQ ID NO: 224268 - DNA, 426 bp, Homo sapiens
  chr12:2144046-2144472
  hyper
tacaggatgctatgggacaccgaatccaactttgcgggacaggggaagaagccttaggagctggcgaggcgagggggtgaagaggagaaggaggtctgggcactggaagcggcacacgtggaaacggtaaaggccgacgccggttcagagccgcaaccgcgacagccccgtcgtccacctcaggtgccggcgccccctgctggtgcgcggagatgcgcggagaccgcaaggcccgggggcgtggcctcccctgcgccggcgcgtgtgcccgggccctccgcggggcgccggcgtctgcgccaaggcacgttctcctgctgctccagaactgccaccttccaagtcctgaaggaggccgttttcctgtcatttgcacctggccggagccattctggatgttttaaggaaacgagaaaaccattcttt

SEQ ID NO: 224269 - DNA, 2213 bp, Homo sapiens
  chr12:2161370-2163583
  hyper
cgtgctcggctgcctccaaggaattattaaacctgggtctaggaatctgttcagacatctgggcaccgctgcctcgcctaccaggctccgcctcgctgcccctcccgcttcccctcccctcctctatctgtcacttctacaaccgctctgattataattgatcaaacagaatcacggaatcacggctcatcttgccgttttgttcagtggcccgatccgaaacgagactctggtagtcgggcaaattgtattcctcctccttggaattccgctcacagaggccttcccggcgtggccggcccagcagggacgcgccgccgcagcggaggagagaacgcgggcggggggctgcaggccggcgcggggggcgcgacgccgccggcggggcgcgagggggtgtgtccgcgccgcggccaccgcggccaccgcggctggcgcccgggtgcgccgcgcgccccggcctccccgggggctcctcacgccgcccctcgcccgccggcggccggggcccgctccctttgacgtcatgcgggcggagggctcgctcgggcggcgctgccgcgggcgccgggagggggcccgacttcgggctccagtccgccgccgtgcgccccgcgccgtgcgcccggctccctgcgcgccgccgcagccacatctggaagcgttcagcgcgtctgcctccggcgcgccgggcgggcgggcgggcggcgcgggcaggggcgggcgcgggcgcggcggggctgggccggggggagtgagcgcggcgctctcgcgcgcccggtgtctccctctcgctgcctctgcagaaacagctcctgccagagcggcgctcggcgcggcgcggcgggcccggagcggcggcggcggctcttcctgcctccgcgcccaggagttgccggctccctttgacagcagagagccgggcaggggcctcaggaggactcgctgggagtgggcagaggcgcctcggcccctgccggcccaggcgggccccgcgcgccccccgcccctcctctccgcctcttctcgccctgcctctcccgatttattttttcaaatggtgtagccgccggaggtgcggtgctcagttcttggaaggggcccggatgtactgaggatgcgttacagtttcactcgaggaggcagtagtggaaaggagcagtttttggggtttgatgccataatgggaatcaggtaatcgtcggcggggaagaagaaacgctgcagaccacggcttcctcgaatcttgcgcgaaagccgccggcctcggaggagggattaatccagacccgccggggggtgttttcacatttcttcctcttcgtggctgctcctcctattaaaaccatttttggtccatggtcaatgagaatacgaggatgtacattccagaggaaaaccaccaaggtaaggctggaccccgccgcctcgccggggctccctgccttttccaccgggttcctgccctacccgcgctccccgcggccccggggccggtccctgcggagtggcccggggccgcgtccgcgaggggcgcctccgcctcgtcggagcgcccgggagcccggcgggaccggggcccgaaccgccgcgcgagacggagcggaaaattcccgcccctccccctccgggccccagcttctccagagcatgtgtttcctgtgaaattccaggcgaggggggaaaagttccccaagtggctgccgccgcctcgctttctcgcgtccgcctggagagcccggctgcctggccagccgcgcggggggcagagggcgccggcgccgcggagcccagaggcccggggtccctcgcccggctcggggcgcggctgggagcgcgcgcgcgcgcaccctgcgccggcagagcccggcgcccacggccgcccctggggcgccctcgcgctgcccggcgtccactctcgtccaggcgcccctgccctgggcggcgcgctccaggtggcgggtgggggcggcggtgcagatgtgaagcccagcgcgcccctctggttccccctctgtaggtccccttcttcctctctccctccctcctccgccgctcacctacacccacccacctctccactgctgttgaccccgagcgcgcccacgccgcgtgtgttctcattcgcacccacatgtgggctagcacctgaggatggaagcggcgaggagccgggcggtgtgtgggctttgctgtttcgtgtttgaaggaga

SEQ ID NO: 224270 - DNA, 142 bp, Homo sapiens; identical to SEQ ID NO: 202827
  chr12:3129463-3129605
  hyper

SEQ ID NO: 224271 - DNA, 540 bp, Homo sapiens
  chr12:3186403-3186943
  hyper
cgggcactggcgctggcgccccgctcagccctgcgatccttctccgccccgcccctccccgctccgccccgcccctccccgctccgcccccgggccgccccgccccgcaggctcgccattcccgggcaggccccgccccctgtttccgctggcggcggcggcggcggcggtgccggagcgcgagcagagcggagacccccaggtcctgcgggcgcggtgagtgcggcccgggcggcgggcggcgaggcgggtctcgagagcgtgcggagtcgcgcggccttgagccggcgccgggcgggctgggcacccccaggccgagacccgagaagggggagcggccgggggcgcccacgggaggcagtgtgggcagggcggcggtgggacgagaggacgaggaacagagtaggcgccgtgcgggaagcgggccgggaaggggagggtgggtgcggggcccgggcaccgagcgaagtggggtcctccaggggatggctccgaggaagaccgtttcagaaagggagtaacccggggccggcaagggtt

SEQ ID NO: 224272 - DNA, 58 bp, Homo sapiens
  chr12:3474998-3475056
  hyper
tgcacacaccaacgcgtgctcccacgcgccgcgactcccccgggatgcctgccccacc

SEQ ID NO: 224273 - DNA, 980 bp, Homo sapiens
  chr12:3600023-3601003
  hyper
gagctggggtgggccggggtggggagggtgcgagttaactgtggcccggtctcgcccggacctcgccctaggtgggagcacgcgcaccgggtctgagaacctgcaagagcctcgcccggcgccggctttctctgggccccccgcgcgggcctggcctccacgtaagttgtgtgcagcgccagggagtggaggcggccgagaccctcggagactaggggagggggcgggcccgggggcgctgggggccctcggtctgcgcccagccgccgccggctccagcgaacctcctaccccgcccccactcacccggctcagcccctaggagagacgcgcaggaagcgtgttgcttcgcccagcggatcggcagaagttgagaggagttggcggctgcctccggccggccggactttgcgagcagcctggagaggatccgcgaccgccgccgccgccgccgcggaggcttcggggctgcttccctcgagcttagcccgcagcgcgggtggagaggggcggggagggggtcgggggcacgagaagaacttgaaaccgtgtgaaggaatccggagcagatgagaagggaggaaaataaaagaaagtggagactgcagaacagactccgctgtggctgactgtgccggccgacgctccagctgaggggctgggttggatttttttttttctcccatcctctcgctctctcttttaaagcgacaccagctctctctcctcctctactatctcggtatcaccaaacccttgccggctcttatgggcatgaaacactcctcccgctgcctgctcctgaggaggaaaatggcggagaacgcggccgagagcaccgaggtaaggaggcgagcgagcaggggctctcggagaccccgccgcccacccggaccaccgcgccgccgccgccgctcagcgccgagtgccaaactttccccagtttcatcccgctcgcttctgccggcctcctcctgtgt

SEQ ID NO: 224274 - DNA, 1020 bp, Homo sapiens
  chr12:3601270-3602290
  hyper
cctggggccaggtctgccccctgcagtgccttgaccgtctcctgccgctgcctcagctttacccttcaagctcgagtcggttcccgagctctccgtccccgcagccgcgcggagagcccccggccgcgggggccgagccggcaggaggactcgggcacctcctacagaccctccggcccagatctgggccagagagaagtctgcaatcctcagatatcagagccgcctctgggtagctaaacccggcagggcacacgggccgcggccaccttcagcaccagggacagcgtccgcccctgcagcagccgagcctgcgcggactgtgggggctgcgcgccgccggctgcagtgagaaatgggtctgcagccacccgtcccgcaagggcttttgaggaggtcgctctagctccgcaaattgtgttctcggcccccgccttcggcagcctttttctctactctccagctggccctgagccgcagagagccctgctgggctttgcgtcccgagactcgaggctgtgatccctcgcctccctctgaccccgctgtcattacaacaaccggactattccgtaggctctgggcacctgtagtcacgaaggggatcagcgtgggcagcccccttaccttcctggagaaacggtgcgccgagatgggggcggagtggggcatgtgtgtgaagatcatcccttactcagtggcaggaaaaagacacagagagcaaactcccaggctctattaatagctgggtgtctggtggggctgccgcacatttcacatatggttacccatatgcagcggggggcggggatgggggtgtggcgcggggattgtccctctgtcttgccggaatgcaaaaaggtagagagacccttcctggtcttcttccctcgagttcttaactctgcgctaaaacccctaccccacggcgtaggcagcaaagctttataaatcccccttctctgagagactagaagcagcatgcatctgacaattgtcaatttcaaaacaaacacgctc

SEQ ID NO: 224275 - DNA, 480 bp, Homo sapiens
  chr12:3602395-3602875
  hyper
ccacctgagagcagacattcggaatgatgtgtagtgcgaggcggctagcctcccagcagaaagccatccttaccattcccctcaccctccgccctctgatcgcccacccgccgaaagggtttctaaaaatagcccagggcttcaaggccgcgcttctgtgaagtgtggagcgagcgggcacgtagcggtctctgccaggtggctggagccctggaagcgagaaggcgcttcctccctgcatttccacctcaccccacccccggctcatttttctaagaaaaagtttttgcggttccctttgcctcctacccccgctgccgcgcggggtctgggtgcagacccctgccaggttccgcagtgtgcagcggcggctgctgcgctctcccagcctcggcgagggttaaaggcgtccggagcaggcagagcgccgcgcgccagtctatttttacttgcttcccccgccgctccgcgctccccctt

SEQ ID NO: 224276 - DNA, 1432 bp, Homo sapiens
  chr12:4377789-4379221
  hyper
atttaggggaaatgaaggtgcgtgggctcactctgcagctgcagttttcagcccttgcagtttagaagattctgcatgagcacggatgccacgagggtatccagcgagtgggaagggagtcgccctacatgttttcacatcgatttgtaaaactgttttgaaagggtatttctagatccatttgttccaaatgcagcaaaattcatccgatatcgctcacaatgcatgcacgggttatcttacatgtaatagccatcgtattaaccaacccagctgatactgagatggtgaatggggcgggggagcagggaggaatatgtcgcgcatgaaaaactccgggtgtaaaagtcaatgcagaactcactccccgaggaaccgaaaaagacattcacgactctcaagtggagagaggatagaaagtcaagtggcgggggtcgcgaccagtgatcgggatttcagtctgatctcagtacccagcggaacaggaccataacctaaagaaatgagctttttccggagcaaagagcggccccgatttcaaagtagaaaaaataaactgcttgggggtggaagatggcgaggggcggggggcggggagggaggcgggtcgcggcgctggctccggggtccgcggcacggcctcctctgccgcgctgcccagggcccggaccctgcccggcgctgcgcccaccgcgagggtgccagacccgccgcgccgccgccgcgctctcccagccgcggccccctcccccgccgcttcctcttgctctcccagccccttcccccacgtgtggatgacgtcaaaattccgcgaaaaagccgcgtggtggctccccgagcggaggcgcgattccgccgcccagcggccccctcccgggggcgcctggagggggagaagggcggaggcggccggttccttctcctcccgggaggcaggaccccccgacgccgaccgccggacgccccccgccccaaagcttattggaaaattcacttttgtaaagcaaatgtatttccagagctattttcggccgcgtgaggcgtgtcctaagctgaatcagacaggaagagggggaagttcgggtcttttaattttttttttttccgaagggaggggagtgagatgctaggtgggtgacagacggcaggcgctcgccttcttaactcacgcctgtcgcatctgccgcctcagtaatccagccccgtccaagccgaaattcgccgaagggagtgcggatgcacaggcctggcggactctgcccccctccagaacgcagcggcccagcgccccggcgggcgcggctgcgaccagagggtcccggaagcgagtgaacacctgcaatcgcactgcccgtccccacccaccctgctcccccgtgctctccgcttcccgacgttttcctcttctccttgtccgcatttttctactttg

SEQ ID NO: 224277 - DNA, 180 bp, Homo sapiens
  chr12:4380180-4380360
  hyper
tcggaaggggaagtggacaggggaacttcaagaggcgagcctgccacgcgggaagcgcccgaacttgcgggtctccatgaatgcagagggcgccgggaagggggggcatccggccgcgaccctctctgcccctcccattcgctgcccccctccccgctggaatttctctgtaaagcaaga

SEQ ID NO: 224278 - DNA, 780 bp, Homo sapiens
  chr12:4381479-4382259
  hyper
cagcccgcgccccaccccgccttgctggctctccgcgcccctgcccgggccccctctctcggtgagggaggcactcagtcggcctcggtgtgcccagagagctcgagccacgccatgcccgctgcacgtgccagcttggccagcacatcagggcgctggtctctccccttcctcctggagtgaaatacaccaaagggcgcggtgggggtggggggtgacgggaggaaggaggtgaagaaacgccaccagatcgtatctcctgtaaagacagccttgactcaagcatgcgttagagcacgtgtcagggccgaccgtgctggcggcgacttcaccgcagtcggctcccagggagaaagcctggcgagtgaggcgcgaaaccggaggggtcggcgaggatgcgggcgaaggaccgagcgtggaggcctcatgcctccggggaaaggaaggggtggtggtgtttgcgcagggggagcgagggggagccggacctaatccctcactcgccccctccccctcccgggccatttcctagaaagctgcatcggtgtggccacgctcagcgcagacacctcgggcggcttgtcagcagatgcaggggcgaggaagcgggtttttcctgcgtggccgctggccgcgggggaaccgctgggagccctgcccccggcctgcggcggccctagacgctgcaccgcgtcgccccacggcgcccgaagagcccccagaaacacgatggtttctgctcgaggatcacattctatccctccagagaagcacccccct

SEQ ID NO: 224279 - DNA, 376 bp, Homo sapiens
  chr12:4918558-4918934
  hyper
gaggtgggtccccgcgctcgggcgccggggcagccccgggccctctgcgaggcctgcggcgcggctcctagggaggaggtggcggctgtggcggccggaaccgcgaccttggccggacccagccccgcggtggacgcagggcggaggccgagccccgccaggagtctttgccgagccggagggaggcgcatctggcgcttcggtaccagcggcagccgggggtccggagcggctggaggagcgcagtgggaactgggaagagctagcccggctggagggcggacctctgcgtccgggagccgggtctcaggcaccgctgggggcgaagccacgcgtcttttcgggcagccaatttcacacgcgcctgtgtgcggtt

SEQ ID NO: 224280 - DNA, 288 bp, Homo sapiens
  chr12:4920225-4920513
  hyper
tcctccgagtcatccgcctggtccgggtgttccgcatcttcaagctctcccgccactccaaggggctgcagatcctgggcaagaccttgcaggcctccatgagggagctggggctgctcatcttcttcctcttcatcggggtcatcctcttctccagtgccgtctacttcgcagaggctgacgatgacgattcgctttttcccagcatcccggatgccttctggtgggcagtggttacaatgaccacggtaggttacggggacatgtaccccatgactgtggggggaa

SEQ ID NO: 224281 - DNA, 1920 bp, Homo sapiens
  chr12:5018390-5020310
  hyper
caaacccacgaagccttcggtcccccacaagtcacattccctgtatttcagaataatcggatcgtaagaaaacttcaagtcccatcgtaggttaaagagggacaggctcttagtaccgccgccgcccagtaaaactacatggaacaaacccagggatcctcatctgcacagctctgcccaaagtctgcagctctgcgagtccagccggcgggggaagctgggtgggccccgcagagagcaagggccttcttgggggaggagcgggatggggcgcagagcagtgcgatcgaagagggttactgtgggactgcacaaaagcaaacccgtcggaggagttttgccagaaacaccaccgcctgcattgcgtcggacctgaccatttccaatgtgaaattcccggggaaggtcgcgagccgctaggggccgttcgtgggcggggcggcgggccacaggggaagtagagttagcggtcggcttttctggtaggagaggaaaaagctgtgctggcaagggtgggaactgaatgacaaccccgctctcttccaaaccaccccctcatattttccatccacctcctcgctcctgccctcccccgccctccccaacccacgcccgggtgggccaatcgctgctcggtattccaggcgctttctcaggtttctgctgatcttgcagcgcccagaaatggaccgagcggacccgccgccgcacgcaccctgctccactccaagctcctaagggctcctggcgcgccgcgtagccttggcgaggtccgcgctggggtgcggagagcgaagggaactggagagccatgtagatccaggctctcgcccgcccgcctccttcgggatcgaatcaagggctcccatagtgttaggagggggcgagagtgctgtttatcgtcatttgcctcggagcttcgagagagggtggtattttgcttttccgccccgcatcctccggaactccctgcaccggagagaggacggcgtctccaggttgctggcaaccggtgagaatgggggtagggaaggaacattttcgccgtagctgctccgtaaagcgattgtccaactgagaggggcgtcggacgagtggaccagggcggcgagtttgcccggcgcgtctcggatgctgctgcggcggccgccgcggctcccgccagggcactgcaaagacgacctgccgcattcccactcgggctctccgctgactcagcaccgcccctgcgccaagccagccggccaggtagggggttccccagctcggggatgcagaagcgggggttggggggaccgggtgggggaggccgggggtgcggggatgctgtccgggaccctgagcttcccccggcgtctctcggcgcttttccgatctctagtttaacgaagttgtaaacagatcggctgttgggcattggggaaagtgggatggaagagccccaaacttggatttccgggtgtctgcgtgtcgtctgtccgtgtgtgtgtgatagccctagcaaacgtccagtgctttctcaagctagaggtctgtgttcttcggtgtctgtaggtccgtcccatctgaatgcttctgattttctacccccgtatcactttctatttctctgcagcgtgcatcgatcgccctggtgggagcttagaaggcggcaggcgaagaggggtaggaggggggagagccgaggagaagcagagagggtggcaggcgtggggatctgccgagccggcactgcaccgggtcctaggaaggctctcggaggggaggggaggccagggcgacccccgaagcaatggcccagtccgctagaacggcactgcgttaaggcacctgggatcaggaagaaatatctaaacaacaacaacagaaaaccaacaaacccccaaacccaaacccaaccctctgcaaaaagctgcaccc

SEQ ID NO: 224282 - DNA, 812 bp, Homo sapiens
  chr12:5540932-5541744
  hyper
acatgtaacctgttacgatacatttaacgtttcgttttttcctggatctctaaaagggaactcaagggtgggggttactgaagaatactacagatttggaagtttttgttgctgttgttgtttggtttggttttgtttttcaagaggggccaggagaaatgaccccttccccgccacgggtcccgaagtgagggcggggggggggctctggggcgcgggcgcgcgcggcgcggcgcgggccggcgggggagggcggcgcggcgcggaaggggttaaggcgctgagcgcggagccatctggccgggttggctggttataaccgcgcagattctgttcacgggactcagagttgaagctcctctcccttccgaacagctccgcgcaccgccccgcgacgcagcccggcgcaactactttcttctctctcctttctttcttcctctcctttttcccctgctgggtagtggctgcggcggggtgggggagactttgaatgaccgagctcgcgtccacctttctcttcatgtcgacgtccctggaaacggccacacggatgccatggttacttttgccacggtaaggggaggcggcgggcaccttgggtgggcaggtttggggatgggggtccacgtggggagggattttccagtggactggtgcggggggccccagatccgcatcccgccccacccccatcgcgccgcgctcactcactttcccgggcttgtgtcttccccaaagtttgcgctgggatctgctcaggccgaagcgcaaccgcagccaccccgctacacacacacacacacacacac

SEQ ID NO: 224283 - DNA, 660 bp, Homo sapiens
  chr12:5541892-5542552
  hyper
gaggggaaatggggacgacgaaagagcaggaaagagattcaacagaatcaaccacccaccactcccaaccgacccgcctgctcctccgagaaagctcctagcgcatcctataacaaaagggggtggcagacagaactccgggcggggaggtgccgcggcagctcccctgcacacgccctgcactctgccggccgctgagcctgattctcagctcgccccagcaccactctggcccgggcgtgggctggggggaggggacgcgcagctcaggacccggaacctcgcgttccagttttgggagttgggactcactgccacgcgccgcgtacctgcgttggagttccccgaaagggttttttcagaaaagacctcgcgccccgggctcctcttggccagcgcccacccggtggccaccccaccctgggcctttgcgcagatgttggagctccgtacgcagcccgcacatctgggacccctccggggagcggcgggcacccgggcccggccatcccaggggatctccttgcggtatcgtccagcctgttctcggactttgagcggtggcgtgggaggccgggagacctgggcacccgcgcagccagccaggtcggagtttaaaggtcccacgacggaccgaactgtcccattgccccagagctt

SEQ ID NO: 224284 - DNA, 317 bp, Homo sapiens
  chr12:6309398-6309715
  hyper
ggcgggggcggggggcggggggggtgcggcccgggcggggccggtggggcgggaggcgtggccggcggggggagtgggggcggcttttcccggcacatgcgcaccgcagcgggtcgcgcgccctaaggagtggcactttttaaaagtgcagccggagaccagcctacagccgcctgcatctgtatccagcgccaggtcccgccagtcccagctgcgcgcgccccccagtcccgcacccgttcggcccaggctaagttagccctcaccatgccggtcaaaggaggcaccaagtgcatcaaatacctgctgttcggatt

SEQ ID NO: 224285 - DNA, 141 bp, Homo sapiens
  chr12:6387950-6388091
  hyper
ggggcggagggggcgcggtaagcccacggagggctgactcatcctggcgccgccctgactcacccgcggccgccctggcagccccgtcctgccgcgccccctcgcggccacgcgcggaagcgcagccggggtgccccgccc

SEQ ID NO: 224286 - DNA, 671 bp, Homo sapiens
  chr12:6492950-6493621
  hyper
ccttgcagtccccgcgccctgccctctccatgactgcccgtcctgggcccctcgctttccagatcccgcacccagctgtcccttgcgctctctggaactccctctgctctccctgcgaggcttgtccaagggctgaccccgggcccgccgcccttccctcggctgggccagggctgtccgcagtccgctctcccgatcgggcttccgaagaagggaggaggccggttccggccccgcggccctcacgtgctttcccggccgcccctcccgccccgcatcgaggcagacaagcctgttcctcttccctgggctgcgattgcgacaggccggcctggctcccagcgctccctgtccccgccccgcggccagctcgctccactcccacttcctgagctccgccatgggagccctggaggcccggcctggccgctcccggccctggggtgcacatcggccctgagtcccgtcccaggctctgggctcgggcagccgccgccaccgctgcccaggacgtcgggcctcctgccttcctcccaggcccccacgttgctggccgcctggccgagtggccgccatgctcctgccttgggccacctctgcccccggcctggcctgggggcctctggtgctgggcctcttcgggctcctggcagcatcgcagccccaggcgg

SEQ ID NO: 224287 - DNA, 723 bp, Homo sapiens
  chr12:6809093-6809816
  hyper
gcgaaccagtgaagcggagaagggctcccagggcgcatctgtggccagctgactctaggactatcgcccctccgcctgtgcatccccacccccagccagcgccaacccagtccctgggccccgcacagcttcagccgccccctccaggaagcccgcagtccccgggctggcgcgccacccccacccctctcccagcttctcaccgacctgttgtgcgcaggagacgagctgggggtggggcaggagcctcggggtgcgggagccgggccccagccccagcgtggcccccatcccacccatcccgcaggcccgcactccccgcacagggctggagagcggcgagagtggggggagacgaggaaaaggaggtcggcgaagggaccccgaggcagggagtgccgagagcggactggggacccgaagcaggagactgcgcggagccgcccgccgagccgaggcgggatggaggcagccgcggggacggggacggctgcgccagggagggcgggagcgagccaggaccgcggagggatggagagcccttcggggaaggggcgctgggaggctggaggccttgtcccgggcgagggaccgcgtcgggaggggcaggaggcgcagggcgcggagccgggaagggcagggccgggctccccgcgggtgggggcgtgggggtccctctcactcacctgcatgcttggcgcggcggcgcgacgactgcgggcg

SEQ ID NO: 224288 - DNA, 439 bp, Homo sapiens
  chr12:8123158-8123597
  hyper
ttgcactcgtctttatcttctaagccctccacatgcttttaaactgtcagtcttttcatttttatttcttcctcttggacgcatttacccaaattggcccgagggaggctgagacagcagatacgaaagaaaaatgtgtgtatgcgtgagtctttgggtggcgaagaaggaggaggaggaatgtagctcggggctcggcccccgtgctgggattccgagggcgggggacaggatgcgcgcgcggcgggtagcgtgccacacggcacgtcccggccgctgcaggaaggcggggctcaggtcccgccgactcccacatgctgggggacaccgggagcgcctcccactcccagcccgccggagagccttgcaattttcaggaatcggcgtcttctctggaaagccgccaaaggttttaagagggtttcgccttaagggcaga

SEQ ID NO: 224289 - DNA, 521 bp, Homo sapiens
  chr12:8171289-8171810
  hyper
gcacaaatctggccccaggccgccgccgccgcgcccggcagtgacagcgaccgcgccgctgcgctcccgccggccccgcccgcagccgctgggacccactaactgcctcgaaaagcctaggattcgactttgaatggtccgttaatgtggtcgcaaaacgtgactcggttcatcgggcgctccctgtaagcaagacaagcacccacctgcggtcagagcaggggtccggctcgcggtcggggttgtccaggccctcccggcttctcacctgcgcaccacacggtccagccctggcggctgcaggggatccctccgagcgccccctcaggcgtcttcctgcgaccggggagagggaaccctttacggggaaacagttttggggcccaccacccttggcgccgccgttaggagggtgtgaacatttctgctttaagagatacccgagcccctcaccgcctgcggcagggaggtggtgccccggctatcgccgcgggctggccggctgggctgggaagaaggct

SEQ ID NO: 224290 - DNA, 292 bp, Homo sapiens
  chr12:9216953-9217245
  hyper
cggcggagcagctgcgggagccgcagtggctgctgtgggacatctgtgcctcgcgtcccctgtgccttgagaccccaaagcagccgactgcgccgccaccatcctcgcgttgccgggtggggcgacgtgctccccggccaggagcctccaccgctccggaccctggccctatgtcgccgctctcgcccgccgccgccgcggagtgggagtggggaggaggggaacagtccttggagccggccccgggagtactcccggagcctgccgccctggaagccgccacgatggaccg

SEQ ID NO: 224291 - DNA, 44 bp, Homo sapiens; identical to SEQ ID NO: 202870
  chr12:11801643-11801687
  hyper

SEQ ID NO: 224292 - DNA, 394 bp, Homo sapiens
  chr12:11802787-11803181
  hyper
gcgtcccgggtccccgcgccgcgccgcgacctgcagaccccgccgccgcgctcgggcccgtctcccacgcccccgccgccccgcgcgcccaactccgccggccgccccgccccgccccgcgcgctccagacccccggggcggctgccgggagagatgctggaagaaacttcttaaatgaccgcgtctggctggccgtggagcctttctgggttggggagaggaaaggaaagtggaaaaaacctgagaacttcctgatctctctcgctgtgagacatgtctgagactcctgctcagtgtagcattaaggtaaaaatcttctcccctccttctacgtggtggaaaccctgagctgcaccggccagggcagtcgtgctgggctcctcagagcaggct

SEQ ID NO: 224293 - DNA, 198 bp, Homo sapiens; identical to SEQ ID NO: 202872
  chr12:11905383-11905581
  hyper

SEQ ID NO: 224294 - DNA, 165 bp, Homo sapiens; identical to SEQ ID NO: 202873
  chr12:11992073-11992238
  hyper

SEQ ID NO: 224295 - DNA, 217 bp, Homo sapiens
  chr12:12006278-12006495
  hyper
aggcacttagctgctgctccgtagatcgttgttggaaaaacatctttccatttctcgatttccctttcctttttctttccaggtgatgtgctctatgaactccttcagcatattctgaagcagaggaaacctcggattcttttttcaccattcttccaccctggaaactctatacacacacagccggaggtcatactgcatcagaaccatgaagaag

SEQ ID NO: 224296 - DNA, 546 bp, Homo sapiens; identical to SEQ ID NO: 202875
  chr12:12022357-12022903
  hyper

SEQ ID NO: 224297 - DNA, 147 bp, Homo sapiens; identical to SEQ ID NO: 202876
  chr12:12037378-12037525
  hyper

SEQ ID NO: 224298 - DNA, 101 bp, Homo sapiens; identical to SEQ ID NO: 202877
  chr12:12038859-12038960
  hyper

SEQ ID NO: 224299 - DNA, 2801 bp, Homo sapiens; identical to SEQ ID NO: 202878
  chr12:12043874-12046675
  hyper

SEQ ID NO: 224300 - DNA, 1481 bp, Homo sapiens; identical to SEQ ID NO: 202879
  chr12:12046855-12048336
  hyper

SEQ ID NO: 224301 - DNA, 319 bp, Homo sapiens
  chr12:12502885-12503204
  hyper
gtcctttggatgctcgggtgtgggtgaaggagcctcggcccctggaaaggaggggaccgactctctccgcaggtagcgacgtcgcctgcggccggtcgggggtgggtattggggagacccctttacctggcgtcgagaggaccccggcgcccctgctgccatccaggtgcgaggacagctctgtcgcgcccgcgggaaggaccggcgaatccgcgcgggggtctcggcgaggaccgcagcggatgctccgcagctcccgcaccggcctggcgggttttgtggttagcaagttcctgcttccgtcgcagcgacggcaagt

SEQ ID NO: 224302 - DNA, 105 bp, Homo sapiens
  chr12:12848341-12848446
  hyper
gccaggaggctccatcggaaggaggcagacacttcaggtgttgggtggtacctttaagatgttgcggggccaaatccaatgccggtgcaggtgtcccatatatcc

SEQ ID NO: 224303 - DNA, 105 bp, Homo sapiens
  chr12:12869129-12869234
  hyper
tggaatactagtatcggacgttaggacatggttgtggtgttttaaaaatcatttcatcatctggagtttgaccccgaggggagtattttcacccttcagccctct

SEQ ID NO: 224304 - DNA, 180 bp, Homo sapiens
  chr12:12869320-12869500
  hyper
gctgttgtatttggcggctggactcaggtagaggaaactgctacaatcccgggaaagaacagaaaagtagaaagggacgagttcccacacgcagccaatgtccatggccttaactgtgcttgggaaggaagatcctgggccaggggtgtaccctcgtttttcaaaactaaacgtgtctga

SEQ ID NO: 224305 - DNA, 159 bp, Homo sapiens
  chr12:12877458-12877617
  hyper
cgtgggcttcacaggcgaggagcggggcgagaggcctctcaggccggggtgcgcccaccgccccggcctcagggagcgactttcccggaggccgggggacgctgccttcgccatttcatcttcatcatcacagcgcccacacttgctcttctctcaagc

SEQ ID NO: 224306 - DNA, 137 bp, Homo sapiens
  chr12:13069193-13069330
  hyper
ctcctttgacctaaacgggcgatgatgaaataaaactcaacagcctttctctcatcttgcattgtgagatgcgaaatagagcgtgtctctctgcctctcattttaggctgaggccgtccaaagcggccatgccccat

SEQ ID NO: 224307 - DNA, 447 bp, Homo sapiens; identical to SEQ ID NO: 202885
  chr12:13152998-13153445
  hyper

SEQ ID NO: 224308 - DNA, 93 bp, Homo sapiens
  chr12:13154241-13154334
  hyper
gggatctgggacaggcggggccccgaggccgagcctggcgctgcccagcggccggtgcaggcctcaagctgggccgggcggaggggaaccggc

SEQ ID NO: 224309 - DNA, 360 bp, Homo sapiens
  chr12:14133746-14134106
  hyper
cctcccaccccgggcttgtgctgaatgggttctgattgtgcacggggtgcacactgggcatttcttggaaggggcacactgacgcgcgcacacacgcccccgacgcgcacgcgccccgcgcgcactcacactcacccccgcgcacactcacccccgcgcacactcacgctgccgccgcgctgaggtgcagcgcacggggcttcacctgcaacgtgtcgattggacggatgggctcggcgcgtgggtccggcccggggcgccgctgccctgcccctctgctaggtgaagggatgaaaccccccaaaagaccagagacagccctacccagtcacagcaccccctcccccacaaaaaaaaaaa

SEQ ID NO: 224310 - DNA, 540 bp, Homo sapiens
  chr12:14134192-14134732
  hyper
ttcacggcttcgaccctttatctgcctgacacccccaaacccctacattcaaaggagagactccaaagcccatctttacgtaccggctccgagcgcctccgcggttgcagtctgcggagaggggtggccggtggctgggaatggagggttttcctttcctgcaaagcaggattaatgatccgtctcgggggttttgaagttcatgactcttctttgcaaggcaaaaggatatgcattcggacgccagcactactggatggtggtgatcaagaatcacccttgacgagcactctcgatagagcgaagccccgagatttcctagaggtgaagaagccggaggaagtggtttttgaaagggggtggggggaaccttcctttctcaaaaagaggtggggggtggagaggcaggagcccagattccagttggtgaggatcggagccgggggaagggaagcgggcgggggcaggctgtgcaagtcaaccgcgcggcagccggagagggagagcaggaggggaggaggggagcgtcagaaaaatggg

SEQ ID NO: 224311 - DNA, 806 bp, Homo sapiens
  chr12:15941915-15942721
  hyper
ggccgcagcgccctaccgcacctggctgccaacaccagttgaaagcagtcaaagtgaagggaggcggacgcggctcctggcaccgctccgattccagcacacaaaggcggatttttaaaatcgagaaagtcaaagccgccggaccccgggaccggcgcctttcgccaaggggctcttacctcggatccgccctcggggccacggctttccccggagacgccgcgagcccagacgaggtgggaggggaccgggagaaagccccccaatctgattcgcgcccagccagtcgtccgcgagccgcggagccgccttctgcacccagctaaagagcagcgatctccgaggcgagcacagcgccggcctcgcgccgggcgagaccgcctcgctagctgctgcctgtgaagtctggagccgcccgcccgctcgcagccagtgccaaccgcgcgccgcgcatgcccagtgcccgcgcgaggaacgagcgagcgggcgggcgggcgagtgcgcgccccgcagccaggagcgaaatccgctatccgggtcttgccggcagccgagccgcagagttctggtcgactccagcgcttgaggcgaagtggccggtgaggccgggtgggcgggagagggaccggaggaaaggagacggggcgctgcgccaagttatcaaggccgcgatcaaagtcggaccaaggcagcgagtcgacagcaggtttccagaagtgccctaacaggactgactagcagccaggaggcgcaggaaggggcaaagagcgtgtggagagcttcgcccccggcgaggatggacgccc

SEQ ID NO: 224312 - DNA, 1200 bp, Homo sapiens
  chr12:19282309-19283509
  hyper
ttaggctccctttgatcgcgccctgggatgggaagccttcgggcaaagccctgggggcaggacgcgtttttttttttttttttttttttttttaatcgatcccggaaccttcgcgcggcggagggggcgggcgcgccgcaggggcccgagggaggggtctggggcgcggcgccgcttgcccatcccccgagcgcgcggcggggcggccggccggcggccgccgggatgcggaggggcggcgacgggggccggaccctgccggggcggcggggcgggcaccgcccgagggggtagggcgcgcgcgggggcgcgccgggccggggaggcgcgctcgctccgcgctcccttcgctcgctcgttccctcctccctcggcagccgcggcggcagcaggagaaggcggcggcggcggctagggatcagacatggcggcggatctgaacctggagtggatctccctgccccggtcctggacttacgggatcaccaggggcggccgagtcttcttcatcaagtaaagagccggggacggcacgggggcccgcgggggcgggagggcaggaggcgggcggctggcgacacgggggagagcccgggtctgtgctcctgcagcccctcggctcgcccccgcgtcccctctcacgctccgtgtctgccccttctctcacccctgcagcgaggaggccaagagcaccacctggctgcaccccgtcaccggcgaggcggtggtcaccggacaccggcggcagagcacaggtaacgccgggcccaaacggagttgggctccgcctggaggaggcggcagagcccgggccgcccggctccccgcaacctgccccgcgccgcgggccccgggaggcggcgaggcggggcggaggccgggcgggagcggccgcaggtagaggggccacggggactccgccgccgggagttctctccagtctcggggcgcctctttctcctcagcctttcatcagcacttggagacggcgccctcttcctgcgccttctccccccatcccagcctagacgaccctcgcgaccctagagtggcgacgctcccctccctgaaacctggagtcctgagtttttcctccgcggccgctactcactccccggtgacccccagctgccgtcttgccccccagcaatcttcaggcagtccttacccactcccctccctgcagccccggaccccgat

SEQ ID NO: 224313 - DNA, 180 bp, Homo sapiens
  chr12:19283593-19283773
  hyper
gacttgtgggtaggtggctgatgaaggaggaggaggaggaggagaggagttcgggggtgctgcgatcctctctgtgacagggaacggctcgggaaacgcttggcgcgttccctcctgccacgggaggagcagccggagccggaggaggcgttcgcagcctcagttgctggcgatccggat

SEQ ID NO: 224314 - DNA, 545 bp, Homo sapiens
  chr12:21680606-21681151
  hyper
gcccgggttgtcccgggccaggctgtcgctgagccccaggtctcgtttttgcagagggtcgccgcttcatctccgaccagagccggagaaaggacctctccgaccggccactgccgggtgagtgaccaagggtgcaagggcgctagtcctgcgcttttggaataggatggggcgggcagggcttgctccgcgctggtgccgaaagaaagcgtctcctcaccggaaagacgcggctctgaggcgccctcagatacagtccgcccgagggcagcccgggttggcagcagcagcagctggatgccgagcgccggagctgggagctcgcgcgtccagccccgcgccaatggtggcaagggcggcccaggctggcgctgcggctccccaagccttattggcttgcggctgttcagccagccctctggctgccagggtgtgcagaggtccccagggagttaggacctgaggtgcagctcagaggggtaaggcgagataggaagaactatgcaaatgcttctagaaatgtatctgcgcgtttgtgcaggaac

SEQ ID NO: 224315 - DNA, 1440 bp, Homo sapiens
  chr12:22486815-22488255
  hyper
ggatgaaagggatgcctctgcgagacggtgcaaggcggtcctcgccggtgaccctgtcctctgcactcggggaggaaaggacgctagaggggaggagccgcgagggcaggagtacctgaacgctctggccgcggtctggttcctcctccacgccgtgccctgttgcagcaccccctgcacgatctctttctcgttgggcagccggtagacggggaagatgtagagccaacagaggaccacgacacagagggcactggctcccatgggcagccgggtccgcgggaacttccacgccagtacagccatggcccctctggacgtttgtcgccgggcccgcccgcaggggctcatcgcagccccggcgtcccaggggcgggggccggggcctcagcacaaagctaggcgaagtggcagcggagggtcccccaccgccagccccccatgcacacacacctttggttctcttacttgcaaacgcacgcacgcttcttcggccccgtcggccccaaaggtcagcgcaaggattttttcaaatgcaacttttccaaggatttctttctaggggaagtggctgggggtgaagtcacgatctatggccatggtcgcttcccctgcagaaggcgggcgctggggtctccgagtgcgcagagagcggcggcggcgagtcgctcccgccggttctgcagcatcacggtcgccctcggcgagggtccgggagaaggctcggctccctcctaaacatgtggcccgtggcgtccccttgtcccctccgagcgatgctcctgcgcccttcgccgcctcccgcgctgctgcgccgccaggcaacccccccccccccaccccgccccgagacgcgctctctgcgccgcaccaagtccttggaaatttccacggcggcccgggaccgctatcctgccccgggctcctccgcctcgcccgccgggaccctcgctccccacccctcccggagaagaaaagaactcgctctcatcagttaattcagcggcgcgccgcagccttccgctgcgccccggacttcgcagacaaacgcccggggattggtggaaatcaaggtctccccctccctcccccacccgcaaaattgcctccttcgacccgatccgagccgcgacactcgcccagagcgcgcacccctcactcgtgcccttgttctttggagataacggcagacaataaaaaccaacagccccccgccaatagaaatatatcagtccctgagtgtggcggagactggctaatatcctgatccttcgacaagcggccggtgtgcccaggctgtcaccctgctgccgtcaccctagtctttctctagctggttggatattaacccgcagccaggcgcgaggaggctggcggagatttattccttcctgggcccccacccccattagccggtcccggagccgcggcccgtgtgtg

SEQ ID NO: 224316 - DNA, 106 bp, Homo sapiens
  chr12:22488329-22488435
  hyper
agcgcgcgcacgaggaggtgcgtgcactccggggtcctccgcctcgcctcctccctgaaaggaagtgctgcatccagatgtgcaggcagctggtgcccaaacacta

SEQ ID NO: 224317 - DNA, 180 bp, Homo sapiens
  chr12:22488533-22488713
  hyper
gcgataagcttatcgcaaccccgaccttggaaaagcaccacccgccttgacccaccgagccgagagagtcgctgttagccatttctgctcgccccggcggccgacgcatagctcgggtacctcctagcggtcgcctattctatttgcttaagcatctcgtcaagcataaagtgtgcaagg

SEQ ID NO: 224318 - DNA, 360 bp, Homo sapiens
  chr12:24714624-24714984
  hyper
gaaggatgagacttgtttcagaaattccgggcgggagggagggggagtggtagggagaaggattgcagaaagcgaaacaaaaagacgaaagagtcgggaggtgggggtgactaaggttagggggtgggccaggggtcgctctgatatcctagaagggttaaggggctttgtccaacttttagggtctggccttggacattggccgcgatgcccagcacagcccagggttctccccgcactctcctctcgcatcaaccacctccaccgccaccacttacaaaacaataccagcaacagtacgcaggcttcccaacaaaaatagaaagttatcccgtctccgggtcggggtccaagccggcg

SEQ ID NO: 224319 - DNA, 360 bp, Homo sapiens
  chr12:24715020-24715380
  hyper
cagggccactccgcgcctcgggccgcctcccacctctccgccacccccagcccagtccccctccctctgtacttgaggaaactccggcggcggccccctccctcctccgcggctctccagctggagccgggaaggagtgctgagtggcgggcccggcgagcggcagaggggagctctgcgccttggaggtctgcccacaacaacatcgggacgaacaacaaagttaaaacgcagcgattcacgcaccttacccggtctcgttaatgcctcctccggcgtgggatgcaaagtggcacagaggcgggctgggggcccccgggaggagactggagatgggttttggtggctcgcctttttcac

SEQ ID NO: 224320 - DNA, 720 bp, Homo sapiens
  chr12:24715440-24716160
  hyper
tgtccctctctctccccccgtctctcgctcgcccgctcgctcgcgctccccgtgttgctctcaaggacgaggtgaaatccctttgctggtcatgaggcggcttcagagacaaacaacacaatgcgagtgcaaataacaaaaggcaaaaagacagtaggaacaatgggggaggcgagggcagcgcaccagccggcggtcaccgcggcccggcgcccgccccggggggtgcggcgggggcggggggggggcgcgggggcggtgccgggggctcccgctccctccaggtcgcccccgagctcccgcaagcccaccctgacctccttcttgcagctcgccgcccggccgccctctctatccatccgaagggaaggagccccagagttttcttccccgtctgctgcagagtaactagattgtaaataacgcggcgattacccacaccgtgcaggaattttttttttatctgccctccacttaaaggagcgataaaaatgaaatggcaggagtggaaggagccagggagagcgggatatctctagatctcgatggagctcgcatctataaatacgcattcatgtttagtcaagtccctttgtcaacttcttcccggcgcctgagcctcagccgctgctctgcgcccaggacctggcccctcccggccccctagtccagtggtcaggcggtcgggccggcagggagggcgcgcgcggggggctgcgg

SEQ ID NO: 224321 - DNA, 775 bp, Homo sapiens
  chr12:25101370-25102145
  hyper
gcttttaacagtgaaaagatcgttctccctcccctctccacccgggtcaactcttccagccgctccctcctgcatcacgaacacacgctgcaggaaagcgcatttacagcccgggacatccccagacctcctctccaaaattccccacctcctgtgcataggagaaactgagagaagccctcacttcctttccaaacttcacaagcaggggagggagctgtagcagactttcacctccgttcccaaaagcgaatgtgaaaaagtccgagaaggcacgtcctgcgagtggaggttaaaccgaaatctgaacagaatgcacggtccccgcaaactacgattgataaagaagatactgagacgtttgcgggggatataagccatggttgtctcgccttcctcccctccctgccaactatgtttcttggagaaatcgccggttcgattcacgcacacatttttgtaaaacacggacaaaaccataagtagttaccttcattgttccgtcggccacgagggaagctcgagctgagcggagggcagatcccaagggtcgtagcccctggccgtgtggaccgggtctgcggctgcagagcgcggtcccggctgcagcaagacctggggcagtgcccgaggcggcggcgagtacacgtggcgggctggattgcagaccggccctctcgcggcggagactcgcgacctagcggattgcatcagcaggaagacactaaggctgctcccccaggccgcccccagatggtggagtctctcccagccc

SEQ ID NO: 224322 - DNA, 135 bp, Homo sapiens
  chr12:25378546-25378681
  hyper
cctgtcttgtctttgctgatgtttcaataaaaggaattccataacttcttgctaagtcctgagcctgttttgtgtctactgttctagaaggcaaatcacatttatttcctactaggaccataggtacatcttcag

SEQ ID NO: 224323 - DNA, 94 bp, Homo sapiens
  chr12:25380229-25380323
  hyper
ctccccagtcctcatgtactggtccctcattgcactgtactcctcttgacctgctgtgtcgagaatatccaagagacaggtttctccatcaatt

SEQ ID NO: 224324 - DNA, 86 bp, Homo sapiens
  chr12:25398214-25398300
  hyper
gttggatcatattcgtccacaaaatgattctgaattagctgtatcgtcaaggcactcttgcctacgccaccagctccaactaccac

SEQ ID NO: 224325 - DNA, 259 bp, Homo sapiens; identical to SEQ ID NO: 202917
  chr12:25404339-25404598
  hyper

SEQ ID NO: 224326 - DNA, 142 bp, Homo sapiens
  chr12:25538253-25538395
  hyper
cctaactagcttgccgaggagagcgtagagtgacacgggacgggggcccagggcactgaggccaagagttcccgagtcacgccagtgctcgcccctttggcctttgcctaaaatcctgcgatgcctcgctgacaaagcaccc

SEQ ID NO: 224327 - DNA, 104 bp, Homo sapiens
  chr12:27486691-27486795
  hyper
agccgtcagtggagttagcttgttcgattatgtatttctgtggtatttttgtgaatggagttggaagtttgcggtgctttttccttctcgctagtattcactgg

SEQ ID NO: 224328 - DNA, 600 bp, Homo sapiens
  chr12:28123506-28124106
  hyper
ctccctccaggcccggccggctcctgccggcgcggcggatccgggagccgagatccccgagggcgtgcggactgccccgggcagccggcggtccccggcgcgccgagctggacgagcgggcgccaagaccaccaggggcggaccgacgaggaggaggccaaggagctgggccggggaccgcgggcaaccgggagcctgcgcggagaggacgcgggctgttggcctgtgaatttaaggagcccgaagctcgcctggcagctcggggcgatgcatgagaaccttcctccctggcccattcccgggatgaactgagtggggagcatcggctagagagagggagatcttttgcttagaagaacaaaaacagttccagatttcatatctaaattgcactttttgctgtttcagaactgctgggagacatctggagccggtcccaaaaaacccgcgcacaggagagatcccccttttgaattgcagagggggaccgacactcctggagcacgcacacggcccttttcactcatggtcgggagtctaacccatcctttctctgataccctacctgcttgtcccctccccctcaaaagtcccaggtta

SEQ ID NO: 224329 - DNA, 105 bp, Homo sapiens
  chr12:29301531-29301636
  hyper
gggtcactgcagggcgcctccgcaatgtctttagcagatacaagagcatccctcccacgggatgtgcagtgtagtcaagctgagtaaactgggatttttggctgc

SEQ ID NO: 224330 - DNA, 810 bp, Homo sapiens
  chr12:29301986-29302796
  hyper
aacgaatggaagcgcggggcgggcctgcgcgcgcggccgccctgcccacgatgctgtcgcccccgcgacctgtagggccttcgctggcccctcaccctcctcccgccccgggctgaggctgccgccggtttcgcgcccagtgccgaggcagcggcggagccggggaaggtcggagggagggtggtttcctcccgccccacacccagtctccgagccggatatatagagtgtcacgtttgggagccgaaagactggagccgtttccttgtggctggagcgcttcccgtagcctcggggaaggagcaggatttagaggaccactagttggaccccatcctcgtgctggaggaacaggtattccagggtccccagccctggcgctcgcagagcccacgcgctccaaaagcagagaccggactgggggtggcccaggagggagggctcggctgggttcgcagggcggggcggttcccggcgggacctcgaggagggtgggtgtgaggccgggtgggaggagagaagcatttgcggaggctctgccccctgaagctgcccccggctgcaccccaatcgtcaccggccgtttacgcgcggttggcgtcggcggagcccgccaaggtggggcgcgcgggggttgcaaagggcagaaagccgggaaggacccagcaaggttaatgtggggggccgcgccttggggactggggacccgggaagagaggcgcggggccgagtcccacccaggcctcctgggcccttggggctattcctggagagagcgcgaaaatgccggggccacgtgtgaaacggcag

SEQ ID NO: 224331 - DNA, 180 bp, Homo sapiens
  chr12:33049815-33049995
  hyper
ggggggagctcggcctcgtgggccggacgcccggccttccctgaggagggggcgcggctccggccgggcacgcgcagtcgggcccgggggcgggggcgggggcgggccggacccgctgagcgcgcggacacctggagacttgtacccgcccgcggggaggtggggagaggggcgcggttc

SEQ ID NO: 224332 - DNA, 720 bp, Homo sapiens
  chr12:33591756-33592476
  hyper
aggtgcccgacaggttgcagccgcgggttacctcggaggccaaggcagccacctctgcaagggagttctgcgtccaagcatggcttgtccgtcccgcctggcccccatcaacaaggccgggaccagcggccggtggaacgagcgagagcagccctagtcccacaggtgagccgcccccacaagcagccaagccgcgagccgtcccggcgccgtcaccgcccgcactcacttctccactccgggagggagatgggaggcgtgggagaacgcggagaggcgcggcgaggctgggagcgggagacggcgccgggaggcgggaagcggaccagagaatgggagaagcccggcaggtggacaggaggaaacaaaacccaaacgccccaccctcgaagtcgtcaggagctgagcgaaggaaggagcgaggtaggaaagcgtggcgccccaaatatgccgcgggagcggcgcgggaggcgcagaaccccggagcttgcagcctagcgcgcggggtcccagcggagcgcgaggacgcgagcggagccctcccggttacctgtgctgcttccgccctggctgcccctgtcccgagggaagatgcccgagcacttctcccactccacctggccggcgaagcacagctcggtgacgatgtgcagagccttctggcacagactgttcactccgtcctccttgtggaaactcatcgtttggcttttctttcgt

SEQ ID NO: 224333 - DNA, 180 bp, Homo sapiens
  chr12:33592571-33592751
  hyper
tggagattgcgccgctgagagccggcaactcttaggagccccacgttggccccatggcgggagcggagggcgtaggggaaggagaggcgcgcgaggaggctgcggctgccgcgaggtttgcgccaactctcccgccgcgcgagcgagccgaggcgcgctggaactagagacccggcatgg

SEQ ID NO: 224334 - DNA, 180 bp, Homo sapiens
  chr12:33592865-33593045
  hyper
gcgtccaatcgcagcccggcgcgggcgctaggtgacaggcggcggagcgcgcagacccggctccccgcgtcctctgaagaagggactcgcgagggagggagggagggagggcgggcggcccggcgcccctgccgaggccggggatgctcatcgttgcccagagttggcccgaggagccct

SEQ ID NO: 224335 - DNA, 815 bp, Homo sapiens
  chr12:40618276-40619091
  hyper
ttcccagcgccctgatttctattcttagatctggagataggcggctttcatttttcctgctcccagttcccagaccttccgtggggccgcaggatccccggctggcgggtcgcggagggtggccggccgggctgcgcactgcgcgcctccgctgcggggctccgggcctgtggactcagcggagtccgctgagtcagtttcttcccgcgcgactcccggccgcgccgccgctgcggtggaatctggtcccaggaggcggcgtccgcccggggtccggtctaggcgtgcgtgggggccacggtcacggtcatcccagccaggcccggctccagcagccccacggccgccgccagagttctgcgcggcccgtcgcctcggcggagcctctggcaggcccctgagctcgtttttggggcctgagtgggggaggaggaagccgagcaggagggctccggagagggagggcaacgcggggcggggagctgcctccttcctcataaacaggcgggcgtgggcgccgatggggcccgcggggagcgctggctgcgggcggtgagctgagctcgcccccggggagctgtggccggcgcccctgccggttccctgagcagcggacgttcatgctgggagggcggcgggttggaagcaggtgccaccatggctagtggcagctgtcaggggtgcgaagaggacgaggaaactctgaagaagttgatagtcaggctgaacaatgtccaggaaggaaaacagatagaaacgctggtccaaatcctggaggatctgctggtgttcacgtactccgagcgcggtaatca

SEQ ID NO: 224336 - DNA, 835 bp, Homo sapiens
  chr12:41582147-41582982
  hyper
tccactgccgccgccgcgagacggctgccccgggggtggcccggggaaggcaggggggctcggagaagacggactctgctttcgctccccctttcttccccatccctaacatgggctttgccctggagcgcttcgcagaagccgtggacccggctctggagtgcaaactgtgcggccaggtgcttgaagagcccctgtgcacgccgtgcgggcacgtcttctgcgccagctgcctgttgccctgggcggtgcggaggcgccggtgcccgctgcagtgccagcccttggcgcccggcgagctgtaccgggtgctgccgctgcgcagcctcatccagaagctgcgagtccagtgcgactaccgcgcccgcggctgcggccactcggtcaggctgcacgagctggaggcgcacgtcgagcactgcgacttcggccctgcccgccggctccgcagccgcgggggctgcgcttcggggctgggcggtggtgaggtgcccgcgcgggggggctgcggtccgacacccagggctggccggggcgggggcgcgcgcggggggccgccgggcggccgctggggccgcgggcggggacccgggcctcgggtcctcgcctggaggcggcgcgagaaggcgctgctggcgcagctctgggcgctgcagggcgaggtgcagctcacggcgcgcaggtaccaggagaagttcacccaatacatggctcacgtccgcaacttcgtcggcgacctcggtggcggccaccgcagggtaagcaaaggggggtgggcaccgcgggcatggtcgattggggtgggaaaaggagcggttctttctgacgcttcagg

SEQ ID NO: 224337 - DNA, 180 bp, Homo sapiens
  chr12:45444647-45444827
  hyper
cgcggaggaagccacaacgtcccagtacgcaccggcgtgggctgcgaccgcgctggggagcatagtgcggcgccaaccggtctgctgcgcgcccgccttgcgcccgcctgtcgcccgggcgccccgcaccgcacccagagccgcagcttctcgccgccgcctcccgcagggctggagcgc

SEQ ID NO: 224338 - DNA, 180 bp, Homo sapiens
  chr12:45445143-45445323
  hyper
caaggggaggggactcgtagtgggaggaggtgggcgtggaggcgacgtgaatcgggcgcgctcgccacctccccgctgccgtgcagagccgtggcactctcgctagagcccaagcagtcccccaggcgtggggtctggtggacgctggcctggagcgcccggagggcggggtgggggtgg

SEQ ID NO: 224339 - DNA, 320 bp, Homo sapiens
  chr12:48299194-48299514
  hyper
ggccaggacttcgtcgtccgcgggacgctggggggcgcctgccgactggcaccggcggctagctccgcacgaatgggaaatcccgggctccgctcgccaacctgttactgctgcagaacgccaggaagctcagcctgatcccacagattagggtaaaatatcccggggggccgaagtggaaaccggagttgcgtcattgctcccacccgatatcaccttggcagcgaccgcggctgaccacgttcccggcctgtcgcgaatctcacccaagggagctgagtctcagcttccctggtccctggtcccgagttccgccttcc

SEQ ID NO: 224340 - DNA, 240 bp, Homo sapiens
  chr12:48397784-48398024
  hyper
gacctgcaaatacttgcaactgcgatgggcaccgaggaccctgggacagagtccttgattggcagaactcttcttggtgaacttctgcgtgtcctgtgcctaagtcggcgcgctacgaccccgggagccgttttagcccggagccgcgggctccagagctggagcgggccggggagaaggatgctgagggacgcatggaaagcaggcaggcaggcaggggcgggggaagacttacggaca

SEQ ID NO: 224341 - DNA, 360 bp, Homo sapiens
  chr12:48398049-48398409
  hyper
cggcgacgagcagcgtcagcagcaccagcgtctggggagccccgaggcgaatcatggctcaccgcggggcctggctgagccgggcccgggcggagcgcagcgaaacggcaggagcacggcgcgggtccgggtctctaccgcgccctcatgcaggaggcccttggagcaggagggggaagcgggagacccggcagcccagcagcgctctgcgtcttctccccgccgcggcgcccgttatatgcgcccggcccctttcgaggctggcgaactcgcccaaaccgcgggccgccccctgccccccgctgggctgtaacctgaaccgcccgcccccggagcccgcctgggccctgccagtgcccg

SEQ ID NO: 224342 - DNA, 328 bp, Homo sapiens
  chr12:48576835-48577163
  hyper
gtcccatccttcccccgctccggtgatttctatagctagagggctgatttactgcagaaacctccgtagcgccctcctcctgcctctgcaccgtcaggcccggtgggtccggctccagagcgccaccgtgccccagctcaactctgggatcattagcaacagcctctctaccctctccgctttcctgcgcatcgctggaggacagggaggcaggactcgactttagcgccatcctctgagaaaggaatgcgggctggaaaaatctttccagggcagtctcgctgggtctcataccccggctaggggagggacgatctctcccggactt

SEQ ID NO: 224343 - DNA, 540 bp, Homo sapiens
  chr12:48577270-48577810
  hyper
ccaccccgctagtccagactccagagccccactgcagcttccagccatcctccctttttcttcgccacttcctggttaccatggagacacacgtcatttacgtgccgtgcgtcgccttggaaacagaggagcatccgcgacacccccgggagacccaccccagctgctgctgccacactcgcgggcgctgcccggtaatggcctgggggagtcccgagtccgacgcgccgctggcctcagcctggacgcggacccctccgcgagcgcgtctgtgacccacggaaccggcaggcgctctctgcttgtggcgcccagagggcggcgctgacacgggcgcgatccgggaggcgaggcagggcagggcactttcgtcccggggcgatcccaagagacgccggctctgggaccctcgccgggtcctcgtcccgcagcctcttctcggcctcccgcgatcctgcctgcgccctctgcccaggactcgtctctcacgtcggctccccgccagtctcgggagcctccgcttccctcggctcccgctag

SEQ ID NO: 224344 - DNA, 180 bp, Homo sapiens
  chr12:48578049-48578229
  hyper
gcccagctgcaagccctgtttgaggacgtgagggccatgaggggggccctggacgagcaggcctcgcacatccaggtgctctcggacgacgtgtgcgccaaccagcgagccatcgtctccatgtgccagattatgaccactgcgccccgccagggcggcttgggcgtggtcggcggcaag

SEQ ID NO: 224345 - DNA, 335 bp, Homo sapiens; identical to SEQ ID NO: 202960
  chr12:49182447-49182782
  hyper

SEQ ID NO: 224346 - DNA, 217 bp, Homo sapiens
  chr12:49183113-49183330
  hyper
ttctgggatcaagaccccgcggggaggggacctcgcagcccggtccccttcccttcaccccggccgcctcctccggcattcctctcccgccctcaccccgggggtccccgagcgcgcccgcaaacccacccctcacggctacatcccccgccccgcccaccgagggtcgccttccttcctgtcagggtcccaggggttgggccggcgccccgcgccc

SEQ ID NO: 224347 - DNA, 204 bp, Homo sapiens
  chr12:49351242-49351446
  hyper
gaagccgcgacggcgactggagctgtgcggcgtacccccacccccagcccgggatacttcccacctccccgatcgcgcgatagctgcgcggtagctagcggcagttctcgcgagacccatcaccatggcagcggctgcagcaccggcggccgggcgctggagctggagtcagggcgggggcaggtgtgggggctgtgggcggcg

SEQ ID NO: 224348 - DNA, 695 bp, Homo sapiens
  chr12:49363694-49364389
  hyper
cgcaggggcccagacgagtggccagacctggctcagagcggctccggggggggcggggaattccaggagaggcccctcccggagccgcgaaaccatcccttcccgcctccgcgcgcctcgccctgccgcccaccccctagcctccgcggcagcgccgacccgcccagccaggctcaccgcgcttgaggatggcgctgtggtgcggcaggcggccgccgccctcaagcgcggagcagttccagcgctggtcgcgcagctggtgctgacactcgtggaccgcgatgtgcagaccctgaagcgcggacgccgtcacgtcggggttgcgcaggcacaggcctagctgccgcttgctcaggccggacagcgtcaagcacacggtgttggccgtcagcggcggctcgccaggcaacttcaggcccagaatctcattgcttagagccctgggaaccaagaaggcgtctggggtctgcggtccagacccctccaactctccccaccccgggtcggtgtttctatggcctgggagacaaggggaactgctcaccgactgcacaacgccaggaacaggagacccgcgaggcccgagggcggaggccgcggccggggctcctccagcatgtcgaagcccggaggctccggtgggcagatcgatcaggacctgcgggacgggagacttgatgcgggttcaggaatag

SEQ ID NO: 224349 - DNA, 698 bp, Homo sapiens
  chr12:49371614-49372312
  hyper
ggtttctctccaccgctaggctccttttggttagctcacccccacaactcatccccgggatttccctgaccacagccgcactcacgcccccgtctcccctttttccttctctgtccagccatcgggggttcctgggcggttaagcatctccccggagtcgctgcccagaaccacagctttccttccgacactcaggatgggggagagaggggacgtcggaggggcccggggtgacgtcgaggggacaaccccaccgcgggcggcgaggcgggctgggcccctggcgggctctccccgcagcacactctcgccgcgccccctggcggatgctagtcctcgacgggctccggacgctcagctgagtgaggcgggcgcgcgtgggagggtgtcccaaggggaggggtccgcggccagtgcaggcccggaggcgggggccaccgggcagggggcgggggtgagccccgacggccaacccgtcagctctcggctcagacgggcgggaaccacagccccgctcgctgcccattgtctgcgcccctaaccggtgcgccctggtgccacagtgcggcccggaggggcagcctcctcccgtcacttcagccagcgccgcaactataagaggcggtgccgcccgccgtggccgcctcagcccaccagccgggaccgcgagccatgctgtccgccgcccgcccccaggg

SEQ ID NO: 224350 - DNA, 180 bp, Homo sapiens
  chr12:49374367-49374547
  hyper
attgacttcggccgcctcttcggccgggagttcgtggactccggggagaaggggcgggacctgcgcttcctcatgaaccttcacaacaacgaggcaggccgtacggtgagctttgagaggctccgcaccctaagcggagcggcaggggccaacctcgggctggggaagtgacggtcggtg

SEQ ID NO: 224351 - DNA, 720 bp, Homo sapiens
  chr12:49374829-49375549
  hyper
cctttgctgaggtccggcccccgtggcgtccgggagagggcagtgtctgggagggtgactctggcccggtgccctgggacactctttcttcccctatccccgcagaccgtattctccgagatgcgccaggagtgcaagtgccacgggatgtccggctcatgcacggtgcgcacgtgctggatgcggctgcccacgctgcgcgccgtgggcgatgtgctgcgcgaccgcttcgacggcgcctcgcgcgtcctgtacggcaaccgcggcagcaaccgcgcttcgcgggcggagctgctgcgcctggagccggaagacccggcccacaaaccgccctccccccacgacctcgtctacttcgagaaatcgcccaacttctgcacgtacagcggacgcctgggcacagcaggcacggcagggcgcgcctgtaacagctcgtcgcccgcgctggacggctgcgagctgctctgctgcggcaggggccaccgcacgcgcacgcagcgcgtcaccgagcgctgcaactgcaccttccactggtgctgccacgtcagctgccgcaactgcacgcacacgcgcgtactgcacgagtgtctgtgaggcgctgcgcggactcgcccccaggaacgctctcctcgagccctcccccaaacagactcgctagcactcaagacccggttattcgcccacccgagtacctccagtcacactccccgcggttcatac

SEQ ID NO: 224352 - DNA, 229 bp, Homo sapiens
  chr12:49487980-49488209
  hyper
ggccctccttacctcggtcatcaggcggtcggctccactgttctcctcatccttgaagatgatgtcggggttgtagttgggcacgaggtcccggaagcgctcggagccccttgccaccctcccctccgctggcccactggcgcccagggtccgctctggcacgccgggcacaaattgcttgtagagtagcggcacgagctgcttgcgcgcatagcggcgccggccaacc

SEQ ID NO: 224353 - DNA, 301 bp, Homo sapiens; identical to SEQ ID NO: 202975
  chr12:49761541-49761842
  hyper

SEQ ID NO: 224354 - DNA, 284 bp, Homo sapiens
  chr12:49931779-49932063
  hyper
gaccgtcgcagcgcgggaggccaagaaaagacggccgccccgggcccggctccgccccgccgggaaggggctccctgcagccgccccagggcagcaccccgcgcggcgccgcgcggagctctccaggacgagctgcgtgaggcgcggggctcggccttcctcgctctcctggtgccaggacccgcacgcacaaggttcggaagttttttcgcagtgtctgacccctgccggtcccctgtatttaccacctgaccctctagcgcgcttaggagaggcaagaggtg

SEQ ID NO: 224355 - DNA, 92 bp, Homo sapiens
  chr12:49932286-49932378
  hyper
gccgggcagctgtgcgcgcagaacccccgccccatctgcttttagatttcccgggtgcggctggagcccctctagagcgccggcctccgctg

SEQ ID NO: 224356 - DNA, 538 bp, Homo sapiens
  chr12:49932966-49933504
  hyper
gtgggcggcgagggcgcgaggggccgcgcgccatgctccgggccccgacggcgcggacgccccctcgcgcgccagcgtccggcgcgaccccggatcccggtctgcgcattgccccccgacggctgcgctagggagcgcggggcccggcggggggcggccgagctgggcgccctcccccggcgcggagtccccgcaccccggagggatggggcgggcagccgcgggcgcctaagatgccggccatgcggggcctcctggcgccgcagaacaccttcctggacaccatcgctacgcgcttcgacggcacgcgtgagtccgaccctcgcccacttgcacccgggccgccggaccctcgccagggctcccgccttccccgaacccccagcagcccagcttggcgccagcctattctcaccctctcctccctacccgcccctcttgaggctggggccatcgtctcctgctaggcgctgtttccccgaaggttcgaaggttcggggtcaacactgcttcaggcgaggcaacagggccagaagtc

SEQ ID NO: 224357 - DNA, 240 bp, Homo sapiens
  chr12:50677272-50677512
  hyper
acctgtcgcgaccaagctgctaacacctactgctcctgcggccccgccccggaccccgcccaccgccgcgggggcgcgcacgccagacagcctcccgtgcggcctcgggctgagcgtgcgcgccaccggctacgtgcccagcgctcgcgtctgctccagtcgctctggcggtgcggggcgctggcgacgggacagggtttttgctgcccggggcctagtctacctcggcacgcttttctc

SEQ ID NO: 224358 - DNA, 32 bp, Homo sapiens
  chr12:51610959-51610991
  hyper
cagctggccctaaccgccgggaacccaggcgt

SEQ ID NO: 224359 - DNA, 380 bp, Homo sapiens
  chr12:51818412-51818792
  hyper
agcagttggaaggaccttcacgcccagaggcccctgaagggagggaggcggtttccaaggcaaccgggcccgggagcggttggctccccggctcctccccctccccgcggtagcccagggtaccgccggacagcgtcctcccgtgctccgcgccctgattggctgcgcaggcctctcgctgattggttgcggcggatgcctcgcgggccggtggctatggaggcggcggcggttgatggttgaccgttggctccggggtgggggtcgccgttcgagtgatctgctcagacccgaccagagggcgcgggctgctgatgcttggcttggagcccgtgggggagacctagttcggctccgccatgccggccgccgggagtaac

SEQ ID NO: 224360 - DNA, 104 bp, Homo sapiens
  chr12:51818997-51819101
  hyper
tgcgagagagtgaccttgggccgaacctgggatctggcccatctctgccgcatcccttgcgccgcccgcccaggagccctgacagccggcgggcggcgacctct

SEQ ID NO: 224361 - DNA, 165 bp, Homo sapiens
  chr12:52294168-52294333
  hyper
ccaggcgcctcccgcggccaggggcgggcagccgcagagcagcacgctgggccttggctccggtagcagcaagttcgaaccccgctcctgctccgcttcggttctcgctcctcggcccttgggcctccaaacaccatttcctggcagttcgttgcgcattgcgct

SEQ ID NO: 224362 - DNA, 139 bp, Homo sapiens
  chr12:52345764-52345903
  hyper
cccagtcagcttccccgatctccgaggcgcagccgcccggcggcgacggagctcacgccgggcccctggggacccgagccctgttccaggcggaactggattcgggcagttctcaggggtcgcgctcccagcgccctcg

SEQ ID NO: 224363 - DNA, 1064 bp, Homo sapiens
  chr12:52400262-52401326
  hyper
tactcctgcgcagccccgctgccgctctccctgccctggagtctcctgcagccccttggatctccgtgactctccctacctccccgactccccaggcttcttacagtgacctcttaccgtgccccactccatgaatcgccagagctattcgtccctaaatttcaaaccttgcgcaatgtcccttcacagacccctccaggtatcacgcagccccgagccccgagccccgccccgggggcctcatcccgccccttcgcgtccgcggctcgttttcccccactgagcgcccagctcccgcagtttccccggccgtcgagcgccgtgggcggggctccagggcggcggcgcctcgcggggagggtcctccgtgctgggggcgaggccacccgaggcagctccccgcccgcccccaaccccgccccgctctcggagcctataaagggaggcgacccgcggcccgcccggctggcatcccccagccgccgccagccccgccgaggggagccagcgccgtctctgaggggcgtccggcgccggagccatgaccctccgccgactcaggaagctgcagcagaaggaggaggcggcggccaccccggaccccgccgcccggactcccgactcggaagtcgcgcccgccgctccggtcccgaccccgggaccccctgccgcagccgccacccctgggcccccagcggacgagctgtacgcggcgctggaggactatcaccctgccgagctgtaccgcgcgctcgccgtgtccgggggcaccctgccccgccgaaaggtgcgtcccccgcccgccttcaggatctgctcagcccctctccgactccctacagggcctgctgactccgcagtgccctctcctcggcgtccgcggagtcccccaccttcttccccggcccgctgggtgcctcgactccccgcgttccccgctgctgcgaaggccgtggccctcgcctgcacaccgcgcccaggctcggtggctcttaactccgcgccccatgcacgccccctctctccctccttgactcctcccagcaccccccttctcctacccg

SEQ ID NO: 224364 - DNA, 180 bp, Homo sapiens
  chr12:52401389-52401569
  hyper
gagcccctcgcccgagggacagagacagccccaggcaagttgaaggtccgagagcccccggtgggagaagcgggccggtggctgcgccgcgtgcgttctcactctgaggaagtgcgtggggagccgctgactccggatagcacacccttccgaggggactccccgattcctgggctgggg

SEQ ID NO: 224365 - DNA, 360 bp, Homo sapiens
  chr12:52416804-52417164
  hyper
ccagtgctcaggggcgagcggaatggagaggaggcggggctggggcgcacagccggcaggggatccctgccggagtctgcttttcacgggttcccgtctagaccagagttggggctcagcttggagagatgggacaggtggaggtgctgggggttggagccccacgcgctgctcaagaggctgcaggctggccttcaaggcctgggctagactgcggcggttgggggctggcggtgcggctcgggtggagtccgccgggcaccgccctccctctccaccctcgcccaccccggggccgcgaggctgtgggttgagctgcagaggcgagctccctcctgggcgtgccgccgccgcgagtgg

SEQ ID NO: 224366 - DNA, 105 bp, Homo sapiens
  chr12:52427134-52427239
  hyper
tgggagtgcgattacgggcctctcacttcgtaaatcacgcaggcctgaaacgctcacatttgtttaccacgagcatgtttgattttgtaatttaacaaataaaat

SEQ ID NO: 224367 - DNA, 185 bp, Homo sapiens
  chr12:53272443-53272628
  hyper
gtctgtacctgtctgcgcctatgcacatacaatctcccataggaattattccttgtctctggtgcctgaggccctccatatgtgcacctgacagtacacacacgcgcacacgcatgcacacacccacagccccctgcctgcgtgtcttccctccatgatggcaaggctgccgctgcagagggtgg

SEQ ID NO: 224368 - DNA, 267 bp, Homo sapiens
  chr12:53719525-53719792
  hyper
tgagccccctcagcccagcggggtaaccttggggggcgggggccgcacaaagccctattgtggctcggggatgctgccacagagtggtttttgttcttcggctaactccgtggcgggcacgactgattgcagacccagggcagggggcgggttacgtgccaggcccagtctgcccgccgggagccgcaccaccgcccgactggggccgcgcaggagtccgcactgcaaccgcggtgcccgcgctcgggtcgcgtcactgccctgacc

SEQ ID NO: 224369 - DNA, 118 bp, Homo sapiens
  chr12:53765064-53765182
  hyper
agcttcttgggctcgagggagggagggcgcgcaaagccggaaggaggggtttgcggctggggagagccagagggcccacccctacccggaaactgggggtggagaggccccaggccag

SEQ ID NO: 224370 - DNA, 281 bp, Homo sapiens
  chr12:54144768-54145049
  hyper
aacattgtaagccccgcgcagactgtccctgtggaggagaaaggcacatgagcagccaaagggacggacactcacacacacacacacgcacacactcactcctgcgcacacaggctgctccgcggacacgcttcacggagcaggtgtgcccacgcgcaataccctcctggcccacaggcctccgcacgcacaggacacacacacacactctctcctggcctccctcccgccgcccctcctctgagccctgcggcccggccttccgcacctcccaacgcctg

SEQ ID NO: 224371 - DNA, 1080 bp, Homo sapiens
  chr12:54332688-54333768
  hyper
tcatgacgacttcgctgctcctgcatccacgctggccggagagccttatgtacgtctatgaggacagcgcggcggagagcggcatcggcggcggcggcggaggaggaggcggcggcacgggcggagcggggggtggctgcagcggagcgagccccggcaaagccccgagcatggatggtctgggcagcagctgcccggccagccactgccgcgacctgcttccgcaccccgtgctgggccgcccgccggctcccctgggcgcccctcagggcgccgtctatacggacatcccggccccggaggcggcgcgccagtgtgccccgccgcccgcaccccccacctcgtccagcgccaccctgggctacggctaccccttcgggggcagctactacggctgccgcctgtcgcacaacgtgaacctgcagcagaagccttgcgcctaccacccgggcgataaatacccggagccgtcgggcgccctgcccggtgacgacctgtcctctagggccaaggagttcgccttctaccccagcttcgccagctcctaccaggcgatgcccggctacctggacgtgtcggtggtgcccgggatcagcgggcacccggagccgcgtcacgacgccctcatccccgtcgaaggctaccagcactgggctctctccaatggctgggacagtcaggtgtactgctccaaggagcagtcgcagtccgcccacctctggaagtctcccttcccaggtaaggaagggacccgagcgccgccgccgccggggacccctccccgccctgcctgccccggggctccgcgccccaaccacccccgccgtctggccccggcgcgcccgctcggctgggctgcctatggagccggccgggcgagctgcactgaggaatgcgccggggaagaaatctgctccgacacgttctctgtagctgcccggccgagaatgaagcaatcacaggcgcccgaaagccgggccgccggctctgctctgtccggtagctcgcctccgcctccccttgcaggctccagcctcccgccgggctcttggcccctaaacctgcttccggcaagggatg

SEQ ID NO: 224372 - DNA, 300 bp, Homo sapiens
  chr12:54393348-54393648
  hyper
atacatacatacacactatttaaaaacgcatttttaaaagccacgttccgaactgacaatcgctgatctcggctcgcgcagagactgcgggagcgtcggggccgacagagacggattacgtcaagaaatagttcctccacctacctcggtcggcctccccgcccctgcggggctcccgcgcccagctcggccctgggggtccgagaaccctggcttcggggactggcattttcaccccattaaaaaatcctcatggttggggggaggccatctgcttatgggtggacatgggcacagggg

SEQ ID NO: 224373 - DNA, 930 bp, Homo sapiens
  chr12:54393706-54394636
  hyper
tccggacccccaggaaatcgcaggtcgcggggagcagcagagagaagggggtgggagagggggaaaagaaggcaaggaaaaaaaagcccctgcgcattgatccgcgccgtatttttgggtaaatacgatcacgtgggggccggggagccaatgagctgtggggaaaaggctggaaaaataattacctgacttgattgttctgtgagcagataaaaagtacatatacagttcatacaataatcttatgtatgtaaaaccccgttacgatgtcggcgacggggcccatcagtaactattacgtggactcgctcatctctcacgacaatgaagacctcctagcgtccaggtttccggccaccggggctcatcccgccgccgccagacccagcggtttggtgccggactgtagcgattttccgtcctgtagcttcgcgcccaagccggcagtgttcagcacgtcgtgggcgcccgtgccctctcagtcgtccgtggtatatcacccgtacggcccccagccccacctcggcgccgacacgcgctacatgcggacttggctcgagccgctgtccggcgccgtctccttccccagcttcccggccgggggccgtcactacgccctcaagccggacgcctaccccgggcgccgcgcggactgcggcccaggggagggccgcagctacccggactacatgtacggctcgcccggggagctgcgcgaccgcgccccgcagacactgccctcgcccgaggcggacgcgctcgccggcagcaagcacaaagaggagaaggccgacctggaccccagtaagttgggagcaattttcctttacaaccggcgcgggaggggaggggaggacgggcgggggcagccgaattacagccctcccgaaccgtgcagggagcgcgggagaggggcgagggggcgaggac

SEQ ID NO: 224374 - DNA, 278 bp, Homo sapiens
  chr12:54398739-54399017
  hyper
gcgggcttctctcccagaccgagagcggcgtttccgggcttccaccccgcccctgctcccaggccctgtcgcctcccctcagcgtccatcagcgcggcctgcttcctgcagccggcctgagcggccttactgcgggcaggaaggagggccgcgggcttggaggaccctgaggaaagcatgggatgcagaacaggcccacccggcccggcccactgttcaatcccagcccagcctgcaggtcaggattggaatcattttttattcgctatcatttacga

SEQ ID NO: 224375 - DNA, 420 bp, Homo sapiens
  chr12:54399254-54399674
  hyper
gaacaaaacagcagcgcggagctggctagacgtctgggcttaattgttttatggtttaaataaggtggacactttcctttgaaatcggattataggaatgttttgtctatggcccacggagaacaggacctcactggctgagagggagaggtggagagcgcgcgcgcgagagggatgggctacaaaccaggggtcaaacagcctggagaagtccgagtcccaccccaaagtcctgcaggcggcggcggaatagtcggtgcggggccagcatcagggtaagaggagggaggactttagggtgcgcgccgcgggcaagccgtcgtgggagcctcggagcgtgcatccgcgttcgcggagatgttccaagcccagaaatgcgcctgaatggggggagatcgcggcagttgctttgcttagagt

SEQ ID NO: 224376 - DNA, 360 bp, Homo sapiens
  chr12:54400010-54400370
  hyper
gcgcctcggccggcccggccccactggctctgagcaaatcaatcctctcacctgcgaggtgtaaataattcgcgagtggcagcgggagatgggccctcgatctggcagcgggctcggaaggctcaggagggcaggcattaaaaataatcgctttgtggaggagataagtgcaaagcaggcagcgcgtaattaacacaaaaaggcagaatgacccggacaaacgaacataaatccgtggtacctatgagggcggtgcaggcctcggggagagggacagagacggcctcggcgaggatggctgctttcggttcctttatttccaggctcggggagcgaaataaaccagataacgtgtaaaag

SEQ ID NO: 224377 - DNA, 420 bp, Homo sapiens
  chr12:54426968-54427388
  hyper
gcaaacttgtgggaactatggatcggcctcagaggtgcaggcatccaggtactgctacggcggattggacttaagcatcactttcccaccgcctgcgccttccaactctctccacggggtagacatggctgccaacccccgggctcaccccgaccgccccgcctgcagcgccgcggccgctccgggacacgctccgggcagagacgaagcggctcctctgaaccccgggatgtacagtcagaaggcggctcgcccggcgctggaggagcgagctaagagcagtggggagatcaaagaggagcaggcgcagacagggcagcccgccggactgagccagccaccggccccgccacagatttacccgtggatgaccaaactgcacatgagccacggtaaactttaggacttcattttgcgctc

SEQ ID NO: 224378 - DNA, 180 bp, Homo sapiens
  chr12:54427426-54427606
  hyper
taaagaaaaaaaacctgcggccataaattttacgatccaggcatcaatggctcgtaaaactgtccactaaaaggcttagaggctgtgtgcgcccaaatttacgacgacataattggatcataggaacaaaacgtgtataaaaggcaatattcaatttttgggggagagggagggagttaa

SEQ ID NO: 224379 - DNA, 41 bp, Homo sapiens; identical to SEQ ID NO: 203030
  chr12:54686414-54686455
  hyper

SEQ ID NO: 224380 - DNA, 246 bp, Homo sapiens
  chr12:54812376-54812622
  hyper
cggcctctgcgccccctctgcgcccccacccgccccaggtcccagcagcccacagacttcagccagagaccctcagctctccattcacgcgctctcctctcccttggcccggagacccctgcccagacttctccagctccgtgtcctctccccaccggacacatgtctccccactgatctcaaacgccagggcccctcctcacccgccacggtgccctccctactccagcgcgggcccccaactct

SEQ ID NO: 224381 - DNA, 326 bp, Homo sapiens
  chr12:54812830-54813156
  hyper
actgctggggcctccgcgtctaagttgaagcccccgaccctgggtggcggcggcagcagcagcaacagcagcggcagcagcgggggtcggcgccgggggccccagcgcagctgcacggcgtggagaggggactctggcgtccggctccccatagcgcccgctcttccctgtcctggggccaccgacccggagccgcttcctaaacctcccagaggcgaatgactcaacgcggggaggagtttgccaaactcccggctgagccctccccccgcctgccgagggggctggcgggggggcattcctgggtccctggaactctgagcccg

SEQ ID NO: 224382 - DNA, 42 bp, Homo sapiens
  chr12:56326151-56326193
  hyper
ggatggtgaagcccggttcctgggacccgactcggagggaag

SEQ ID NO: 224383 - DNA, 151 bp, Homo sapiens; identical to SEQ ID NO: 203036
  chr12:56390556-56390707
  hyper

SEQ ID NO: 224384 - DNA, 268 bp, Homo sapiens
  chr12:56472768-56473036
  hyper
tctggagaaaacaactaggctctccgggcgagatcccgaataccagtttaagggatttgaaatgcaaggccgtctgggactccactgccacggatgggcaccaggcggcgccggtcggatccgtcccgggactagcagggctttgggcagcaacccgcagggagcccgaccgcctctggccaggtccgggcagctggtgggggaggttccagaggtccacgccattcgtggacgcagtctctagtgtcctctccgcgtcccacttcac

SEQ ID NO: 224385 - DNA, 273 bp, Homo sapiens
  chr12:56474073-56474346
  hyper
tctgcggagtcatgagggcgaacgacgctctgcaggtgctgggcttgcttttcagcctggcccggggctccgaggtgggcaactctcaggcaggtaagtggcgcgagagcaccggcgggctcggcacctgggagccggaacccagtgcgcgcagcctcggagggtatgggcacggtctcaggcggcgcggggttgtgggtgctgcccccggtttgccaggaccacctgggagaggggcggtcaggctcgggttatcggcgtggtccggccgag

SEQ ID NO: 224386 - DNA, 480 bp, Homo sapiens
  chr12:58158951-58159431
  hyper
tccaggcagcccaagcgcgagccgagcagaaccgcggcgatgccttgtcgggagggggcgccgtcagggttccgggaggctctggtagggcgcccccgacgcctgcccagctctgtcctgggactcaccttccagtccgaacttgtaaaattcccccgccacgtcccgaaccagggcgggcggccccgtgccacgtccccgctggcgcctcagacgccgcacaaggtcgcagactacgttgttcagggttccggcgtagcgggcggccgcttgaggccggaggaggagcggggccaggagactgcggagcctttgccattcttcgccttccctgcagggttgaggagagagtgcgcatcgggaaggtggggacggctcgacgggactggctgcagtgaaggagcgcgttcggctgcggtggccaggagagggattgcgtctgcccccttggggtacggaaacctgcaccggcctgcgcct

SEQ ID NO: 224387 - DNA, 374 bp, Homo sapiens
  chr12:58259123-58259497
  hyper
gaagtttgcggccaccgccggccgtgcagtctcccgcgcttcccccgccggagcgccggccccgcattcctccgggttgagcaacagcttttcctccgagggcggctggccgggcaaggcggggccgccagcgctggggccctcgcggggcgcggcccgagtgtccggggcctctggcagcgccccgggtttaagtggagcgcggccgccagaccctccccggggagccgagctcggagaggggggccgcagagcccaggccccagcctgcccttcctgcagcgccggcgggattgccgaaagaccaagcgggtgccaggcctcacccgaccttgatgttggcgttagtccgggttgaccgcccactctgacgc

SEQ ID NO: 224388 - DNA, 280 bp, Homo sapiens
  chr12:58290227-58290507
  hyper
gcagccgacccagtcgggggagtgggcctcctgcgccctcggaggcacaggaccgcggggccccaccgaggaccccctgaacggcagcccgccgcgaggcagcgtggggaccaaactgccgcgccccagagcccgccgccgcctgtccccgcgtctgaggtccgcaaggaagagctgcgggaatgcacgcccggggaagaggctttgtgaaccgaggctcggcgcgccccccacccgcgcccctcatgggcagccgggcccagcccgccgcccgggcccc

SEQ ID NO: 224389 - DNA, 960 bp, Homo sapiens
  chr12:59313525-59314485
  hyper
cccccaaccctggtctacctgcagccagttaggacgcgccaagagcccacctgcgccgcccgcaaagcacgtgggagggaaactgaggcccggacagttctttttccacgcccacggagcgccgatcgcggcctgggccagaaggagctatacggcaaaaaggggactgcacgccgaaccccattccccgccggctcctgttttctcgaatctccagcggcccgggccccctccccccgcgggaagaatacttacagccgagcgacccaggacgggagtggctcgggaagacgcgctagccgcttacgactgcagtccagcaggtccccgaggcagcggcaggtagtggggcatgggcgctcggcggctaccccagagggctgcccgagttccccgcgaccgccgctgtctgaccggccagcgcgccccagcaccgcgcacagcagcagccccaaccccgcggcgcgcgcacggaggctcggcgcgctcatcgcggtccagcggcctaggtctctacccgaagctcccagccggcgcgcgctcggggcccggcacaaacttccagccgagggtgcacgcccgccctcgcggtcgcgtgcgcgctcctccctcgcgctgcccggtcaattccttcttttactcccggcggcgaagccctttcatgcccccaaacagcaggagggaaaccgaaaagaactgccaactgcaacagagttgcagcttgagcagcgtcggctcgccgaagccccttcttgtctgcaaaagaaactttttcgcctccaccccgcggcactgcgccaagtccccgcgcggcggagtagcaaggcgggcgggtagaggccgacgcgcgcccattggccgactcggctgcgggcgtccccgtggccacgtgacaataacaccgctccagccgggggcctacgcgcgggagaaagtggagctgagattgtaggaaattca

SEQ ID NO: 224390 - DNA, 180 bp, Homo sapiens
  chr12:59989688-59989868
  hyper
tagctttgacagccgcttggagcatgctcagtcggtctccaggcaccgggaggcggctcccccccaccaccccccgggccggcctccaccgcagcctgtccggcccccacccctggcgcgcgctcctccgcacccacaagggcgttcagcagccgcgcctccccttcccgccaccgcctc

SEQ ID NO: 224391 - DNA, 180 bp, Homo sapiens
  chr12:59989994-59990174
  hyper
ccctgcgccagagaccagataaagtaagtacagctggggagggaggggagaggaggaggaggaggaggaggtgccggctaagaggagggcgagcctgcgtctgcgacccgagctgcccgcggagccgcacgcgtgtgtgcaaataatggccagcctgtgacaaacgtgccaacgcagagt

SEQ ID NO: 224392 - DNA, 180 bp, Homo sapiens
  chr12:59990261-59990441
  hyper
ccgggaactgagggggcgcgcggggtcctgggcaaggagcgcctcgcgtgctttcggccaggaggtgctcacgctctcggcttttacaccgagactcagcgtggcgcggtgcaccccagtctccctggctcacgggactccgagggctgcttccagtgcggcgtgtctctagtgcgcgcc

SEQ ID NO: 224393 - DNA, 960 bp, Homo sapiens
  chr12:62584729-62585689
  hyper
tgctgttattaggagaaatggggcagagagggagggcaccgctcacggagcctcatttcgcatgctccgatcccctctcggcgtccctctactccgcccctaccctgaccgcccgcgagggagacgccggccgatggacccgcatctgccctcacctctcgccttccccgggcgatccctctacagtcccggacccccgagaaaggggaagggagacgtgtgcacacgggggcttccgggaccgcggtcctgcagttgccgctccggtccccagcgctggccggcgacccgaggcgcggctcgcacctacctgcagccccgcttcccggtggcggcaacacctagcgatgctcctgcagcttttgcgggccggcgccagccttatcgctctcgcatcgcttccaagatgccaatccgccgtcaccatccaggggcatagggaaccgaagtctggtgctgtgtgatcgtggagggcggcgtgtgagtgtggccctgagcgtgcgagtgtgcgcgcgcgtgtgtggatgtgtttcctcctccgatggcaaagacggttcaggaatctgacatccaagctggaatccccctgaagcgggtgaaggtgagcctgatccttctccccgcttctttattccacagtgtcaaagtaatcaaaagatttgtttactgaggaaaagccaaagtcccgcagcccttggcagcgcccgcggtcgcctcctgtcctcgccggatgcgcgcggtgcgctcagctccctggactgcaagaatcaaggcggtcttgctgcaattaccgctcttattccatctctgatttgtttgcttttaaggccgactaaagacttttcctctcgcctcacgtcgtctctccctctcacacacacacacactcacacatcctccgttccctctctcccgccctccctcttgttctctggggaaaggcaattggacagaatgatt

SEQ ID NO: 224394 - DNA, 329 bp, Homo sapiens; identical to SEQ ID NO: 203072
  chr12:64237615-64237944
  hyper

SEQ ID NO: 224395 - DNA, 110 bp, Homo sapiens; identical to SEQ ID NO: 203073
  chr12:64238195-64238305
  hyper

SEQ ID NO: 224396 - DNA, 31 bp, Homo sapiens
  chr12:64783548-64783579
  hyper
ttataggcgtgatccacggcacccggcctta

SEQ ID NO: 224397 - DNA, 270 bp, Homo sapiens
  chr12:64784133-64784403
  hyper
cggatggacttgggcgggttctcggttaggtagacgagccggtcgcttagcaccacatacttgaggatgtggttctcagagttggacaccacgatgcatggctcgtaggcgcggaccgcgtcgtagacctcgggcggcagatgccgccgcaggaacacatccaggcggctgttcctgcgcgcggggaagccggacggcaaggggctggccatgcccggcgcccgcagcgtggcggagtgctgggactcgaggccctcagctcgccctctc

SEQ ID NO: 224398 - DNA, 396 bp, Homo sapiens; identical to SEQ ID NO: 203076
  chr12:64845175-64845571
  hyper

SEQ ID NO: 224399 - DNA, 145 bp, Homo sapiens
  chr12:65564627-65564772
  hyper
gcctctagttcactcaggatcaatcacgccaatcatacgggctccaatcatacctacctgaaaaacacatacaacaaaccgaagctttccgaacccgaagaggaacttctccagcaatttaaacgggaggaggtgtccccaacag

SEQ ID NO: 224400 - DNA, 174 bp, Homo sapiens
  chr12:66582759-66582933
  hyper
gctctgggctttctccagttcgcactctgcttgtctcggcagctccgtccccaccgcagaggtgtgaaggggcgcaaagccagcgaagggagaacccgggtcgggtaacccccaggcctggccaggcggacgcaggggcatctcgggcgaggcgcgccttgcgtcacgtgggca

SEQ ID NO: 224401 - DNA, 180 bp, Homo sapiens
  chr12:66582984-66583164
  hyper
cgtggaagcaggatttccgcggttgtgtaacggcctgtcgcaggcgtgcagggacctggactccgcctcgtccccggggctcgggcagccgagccatggcggggaactgtggggcccgcggcgcgctgtcggcgcacacgctgctgttcgacctgccgcccgcgctgctcggagagctct

SEQ ID NO: 224402 - DNA, 151 bp, Homo sapiens
  chr12:66583214-66583365
  hyper
gagtcggcggggaccggccgggggcggcgggggagcccagcgcgccgcggggcccgctcggcgtcgccctgcatggctggggtccctcgcggggctggcgcggcctccgggaagttcccgccagggagccggccccctcctttcctgggtt

SEQ ID NO: 224403 - DNA, 341 bp, Homo sapiens
  chr12:66629083-66629424
  hyper
ggcgggcgcgggcgcggggcagcctgggcgcggggcagcctcgccgcgagggggaggacgcaaggagggggccggccgggccccgggccgaggcagctttgggaactccctctcgccgcgcggcggcggccggcgggggctgcagctccgcgctgacttcccctccgcactcgtctaaaagtgcggcgcggcgcggggcgagactcgagcagctcgggcagccgccgctctgcgtgccatggacgggagttcgcgcgcggagctggcggcgtcgccgactctcccggcggcagcggaggagcagcgccgccgcgtcctccgatattattaagttatgtttt

SEQ ID NO: 224404 - DNA, 64 bp, Homo sapiens
  chr12:69080591-69080655
  hyper
cgtctgggctaaacgcaaccaggaacacattggcaaacttttgcgcctgcgcccaccgggcgtg

SEQ ID NO: 224405 - DNA, 47 bp, Homo sapiens
  chr12:69080866-69080913
  hyper
gtggcagctgagcccgaagtcttgcccgtctcgcctgttggcgaaac

SEQ ID NO: 224406 - DNA, 114 bp, Homo sapiens; identical to SEQ ID NO: 203107
  chr12:77272744-77272858
  hyper

SEQ ID NO: 224407 - DNA, 855 bp, Homo sapiens
  chr12:80084234-80085089
  hyper
ctgcccccgggctgcgccccttggagtcctcgagcgcgcccaccagtcactaccggccagcagccgccgggtccccaccctgcaaagtttctcccacgcacctacagtacggaccccgacgatcgccgcccctagaagggaggagagaggactgaccccacccccaagtcggcccgcccgccccatccccaccaaggtccgcgccggcggcggtcgagatactagggctagacccgccacctgtcggctcgtcgtatcgcctgctccgcgctctagccaccgccggtccgaggtccccgtcagctacaaccccactcccaaggcgaggcgcggagctcctagccggttcgcagaggaggcggggacccagctgtcccgccgagcgtggaaaggaccgggtgtgagcgagcgccttaccttggaggagcttgtaggggacgaggcgtagggctgggatccggctcccaggtgtgccgaagctggcgcgcgctcttccgccgcgcggaaagtgccgcggcaaactcgcggtgcggagctccaggcaatcccaggacaggagggagggagaagaaggagggagggagggagggagggagccaggggcgggaagggagccgagcggcgccgaagcacgagcggaaaaggccgaggcggcgcgcgaggggcgcggcgcgcggtgggaagggtcgtggccgctgacgccccgcccccggcgctcaggtgcgcggcgtcgcgtccggcccgccgctgcagcctgccctgcgccagccgtcctctgccccgctcccgccgcagaccacagcgcgcccgccgcgctccgcccgcggcctgcgagttagacggcacattcctggg

SEQ ID NO: 224408 - DNA, 660 bp, Homo sapiens
  chr12:81330538-81331198
  hyper
cgaacactttccccgttcaagtcagagagcaggactcactgggtggcaggtcagaagttgaattttaacccgacctgcgctttgtccccgcgccttccgcagcctgggcgccgcggtggcaccgagctgggagaggacacgagaggctggcgcgggagaagccgagagttgctatcgaccgggagctgccggcggcgggagcagacgcgaccctcgccgctttcgatctcgaagccgcggagagccgatctcggctgctggggctcggctccccgcgctctgccttgccctttcggcagagggcagctccctgcctgctgcagccccgccactgtgcgcccggcagcccaggggtgcgcccagcccgccccccgagtggccgccgggactccagcagttggaccgaccctcgccctccggcgcctggacaaacttccttcctcccgggcccctgcgccaagcaagctgacaggcggctccctcgccggtctcctctgggctctggccgggcgagcttgctctctgcccctctccaaccccgagcccctggcgcctatagccgtccccgcgcagcggctccaacaaagccagaggaccggagacgacccggcgaggggctgggagtggcagcggggaccccagagccagaaggaggcgtcc

SEQ ID NO: 224409 - DNA, 360 bp, Homo sapiens
  chr12:83080964-83081324
  hyper
cccatcccgcacccttccacctcctccgagtcccactcctcacctaggacgccccaaactgccatgggttagggtggggatcgcgacccgcgcgaaagaccagccctgcgcttccgccgggggacgcggagcccaaacgccgctcaccgcttgcgggcgccgggcatggggagtgtggtgtgagcccgcacccggggaggacgcaggagctgcggagacgggcgcgaggaggaggagaggagtcgtggattggaaggacccgagggagggagggtggggaagcgagggaaaagtgaagctgggaggagaaggcggcggaaggtggagattgatgcttctgttttttgttgccgctgctgc

SEQ ID NO: 224410 - DNA, 38 bp, Homo sapiens
  chr12:89747142-89747180
  hyper
ccccaccaccaccatcgcctgctgggaggtcgcgctgg

SEQ ID NO: 224411 - DNA, 336 bp, Homo sapiens
  chr12:89747255-89747591
  hyper
tgggacgcgccgggccgggccagcagtccccgccatgggcgaggcgtgaggaagtcctcccgcaagacctgcaggctgcgggggctcggcaggggggctcgacgattggttacagttggcagggaggcatgtcagagggggcctccccagccctctcctgccgccgcctcctccctttgtccagcgccgggcactccggggagcaccagccgcgcctgcgcgctgcgctccctgccaccgccccgccgtccccgtctccccgcttgggcacggggctgtgcgcgacgcagtggacgggtgcggggctcagcgagggactcccgggtccatagagat

SEQ ID NO: 224412 - DNA, 398 bp, Homo sapiens
  chr12:93966030-93966428
  hyper
gggccctcgggctgcgccaggtgtgagaccggaatgccaatttggggaatctctcctgttctttcctttttaattttttctacttgtccttgacaagggcctattcccactggatctgcaggtgactatttgctcttcctaggtcgccagtctttgatttcagctagtgaccctgggcgggaagacaccctgttcaccctcctcctgacctccgccccccacctcttcagccaactttatcttggatctctgctctctttatcttttctctagagctgggccagggcgctaactggaagcttggggttaaatggtgcaggaacgtagaggcggaggagtccctgggattttccacgtctatttccccacccccaccccagccgcaggggtccagtttg

SEQ ID NO: 224413 - DNA, 465 bp, Homo sapiens
  chr12:93985219-93985684
  hyper
tctgtctgcggcaagaggaatctcagagtttcggttatttctccttgaagaattttcaaacggagttcctgcaggggctggctctagcgtctacgatgtgcacacactgtctctcaagagggaagtgatcctggcgccacggggtgatgcagcagaagttctttttgtctgtggccagggtagagtgcggagccccacggagctgtggcgtggcggctcctcccagacgcgtccggggcgccgctcgggtctcccaggaccttatgtaacccagcgtcggcagcaaggagccggtcacaggctgaccaacgtcaaggcgtttcactttggaagcgcaccagatgagtgtggtattgagagcagacggctgggtgcaatgtttttgccgcatatctcatgggttattttaatcttttcacgtagtcttaagggtctcactagaccgtatatgagaatgtggccagg

SEQ ID NO: 224414 - DNA, 450 bp, Homo sapiens
  chr12:94541784-94542234
  hyper
tcactcatccgacccggggaaacccacaccctgtcacaggggcgccttggtccccggagtctccggctcggccatgtctcccgcgcgcctccccggggcctccctctcgccgctccacacctgtcagccgctctcgcagcagccctgtggcccgagcccggggcctcagctgcaaccccttcgcaccctggatcctcgctccgcgcgcctggcgtatccccgacccggctgctgtcgtaaacaaaaccgggcgttggagcagcaccgcgggcggacgggcgcgggagcccgctccgtgcgccgttagcgcgccccgggagccccaggcgagccaagggggcgatggtggcggccgcggcggccgcggcgggcggctgagctttgttatgaatagatgaaagaggccacctacacagtaacccaaattacgagacctccctcctccctatc

SEQ ID NO: 224415 - DNA, 1591 bp, Homo sapiens
  chr12:94542561-94544152
  hyper
ccggagcgagcctgccgcgcgccgccctccccgctctccttcctgggcgagctgcggggatggggcggccgcgggagcccgagcgcgcgcaggaaccgccgccgccgccgcccgcgtctccgttgccgcgcgcctgagccgccgtcgccgccgcgcgccctgcccgggggcggcccccccagccccatggaggtctcccggaggaaggcgccgccgcgccccccgcgccccgcagcgccactgcccctgctcgcctatctgctggcactggcggctcccggccggggcgcggacgagcccgtgtggcggtcggagcaagccatcggagccatcgcggcgagccaggaggacggcgtgtttgtggcgagcggcagctgcctggaccagctggactacagcctggagcacagcctctcgcgcctgtaccgggaccaagcgggcaactgcacagagccggtctcgctggcgccccccgcgcggccccggcccgggagcagcttcagcaagctgctgctgccctaccgcgagggggcggccggcctcggggggctgctgctcaccggctggaccttcgaccggggcgcctgcgaggtgcggcccctgggcaacctgagccgcaactccctgcgcaacggcaccgaggtggtgtcgtgccacccgcagggctcgacggccggcgtggtgtaccgcgcgggccggaacaaccgctggtacctggcggtggccgccacctacgtgctgcctgagccggagacggcgagccgctgcaaccccgcggcatccgaccacgacacggccatcgcgctcaaggacacggaggggcgcagcctggccacgcaggagctggggcgcctcaagctgtgcgagggcgcgggcagcctgcacttcgtggacgcctttctctggaacggcagcatctacttcccctactacccctacaactacacgagcggcgctgccaccggctggcccagcatggcgcgcatcgcgcagagcaccgaggtgctgttccagggccaggcatccctcgactgcggccacggccaccccgacggccgccgcctgctcctctcctccagcctagtggaggccctggacgtctgggcgggagtgttcagcgcggccgctggagagggccaggagcggcgctcccccaccaccacggcgctctgcctcttcagaatgagtgagatccaggcgcgcgccaagagggtcagctgggacttcaagacggccgagagccactgcgtaagtcctgcccccggggcgccgcggagagcgctgctgccggggagccgccgccgccgccgaggcagaacgagctgggggcgagcggcggggcgggggtacagccgggtgacatttaccaggtctcaggttcacaccgcgggcggccgtccgaaggctcctctcggacggtccccgagacctggagcacggcctgaggtccccaaagggagagtgtaaaaaggggggcggggagggttggagttagactcaaaactctagtggctgcatcccattgccatccttccctgtccaaacggggacgcttgtttggggctgagtctcctcgcgcagcccctctttc

SEQ ID NO: 224416 - DNA, 34 bp, Homo sapiens; identical to SEQ ID NO: 203135
  chr12:94544417-94544451
  hyper

SEQ ID NO: 224417 - DNA, 105 bp, Homo sapiens
  chr12:96183926-96184031
  hyper
cagcgctctgcgctcgcagccctggctcccctgcacccccgagtcccgagatgggttagagaagcagcgagggaaggggtgggggccccgccgcgtcaccaccca

SEQ ID NO: 224418 - DNA, 180 bp, Homo sapiens
  chr12:96185017-96185197
  hyper
ctcctcctccagccaccccctctcggggagtcccacgacccggggacggaacaccccaacccagccccgcgtcacccgcactgagagcgcgccaactgctaagcggcgttcgccgcttctctgctgccttttgcgggggtagggggatgtctcggctaaacaatcgctgcctacatgatc

SEQ ID NO: 224419 - DNA, 206 bp, Homo sapiens
  chr12:96587648-96587854
  hyper
ggcgtgagccagcacgcccggccgagggctggcttttaaaacaccgaaaacccagacaggaacggtgtccatctccaaccccagacggaaactgtgcccgcacccacaagaaaagcagtcctttgcccagagcaaccaaaccctgaaccccactctcgattcccctctgccccccaactcttccatcccagcggatgggaaacagc

SEQ ID NO: 224420 - DNA, 33 bp, Homo sapiens
  chr12:96618052-96618085
  hyper
attgtggtgatgaccgaccgagccattacatgt

SEQ ID NO: 224421 - DNA, 1080 bp, Homo sapiens
  chr12:99288192-99289272
  hyper
gaacaggtttgaaaaaaaaagcccccctcccgccccctccgtagagaccgctagctgaggctgcaacacctgccccggcaaagcgtctccgcagccttcccggcttgcccgactcggcttcctccgcctctgccccggctgcggcaccacttcttggagccacgtctcggcgagcgggggccgcggagcgagggggccgctgtgccgctactcacccgagccgctcgggctggccgcgagccgggatccgcgagggctggcgggctctggcccccgaggacgcagacatgtggcttgaacctccgctcccctagccgttgcctctgtgcatctttctgggcgcccccagcgaatgcgagcggcgaggcgagggcgagcgcgccgaggaagggcgggagaggcgcggagcttggccgcgccgcgctgcgccgagcgccgggctctccccgcgagctccccgggcccgcgcgcgcgccccccactgcccccgccccccgcgcggcgcgtgccccccaccccccgccgcgcgccctcgcacccgcccggctccacgcggcgcgcgcctgccctggcggcagcggcggcggcggcggcgcgtcctcccccgaacgccgtctccagggctgctggctgcgctctccattgttccgcggctgctgcccggggtgggcggcgaggcgggggggaggtgtcggcttggccgccggggagggcttaccgctcgggcggaccctcactgcgagagcgatgcgggcccaggcgcggcgcgcgggggctgcagggcgcctagcactgggggttgccggcgcgcgggggcctcctcctggctcccaggcactcgctgctgctgggcgcccctcgcatcctcggttactatggatatctcgctcctccgccgccccctccgcgcactccgggaggccgccggggcggtagcagcggcgcggctccgcgggtgcccaggtgaccggctcggcagcggcagagcagtggcagcagccgccactgccgctgttactgcggtcgccgccgctggagagaggaggacgaggagggcaaggggcagaagcaggtcctgct

SEQ ID NO: 224422 - DNA, 180 bp, Homo sapiens
  chr12:103351554-103351734
  hyper
aaaataataaaaacagcctgagccacggctggagagaccgagacccggcgcaagagagcgcagccttagtaggagaggaacgcgagacgcggcagagcgcgttcagcactgacttttgctgctgcttctgcttttttttttcttagaaacaagaaggcgccagcggcagcctcacacgcg

SEQ ID NO: 224423 - DNA, 900 bp, Homo sapiens
  chr12:103351876-103352776
  hyper
taacttccgtcagggctcccgcttcatatttccttttctttccctctctgttcctgcacccaagttctctctgtgtccccctcgcgggccccgcacctcgcgtcccggatcgctctgattccgcgactccttggccgccgctgcgcatggaaagctctgccaagatggagagcggcggcgccggccagcagccccagccgcagccccagcagcccttcctgccgcccgcagcctgtttctttgccacggccgcagccgcggcggccgcagccgccgcagcggcagcgcagagcgcgcagcagcagcagcagcagcagcagcagcagcagcaggcgccgcagctgagaccggcggccgacggccagccctcagggggcggtcacaagtcagcgcccaagcaagtcaagcgacagcgctcgtcttcgcccgaactgatgcgctgcaaacgccggctcaacttcagcggctttggctacagcctgccgcagcagcagccggccgccgtggcgcgccgcaacgagcgcgagcgcaaccgcgtcaagttggtcaacctgggctttgccacccttcgggagcacgtccccaacggcgcggccaacaagaagatgagtaaggtggagacactgcgctcggcggtcgagtacatccgcgcgctgcagcagctgctggacgagcatgacgcggtgagcgccgccttccaggcaggcgtcctgtcgcccaccatctcccccaactactccaacgacttgaactccatggccggctcgccggtctcatcctactcgtcggacgagggctcttacgacccgctcagccccgaggagcaggagcttctcgacttcaccaactggttctgaggggctcggcctggtcaggccctggtgcgaatggactttggaa

SEQ ID NO: 224424 - DNA, 243 bp, Homo sapiens
  chr12:103696152-103696395
  hyper
gggatttccggacgcgcccaggagtctgctttggatgtcgtcggggtgtgcctgagcgcctgctgggactgccatcctctcctccggctcgagctctgtgttactcgggccggtgctctgcagagcgccgggcgtctggctcctcctgcagaggccgatggcagtggaaggtctggcggcagaacctggaaggcaaagcaggaaagcaggacagagatgaggctcaagcgtgcgggaccacac

SEQ ID NO: 224425 - DNA, 398 bp, Homo sapiens
  chr12:104322990-104323388
  hyper
aagggttttccttttctgtgctagacccgcttttacgaccacgctctccacctgattcacagaaagggttctacgaccgtcaggtcaccgccgcctttgtactttattggggagtcgaaggcctcagcgctgctcgcgatttccctaaggtggtcgggaaggtcccaaccacgttcttctgtaaaccagataaggaaggcctggggattccggccgcggaaaggcacagaggaggtgaacgctccggctgcccaagtgacgcacttgtaggcggattcggaaactcgtgctcttgagccggaggcggagcccccagactcagaccgaccccccagaaccgggcggccttgcccgaggcatgaaggctttctaggcccgcttctaaaagctgtgtacaa

SEQ ID NO: 224426 - DNA, 98 bp, Homo sapiens; identical to SEQ ID NO: 203156
  chr12:104459023-104459121
  hyper

SEQ ID NO: 224427 - DNA, 900 bp, Homo sapiens
  chr12:104850324-104851224
  hyper
acgtcgcccagggattttaaataattgccagccaccagaaaccccctaacccttaattcttccctccgagacccagcccgctgcttgccacttccctctccaaacgctggcgggggtgggtggcagcaccgaggcgattttcttcgtctttttttcctccgggttttgtcatggaaacgctgacacaacctccagacggcggccgagcccggccggggactgagggcttttgggaccctgcgggagcgcggcgcgcacaccgcactccccgggcaacagctggacgcgaccatatcccgggtaggggcggggggagcgcgacgctccgccccggcgctagggtccctccctcctcccggctctccgcaggcgccctcccctcgccgggggccgcgagttgcatttggtaaaacccagccccggaatatatagatcgttggagcgcaatgaagtagcctttggagagaagggagagggcccgtcggacagccacagcggccagcgcagcggcagcggcggcggcaccaccatcaccgctcgcaccccagccgcccggcccgcgaccaggcagcggcggccgccggcgggatcggaggaggcggcggagcggcgaggaggaggagcaggagcgcgcagccagcgggtccacgcatctcagcacttccagaccaactccggcaccttccacacccctgcccgggctgggggctccgagagcggccgcgaagcgactccgatcctccctctgagccttgctcagctctgccccgcgcctcccgggctccggtccgcgcggcggggtccctgctcctgcgccccgggcgcgcttcccggacaccccggtccccgcagccaggacaaagccatgaagccagcgctgctggaagtgatgaggatgaa

SEQ ID NO: 224428 - DNA, 360 bp, Homo sapiens
  chr12:104851599-104851959
  hyper
tgtgtcccttgtctgtctgtctgcgaggtagcagggaaacggagaggtgtgggaagcaaccgggggtgaggggctggtttgaggagaacgaaactccctccctgctgctgccgaggtcggaggatgaaagagttacccggagccggctgctctgcgcccgggcgagccgcctcttcctggttgccgggccgggggcgaagggtgtacgccccggcgaggttgcgagtccctgcagcaggctgggagcccgggactgggctcccacgtgtcccgggctccgcgcagagctgagcaggtgtggagagtggtcgggtgcccagcgttgcccctccaccacgcgccggccgtttgcccccgggg

SEQ ID NO: 224429 - DNA, 180 bp, Homo sapiens
  chr12:106532708-106532888
  hyper
tttgcaggagggaggggagagggtggctcgcagcgcaggagggggagtgttatgtggggcgccgcgccccccaacccctccccgggaggacgcgcagacggggcgggggcggcgctcgcgcggccccaggggagggggagcgaggggcggtgcagccagggcttcccccacctccctgca

SEQ ID NO: 224430 - DNA, 105 bp, Homo sapiens
  chr12:106641151-106641256
  hyper
gctcgacgccctgcaagccctggcccagctcctccctctgccgggagaagtcctggtggctgcgccggacctgctggacctcctccaggacgtggtggacgcacc

SEQ ID NO: 224431 - DNA, 54 bp, Homo sapiens; identical to SEQ ID NO: 203163
  chr12:106641515-106641569
  hyper

SEQ ID NO: 224432 - DNA, 420 bp, Homo sapiens
  chr12:106979781-106980201
  hyper
atactcaacaagtgtggagctaagacaatggcccggtcgggggaagctgggcagccggcgcgcgcctcctgggccctaggcgctctcgctgccgagcccgacaaagcaaagcccctctcggaggcaaagccccagcttgccgcgcgccgcggtgctccggcaggaggcaaaggcgacaggcgcgcgcaggggcagtcgacgcaccttctggccggtgcgcggtttgcagtaagcgcaggcgcgcgtcccgctcggcccgcgctacagccccacgccgcgcaaaagtgggtgctgagccccgcgtggcctgcgctccccacgcgggccaccggcagctacgtgtttgtggccgccgggtccaatcagggctgctctgcccgggtgatcgttgctcagttactcaagttatccggaaattcg

SEQ ID NO: 224433 - DNA, 142 bp, Homo sapiens
  chr12:107167936-107168078
  hyper
ccagcatgcccttggcgggaattctttccggctggatgactaccaatcccagcatgccattcggcacgccagtaaattagatggaagagcgggatagccccattgcatgcagggaattgcagtccatttagcggctggttca

SEQ ID NO: 224434 - DNA, 240 bp, Homo sapiens
  chr12:107168258-107168498
  hyper
gccaggcctcgaccgagtcctgggccttgtcaggggcggccgtgaggcgccggttgctgggggagcggtgacgtcgcggggtgaaagttgaggggcggtgacgtcgggccggcccgggcggaggctggcgggttggaggcaggacggagggagggaaagagggaaggaaggaagctgggaaggagcgagcgggggcgcgaggcgtttacctggaggcagcggcttgggcgcgcagagcgg

SEQ ID NO: 224435 - DNA, 505 bp, Homo sapiens
  chr12:108169005-108169510
  hyper
gtaaaccggcggaacggctggccttgccatactcgctgcgcaccgcgcccctgggcgttccggggaccctgcccggactcccgcggagggaccccctcagggtcgccctgcgtctggacgccgcgtgctgggagtgggcgcgcagcggctgcgcacggggatggcagtacttgcccgtgccgctggacagcgccttcgagcccgccttcctccgcaagcgcaacgagcgcgagcggcagcgggtgcgctgcgtgaacgagggctatgcgcgcctccgagaccacctgccccgggagctggcagacaagcgcctcagcaaagtggagacgctccgcgctgccatcgactacatcaagcacctgcaggagctgctggagcgccaggcctgggggctcgagggcgcggccggcgccgtcccccagcgcagggcggaatgcaacagcgacggggagtccaaggcctcttcggcgccttcgcccagcagcgagcccgaggaggggggcag

SEQ ID NO: 224436 - DNA, 415 bp, Homo sapiens
  chr12:108297348-108297763
  hyper
gtttctggggaaggattctcagaaggtggctcatatgagtaaaaatcatttttcctgggtagctgattcctagaaactcgcagggcggcacagcacggcggctcgtggcagcagaagaggaagatgccgcggtggaaggcgtcttcgcggccgggcagcgacgcgtacacctgccgccggaagaagagcgacggtcgcacagctctcaggccgggggccggagccccggcagcccggccgcgcccatccacgcccagccacgcccagccacgttggccgcccgcccagcctgctgggaaactgctcgctgcgcattcgcccgccggcgccgacttggcgatggccagctacacaggtccggcgggggcggcagccatgtggggcgcgggctggcgtggggagcagcccacagctg

SEQ ID NO: 224437 - DNA, 330 bp, Homo sapiens
  chr12:109746884-109747214
  hyper
ccgggaggagggagcaaagccgaccctgcaaggcggtacctggagccgatcctcgcggggccgccgctgccggcgctccgggggtgggcaggggttccggaggggggctccctcgcgctcgcccctcgcgttccgcaatttggccgccgtcgcagctcgaaccgtttttaaatttccctctctggagctgtccagctcagagcatgcgcagtagccgtgcggggggcttttccccaagggtcagttacagggcagggtcaaggggattgcagcgggcgtttcccagcagccgcgagccttgcacgccccggggttctggggggggggtgt

SEQ ID NO: 224438 - DNA, 180 bp, Homo sapiens
  chr12:109747243-109747423
  hyper
ggggtagggacccctcttcaaactttgccaacagtgacaacaactgcatgcccgagagcatgcgttgaggagcagtgggagggtgatttcggccaagggaattaagttgcaaaaggaggctgggtgcattaaaacttgcaatcccgcctggggcaaaggacgtgggcgggcggagagatc

SEQ ID NO: 224439 - DNA, 480 bp, Homo sapiens
  chr12:111284566-111285046
  hyper
cttagcgtcatgagggtccgggtagtctggtaaggggtcgctggagagtgtgtcgcccctctcccccaaccaaaagcttccctccaaccagctgctcttgtcctctcctcccgagggccctgtgccctcccagcggacttgcaggggagaacgtccatgtttgtgcgagtcacaaaggcgcccgttccaggggtcccagaacgcccgggcgtggggctgggggtgtggcgcagcgaggccgcgcagcaagcagtcctcccggcaccgtcggaagcgcagttgcagcagccgtcggacaagcggccggagcagccacggacaagcagtccgggccccgccactggtaagtttcgccgcccgcccggccgcgcctgctgcgccacagctccccctgccagggaaaaggaaagagcggtcgcggtccccagtccattcatatctcgctgccctaagcgttgaaagtatcagggtctcccgcaa

SEQ ID NO: 224440 - DNA, 1876 bp, Homo sapiens
  chr12:111471132-111473008
  hyper
ataatataatggcgcggaaactgtgggcggtggtggtgacatttcccacgactcagtggcgcccccgggcggctcccaccctccctccggccggcgcgtctacgcagccccaagtgctggctgcgaccctcggatcccaagcatatctggcgatggagcggcggcagcccgaggcacgtgttgtgtgtgctccgattgcaaaagaaaaaaaaatgcatttcaaactattaacttttttttaagcgtgcaatgccgggagctgggggtagacaggtgcaagcgggggtaggcgccccgcgcgcccgcctcccgcagcgccccctcccaaacttccctttgcattgatcagcacgttacgtcagtattgataagtttgcaaaaagccaaagtcaagtgcaatcgcgcggcacaccgaccccggacttgggggggagatgcagcgagcgctccgcgggcccgggagccggcggcaggcagggcagcggcggcgccggcgcctctcggagaggctgcctccccccaacccctcccctcccaccccatccccggctgcctcccccgggcgggcgccgagctccccgcccggcgcgctccgcccgcgccctccgggggtcgggggggcgcacggctcccgggcccgttggcggcggcggcggcggcggcgcggcggcggcgaggggcagcgggtggcaggaggccggagggcgcccgaggggccccgggccgcggcgctcagggcccgggcggccggcggcggccccggggctggggggagtccagcccggatattgagtgcagccattgagaaaagccaaactcttgtgtgtgcgcgtctcgatagcccccaagatggccgccaatgtgggatcgatgtttcaatattggaagcgatttgatctacggcgactccaggttagtgcgggcagcgccggccgcgcggccgtgaggagcccccgggcgcgccctgggcgcattggggaggtccccgggcgggcaggcggacgccctggggcggcgggcggcggctgccggggctcgccggggctcggccgcccgctgcccatcgataggtattaggaattgatctcgccgctgctctttgttcggttcagtcatcgattagctgccgcgaccatggagaagcgctagtgagccctcggtcggcggagcggccgagcggccaggcggccgggcgaggagcggggaaggcaggggctacggcctcgggcagggggctgctggcgggaacccccggcggtcccccctgagccgcactttgcgcgcctcccaacttcgcggcgcccggggaggccgcggagcgcgccgcttgccagtccgcacccggctggggctccggcgagggagggagggagctggcgggcagggaggaggaggaggagaggaggaggaggaggagagaggaggagggagccggggttggcgaggaggcggctccgcgccccgccgctcgccggcacctcagccttcgccgcccgcctggctgcgcagcccggacgcgccgccacccgggggccgccgccgccgccgccagagccgccgccgccggactggccgcaagcgccggcagacctcttctcctcgggccggggtcttggggttcgtcttgcttcttgcctttacccccccgccccttccatccccttcccaagtctagatgcagacgggcggtggaggtgggcccgggcgctcgcaagtttgcgctcctgcctccagggcggtggagagccgggagcggcgcagagcaggtgactcccagccctcgggcccaagggaacttttaaatgagagatttccttgcttgttctgcctcctgcgtttctccccgctgctcccctcgtctcctctctcccgtctc

SEQ ID NO: 224441 - DNA, 332 bp, Homo sapiens
  chr12:111473056-111473388
  hyper
tccctagggcgactcttcgaaaccccatcactttctccccatcctccctttgtgggagtctgtgtgcctcccctagatttggaggtgttctctgcggaccccgtaggagccggggctgggaggtggaatctcagagaacgcaccgtggaggcgcggctccggcctctgttctttcccggagtgccccggacgcgcctggcaaggccccccagccttggagtctcgcaaagtctcggcgggtgcggcggggatcaggggcgggaaaatggtgcggataacagggcggttagagcatcctgccttgaccgtgacattcgcggaagacgcgagat

SEQ ID NO: 224442 - DNA, 262 bp, Homo sapiens
  chr12:111844275-111844537
  hyper
acccccacccacacacgtgttagggagagcgttggggtaactgaggccgtgggatgggggagagggcatcgctgacgcccccagcccaccctacggtagcctcgccggttgggggcggccctcccctcaacttgtgcctggggaggagcggtcaggggtcacccattgctaccctgaaagtgaaagtagtcaaactgaggctgtgagcacagatgagcccttgggtgtgggggcagcgggggaggatgcgccggcccctccc

SEQ ID NO: 224443 - DNA, 42 bp, Homo sapiens
  chr12:112689847-112689889
  hyper
ttacaggtgtgagccaccacgcccagccggatgcttaactac

SEQ ID NO: 224444 - DNA, 35 bp, Homo sapiens; identical to SEQ ID NO: 203186
  chr12:112884177-112884212
  hyper

SEQ ID NO: 224445 - DNA, 196 bp, Homo sapiens
  chr12:112888121-112888317
  hyper
aagaaatggagctgtcacccacatcaagattcagaacactggtgattactatgacctgtatggaggggagaaatttgccactttggctgagttggtccagtattacatggaacatcacgggcaattaaaagagaagaatggagatgtcattgagcttaaatatcctctgaactgtgcagatcctacctctgaaagg

SEQ ID NO: 224446 - DNA, 86 bp, Homo sapiens
  chr12:112915451-112915537
  hyper
tagttgatcataccagggttgtcctacacgatggtgatcccaatgagcctgtttcagattacatcaatgcaaatatcatcatggta

SEQ ID NO: 224447 - DNA, 116 bp, Homo sapiens; identical to SEQ ID NO: 203188
  chr12:112924321-112924437
  hyper

SEQ ID NO: 224448 - DNA, 152 bp, Homo sapiens
  chr12:112926827-112926979
  hyper
gtgttgactgcgatattgacgttcccaaaaccatccagatggtgcggtctcagaggtcagggatggtccagacagaagcacagtaccgatttatctatatggcggtccagcattatattgaaacactacagcgcaggattgaagaagagcag

SEQ ID NO: 224449 - DNA, 261 bp, Homo sapiens
  chr12:113013083-113013344
  hyper
ggaggcggcggagggacgggcccaccaacgctgcaggccggtaaggcgggcgggggctgcgggccaccaggtcctgccctcccaagctgcagcacgcgctggctggggggtcgtgggggctcccgtgggggcgcggccggacgcgggacgctgcctccgggaatggggctgctggagcgggaggatgcgctagaaccgggggtggggcgacgagggacttgggggcggggagacccgcgcaggacccgtgctatcctttgg

SEQ ID NO: 224450 - DNA, 817 bp, Homo sapiens
  chr12:113494407-113495224
  hyper
gatttggggcgccccgagactcgcgtgtcagcgccggtggcgctcagggccgagatctgtctcctccccttcctcctcctccgccccctcccctctccctcccggagcacggccgaggcctcctcccacccgcgagatcccggcggccgccagccggctcctgcgtccgtccgtcggccgggcagtctgtccacgcgcggaaagctcggcgcggcggccgaggggcctgggagggaacgggcgcggaggcgggaccgcggctccctcccactccggggggagcccaggaggcggcggtgctggagcgcgagccggagccggagccggagacgaagagaggcggtgagaacgcgggtgcttagggaccccacccccggctcccgctgggggcccgcgagcggctcggggacgtctgggctggggaagcggggctgttacccccagggcgggaggcagagacgatccagctcctggcttcgccccctccgcgacgcgacccccgaggggccctgggccgcgcctgcagcgccgcgcatccccgtgcttcccggcgcaccccagcgcacccggcatccccccggcagggcgagggccccgggggaagggaaggctccgggagccaaggagggcgccccccaggcggagagtctcggaaaaccgcgcccccggcccctgccttccctccaggcctgccccaagggaaagcgggcggggcgaccccgtacgccccccttgctgtcccccttcggttccccattgttctcagccgaatgctctcctgggaaggggggagggggtgctgcgctctcctcttaaa

SEQ ID NO: 224451 - DNA, 420 bp, Homo sapiens
  chr12:113796410-113796830
  hyper
gggccagatgtactgctaccccggcagccacctggcccgggcgctgacgcgggcgctggcgctggccctggtgctggccctgctggtcgggccgttcctgagcggcctggcgggggcgatcccagcgccggggggccgctgggcgcgcgatgggcaggtccctccagcctcccgcagccgctcggtgctcctggacgtctcggcgggccagctgcttatggtggacggacgccaccctgacgccgtggcctgggccaacctcaccaacgccatccgcgagactgggtaagggttggcttatccccacgcggggccatcgggggagggggatgcgtgggcgccggacctcgcctgttcccgggaccggcctcttgccgggtgggaacgcccgtttctctgggggtcagctactcccgaggc

SEQ ID NO: 224452 - DNA, 180 bp, Homo sapiens
  chr12:113905484-113905664
  hyper
ctgacggctctataaaggcctccctcccggcacggctctcgcctcggcccctcggctccggagccagcctctggccgtttgtctgcccgcgcttcggcgcagggagggagggggcatcgcctgtttctctgctcgaaaggtggaggtaaagagggatcccggaccccagagaggcttaca

SEQ ID NO: 224453 - DNA, 600 bp, Homo sapiens
  chr12:113905729-113906329
  hyper
taccaggaggacagcagggctagatggaatctttcggttcacagtccccgacctcgggcaagtgccccactcgggcgcacggtctgctcccagaccagaaccaggcgcgctcgtagccaaggaagcttggcgggagactcctccgaggctcccggctcccaggccagcggggctaaggagctgtgcccgccccgggccgcacctggatgacgcgcatgttgaggccggtctcctgcgccagctgctcgcggatgtggcgcgtgggcttgggcgtggcggcgaaggcagccttgagcgtctccagctgcttggccttgatggtggtgcgggggccgcgccgcttggtgcccgagttctgctcctcgttctcgttgttggccgtctccttgtccgacgaggtcgagttgtccgtctctttggggtcgtcctgcagtgcgtcctggaggtccggggacaaactgcggtccgtacaggatgacactgcgggcggacggatcgggaaggggacagcggcgtcagcgacggccagacgcctcttcagtccagtggcgggttcccgccggcccaagctacggcctgcccaggctacggccagccccg

SEQ ID NO: 224454 - DNA, 180 bp, Homo sapiens
  chr12:113913768-113913948
  hyper
ccaccccaacacgcatacttcccccaccccacccccaagagccagcgcggctttaacattaaacaaacgcagcgagcgcctccgagctgcgctctcggccgggtctgcgcggcggcggcggcgttacaaattgtaaatttaaattgctcgccggattcattacctcccctctttgatttc

SEQ ID NO: 224455 - DNA, 360 bp, Homo sapiens
  chr12:113914006-113914366
  hyper
cctacgcctaatcactggctttctccctccgacaaaagtgtaattattttgtttggggtgtaaatataggccgcgcctcgcacacacactcagcgtcccgcagcgccgcagagcaccgcccgccgccggaaggaatcgggcccccgagtaggagcgggcgtgaaggctgagccccgctgtctggaggccggaggagagcggctggtgtggcgctccggcgagacccagcgagcccagcctctgccctccgcagttcgggtttgcccgagaacctcgggaccgcgcgctcccaggcgggccagagaggacgccggcggggtgcaatgggtgctcaggcctagacatccgggcagggatgcg

SEQ ID NO: 224456 - DNA, 420 bp, Homo sapiens
  chr12:114029378-114029798
  hyper
cgccctgtcgccctcccctgagctcccggaagcccatggggccgcggccaagtttccccgcctcccgaggagagacagagaagccacgagtcgccgggtgggcgcggcgctcctgggctcaccggggcgcattggcactggcggcggctgcgcgggctcggccggccccaccatcaattaagcgaccgcggggtccggcgagcggcagcgtgtgtggaaattaccttttgatttcttaattacattgtcctcacctgcagctcaacccgcctaggagaggcgctcgccgagctcgattctccgggtgccataaattaggacgccagtcgccggcgaacgctgggggcttccagtataccttccagcgcagcccgcaggctatttttatctccctcagcacctcggcacctcggaggagct

SEQ ID NO: 224457 - DNA, 229 bp, Homo sapiens
  chr12:114075830-114076059
  hyper
aacgcgcagccccccgcccccggctcgccccccactccccgccggccgcccgcatctgggcgcgcagaggaacagatttcgcgtttcacacagcgcacaatggccgccctcaaaggcgcgccgcccgcattgttcgggccggcgcccgcgcgtcctacctccgcgcgcgaattaacccccgtcaccccgccattgtcaccgcgcacttcggggccggccacaaaggcgc

SEQ ID NO: 224458 - DNA, 176 bp, Homo sapiens
  chr12:114841464-114841640
  hyper
ttttgttctgtccccgcaagagaagccgagcaggaaagccagactctgactttgatctctgcaaagggacccgaagcgcgaggtctccttacctgctgggtgaaggcggcctgcggggacgacggggacttgctgggggccccgagcgcgctctcgggtttcgaatcgcagggcag

SEQ ID NO: 224459 - DNA, 324 bp, Homo sapiens
  chr12:114881653-114881977
  hyper
ggggtcgctgggcgcgcgcgcgcggagcaaatttgcccgcgcgcacccagaaacgatgacataagtggcgctgatgagcgctgcgcggctgaaacgcgactacataaagggtccgccggcagcgtgggccggagggattgcttcacactccggaattgggcccagacacatttagaaatgttttgctggacgtgtgccccgcaagggcgacagcggcagccggcagcctgggtgaagctgcgccgctggtcacaggctggcgcgcggcggcggccacagaggcgtcctaggtggagaatgcttctgcctttgcctgttctcccc

SEQ ID NO: 224460 - DNA, 228 bp, Homo sapiens
  chr12:114885146-114885374
  hyper
tggccagagcctggcgggttccgtgcttggctagccagcggagcggggtgagagggtgagagaaggacgcttctcctttgattcgcagacccgggcgcagccggagaccgcccggcaccgcggcgtctgtctgtctgagcgcctactcgcgggtcctctgctgccccgagtgaactctaggcgcagctggaccggggtgagggcgcgcggtgagcccaggccaagcgc

SEQ ID NO: 224461 - DNA, 145 bp, Homo sapiens
  chr12:116972230-116972375
  hyper
tctccccttgctcgcgcgttccctctcttcctccgttttctggtgtgctggaacgttcagcggaatatgatgaatgatcacctgtcacagcttgtttattataatgcaggcaatcaattacacatccccaatgctggccggcccg

SEQ ID NO: 224462 - DNA, 72 bp, Homo sapiens
  chr12:117316909-117316981
  hyper
cggcccggagtcctcggcctcccgggaggggcacccgacatcccgcacgcctggtgccggaaggggagagcg

SEQ ID NO: 224463 - DNA, 517 bp, Homo sapiens
  chr12:117317225-117317742
  hyper
cgctttgggcttcgcgtctgtcgctcaacttcctttttctgcaccccgcgatccatccaaaatgttcttcctgtccctgggattgggcagcctcagcctggcccctttcagtcgcgggagcccctggcctctccaacaggagagagagaaggtagggagaagtggatgggacccccggcgcccgggagccgggcagagagcgccccgaagcgcgcatttctcttcgccagcgcccgggctgcgcgggcccacgcgacatctgtcgcctgcggtcccggctcacaccccgcgcacccccgcagctccctgggcgctgccaccccccacgctccggctgccgcctttccccgcgggcgcagacgctcgggcctcgccttcaggcgccgctccaacttcccagggtgtctgcggcgcgcggcggggctcgggggcggggacctaagggcggctggctatgtcaccttcgagcttcaccttccggccctagacccatctatggtgggctcagcctgattct

SEQ ID NO: 224464 - DNA, 480 bp, Homo sapiens
  chr12:117798695-117799175
  hyper
gccaagcgcgcggctgaggaacgactagggtcttgcaaagttggagcctgggcgcgtagacccccggaccggagcccccggcctgaggccgcccgctaggaggaaaatgaggccgcccgaaccaagttgggacgcgcagcaaagcccgagccttccgcgcacaccaggggctcgggcgggagcggggagccctggggacggagaaggggcgcgggacgcctggatcaggaactcacctgacgccgagccgggcagcgccgaggctgcctcttcgcgctgcgcacccgcccgcccgcctcgtactcctcctcttcctcccgggcgcccgcggccgccgcgctccgggttctgaatcctccgagtccgccgccccgcgcggctggagggcgccggttgcacccactcgcctcctggtaggagccgcgcgcgtccctccccttcccctccgctttgtgcctccaagatccctccccaccccct

SEQ ID NO: 224465 - DNA, 180 bp, Homo sapiens
  chr12:117799280-117799460
  hyper
gcagtgctgggcgccccgcgcgcgcccctggctcaccccgtccgctcggccgctgctcgctgcccggccgcccctcggaggagccgcggcgctaagtagctcctcacccagcggctggaaacgcggcataaatatgtagggactgagccgtgagctcagcgagggtcgtgagggggaatt

SEQ ID NO: 224466 - DNA, 253 bp, Homo sapiens
  chr12:121077958-121078211
  hyper
gaggcagccccacacggaggcgctgggagactttcctcccagcagtgtcctgtcactgcattccggcccctgcgtttgtaggcagtgatgtcacagagtgccttcatgctcctcgggtctccggttctccccggacctctgtagtcctcattgccaaagttgtaccccctggggagtgcaccctgcctgcatttctggaggttcgggcggttccggggctctgcaggagcctccaggcgtgataaagagcgct

SEQ ID NO: 224467 - DNA, 184 bp, Homo sapiens
  chr12:122214126-122214310
  hyper
gtggtgagggttattttaagttctcagagacccaccgcgtctgcctcgtgctcttcttgcccctggagcgctgggggcatcctgagtcaggctgtgagaagattcgccaccagagggcgccccgggccctgggtcgtccaaggggacaaggacgttcccgtctgtgcttcggggttccctgacc

SEQ ID NO: 224468 - DNA, 240 bp, Homo sapiens
  chr12:122231464-122231704
  hyper
cacgatcacgatcttcagctccttcctgcccggaccgggggcggcggtctgggccagggccccgggggcatccattgcccggagcccgcagcactggcggcggcgcgccgggcactagcggagccaagaggtcgggggcggggcggggccggaaccagccccgcccactcggagcagcgccgcctccgccaggcagcctcccggccgacctcccagcctcagtttcctttctgctaaggt

SEQ ID NO: 224469 - DNA, 190 bp, Homo sapiens
  chr12:122232106-122232296
  hyper
aagatgctgacgcgagagtcatgtctgcccacctcgcctgggccagggacgccagcgtgcacgcgggttcggggtgagggactgggctccgcttacccgcaccccgaccctgggctgcagggtggacgtctgacgccctctgccgggcaatcgcctcggcgccggccgctccgggcgcaggttggcccga

SEQ ID NO: 224470 - DNA, 238 bp, Homo sapiens
  chr12:122459882-122460120
  hyper
tgcgagtgtctgtgcgcgagtgagtgagcggcgggcgggcgcgagtgtggccgccgcggagcgcgagcaggacccggcgggcgcgctccccagcctccgtctccccgccggaaccatgtcgggcaggtcggttcgagccgagacgaggagccgggccaaagatgatatcaagagggtcatggcggcgatcgagaaagtgcgcaaatggtaagcggaggcgcccgccgccagccgcctc

SEQ ID NO: 224471 - DNA, 602 bp, Homo sapiens
  chr12:122460949-122461551
  hyper
tggtggcggccgcgcgtggttttcgggatcacattagcgtccgcccggcgtggcccggtcgacattaaggggatcgaacctttccgcggcctcgtcggggtctgctcggaatcggcccctgggccaggcccgaggcgcaagcagatcgccaggttgggtcagagttgttgaaaactccccgctgcctgatttcaactttattatttttttcccacgccttcactggggtcccggagggagaggagccgccgcaacgctggctctgagtgtcagcgcccgcgggctcgtctcgaccctttatttcgagcctggaagctgggcaggccctgtggcaggggatgtttacgtttgggggtgtcgtttctcgagtagcgcctcggtctctaaaagccactgggggcgagcctccggtgtggcggtgtcacaagttagctgtcctttctgagtcaaacccaacaaaaaaggcaagaggaaaatcaataaagtccacgtgctccccggcctcctatggaaagggctggctgcgatggccggatgcccggccgtgggctgggtttggctccagtgggacaaagaattttcagaaccgtgagaaggggagg

SEQ ID NO: 224472 - DNA, 558 bp, Homo sapiens
  chr12:122688624-122689182
  hyper
gacgcgcagcgctgctgccaaccccggcccgggggtccccgcagagtgggtctctgctgccgtcagcccttcggagactgtcgcgttgaaagaatgaaccagagttcgccccctgcccgcgccagggcgttttgggtcaccgagtcctgtggggatccgaggcggctgccgcccaaggccgagcgcagcctcaggacccgcgccccaccagacggggtcgtgcgctccgcggcgggtggagagccgggctctggggtctccgcggctcggagggcggcggggcgaggccgtgcggccagcgcctggggacgcccgcggcgggacaggggccacccgggccgcggcgcagcctgggctgaaacctcctgggacggaaccaagccacctgctgtgcgcccttctcggtgaatggcaccgccgcccgcccgggcctctcgtccacagcccgcggtgctcgcacacctgagactcatctcgcttcgaccccgccgccgccgccgcccggcatcctgagcacggagacagtctccagctgccgttcatgcttcctccccagcc

SEQ ID NO: 224473 - DNA, 95 bp, Homo sapiens
  chr12:122907734-122907829
  hyper
aaatgctgaaaggaactgtagagcaggttaagcttgggaagaactgtatctgctccccacttccctccgggaacgaccgcgggttaaaaatcctt

SEQ ID NO: 224474 - DNA, 70 bp, Homo sapiens
  chr12:122907838-122907908
  hyper
cccagggtttgctccgttcgtttgagaaaagccccttttattcgccctggctgcttggacggaagccctg

SEQ ID NO: 224475 - DNA, 567 bp, Homo sapiens
  chr12:123258812-123259379
  hyper
agtgctgggggcggcgcagcagcctttattgacttcttcattctctgggtagtggtgaacagccggttctttcaggccttccagcgccggagcctcgggcgtgggcaaaaagcgtccatacgcagcctgagccacttgggagcccccagtttccgaggcagaagaacagtgcccaccagcgcagcggggctgcggcccggaaaccctggcggggagccccgagccccggcgggcgcacgccgcgtgggcaccaggcaggcggttggagtacggggcgggggtcggccgagggcgcggggccccggggctccgggctcgcccccgccgctcggggcaggcgcgccgatggcgtttctgaggtgacgccgcccacaccgggcttctccgggggcggaggaaacacctatgaaccctccggcagccttccttgccgggcgccaggtaagcagcggttccgggcgcggcggggcgccgcgggaacggtgcacattggtcgaaatctattgcttctcaagaacggtgtctacttaaaatgtgaaacaggccgggcgcggtggctcacgcctg

SEQ ID NO: 224476 - DNA, 240 bp, Homo sapiens
  chr12:123380440-123380680
  hyper
gaggagcgaaccccgctcgaggcctcacagccgccgccttaagcccagctcggctcacctcctccatcttctgcaccatctccgtcagctggccctcgtcctccagcagctcgttgagctgcaccagcgacagcccggcgaaccgggcttcgctcccggcgcccgccatccccacgtctcggccgtcgtcgccaccgccgctgcggccaccaggctccgccgaccggaagcgccgccctc

SEQ ID NO: 224477 - DNA, 281 bp, Homo sapiens
  chr12:123754888-123755169
  hyper
cagtgtccaagattttttttaggtatcgtttttatgggtcccacttccgatttggggggttacgaggtcaacgtttgcaaacaaggcccaaaactcgagcaggagagccagcgtggcaccggtgaccaacggggccactcctctccccgtcgagtccttccccccatcccgccccgcaacacaaccgccttttgggaagtctgtttccgaccaagtgtcagagaagaagggccccagtgaggtcacaaagcccggcacctacgaatccctcaatgttgtgc

SEQ ID NO: 224478 - DNA, 180 bp, Homo sapiens
  chr12:123920672-123920852
  hyper
ccttcctgaggtggtccctctccatcttcagctcctccagcgccaggctgccctcattcaccagcgcctccagcatctccaggacgcggacgactttgaactgcagctgcgtcacccgggggtcgctgcccagggccataagctcgcggcccaacaggtaggagatgtcatacacgtcct

SEQ ID NO: 224479 - DNA, 274 bp, Homo sapiens
  chr12:124017709-124017983
  hyper
ccgccgcccaccttctggtgcttgcgctccttctcgatgcggtccatcctctccaggcgcaggcggtccagctccaggcgcagctcgtccagctcgggcgcgacgtggtggcggctgaccagcacctccaggatctccaggacgcgcacgaccttgggcatgaggcgcgcgatggcctcgcagccgtgctggtcaatgacccgctcgaactcgtggcccacaagcgacgcgatgtcgtacacgtccatgacggtcagctcggccacgttcttct

SEQ ID NO: 224480 - DNA, 290 bp, Homo sapiens
  chr12:126018012-126018302
  hyper
atgttcctaaacgcttgttttccctttgcatagctgattgcagagcccagcaagtctttctctaaatggctttactttgacaaggggtcgcgatggcattttgattggcatccgcctctcctccggggaaggacctcgtgggcgatggtcctggcgcacccgctagatggcgccgcagaccggcttgtacaggccgcgcgccctcccctccccggcggaggctcctggagcccctgcccggcctgactggctgcgtcctcaggccctgcgatttccagggattcccgatt

SEQ ID NO: 224481 - DNA, 180 bp, Homo sapiens
  chr12:128751069-128751249
  hyper
ctgtgatctcgtgcctcgccccctccgcacacgcacaggtgcacacccgcatctgtcttgagcccgcaccccgccttcacgctccgctgcgcgctgcttttccgcgctcagtgatccagttaggagctctccccgcagcagctgcgcgggactttgcattccagatgtccccagccctcc

SEQ ID NO: 224482 - DNA, 780 bp, Homo sapiens
  chr12:128751292-128752072
  hyper
cgaccaccaggtcccgcagtgaccacgggagggtggggagaaggagtccagctccgccttgagcgtcgggtccctgggcaggaccctccgggccacgggccgctgtccgttgggcacccgggcaggagtctgcgaacgctgagtttctctggaaaggcgcggacccccggaggagccgtcccagccgcctggggagacgccccctcctctcccggtcttctttcccgggcacaccctccctagcccgggcgggggggttctccatctgccgcccctcccggcgggcaggcgaactctctcctaccgcaccctcaatctgtccgcggtcgcggggctcggcgggggcggggcccgggcgggggcgggggcggggccgggggcggggcgggccggcggctgcggaggctgcggaggctgcgggagaaaagttgtcccggccggagcgcgagcagcggcggagccggagccgccagagccagagccggagctgcggcggcgtggacccggcaggggcgggcctcggacagcagagacgcagcgggcccggccgaccgggctgcgggagtggccccgggcatggggcggccggcgggggccgcgggcgggcgctgcgcttcgggctggcggcgggctgcgtgagcggccgggacgcaggatgcgctccgagggtgcggcccccgggccggcggcgccgctgtgcggggcgctgagcctgctgctgggcgcgctgctgggcaaaggtaaggccggggcgggtgcctggcgcgccgacgcatgcga

SEQ ID NO: 224483 - DNA, 180 bp, Homo sapiens
  chr12:128752126-128752306
  hyper
cgggggcctcggcgggggctcggatcccatcaacagcgcctctgcgggtgccgagccgcccctaatccagaagggcgctcccagctgggcgccgggatccgggcaagttaggctggtcccgagtcccgaatctcccaccccggaccccccagacccagagctgccccgcggatgaggagg

SEQ ID NO: 224484 - DNA, 804 bp, Homo sapiens
  chr12:129337895-129338699
  hyper
acggggcacacccgcgccaccccgcacccagggctcgcgccgcccgaggcccccggttcctgtccccctccccgcctggcgccggaacctgcgagctggggcgcggcctcggggaggggcgggcgggacagacccagccgccccggctcccccgccgtccgcgtctgcgccggccccggggcctggtcggcggcggcggggccggtcgatggcccgggcggcggcggcggcatgcggctcctgttcctggcggtgctgcggccacacaccggcaacgcggtcacggcccagcgcgttcggtaggtgcagggcgccggggcctacgaagcctgggccgggggccggggggcggggacgcgggacccggggacgcggggcgctcagccaggccccctccagccgcgccggggccgtcccgagccgcgcgcacaaacggatgggccggtgccgcctgccgggcgcgcgggggtcggtgccttctgcgtggcgcgcgtgtccccgggtctccgtgcggccggcgcattggcctcgcgctctccggaggggactgagcaggtgaacaggcccggagcctgtcgtggaggggcccgggaaggcctcgctgcagaagcaggatgggagcaggatccgcagggatgcgcagcggggtccgcggagctcccggcgggggcgcgtttccaggccggggaccgcggtgccagccctgccctcgcggatcgggtctcggctgtgtgccggcgtccggggtcctgtccccgaagtccctttcccacctcccctctgccctgtctattctcgtcttcc

SEQ ID NO: 224485 - DNA, 104 bp, Homo sapiens
  chr12:129338740-129338844
  hyper
tcttatttgtttacttgttggtctgtgttctggtcgctggaacgcaagcccggcgggggcccggggaggggccgccgcgttaatcccgccgcctcccacccgca

SEQ ID NO: 224486 - DNA, 600 bp, Homo sapiens
  chr12:130645405-130646005
  hyper
gtggagcgccgccaacgcgggaagccccagcactgcctccaaagatgtccgcacactccaccctgctccctggaactatcctcaaacgggcagggggcaagcgaggccggtggacgcgggactcgctcctctgacctctccccggccccccgggaggtagcgggagattgcacacgcgatcctgcgagtttccgaactttggaagatcgtgacccggagagaccctgggaggagagggccggccacctcctaggggtgctgtttttttaagggtcaacccaggacgctacgggaagcacctggcgcatccttgggaacagtggggcttggcggtgggcgcccaccgcgaacgccctgggcgggggaagggaatggcggggggacgtcgtgtcctaagtgaccccgtcacagacccgccccaatccgaggggggatgagctcagaggacctgcccaggacgctccttctccactttccaggaaaaccgagcggcgtgcgcgcctccgtgtcctcgcgggagctgggggtccccgggcaggcgctgacgcgctcctcccacgacccactccatcccaccctactccgggtcctcctgcgggg

SEQ ID NO: 224487 - DNA, 300 bp, Homo sapiens
  chr12:130646508-130646808
  hyper
taaaaggaagagaagatgcaccccgcgcccctcgccgcggaccacccccaaaccccttctcccgccagtccccgaacttcccgtaacctcggcgtcctcggggtgccggggaccatcccggggaccgccgggaaagggggcgccggcggagaggatagcgagaggcaaagttggaggccaggcagagagagggcgaggagaggcgggcgggactgccggggagggtcgcagcgcgcagagccccgcgcgccaggcgggctgtcccggggctggcgggcgacgcgggcgggactaggcgct

SEQ ID NO: 224488 - DNA, 660 bp, Homo sapiens
  chr12:130646869-130647529
  hyper
cgcggcggggcggcggggaggaggctgccccgggccgctgcgctttctcatgcaaagcagcggcggggcggggcgcgcggcccgggggcggggcctgtcagcgctcggcttttctgcccccctttgcctttttgcgagtcttctcatcccgggacgcaaacctcgaaacagctgccggctggtcccggccgaggccggcgcagggagggaggagccgcccgggctgtgggggcgccgcgagctgggccggcctcggtgtgcccgcgccgccagcccgctccagacgcgccacctgggcgctccaagaagaggccgaagtttgccgcggccgtgagttggagctcgcgccgggccgctgcgccgggagctccgggggcttccctcgcttcccggtattgtttgcaaactttgctgctctccgccgcggcccccaactcggcggacgccgggcgcggagagccgagccgggggcgctgtgcgcagcgctcgggccaggccgggcgggcatgggcgggggcccgagcaggggtggagagccggggccagcagcagcccgtgcccgggagcggcggcgctgaggggcgcggagctccccgcgaggacacgtccaacgccagcatgcagcgcccgggcccccgcctgtggctggtcctgcaggtg

SEQ ID NO: 224489 - DNA, 402 bp, Homo sapiens
  chr12:132312446-132312848
  hyper
aggcccgcagggaccgcagagcctccgccgaggaccccagcccccccaacacccgccctcgccctccagtcccccgcgccccccaagccccaccctccctctcccgcggtccgcgggctccaccaagcgcccacctgctgcgctgcggcggcggctccggggcctgaacccgggtctgaacccgggcctcggcgccgtggggggtggacccgggagcgcggccggagaggggagtcagggtcagctccccgcaggcgccccgacccccgcctccgcgcccatcccgcgcgtccccgccgccccaagagcgtcctaagacacccggggaaacgccttccctgtgatgccgcggacccagtcccgtcgcggacacggcggggcgggcgggggtggcagcgtccg

SEQ ID NO: 224490 - DNA, 37 bp, Homo sapiens; identical to SEQ ID NO: 203262
  chr12:132380828-132380865
  hyper

SEQ ID NO: 224491 - DNA, 50 bp, Homo sapiens
  chr12:132480346-132480396
  hyper
gtgaacgaatcccaccgcagcttgactgaatgtgccgttcatcctgagtg

SEQ ID NO: 224492 - DNA, 400 bp, Homo sapiens
  chr12:133286719-133287119
  hyper
ggcaacagggcaagcgtccagcaatgggtaagcggtggggtcggtgcacgcaggcgtccagcaatgggtaagcggtggggtcggtccacccagggagcgctggtccccctggaaggaaacccaggctctaacgcggtccctctgaggaccctgctaggcgaaacgcgccggccatagaaagactgtcccgcaggagagggcggtgttcggcccggggtttgaggggtcgggaccaggaggagggacagcccggccgaacctgaacgcacttcaggccgcttgaacagcacacgcaggaactgcgccgacggaaaactttacttcgtgttccgccaccaaaaaaatatcgtttaaacaaacctgcggcagcttcccagctcccttaaaccaggatcccaag

SEQ ID NO: 224493 - DNA, 180 bp, Homo sapiens
  chr12:133464270-133464450
  hyper
cggcagctaaagcggagccgggagtggcccgcgagagtaggcgcgtggagggcgctcggccatctttgatcctgaccaggcgacttcgtcgcctgcggatcacggaagtggctgcggtcggcgccatgttatgttggggcagaagggacggggaacttccggattggaagccccaaggat

SEQ ID NO: 224494 - DNA, 316 bp, Homo sapiens
  chr12:133464562-133464878
  hyper
atcacacagatccgaagtctgaggcacagggcgcggtccgcgagtgggagcggctgcttgtgggcagggtggacgcggggccacgtcttggccggcgttttgcggggtcttcctgttctgaacgcgcgtaacttttgcctcagtatctcacttcttggaatccggcggcgttcacgtgtgtgctccagagaagggcgccagagggtattccctgaaagtgaaaggtcggcgaaagaggagtaaagacggcgagacgcgtccacgcagggggagtctgtgcggtttggaggaacgcgccaatgtctgcactcatgag

SEQ ID NO: 224495 - DNA, 242 bp, Homo sapiens
  chr12:133481375-133481617
  hyper
ttcctcaccgaagacgcggcctcaagtcatccccaagccggggctcctgggtggcttctcaggaagccaagctccctcaccctgtggcgacgccgcgggcggaatgcgcatgcgcgccacgagccacaatcgtagggttgggcgcgccctgccggccaccaggggcagcgcaggagctgagcgcaccccatcagcgaaagaagcgcgcctccccgctcttttctgaaccgtatctcctaaac

SEQ ID NO: 224496 - DNA, 1140 bp, Homo sapiens
  chr12:133484732-133485872
  hyper
ctcgccgtcacgagtagatgaacacatttaaagtttgtagttaagaggaaaacaacgccaacgacacaaatgccccaagcgctggatgaagcagcgacctaggatggggctggcctggaacgggaaccaagacgcccgcccggacgaaaacgagcagggaaacccgggccggggtcggccgccccacacgacgcactgcgcagagaccacgcggctccgggtctcgcctgcgccggcgcatccctcgcagacgcgctcctcccacgcgagggccccttccccgaagcgcacgcctaagactgcgcgccgcagcccgccctgtctagctgaggcgcagacccggatgggtcccagaggggcgggtcggggcggagagccgcgcccaaaggcaatgggagccgcacgctgctaggcaacatgctgtctcccggcaacgtagaggcggggaattcgccaacgtgtctgaaacagacaacaattttagccaacggctgcgtgggccttgggcgtcctggccaatgggaatagtgaggggcctgtcactaagaaacctgtccctgagcaacgcataggaggggtggaacccagcagcgctgactgagccgccgcgaagtgccggaacgtattacctgggagccaaatttcagagcgtcgtttgtcttcccaagcccaccagctttcagcgttctccagcctcgccacacccccgcctcgggccgtccccgcccagacgcttgtccccgcgagaagctgagcgcactgaagtgagcccggcggctgccgccggaggaggagcccggctctggacacggccgtcaggaagctcagaggctgcagcaccgcttctgcgttgatttccgcttgacttttactcttttcttgggttaaaaatcaaacgccgacccgaggcgtcagagatgggcggtcgttaggcgcagtggcggcccccggatgtttgcgatgggacggcgggctcggaacgtgtggacgtgggctttggaggtgcgagccccattgggccagggctgggtccgggcagtggtacggggtctcagctgtccgtcacaggagatgtgcaggcctcgtcatctggggtcttacgtgtcagtgatgtggggtctgccgggtcagtgagggggt

SEQ ID NO: 224497 - DNA, 201 bp, Homo sapiens
  chr12:133706815-133707016
  hyper
tcctcagtgcctgcctccaggcgtccgcggtcccgcccgagggggacgcgaggccgaactacgtttcccaggagctcctgcgccgccccgcagaggggcctggtctgtgcgtcacggacgcgctctgggccgaaggcccgcagggtccggcacagagtggcggctgcggcgccggcgacgaatcgccggctctagggtccc

SEQ ID NO: 224498 - DNA, 810 bp, Homo sapiens
  chr13:20735313-20736123
  hyper
tacgcgcagccacagcactcgcccgcgtccgcattccacaccctaccccgcgcgcacgtccatgcctagcgcctgcatccccatcccgcacctgcgcgggccctggggatgtggacgcgggggctcttccctgccgcctacgcactccggggcatgcccgcgcgggacgtgagaggagagccgagggctgttggggcgggcccgacccgcttgcggggcgcccaccgcacgcagatgcgccagcccgcgccccgctcgcgcctgtcctgggcttcgcaggcccggcgaggtagctgctctccgggcgctcccacggtcggaggcgcgtgggcgtcgggcacctaggtctcgcccgcctgcagccgcctggggacgcgggttccggacggctggcgcggggcggggcggggaccaccgagcaggaagtccccgcggaagcgccgccgggcacagcgtgggtgctgtcgaggagtggcgcccgggcggggcgggaggttataaatagcggccgccatcctgcttctcttcagacacacttaatttagccggcaggcacacggatgcttatttttaaaaaaagaacttgttttattgcgctcgaggtgaccgggaaggtgtccccgcgggtcactcgctccatctggtcctggagacgagatgccagggcgaggcctaacctgcctgctggcgcccaacgaagattttaacgttttctgttcccttcggggtggttttaccacgcttgagagggacgcctaccgcggaaggccgcggaccgagggcggcatcgcgtccttgtctgctgtctgg

SEQ ID NO: 224499 - DNA, 240 bp, Homo sapiens
  chr13:20766700-20766940
  hyper
gtgccatcgcgtccacttccccggccgccccattccagctccggagctcggccgcagaaacgcccgctccagaaggcggcccccgccccccggcccaaggacgtgtgttggtccagccccccggttccccgagacccacgcggccgggcaaccgctctgggtctcgcggtccctccccgcgccaggttcctggccgggcagtccggggccggcgggctcacctgcgtcgggaggaagcgc

SEQ ID NO: 224500 - DNA, 420 bp, Homo sapiens
  chr13:21099646-21100066
  hyper
gcaacgctggctcccgggaagcagacccaactccgcggggcgcctccacctgccaagcccctccagccgcgcctctccccgagcccgccagcgccgtaggggccgcagggcgcagggcttcggaggaccggaggccggggcggggacagcgacccggcgcccaccccgagggccccacgcgagggcaccacgtccccggcgtctccccgggctccaggggcagcagcgcggctcggagccctttacctgccaacgatcaccacgcagccggccgcggaggacgccatggttgggccggggacgcggcgccgcgggcgctgggaccaggcgccggcggagctgcgagctctgggctccggggagggcgggtcccgcgcccattggctgcgcgcgcggaccgggagggcggggagggccgct

SEQ ID NO: 224501 - DNA, 105 bp, Homo sapiens
  chr13:21141668-21141773
  hyper
cgggcgtcgctgaccgcttggcgatgtcccaagtcccagtcacgcctgacggggaaacttaaaacccagttagattactgcgccagctctggaatcgcacagcag

SEQ ID NO: 224502 - DNA, 240 bp, Homo sapiens
  chr13:21635643-21635883
  hyper
cttcccggggcgctcacgccgcggttccaaagcgcagacccaagtgggacattcgctacattgttggcattccacgggcgtcacgtgaccccgcctcccgcgtcactctcggccgcataccagtccgggcggggcgcctgcggcccctgctcctccgcggccgctccgcccagccccgcccggccgtgcttcctgcctccggcctcgaccgccacctgcccacggcctccctgctggcct

SEQ ID NO: 224503 - DNA, 360 bp, Homo sapiens
  chr13:22243584-22243944
  hyper
tccttcctcctcgcccgggccggagcacgccttcctccccggagggcaggggaaggtcgctccaggtcgctggcacctccagcgcccccgaaatctgcaaattcatcgctccctttcgtcttcaggcgaagccctcccgtccggagtagggccagccccagttatgcatctccagcctttagctgactactaaggcggatccgacttctcccccataaccaggttttgattcgcttccccaccgcaggggttcagtctctgctttcgactttgcttctcagttgcacgccccgcagtgtggagctgcgctcaagtctcggcaactttcaccatcttgacccgagagtcgggccgtttcta

SEQ ID NO: 224504 - DNA, 179 bp, Homo sapiens
  chr13:22244074-22244253
  hyper
gccgccactggggatccgggcgcaggcaggctgtcccgggcgcagagcgcgccgcctccagtctctctggcgggcccggcccggcagggcccctggcggcccccggaggcgggtttctttgtccctgactcccgctgggcgcgaaggccgccggcggctaacagaaacccgagcccgcg

SEQ ID NO: 224505 - DNA, 273 bp, Homo sapiens
  chr13:22245126-22245399
  hyper
gcgggcagtaagccgggcgctaggaccgcggggagcccgggctgcggcggcgctaccttaaacccagcccaatgccgctgcctgcgccactctgcgcgccggcgggggctgcgcaggaggagcgctccgcccggctacaacgctccgcgagccggcgcggcaacacctgttcgcggcagcctgggcggcacgcgagctcccggacgcggctctcctcgctcgccgctcgccacccgttctaagccaatggacatctgccgagcctctggagaa

SEQ ID NO: 224506 - DNA, 96 bp, Homo sapiens; identical to SEQ ID NO: 203283
  chr13:22247845-22247941
  hyper

SEQ ID NO: 224507 - DNA, 180 bp, Homo sapiens
  chr13:23733916-23734096
  hyper
gcgcaggggtgcgtgggtgggtgcggaaggagtgcagggtatggaggggaatcttggggcggcgcgaaggaggagcgcttggaaaggcgcggtgtttggtcacagaggggctcggagtgggagtgcaggggtgcggggagggagtgcagggacgcggggagggagtggaggggtggggac

SEQ ID NO: 224508 - DNA, 652 bp, Homo sapiens
  chr13:23734184-23734836
  hyper
ggggaatatgtgaaggagtgctatgttggaacttggaggggaggggggatgctggagaggcacacggtgatggacatggaaggacccgggaggtgtggagtggtgggcccggcccgtcgcgggaaggacacagagggacataggctgccctggagaggcgctttcggacatctggaggggcgcatagtgctgggacttggcggcgcctggggcggaggggcgcgccggatccagccgggcgcgctcgggggccgggcgcagtgggagttgacgggcgtccagccggcggcgccctgggctcggctaggcgcaggacggccctggcagcggtgcagcagcccaggctagttcctggggggtccctggtccccgcctccccgcgcgccccggccagcaccgcccggagtccgggcggggaagtgggcgcccgcggcttgggaagctgctcccccgccctggagcagagtcgtcgctgcggtcgctgaggaaggacggagcagaggcccgcgctgtctggggagaagactgtggtgtcatcccgtcgggaatgaagggaaatgcagcggctgtttgcgccccgggactccaagaagtacagcaggtaaagagaatagccacggcccgccacttcgccttcagttcccccaattcc

SEQ ID NO: 224509 - DNA, 240 bp, Homo sapiens
  chr13:24040524-24040764
  hyper
cgctacccagcccgctaggctgcgcagctgcgtctgcgggcggggagccggggcggccgtgggcttcctccgggcgcgggctgacggctgccgcctgtgggcgccccagccctgcagccgagcgggaggggcggaccagcgggtgtcgggagcaggctgcagcggccaggcctctgcggcttctcggagtactgggtccactggagagcgaagagccgcggccgccaggattcccagcag

SEQ ID NO: 224510 - DNA, 420 bp, Homo sapiens
  chr13:24734780-24735200
  hyper
ggcctgatatggggcggggggaagagccgggctgggggcgtggcctggtggggagcggggctggggcgtggcttggctgagtgtgctgccgcggcgcgggaggagagtgtgcgttgcgctttctcccgcgatcgccctgccggtcgctagctccgagggcgcgcactggatcccaggctcctccgagagtgcggcgacctcggggctccgccggcaccggaggtggctctgagggcagggacgtgttggacacgctgactttgtaggctccgccaagaggcgccgcaggaggtaagacggcttcgggcgcgcggctctgccgggcgggcgcgggcatgggctgttaggtagaatatcgggaggatttgagtcccagtggactgcctcggggcttcgggatgtccagctcccagctgcttg

SEQ ID NO: 224511 - DNA, 240 bp, Homo sapiens
  chr13:24735313-24735553
  hyper
tttgggaggacatgcacgtggtgttctcgcaaaaggccgtttccagccggaagcctgcagggaggtcgccttgtaacttcacccgcgctcccagctcgcggggcctggcctacaggggcggccgtgggggtggcagagtctggggagcctggcgcggcggagccctgtaacgctctgctccatcgggtggcgtggctggtgcctccggggacccggagcgatgcggttggagagcttagt

SEQ ID NO: 224512 - DNA, 626 bp, Homo sapiens
  chr13:25321642-25322268
  hyper
tatggcttgaggaggtgacactgtgtcgacgtgcgtttgaagggaggacggctgaaggtacatgcagtctcccggacgtcacaaactccgcggacgcgggtcacacccgcgcgcacgcgcagcaggggtcttagccacacaggcgcacggcggggcacggcggggcacgggccctgctgcaaacgggcgcgctcccttctgggcaagcaggtgcgaggcgcgcgccatggaacagcccttagctgagtttcggtttgcgcgcaaacggccggcctggccgcccaacgcagcatttccagccagggcgcacaaacctcgggagagaaggtggaagccgcaggggctctaaaggcagccccaggttggctaaagcggttcctggtacggacaccaaggcccccgtgctcgggccctacccagcctggttcaggtgagaggaggcaagcctcggcccggtaccggcgtcggaaccacagtcgggcctggccctgctgccggggcggggctgctggacttccctcccgctccgggctggacctgacatctgtctctcgcatccgcactgatccgagctttaacattttctttccagcccgcgaaccacgcagctccggactccaggcagg

SEQ ID NO: 224513 - DNA, 1381 bp, Homo sapiens
  chr13:25744683-25746064
  hyper
cgacgggtctgagggtggatcgacagaggcagggtctggggcggcgggcgcccggccgctgccgccttcggagtcgacaagggggaccgtctttacgggaacggcccccgtcctggaagcgtcctctgccgtgcggacctccccgggccccggctcggcgcgccgatgccccgcggcgtcctctccccgggcgccggtgtcgccggggtgcgcgaggccctctgcctctcggcagctccgcgctggggcgcggtcggcgggggcgggcacctcctctccccctgcgggctcacctgctgggtctcgcggggcgtcctggctgggctcctccggctcgcgcgcggctctgggcgtctcctccttgacgcactccaggctggcggtgagcgagccgggtaggatcaagccgcccccgggcgcgcgcccctccgcggcctccgccttggcccgcttgtctttcctgtgccagcgcatgccgctgaacagcccccgcagcccccgcttttgtttgccgccggccttgctcgcgtccacaggctctcccttgccgttttccgagcgcccgttcttcttcagcagcgagaagaagctgtgcgacttggccaccgagctgctggcgagggagcccccgccgggccctgcggctctggggggccccgggttcggccgccccccgccgcccccgccgctgtcgcccccgccgcgcggctcctccttcctgccgctctccagcaccagcacctcggcaagtccgtcgtgggtcctgctcctcaccagccccgtcggacccgagcttttcccgtcccctttgtttttgaccccaaaaatgctgggcatggtgccacccgatttcctcttcttgaataatttgaaggcagctttattaatcttccccgacggcggctcggcggccggcgtttcggcggcacagtcacaatgcaagtccatgtctgccgcgagggtcccggtcccggccccggcctccgccttcctcctgcagacccccacggacgcgccagctccgccgcgctcgctgacagccccgccgccgccgcggctccggctcgtctccatggaaaccgcgcgggataagccgctttcgtcagcagtgggctcgcgccaggccactgtcacccgtattctaaatcaacctgagccgcgctcgccgccgccgctgcaaaagaaacacacataaaagaccatcttccctcccgcaagggcttatataataccctaacccacttccatccgacttggctcggcgctgcatggcgtttttgtggcaggagcaggcaacacagccgcgagctgattgcagaaattcgagtcgtaattatggaattcaaattccctcaactctcacccaccttcggattccttc

SEQ ID NO: 224514 - DNA, 877 bp, Homo sapiens
  chr13:25946074-25946951
  hyper
ggggctccgctcagggccggtcccccgcccccacgccgcagcccgggccagcggggcccgccgcggtggcgttcgcggatgctgccgcattggccgctgcggcacggacggcgcagcctcgggcgcggcccggcacaggcgccggcggtccccgccagctagcagcccggcgaggcgctggcccacccatggtcctcgggcggcggcccctgcgcccagccctgcgcgtagcctccgtctctcgcccggggccgccgagcccccgacacgggcgagatgctgaacggcgcaggcctggacaaagctcttaagatgtccctgccgcggaggtcgaggatccgctcgtccgtgggtgagctgggaggggcgcggcgagggagggtgggcccggggcgggggcggcgcggggcgcgcctgcggttatgcgacactgccccgcccgcgccccgctcccctccctgggctccctgggctctctgggctgcaggatccgccgacgcggcgcgctggccgcacgggggctgggcgtcgctgcacctgcggggccaaaaggctccaggccggggcgaggtgagcggcgggcgtcagagacccccggctcgtccctgtacagatgtgtgtgtgtgtgtgcggcctccctgtgcgcgtgcccgtgcgcccctacgcgcggatgcggctcagggatgcgacctaggcggcagtcaccgcgatggtgggcacggtttggcggcgcagagaagatgcagccttccctgccggcggccggcaccgctgtgctgcagagctcaaaagcagagggggaaaaaggcatccgaagggtccctcgagtgattctcaccacttggagccccgggtcctcgcgcgctcacagcggcga

SEQ ID NO: 224515 - DNA, 448 bp, Homo sapiens
  chr13:26042694-26043142
  hyper
gggactagagggtacgctcggccagatggctgggggtgccgctggccttggcgcccccgccgtccccgcgcggtcgcccaccccggcccgacaagcagcttgggcgtccagcccggcccggtccctgcagggagggagcgcaggagctgggggcggctctcccggggcggggctcgctccacaagcgccaggggccgcgcggggcgtgggcgtgggcggggccgggggcggggccggccttggctgccgcggcacaggcggcggcgtctccagggggagccaaggtacgtaggcggcgtccgcctcacccgagcatccttccccgccggtggccgcccgcccgcggcccgcgctcgcagcctcccgcctggcggttgacttctttgtgtcgtattctctgcctgcgccctgtctctgcaggacctgttcgttcttctttgggctataa

SEQ ID NO: 224516 - DNA, 180 bp, Homo sapiens
  chr13:26043192-26043372
  hyper
aggcacccgcccgcaccatttacctcaaccaaccgcatctcaacaaattccgcgacaaccagatcaggtaggagaaggcggccggctcgcgcggaaggcggtggagtcacagctgggaaggggctcgtcctcctgcgcggggcttggccgcgcacctggccggcccccgtccatctcccc

SEQ ID NO: 224517 - DNA, 180 bp, Homo sapiens
  chr13:26625398-26625578
  hyper
ggctgtcgtccggaagcctctggaggtttcactggcaaccggaccctccctgagcatccccgaagggatgctcactcgagccgaatgaccgctgggcgcgccgccgcggacctggagccagggctctgcgcagggtttaagcctcagggtcccgcgcgcgaatcagggcccgtctcccct

SEQ ID NO: 224518 - DNA, 180 bp, Homo sapiens
  chr13:26625655-26625835
  hyper
gccggccgcgctcagcctcctctgccccgaacttggtccgcatggctccggccgggccgcccgggcagcccacgggggtgcagccccgacgctccactcggcggggccgacggccaatcttcccagcacgtcgccgagggagcgctcctgaccccgggaacgtccaggacgcaggcgagg

SEQ ID NO: 224519 - DNA, 420 bp, Homo sapiens
  chr13:26625885-26626305
  hyper
gccgcggctgctgctgggcgcggatccaggcgggcggctcgccccggttccccttctccgcctccccggctgcagcgcggtcccacaggagcccggcagcctccggccggctctccctctcccggtcgctgcctcgccctcgggaggtgtgcgcaccgatggaagcctcccacggaagtttctttcctccgggctacgggagaagccgagcgcagcagccgcccacagcctcgcctcgccccgcccggcgccagaccagctccgactccgctcgctgccgcgctgagccgcgctcttatagaggccggcggctccccggcgcgcatgcgcgctgcgcggctcccccccacccccgacctcagggacgcccgcgggcgccgggcagcccctcactttcctaccccgggcaaggagaaaggt

SEQ ID NO: 224520 - DNA, 835 bp, Homo sapiens
  chr13:27334206-27335041
  hyper
gtaggacttcaaaacaccagcgtgagcgaggcaggcacacacggactcgcggcggtctgtttgcaacagcgctgggaatgcacattggaaaatcacatcttgcatgctgaaaacgaacaactgtttgacatctgggctgctgccgagaaaaccacgcggcagcggcaggtctcgagccaggggccgccatcctcgatggaatatttaaatcgcctatttccatcgaactcccaccctccaaacgcatcccccgcgcgcgtgcacatcctcaaacgcacccccgaccggaacaaagaggggctccagactccccccgtgcgcacggggcagtcgggagggccacgagagggaggtgtgtgcaatggaagtaccgagacagacagacagacagatgcccatgcactgctgccgattccctggcggcggggacgggagtcggacgcgagggggacagacagggtgcggggacaggcggcccgcgggggcgggggggtcatcgagggggtcaccttggctcgcccaggccgagggggctcctccggtgcttccgaagcgcgtgggctactcgtgtcgcatgtcggcgcagttgcccgctgtggcaaggggggggcggccgggctccggagcgggccgggagggcgcggggcgcgcactccgcggcaggtgagcggcgcggctgcaggtgagcagcagcctcggctcgcgcgcccagctttccccgccgcgcccgcccggcccacacgctccccgcgcgcgcgccgcccccgccccgcgcgcgcccggccgcccgcccgcccgcgggatccccgcgaggccgcgcgcccccacgggtcag

SEQ ID NO: 224521 - DNA, 275 bp, Homo sapiens; identical to SEQ ID NO: 203294
  chr13:27744759-27745034
  hyper

SEQ ID NO: 224522 - DNA, 106 bp, Homo sapiens
  chr13:28493981-28494087
  hyper
ttggaacaaaagcaggtgctcgcgggtacctgggcctagcctcttagtgcggccagccaggccaatcacggcccccggctgaaccacgtggggccccgcggagcct

SEQ ID NO: 224523 - DNA, 660 bp, Homo sapiens
  chr13:28552051-28552711
  hyper
cgcgtgcgcgtgtgggtgggcggacaaaaggactcattactcgtatgattgcctcaattctccacttcctttgtgcacgtgtgtggacgctgttccaggcccgagtccgcctcccgcccaggacgcacagctccgggccgtggcccccgcgcgtccggttgtgcgtcccgggtccctggcccgcgcggcagctacagcttggcggggtctgcgcggaggaggtcggccaggcgcaggctgccgatcttcttcacctcgcccagagcagtgcgcagctcctgcgcggacgggcagagcagccggcgcgccagctcgcgcggcaccgccgtccggtcgctgaagcgcgcggcgagcacgaaggggaaaccgaagcgcgcgcggtactgcgcgttgagctcggccagccgcagccgctcgtccgcgcccaggctcctcaggcctgcgccgctctgttcccgctgcgactcggccgtgagcgtgccccgctgcagctcgctgcccgccaggtccgggtggcagcgcaggatgccctcctggcctgcggagaagcacagacaccggcgggagcgcgtcaaccgcgcccgtcccgcaccgcgcactcgagggggcgcgtaggccgcgcccggcccccctgccccgccccgccccgcccggccccaa

SEQ ID NO: 224524 - DNA, 66 bp, Homo sapiens
  chr13:28592626-28592692
  hyper
aatcactcatgatatctcgagccaatccaaagtcacatatcttcaccactttcccgtgggtgacaa

SEQ ID NO: 224525 - DNA, 499 bp, Homo sapiens
  chr13:28608023-28608522
  hyper
ctttcagcattttgacggcaacctggattgagactcctgttttgctaattccataagctgttgcgttcatcacttttccaaaagcacctgatcctagtaccttccctgcaaagacaaatggtgagtacgtgcattttaaagattttccaatggaaaagaaatgctgcagaaacatttggcacattccattcttaccaaactctaaattttctcttggaaactcccatttgagatcatattcatattctctgaaatcaacgtagaagtactcattatctgaggagccggtcacctgtaccatctgtagctggctttcatacctaaattgcttcagagatgaaatgatgagtcagttaggaataggcagttctgcagatagaggaaagaataatgaatttttacctttgcttttacctttttgtacttgtgacaaattagcagggttaaaacgacaatgaagaggagacaaacaccaattgttgcatagaatgagatgttg

SEQ ID NO: 224526 - DNA, 106 bp, Homo sapiens; identical to SEQ ID NO: 203314
  chr13:28636040-28636146
  hyper

SEQ ID NO: 224527 - DNA, 1093 bp, Homo sapiens
  chr13:28674057-28675150
  hyper
gggctggggggtatcgttattgaggatgactcgctctaggggagaacgcggacgcattttcccatcagagttccctccataaatcaaaacctcaaaagaagagttaaagacgacacccaggtgtctacagtatccaagggccgggccaggagaggtccttggccacctggcgccgagttcgcggccgcagactcccacggacggcccagcacccgagcgcgcgggccgagctgccccagacccggcgcagcgcctcggcgaggccgtctgcgaagtccgggccgccactcgggaccgcggcccgagccagaggagagacttcggagaagagggaagaggacgcggggtgggaaacgccggggccgcaggcaagtagtgggcgagtccggagggcgcgaaagaggggaggggcgcgggaggcaatggaaggagcgagcgcggggaggagcgaggcggctgggccggaggaggcgcgcgcccgggtccacactgcggggtgggggctgagggaccgcgaggggctgcgagcgagcgagcggggccttaccgagcagcggcagctggccgccgtcgcgcgccaacgccggcatggcctccggagcccggggtccccaggccgcgccggcccagccctgcgatgccgcctggagcggcgcgcctcgcgctgcaggtggctctcttaaggatgcgcgtcaccgaccgcaaattccctcggactggtgcaaagtggaaggggggaggaaccctctccccagaggcagggaccgaggcgggagcggagaggttgggcagagccgagcagccggtgcctggcgcagcgctgcagccgagcccacgtgcccgccgcggtccgcagcctgtgctcggcggcccccggggctccccgactgcggcggggaagattgggcgcggtcccgccggagaagttgcactggctccgcggctctgccgccttgctgcccctgtgagtccccgaactctgtcgtttggatccggggcgtggggactgcagggagccacaaaccaccctcctagtgcgctgggatctttgaggccctgagaaaggcgctgaatccgctcggcacgctggcaa

SEQ ID NO: 224528 - DNA, 300 bp, Homo sapiens
  chr13:29068070-29068370
  hyper
taaaggctaggcttgtaagtcagtaagttaacggtatttgggccctgggctgcccttgtgggtcagggtcactgatgtccgcgacacggactggaccgcgcaccacgcctgctcccggcagaggccccacccgggtggctgagcgcagcgcactggggccccgcggtccgagagcggcggggaggagcgggcgctcgccgagcgttccccgggacagtccggcttggggactcaagcgggtcatgggatgccggcgctggccctctcctgagatcctcctgctcccccgcaggcacgagt

SEQ ID NO: 224529 - DNA, 1075 bp, Homo sapiens
  chr13:29292471-29293546
  hyper
tatattgccaactgatttttcgtaagttcaacaatgaggttccttttgggaagcgacagttgcacaattgttattgttattttgctgcgtattaaaaacggacagggagggggcgttttaaaaagcagctcccaatcgaaagggccttatttttaactcaccccacgattacagtcttcctgccaggctgggtacaggtcgggccgtgccaggggctgtcgcctcggatgccctgcgctcgtgcgcgcccgggttcaagggcagcctctggactggggcaacagaggacgcgccggggacagtaacctcggactacgcggccggcgctggggtggggagagtactttcccgtcgaactcgaccaaattacgcttgtcggggagtctcaagcgtattgtaaagcaaacctcggcaagcgcacttccgcgtcccgagtgacacctgcagggttctccggcagccctcggcttccccgcggccctgcggacctcggcctcagcgcggcgcggcggggcgcggagcagctgctccttctgcgcagtggacaatcggccaatcggcgcctccgtcggtcggtcagcggccctgccagcgctaggcgatgactcggccgcagccagctgagcatcgctgtccgccgaggaggcggggtcggctgccgcggcgctgtcactgttctacccggctctcctgcgattgggcccagcggtcggtgccccagcggcgattggtccacccggacgtcactctcccctggagagtggctagtggatcgtgcacccaccctcggaggcccggagtggatcccgcgcgaccgagcagccactcagcaccgctgttgagtggtgggccgcgccgcaggctcaacagctctggagttgcaaagcatttctgaatccgaatatcctttctcatagaaacacataaaacaacagttggaaaagtaacatgtttgggctgtagcccccagcaggatcccggtcggcccgcagaagaggggaatgggcgcaggtggagggcataggaaagagagtgctcaatgcagagttagcggagggttggaatgtggtcgctg

SEQ ID NO: 224530 - DNA, 580 bp, Homo sapiens
  chr13:29394053-29394633
  hyper
cgcggggcgcggagcgcgggccgggaggaggcgcctgggtctcggcgagtgcgtctccgggcggccgggagggggtgcgcgcatcagctgccccgcgccgcctaccgctcgggcccgctcgccgcccggccactgtcaccgcggacggcacctcgcgggcgaggcgcgccggctgcgtggcgcgctgcgaaggttgggctgggcggccgccggccccgcggcttctctttgtccaggcgaggcggctggaggagcagccgcggccgcggcggagccgggagcgcctgggcgtcgtgcgggcggctccggtccccggctgcgccccggccctcgagcgggggcggcggcctgggcggtgcctgcgccgaggtgagtgcgggggcgcggagcggagcgcagccgcggcgcgggcgtgggcgggcagaggtgatagcgagcgccggcggctccaggtgcgggggcgcccctcgcgctccacctgcgccgccgccgccggctctcagggcaagtttatctccccccttctgcggaaacccttgaccgcttagcggagtacagacctgtcggtaaatagaaaact

SEQ ID NO: 224531 - DNA, 236 bp, Homo sapiens
  chr13:29394676-29394912
  hyper
gagatgagcgtctccgtgagggcagtggtggcctcttggacattacatctttcttggctctttttgacccaggtgagcgaatcctctgctgcgcggtccggtggggtcggctggctctgctgccgccctctggacccgccggagacaggtgagcggagttggggagcgcgcagccgggctcggggcagcgccgggctggttcggcttctcgtctccagagcgctgatgcttcctgc

SEQ ID NO: 224532 - DNA, 180 bp, Homo sapiens
  chr13:30982594-30982774
  hyper
ccggcaggtgtctctttcctggcttgggaacctattgtgagttcaccaaatggaggcgcgaggaggagggggcgggcaggggaggggcgccgagagccggagcgggcaccgccccctgcctgcccgctccccgagcgcaccgcggcccagccacgaggctgccggtcctcacctttgaaa

SEQ ID NO: 224533 - DNA, 274 bp, Homo sapiens
  chr13:32889530-32889804
  hyper
acccgcagcggcccacccaggcctgacttccgggtggtgcgtgtgctgcgtgtcgcgtcacggcgtcacgtggccagcgcgggcttgtggcgcgagcttctgaaactaggcggcagaggcggagccgctgtggcactgctgcgcctctgctgcgcctcgggtgtcttttgcggcggtgggtcgccgccgggagaagcgtgaggggacagatttgtgaccggcgcggtttttgtcagcttactccggccaaaaaagaactgcacctctggagcgg

SEQ ID NO: 224534 - DNA, 106 bp, Homo sapiens
  chr13:32890558-32890664
  hyper
acttatttaccaagcattggaggaatatcgtaggtaaaaatgcctattggatccaaagagaggccaacattttttgaaatttttaagacacgctgcaacaaagcag

SEQ ID NO: 224535 - DNA, 249 bp, Homo sapiens
  chr13:32893213-32893462
  hyper
atttaggaccaataagtcttaattggtttgaagaactttcttcagaagctccaccctataattctgaacctgcagaagaatctgaacataaaaacaacaattacgaaccaaacctatttaaaactccacaaaggaaaccatcttataatcagctggcttcaactccaataatattcaaagagcaagggctgactctgccgctgtaccaatctcctgtaaaagaattagataaattcaaattagacttag

SEQ ID NO: 224536 - DNA, 109 bp, Homo sapiens
  chr13:32899212-32899321
  hyper
gaaggaatgttcccaatagtagacataaaagtcttcgcacagtgaaaactaaaatggatcaagcagatgatgtttcctgtccacttctaaattcttgtcttagtgaaag

SEQ ID NO: 224537 - DNA, 182 bp, Homo sapiens
  chr13:32900237-32900419
  hyper
tcctgttgttctacaatgtacacatgtaacaccacaaagagataagtcaggtatgattaaaaacaatgctttttattcttagaatactagaaatgttaataaaaataaaacttaacaattttcccctttttttacccccagtggtatgtgggagtttgtttcatacaccaaagtttgtgaag

SEQ ID NO: 224538 - DNA, 115 bp, Homo sapiens
  chr13:32900635-32900750
  hyper
ggtcgtcagacaccaaaacatatttctgaaagtctaggagctgaggtggatcctgatatgtcttggtcaagttctttagctacaccacccacccttagttctactgtgctcatag

SEQ ID NO: 224539 - DNA, 50 bp, Homo sapiens
  chr13:32903579-32903629
  hyper
tcagaaatgaagaagcatctgaaactgtatttcctcatgatactactgct

SEQ ID NO: 224540 - DNA, 146 bp, Homo sapiens
  chr13:32905055-32905201
  hyper
aatgtgaaaagctatttttccaatcatgatgaaagtctgaagaaaaatgatagatttatcgcttctgtgacagacagtgaaaacacaaatcaaagagaagctgcaagtcatggtaagtcctctgtttagttgaactacaggttttt

SEQ ID NO: 224541 - DNA, 1116 bp, Homo sapiens
  chr13:32906408-32907524
  hyper
gatttggaaaaacatcagggaattcatttaaagtaaatagctgcaaagaccacattggaaagtcaatgccaaatgtcctagaagatgaagtatatgaaacagttgtagatacctctgaagaagatagtttttcattatgtttttctaaatgtagaacaaaaaatctacaaaaagtaagaactagcaagactaggaaaaaaattttccatgaagcaaacgctgatgaatgtgaaaaatctaaaaaccaagtgaaagaaaaatactcatttgtatctgaagtggaaccaaatgatactgatccattagattcaaatgtagcaaatcagaagccctttgagagtggaagtgacaaaatctccaaggaagttgtaccgtctttggcctgtgaatggtctcaactaaccctttcaggtctaaatggagcccagatggagaaaatacccctattgcatatttcttcatgtgaccaaaatatttcagaaaaagacctattagacacagagaacaaaagaaagaaagattttcttacttcagagaattctttgccacgtatttctagcctaccaaaatcagagaagccattaaatgaggaaacagtggtaaataagagagatgaagagcagcatcttgaatctcatacagactgcattcttgcagtaaagcaggcaatatctggaacttctccagtggcttcttcatttcagggtatcaaaaagtctatattcagaataagagaatcacctaaagagactttcaatgcaagtttttcaggtcatatgactgatccaaactttaaaaaagaaactgaagcctctgaaagtggactggaaatacatactgtttgctcacagaaggaggactccttatgtccaaatttaattgataatggaagctggccagccaccaccacacagaattctgtagctttgaagaatgcaggtttaatatccactttgaaaaagaaaacaaataagtttatttatgctatacatgatgaaacatcttataaaggaaaaaaaataccgaaagaccaaaaatcagaactaattaactgttcagcccagtttgaagcaaatgcttttgaagcaccacttacatttgcaaatgctgattcag

SEQ ID NO: 224542 - DNA, 4932 bp, Homo sapiens
  chr13:32910401-32915333
  hyper
gtttattgcattcttctgtgaaaagaagctgttcacagaatgattctgaagaaccaactttgtccttaactagctcttttgggacaattctgaggaaatgttctagaaatgaaacatgttctaataatacagtaatctctcaggatcttgattataaagaagcaaaatgtaataaggaaaaactacagttatttattaccccagaagctgattctctgtcatgcctgcaggaaggacagtgtgaaaatgatccaaaaagcaaaaaagtttcagatataaaagaagaggtcttggctgcagcatgtcacccagtacaacattcaaaagtggaatacagtgatactgactttcaatcccagaaaagtcttttatatgatcatgaaaatgccagcactcttattttaactcctacttccaaggatgttctgtcaaacctagtcatgatttctagaggcaaagaatcatacaaaatgtcagacaagctcaaaggtaacaattatgaatctgatgttgaattaaccaaaaatattcccatggaaaagaatcaagatgtatgtgctttaaatgaaaattataaaaacgttgagctgttgccacctgaaaaatacatgagagtagcatcaccttcaagaaaggtacaattcaaccaaaacacaaatctaagagtaatccaaaaaaatcaagaagaaactacttcaatttcaaaaataactgtcaatccagactctgaagaacttttctcagacaatgagaataattttgtcttccaagtagctaatgaaaggaataatcttgctttaggaaatactaaggaacttcatgaaacagacttgacttgtgtaaacgaacccattttcaagaactctaccatggttttatatggagacacaggtgataaacaagcaacccaagtgtcaattaaaaaagatttggtttatgttcttgcagaggagaacaaaaatagtgtaaagcagcatataaaaatgactctaggtcaagatttaaaatcggacatctccttgaatatagataaaataccagaaaaaaataatgattacatgaacaaatgggcaggactcttaggtccaatttcaaatcacagttttggaggtagcttcagaacagcttcaaataaggaaatcaagctctctgaacataacattaagaagagcaaaatgttcttcaaagatattgaagaacaatatcctactagtttagcttgtgttgaaattgtaaataccttggcattagataatcaaaagaaactgagcaagcctcagtcaattaatactgtatctgcacatttacagagtagtgtagttgtttctgattgtaaaaatagtcatataacccctcagatgttattttccaagcaggattttaattcaaaccataatttaacacctagccaaaaggcagaaattacagaactttctactatattagaagaatcaggaagtcagtttgaatttactcagtttagaaaaccaagctacatattgcagaagagtacatttgaagtgcctgaaaaccagatgactatcttaaagaccacttctgaggaatgcagagatgctgatcttcatgtcataatgaatgccccatcgattggtcaggtagacagcagcaagcaatttgaaggtacagttgaaattaaacggaagtttgctggcctgttgaaaaatgactgtaacaaaagtgcttctggttatttaacagatgaaaatgaagtggggtttaggggcttttattctgctcatggcacaaaactgaatgtttctactgaagctctgcaaaaagctgtgaaactgtttagtgatattgagaatattagtgaggaaacttctgcagaggtacatccaataagtttatcttcaagtaaatgtcatgattctgttgtttcaatgtttaagatagaaaatcataatgataaaactgtaagtgaaaaaaataataaatgccaactgatattacaaaataatattgaaatgactactggcacttttgttgaagaaattactgaaaattacaagagaaatactgaaaatgaagataacaaatatactgctgccagtagaaattctcataacttagaatttgatggcagtgattcaagtaaaaatgatactgtttgtattcataaagatgaaacggacttgctatttactgatcagcacaacatatgtcttaaattatctggccagtttatgaaggagggaaacactcagattaaagaagatttgtcagatttaacttttttggaagttgcgaaagctcaagaagcatgtcatggtaatacttcaaataaagaacagttaactgctactaaaacggagcaaaatataaaagattttgagacttctgatacattttttcagactgcaagtgggaaaaatattagtgtcgccaaagagtcatttaataaaattgtaaatttctttgatcagaaaccagaagaattgcataacttttccttaaattctgaattacattctgacataagaaagaacaaaatggacattctaagttatgaggaaacagacatagttaaacacaaaatactgaaagaaagtgtcccagttggtactggaaatcaactagtgaccttccagggacaacccgaacgtgatgaaaagatcaaagaacctactctattgggttttcatacagctagcgggaaaaaagttaaaattgcaaaggaatctttggacaaagtgaaaaacctttttgatgaaaaagagcaaggtactagtgaaatcaccagttttagccatcaatgggcaaagaccctaaagtacagagaggcctgtaaagaccttgaattagcatgtgagaccattgagatcacagctgccccaaagtgtaaagaaatgcagaattctctcaataatgataaaaaccttgtttctattgagactgtggtgccacctaagctcttaagtgataatttatgtagacaaactgaaaatctcaaaacatcaaaaagtatctttttgaaagttaaagtacatgaaaatgtagaaaaagaaacagcaaaaagtcctgcaacttgttacacaaatcagtccccttattcagtcattgaaaattcagccttagctttttacacaagttgtagtagaaaaacttctgtgagtcagacttcattacttgaagcaaaaaaatggcttagagaaggaatatttgatggtcaaccagaaagaataaatactgcagattatgtaggaaattatttgtatgaaaataattcaaacagtactatagctgaaaatgacaaaaatcatctctccgaaaaacaagatacttatttaagtaacagtagcatgtctaacagctattcctaccattctgatgaggtatataatgattcaggatatctctcaaaaaataaacttgattctggtattgagccagtattgaagaatgttgaagatcaaaaaaacactagtttttccaaagtaatatccaatgtaaaagatgcaaatgcatacccacaaactgtaaatgaagatatttgcgttgaggaacttgtgactagctcttcaccctgcaaaaataaaaatgcagccattaaattgtccatatctaatagtaataattttgaggtagggccacctgcatttaggatagccagtggtaaaatcgtttgtgtttcacatgaaacaattaaaaaagtgaaagacatatttacagacagtttcagtaaagtaattaaggaaaacaacgagaataaatcaaaaatttgccaaacgaaaattatggcaggttgttacgaggcattggatgattcagaggatattcttcataactctctagataatgatgaatgtagcacgcattcacataaggtttttgctgacattcagagtgaagaaattttacaacataaccaaaatatgtctggattggagaaagtttctaaaatatcaccttgtgatgttagtttggaaacttcagatatatgtaaatgtagtatagggaagcttcataagtcagtctcatctgcaaatacttgtgggatttttagcacagcaagtggaaaatctgtccaggtatcagatgcttcattacaaaacgcaagacaagtgttttctgaaatagaagatagtaccaagcaagtcttttccaaagtattgtttaaaagtaacgaacattcagaccagctcacaagagaagaaaatactgctatacgtactccagaacatttaatatcccaaaaaggcttttcatataatgtggtaaattcatctgctttctctggatttagtacagcaagtggaaagcaagtttccattttagaaagttccttacacaaagttaagggagtgttagaggaatttgatttaatcagaactgagcatagtcttcactattcacctacgtctagacaaaatgtatcaaaaatacttcctcgtgttgataagagaaacccagagcactgtgtaaactcagaaatggaaaaaacctgcagtaaagaatttaaattatcaaataacttaaatgttgaaggtggttcttcagaaaataatcactctattaaagtttctccatatctctctcaatttcaacaagacaaacaacagttggtattaggaaccaaagtgtcacttgttgagaacattcatgttttgggaaaagaacaggcttcacctaaaaacgtaaaaatggaaattggtaaaactgaaactttttctgatgttcctgtgaaaacaaatatagaagtttgttctacttactccaaagattcagaaaactactttgaaacagaagcagtagaaattgctaaagcttttatggaagatgatgaactgacagattctaaactgccaagtcatgccacacattctctttttacatgtcccgaaaatgaggaaatggttttgtcaaattcaagaattggaaaaagaagaggagagccccttatcttagtgg

SEQ ID NO: 224543 - DNA, 96 bp, Homo sapiens
  chr13:32918694-32918790
  hyper
gagaaccctcaatcaaaagaaacttattaaatgaatttgacaggataatagaaaatcaagaaaaatccttaaaggcttcaaaaagcactccagatg

SEQ ID NO: 224544 - DNA, 70 bp, Homo sapiens
  chr13:32920963-32921033
  hyper
gcacaataaaagatcgaagattgtttatgcatcatgtttctttagagccgattacctgtgtaccctttcg

SEQ ID NO: 224545 - DNA, 428 bp, Homo sapiens
  chr13:32928997-32929425
  hyper
cacaactaaggaacgtcaagagatacagaatccaaattttaccgcacctggtcaagaatttctgtctaaatctcatttgtatgaacatctgactttggaaaaatcttcaagcaatttagcagtttcaggacatccattttatcaagtttctgctacaagaaatgaaaaaatgagacacttgattactacaggcagaccaaccaaagtctttgttccaccttttaaaactaaatcacattttcacagagttgaacagtgtgttaggaatattaacttggaggaaaacagacaaaagcaaaacattgatggacatggctctgatgatagtaaaaataagattaatgacaatgagattcatcagtttaacaaaaacaactccaatcaagcagtagctgtaactttcacaaagtgtgaagaagaacctttag

SEQ ID NO: 224546 - DNA, 182 bp, Homo sapiens
  chr13:32930564-32930746
  hyper
atttaattacaagtcttcagaatgccagagatatacaggatatgcgaattaagaagaaacaaaggcaacgcgtctttccacagccaggcagtctgtatcttgcaaaaacatccactctgcctcgaatctctctgaaagcagcagtaggaggccaagttccctctgcgtgttctcataaacag

SEQ ID NO: 224547 - DNA, 188 bp, Homo sapiens
  chr13:32931878-32932066
  hyper
ctgtatacgtatggcgtttctaaacattgcataaaaattaacagcaaaaatgcagagtcttttcagtttcacactgaagattattttggtaaggaaagtttatggactggaaaaggaatacagttggctgatggtggatggctcataccctccaatgatggaaaggctggaaaagaagaattttatag

SEQ ID NO: 224548 - DNA, 171 bp, Homo sapiens
  chr13:32936659-32936830
  hyper
ggctctgtgtgacactccaggtgtggatccaaagcttatttctagaatttgggtttataatcactatagatggatcatatggaaactggcagctatggaatgtgcctttcctaaggaatttgctaatagatgcctaagcccagaaagggtgcttcttcaactaaaatacag

SEQ ID NO: 224549 - DNA, 355 bp, Homo sapiens
  chr13:32937315-32937670
  hyper
atatgatacggaaattgatagaagcagaagatcggctataaaaaagataatggaaagggatgacacagctgcaaaaacacttgttctctgtgtttctgacataatttcattgagcgcaaatatatctgaaacttctagcaataaaactagtagtgcagatacccaaaaagtggccattattgaacttacagatgggtggtatgctgttaaggcccagttagatcctcccctcttagctgtcttaaagaatggcagactgacagttggtcagaagattattcttcatggagcagaactggtgggctctcctgatgcctgtacacctcttgaagccccagaatctcttatgttaaag

SEQ ID NO: 224550 - DNA, 156 bp, Homo sapiens
  chr13:32944538-32944694
  hyper
atttctgctaacagtactcggcctgctcgctggtataccaaacttggattctttcctgaccctagaccttttcctctgcccttatcatcgcttttcagtgatggaggaaatgttggttgtgttgatgtaattattcaaagagcataccctatacag

SEQ ID NO: 224551 - DNA, 145 bp, Homo sapiens
  chr13:32945092-32945237
  hyper
tggatggagaagacatcatctggattatacatatttcgcaatgaaagagaggaagaaaaggaagcagcaaaatatgtggaggcccaacaaaagagactagaagccttattcactaaaattcaggaggaatttgaagaacatgaag

SEQ ID NO: 224552 - DNA, 122 bp, Homo sapiens
  chr13:32950806-32950928
  hyper
aaaacacaacaaaaccatatttaccatcacgtgcactaacaagacagcaagttcgtgctttgcaagatggtgcagagctttatgaagcagtgaagaatgcagcagacccagcttaccttgag

SEQ ID NO: 224553 - DNA, 199 bp, Homo sapiens
  chr13:32953453-32953652
  hyper
ggttatttcagtgaagagcagttaagagccttgaataatcacaggcaaatgttgaatgataagaaacaagctcagatccagttggaaattaggaaggccatggaatctgctgaacaaaaggaacaaggtttatcaagggatgtcacaaccgtgtggaagttgcgtattgtaagctattcaaaaaaagaaaaagattcag

SEQ ID NO: 224554 - DNA, 396 bp, Homo sapiens
  chr13:32953886-32954282
  hyper
ttatactgagtatttggcgtccatcatcagatttatattctctgttaacagaaggaaagagatacagaatttatcatcttgcaacttcaaaatctaaaagtaaatctgaaagagctaacatacagttagcagcgacaaaaaaaactcagtatcaacaactaccggtacaaacctttcattgtaatttttcagttttgataagtgcttgttagtttatggaatctccatatgttgaatttttgttttgttttctgtaggtttcagatgaaattttatttcagatttaccagccacgggagccccttcacttcagcaaatttttagatccagactttcagccatcttgttctgaggtggacctaataggatttgtcgtttctgttgtgaaaaaaacag

SEQ ID NO: 224555 - DNA, 245 bp, Homo sapiens
  chr13:32968825-32969070
  hyper
gacttgcccctttcgtctatttgtcagacgaatgttacaatttactggcaataaagttttggatagaccttaatgaggacattattaagcctcatatgttaattgctgcaagcaacctccagtggcgaccagaatccaaatcaggccttcttactttatttgctggagatttttctgtgttttctgctagtccaaaagagggccactttcaagagacattcaacaaaatgaaaaatactgttgag

SEQ ID NO: 224556 - DNA, 147 bp, Homo sapiens
  chr13:32971034-32971181
  hyper
aatattgacatactttgcaatgaagcagaaaacaagcttatgcatatactgcatgcaaatgatcccaagtggtccaccccaactaaagactgtacttcagggccgtacactgctcaaatcattcctggtacaggaaacaagcttctg

SEQ ID NO: 224557 - DNA, 876 bp, Homo sapiens
  chr13:32972298-32973174
  hyper
atgtcttctcctaattgtgagatatattatcaaagtcctttatcactttgtatggccaaaaggaagtctgtttccacacctgtctcagcccagatgacttcaaagtcttgtaaaggggagaaagagattgatgaccaaaagaactgcaaaaagagaagagccttggatttcttgagtagactgcctttacctccacctgttagtcccatttgtacatttgtttctccggctgcacagaaggcatttcagccaccaaggagttgtggcaccaaatacgaaacacccataaagaaaaaagaactgaattctcctcagatgactccatttaaaaaattcaatgaaatttctcttttggaaagtaattcaatagctgacgaagaacttgcattgataaatacccaagctcttttgtctggttcaacaggagaaaaacaatttatatctgtcagtgaatccactaggactgctcccaccagttcagaagattatctcagactgaaacgacgttgtactacatctctgatcaaagaacaggagagttcccaggccagtacggaagaatgtgagaaaaataagcaggacacaattacaactaaaaaatatatctaagcatttgcaaaggcgacaataaattattgacgcttaacctttccagtttataagactggaatataatttcaaaccacacattagtacttatgttgcacaatgagaaaagaaattagtttcaaatttacctcagcgtttgtgtatcgggcaaaaatcgttttgcccgattccgtattggtatacttttgcttcagttgcatatcttaaaactaaatgtaatttattaactaatcaagaaaaacatctttggctgagctcggtggctca

SEQ ID NO: 224558 - DNA, 515 bp, Homo sapiens
  chr13:32973294-32973809
  hyper
aaagaaaatcttttaaatctttggatttgatcactacaagtattattttacaagtgaaataaacataccattttcttttagattgtgtcattaaatggaatgaggtctcttagtacagttattttgatgcagataattccttttagtttagctactattttaggggattttttttagaggtaactcactatgaaatagttctccttaatgcaaatatgttggttctgctatagttccatcctgttcaaaagtcaggatgaatatgaagagtggtgtttccttttgagcaattcttcatccttaagtcagcatgattataagaaaaatagaaccctcagtgtaactctaattcctttttactattccagtgtgatctctgaaattaaattacttcaactaaaaattcaaatactttaaatcagaagatttcatagttaatttattttttttttcaacaaaatggtcatccaaactcaaacttgagaaaatatcttgctttcaaattggcactgatt

SEQ ID NO: 224559 - DNA, 552 bp, Homo sapiens
  chr13:33000877-33001429
  hyper
ctgaacagctactacgtgccagacaatgtgcttggcagggtaagacatggctcctaccttcaagaaacttacagaaggataagaaaaaccatgtgcaaaaaagtaagcacagtcacgtaggtataaacaggaagccaaggagcccagaagaggggcatatactggcggggtgggatagctgcccggtcttaaaaggcaaaagaaggcgggagggcaagccaggcaggaaggccagcgtcaaggagagaagcggcttggtttacaggagataaaaacagttcgaagttgctggaacatcaagcgcaaggcagggagcggtgggagttcaggctggagcggtggggcctagcaaggtggccacaggcacaagcccgcgtaattcccagaggttgggtaccggagggccgcttacgcaattcgcaagtgaacgaatttgggcgcccatggcgaggctctgtcagtgacggtcggtggtggcgccgccagccagccccccgcccccgtgcacctgtgcgccttcgcagctgccaaagcaaacgcaggctccccgac

SEQ ID NO: 224560 - DNA, 360 bp, Homo sapiens
  chr13:33590033-33590393
  hyper
tccctctaggatttcggccagtccctaattggctccagcaatgtccagccggagcttctttgggcctccgagtgggagaaaagtgagagcaggtgcttccccagcggcgcgctccgctagggcccggcaggatcccgcccccaagtcggggaaagttggtcggcgccttttctccccgacgaagccgctccagggctgctctcagaggacgcgcggcaggcaaagagaatgaacctgagcgtccacgaaacgtcctgcacggctcccgggagctgggagaaacaggtgcctttctccgacgtccgcgggcgacgcctgccgcaccttgcccgctgccgcgcccctcccgggcacccctcg

SEQ ID NO: 224561 - DNA, 180 bp, Homo sapiens
  chr13:33590467-33590647
  hyper
gagcccgccggggagcgggggtgggcgcgccggcggtgggcgggcgggcgcggcggggcgcgggcataaaggggcgcggcgcggggccccggagcctggctcccgcgcagcatgcccgccagcgccccgccgcgccgcccgcggccgccgccgccgtcgctgtcgctgctgctggtgctg

SEQ ID NO: 224562 - DNA, 180 bp, Homo sapiens
  chr13:33590845-33591025
  hyper
tgggatacgttcacccaccaccccctggcacccccgggagactcccggaacgccagtctgccgttgggcgccccgtcgccgctgcagcccgccaccggggacgtagccagcgacagctacaacaacgtcttccgcgacacggaggcgctgcgcgagctcggggtcactcactaccgcttc

SEQ ID NO: 224563 - DNA, 1320 bp, Homo sapiens
  chr13:37005447-37006767
  hyper
agttcgattatttcacctggcttgtcagtcacctatgcaggcgtctgagcccccgggtttccaggagccccccgtataaggaccccagggactcctctccccacgcggccgggccgcccgcccggcccccagcccggagagctgccaccgaccccctcaacgtcccaagccccagctctgtcgcccgcgttccttcctcttcctgggccacaatcttggctttcccgggccggcttcacgcagttgcgcaggagcccgcgggggaagacctctcgtggggacctcgagcacgacgtgcgaccctaaatccccacatctcctctgccgcctcgcaggccacatgcaccgggagccgggcggggcaggcgcggcccgcaaggacccccgcgatggagacgcaacactgccgcgactgcacttggggcagccccgccgcgtcccagccgcctcccggcaggaagcgtaggtgtgtgagccgacccggagcgagccgcgccctcgggccagcgtgggcagggcgccgcagcctgcgcagccccgaggaccccgcgtcgctctcccgagccagggttctcaggagcgggccgcgcaggagacgttagagggggttgttagcggctgttgggagaacgggtcacggaaacagtcccttccaaagccggggccatcgtggggtgggcgagtccgccctcccaggccgggggcgcggaccagaggggacgtgtgcagacggccgcggtcagccccacctcgcccgggcggagacgcacagctggagctggagggccgtcgcccgttgggccctcaggggcctgaacgcccaggggtcgcggcgagtccacccggagcgagtcaggtgagcaggtcgccatggcgatgcggccccggagagcgcacgcctgccgcggtcggcatggaaacgctcccgctaggtccgggggcgccgctgattggccgattcaacagacgcgggtgggcagctcagccgcatcgctaagcccggccgcctcccaggctggaatccctcgacacttggtccttcccgccccgcccttccgtgccctgcccttccctgcccttccccgccctgccccgcccggcccggcccggccctgcccaaccctgccccgccctgccccgcccagccggccacctcttaaccgcgatcctccagtgcacttgccagttgttccggacacatagaaagataacgacgggaagagcggggcccgctttggggtccaggcaggttttggggcctcctgtctggtgggaggaggccgcagcgcagcaccctgctcgtcacttgggatggagacc

SEQ ID NO: 224564 - DNA, 304 bp, Homo sapiens; identical to SEQ ID NO: 203332
  chr13:37393232-37393536
  hyper

SEQ ID NO: 224565 - DNA, 33 bp, Homo sapiens; identical to SEQ ID NO: 203337
  chr13:39612009-39612042
  hyper

SEQ ID NO: 224566 - DNA, 180 bp, Homo sapiens
  chr13:41345257-41345437
  hyper
gactctaggaaacatcgccgagacacgaaatgaaccaagaacacaactgaaatggtgcgtcccgctgccaaacacgtccccgccctctcttccgcttccggcctggcgccttcctccccctttgcgctccggtgggctacaggggcgggtaactgtgttccggactcgcccgcggccggg

SEQ ID NO: 224567 - DNA, 206 bp, Homo sapiens; identical to SEQ ID NO: 203340
  chr13:41364043-41364249
  hyper

SEQ ID NO: 224568 - DNA, 271 bp, Homo sapiens
  chr13:41767821-41768092
  hyper
tgagatcgaagcttgtgatggtcgaaggcgtctgcaaacttgaggatggcggtgcagttggtcaggtcaagacgtcgggctaagaaggaggcacaggcttcccgcacatattccagctgtagcatgtcggaggccgcgtacaggcgctgcacattggcctcactgagagacacacgacccgtgtagcagtagtcgaccaacacctcgaaggactcggcgtccacatcgtgcatggtcacgctggcctgctggctctcgtacatgccacctg

SEQ ID NO: 224569 - DNA, 105 bp, Homo sapiens
  chr13:42032016-42032121
  hyper
ccggtcttcccgcgcgggcggctgcagcctcctttccggcccgggctggcccccatgtcccaccttccctccaccaccagctccgcgcgcgcccggggttggggg

SEQ ID NO: 224570 - DNA, 379 bp, Homo sapiens
  chr13:42032381-42032760
  hyper
cctgacttccgtgcactgagcccctggccctgcccgcagccccggccctggactcggcggccgcggaggacctgtcggacgcgctgtgcgagtttgacgcggtgctggccgacttcgcgtcgcccttccacgagcgccacttccactacgaggagcacctggagcgcatgaagcggcgcagcagcgccagtgtcagcgacagcagcggcttcagcgactcggagagtaagtgcggcccccgctaggatggcgccgggatctcccagctcccaggacctgccccgcgaaggctgcggcctcagttttcttatcagtaaactgaggaatggtttcctgaagctcaacgcagtaggccgagtggtggcggggcccctgacga

SEQ ID NO: 224571 - DNA, 162 bp, Homo sapiens
  chr13:42615145-42615307
  hyper
gttcaggaaatggcccgggatgaggtccccagctgcttcccagccgggttagcgcttcctccgccgcccgggctcctcctcgcgcgccgcctggagcgcctttgtccggctgatcgaggctctccccgaggaaccgctggcaaaccgctggcgacggccctg

SEQ ID NO: 224572 - DNA, 180 bp, Homo sapiens
  chr13:42615560-42615740
  hyper
gggcgtctggagggtgcaacgggttttgccggggacgaagcagaaagctgacttcgctttcgcctgggatttcgctgcacacgcaacgcggaggttgagtaattttaggaaccaagagtagtgtgtgtgcgtgtcttaagtgtgcgaggataaggaggaagagaccagggggctttggat

SEQ ID NO: 224573 - DNA, 161 bp, Homo sapiens; identical to SEQ ID NO: 203343
  chr13:42615857-42616018
  hyper

SEQ ID NO: 224574 - DNA, 516 bp, Homo sapiens
  chr13:43566054-43566570
  hyper
gagtgagtatgtttggggcccgggctcccgccccgaagccaggttgttaaaatactcaccgcctctggcccgcgtgcacgacgctctcccgcgaagggcccttaggggctgcctccaaaccctctctctggtcttccacggggctcagctccccttgccgcccagaagggtcctggggatcccgggtcgggcgggaggcaggggaggcgccgagcccggagttcaccactctattgcgggtgttcatggttcacagcccgcgggtcccgggccgccgtcgctgcgggagggatgcggctgggacgcttagcgagtctcaagatgggattccaaagtgcagaggcagcggttttaacagctgagtttcggtttctcagaatcagcagcagactgcgcccgccccagagaacttccccacgtattctccactgaggccccgtccgaccttatcgcgggttaacagcccaggatgttgacttgagctggcttggtcggctacaggtgagacggtttaaa

SEQ ID NO: 224575 - DNA, 312 bp, Homo sapiens
  chr13:44544247-44544559
  hyper
tggcttcaccatgacgtcattggccgcgctgcaggtgggcggacacggcgagcggctgacgcagtgtcgcgaggtggtgctcaccacatccaaggccatcccggtgcaggtggatggcgagccctgcaagcttgcagcctcacgcatccgcattgccctgcgcaaccaggccaccatggtgcagaaggccaagcggcggagcgccgcccccctgcacagcgaccagcagccggtgccagagcagttgcgcatccaggtgagacgcgtcagcatgcacgactatgaggccctgcactacgacaaggagcagct

SEQ ID NO: 224576 - DNA, 205 bp, Homo sapiens
  chr13:44991619-44991824
  hyper
ctgcacacactgggccggcccatttctgcagggctctcagcctgcatgggctactcattgctgtgcccgtgacaagcattcctgaccaactcctccctcatcaaagcccccttctgcctccagcatcacccgaatggggcctccacagagcccaggacatcagtccctcccctcatcctcacccgaagggcgtccctcagccaca

SEQ ID NO: 224577 - DNA, 106 bp, Homo sapiens
  chr13:45150764-45150870
  hyper
ctcggccctccccccgcgccccgcagaccctttcaaaccccctgggctcgcggcggctgctcggtgaggaaacgctggccgcggctggggccggggcgacgcggct

SEQ ID NO: 224578 - DNA, 291 bp, Homo sapiens
  chr13:52585269-52585560
  hyper
tccttttctcccacgccaagacatccctggagctggggtctggctcggccttccctgcgcaccccctgggggcgagtaagcgccgaacgcggggaggaaaatcctcctggtgggagtgagcacgctgcgcggacgcgggggaacaaaactcactttccgactggccccttctctggctgtgatctgtctctcctgctcaggcatcgtcccgcacggacaccgaattcttctctgatctggctcagagcaaaaggtcacctggtcggtggaggagagcggggtgttaaagtc

SEQ ID NO: 224579 - DNA, 85 bp, Homo sapiens
  chr13:52702430-52702515
  hyper
cgcttcactggccacgctgctcctggtcccggagacccaacaatctgcatttgctgccgtcacgttcaggcgactccccaggcgc

SEQ ID NO: 224580 - DNA, 280 bp, Homo sapiens
  chr13:52702767-52703047
  hyper
agacaccggaggatcgggttctgagagagacgcatacggacttggggccgggggtgactcgccgggaactgagggcccgcgaccctcccgcccaagtggcaccaaagggtggaagcccccaaattaggaaaattccttctcccctagggccgcccctggaagcggccgcgggtgagtggcaagacgcttacccgtacccgacctccgcgtgtggagcgttgccatagagaccgacgcgccctggacgctacacccacacagcccaggacgctaggccttt

SEQ ID NO: 224581 - DNA, 240 bp, Homo sapiens
  chr13:53425029-53425269
  hyper
aaagtgggtggaaatggggccggagtcccaaaggaagggatttcagcggtttccgcgagcacagcccggccgcgaatggctgggacccggacctcgcgccagcgccccctgcgcatctgcaccccgcagttctgggctggactcgggagccccgccacgcgctaagtttgggtttttcgcttggccagagattcggaactacttgcaatttctactcaaagtgcttccgcgtcagcatgc

SEQ ID NO: 224582 - DNA, 737 bp, Homo sapiens
  chr13:53425316-53426053
  hyper
aggaaaggggagtaggggcaggcaaaagccaggaggcgggaggaggggtgtagggtggctggtagcaggtctaaagtgttttttccgcggccaggccctcgtcgatcggaagtagccacgacggcggcggcgccgggaggctgagagctgggagccggggagcccgggaagggagccgcgagcctccagccgccaccggcgcgcacaggtctttccgtgccggcggtggaggtgtgaaggcacgcgaacaccgtgagctccgggccggcagcggacagccactcgattatggaaatacgatttaaaatagcacatcaacgtccgcagcaactccccgggaaggaaaatatgtccggggaggtggcgctggagaggagtaggggaaagggaggggagctcgcccgcccgggtgctgatcaggcctcacaaaagccgctcgaatcgccttgttatcataccaaaaggtctgggcaggcccaaaggagcccctttctctcggttttagcaacttcgccggcaactgtctcgcaatcttgagaacaaacacagctccacaatggccggcgttttctcggaatgcaaatgttgcgggctccgcaaagctgggtttctgttaccgagcctaatgccggcattgtgaaactcgcgtgcaaacaccaagattgacatgggcgtcacgtgatggattagggctccaggaaagttttcaaagaggcgacaatggggggctcagactg

SEQ ID NO: 224583 - DNA, 213 bp, Homo sapiens
  chr13:60972272-60972485
  hyper
aattgcggccattacggttgtaatcatcccgtttaattcagtaacgcttttcccaggcttgcacaggcacattctgggatgaagggtaggaacggggatgaaaaagatttgcaacggctctctgcaattactgctttaggagaaagagtgaggcattaaaagaccaaacaaaaccagggggaatagtgataaaccgtacgtacagaggaacag

SEQ ID NO: 224584 - DNA, 243 bp, Homo sapiens
  chr13:67799457-67799700
  hyper
tagacatactggcacgttaatactggttgactgggcacttgtatgcagtacttatagaccagtaaaagtgctcgtttacctgtctggtgtgtaaggggccctttgtcttgaagcctccttgggaactgcactctgaggcactgaagtgatctgaactagtggaagagcgtttagaaagggtgtcacaacccccaacaaaggtgttgtccaaagggagttcctgaatcacgtggtgctttttca

SEQ ID NO: 224585 - DNA, 32 bp, Homo sapiens
  chr13:67801107-67801139
  hyper
ttaagtataacccacgtcggttgttttcagaa

SEQ ID NO: 224586 - DNA, 254 bp, Homo sapiens
  chr13:67801447-67801701
  hyper
ctcagataaatacacggtgccattgatgggacttataatgtacctgaggtctatattaggagggttatcatttacatcggtgacattgatggtaaccgttgctcgagcaggagtggagctgccgtcactagccagcactgtcactttgtgaatggctgtctcctctctatctaaggacctctgaactgtaatcagcccagtagtattatttaaagcaaagagtcttttggttgcaggggcgacctgggcaccaa

SEQ ID NO: 224587 - DNA, 180 bp, Homo sapiens
  chr13:74708275-74708455
  hyper
caggaaaccggagaggcgcttggggtggggtggggtggggtgctgtgagggggggggccgaaaacaagaaacccccaaacaaaagagctccgggtcctcctccccagaaacaaagccccgccgctgccggcgagccccggggtggggccgagggcgggggcggcggcggggaggggctcg

SEQ ID NO: 224588 - DNA, 200 bp, Homo sapiens; identical to SEQ ID NO: 203388
  chr13:74709334-74709534
  hyper

SEQ ID NO: 224589 - DNA, 35 bp, Homo sapiens; identical to SEQ ID NO: 203389
  chr13:75794021-75794056
  hyper

SEQ ID NO: 224590 - DNA, 981 bp, Homo sapiens
  chr13:76055057-76056038
  hyper
tccggtcacaccccagacaccgccgtcctcccgggacgggcgctcctccacgcgtgctccttggacgcgccagctccccctccatcccgggaccgttgtccttttccctccgggtccctgctgtagccggccggccgctcccgccgctcgcccagcccccgaacgccttctctcccactcccaaggtccagggaaggggccagccggcgcttgagcgcgccacgtggagcgcgcgcgcctgcagccaaacctcagtcggtccttaaagtggggtccccgcccctcccgccctgctccccgatcccccaaggccgagcccgcccccgcgcctccgagcccctgtcttgcctggctggggtctgtggcgcggaaaacgtggcaggccatctgcgactcggggtcgtcgggctgcgccttgatcaggtaggcaaagtaggtgaggtcgtggctgttgtggatgaagcgcgagatatgctgcgccttgtgctcgaagatgaataccgccgggttgggctgcgtggccgacggactagtgccccccgaggccccagcgcccggcgcggggacgcaacgcaggaagggcgcgctgagcaccaggatcacctctcgggccgccggcgccccgcagccgcccgcctcgggcttctggctgcgcctgcggatctcggccatgagccagggcagcataggcagcgtggtcctgtggtccaggcacgaccccccaacgtaccacagccggaaccgcttatcgcttggcttcccggggccgggctgagctgagacgcccggctcgggctccagggggtgcgggaacggctcatcctgaatgcagctgggcggctccataactctcgcctcaccagggcaccgcggaggccggccgggcgcaccgcgccccccactcccgcgcagaaggcgccgccgaaactgtgccaactgccgcaccgggctcccgcgcctgcctgggagcggcgcgacccc

SEQ ID NO: 224591 - DNA, 960 bp, Homo sapiens
  chr13:77459255-77460215
  hyper
tcgggcaggagaaggactgggcgctggagtggcgagggggtctggggagctcactccctgcagaagacgtactcggtgtagctggtccagatcttgtcctcgctctggtcggtgctgctggcaaaggcgcaggtgcccgtggagctgcacgccaccatgtggaagcccgactcggacagcttgtcgaaggcctgctccaggaagttgaacttgaggtaatagcgcgaggtgtagcgctccgggggacggtcggggtcccggctttcgttcagggtgtccccaaacacctccttggccagcgacgtctttccgcaaacggtgatgcgcgccactcgccggaacttggcgtccgcctgcgcgtcccgcccgatggtgtaggagccgcggtagccgatggtgatgtagcccgagcgccggctgccgtccagcgactgggacggcgtgagcagcgggcccgccgcgcccccggacggactgcggctagccagctccagcgtgggcgacggcgccccggcagaggcgccctcctgctgttcgggctccgagtagccaagcggcagcagctcgtcacccagcgagccctccttgtgcaccccgcgccgcgagggcggcggccccgggccgggctgctggggcgccccgaggcggcgcacgagctctggcagctcgaagtactcggcctcgcgctgcagccggctgcgctcggggaagtagtcgggcagcacgagctgcaagtcccgcaggtaatccaggatgtagcggaagaggaagccgtcccggtccagaaagaagcggcctttgctgtcccgggccagctcctgcggctgctgctgcgtgaacatgcgccagagcagcgagtcgggcaccgacaccaccgtgcagcgccgggtcacgtacacctggccccccacgttcagctccacgatgtcggggaagagcggtggctccgcggaggacgac

SEQ ID NO: 224592 - DNA, 659 bp, Homo sapiens
  chr13:78271995-78272654
  hyper
gccggcgcggcggcgcgcactccccggcggccgcggcgccctcggggcccacgatgatggcggagcaggtgaaatgcgcctcggcaggggtcagctctggagcgggctccgggccggtggtgaacgcggagctggaggtgaagaagctgcaggagctggtgcgcaagctggagaagcagaacgagcagctgcggagtcgagcggccagcgcggccgccgccccgcacctgctgctgctgccgccgccgccgcccgccgcgccgccccccgctggcctgcagcctttgggtcctcggagccccccggccgccacggccaccgccgcggcctcagggggcctggggctcgggctggcgctgggcgcggggggcggtggcggcagcggtagtggcagcggcggtggctccagccccgcgttcccgggcaccttctgcctgcctagccccgcgccctccctgctttgcagcctggcgcagccacccgaggcgcccttcgtctacttcaagccggcagcaggcttcttcggcgcgggcggtggcgggccggagccggggggcgcggggacgccgccaggggcagctgcagcgccgccctcgccgccccccacgctgctggacgaggtggaattgctggatctggagagcgtagccgcctggcgg

SEQ ID NO: 224593 - DNA, 660 bp, Homo sapiens
  chr13:79170079-79170739
  hyper
gtcctcaagggcacgtaagagttggaggtgacctccgggagcgcctaattttgagccgcggaacttcggcccacttctccgaggggaccaggcgcgcgccaatacgcatgtgcgggctctgagcgctcagagcgcgcctcttccttcccggctccccgcggtgcgcacccgctggccactctgcgcacgcgcgccgggtgccccggcctaaggccgttgacctcgggttctccccggcacagtcgaatccacgccagggccctcaggccggtagctgtcctgcagtccgagcggagctgcgacctcgggcagctggaagcctgtgggctgctgcttctccaggcaggcggcggagggatgcaggcaggatgagcggcggtcccttcgccgccacccggagaaccgcggctggtgcccttgaaggccctgggatgcctgggttgggtgggtgagtgaacgagaaccctgagtgagtgaggggagggcgggtcccctcctggcttcaaattcaacccaatcagctctgccgatggtttgaaactgcacacgccgacccacccgccccgaagtctgaaagttatgccctggagacctgcgagctgcggagtgcagctggagagggagctgccccacgaggaggcctccagaataactcccgga

SEQ ID NO: 224594 - DNA, 900 bp, Homo sapiens
  chr13:79175769-79176669
  hyper
ggcttgttcattttctcgcgctgggcgccctcggcctcctcgagccacgcctgcaggatgggcttgagcgcgatcatgttgttgtgcgagagcgtgagcgactcgaacctgcagatggtgctctggctgagtgagcccacgcccgggatcttgaggttggccagcgccgagcccacgtcggcctgcgtcacgcccagcttgatgcgccgctgcttgaagcgctccgcgaacgcctcgagctcgcgcgggtccgtgtccgagtcgcagatggacgccaggcccgctgcgcccaccacggccgccgccgccgatgccgctgccacctgcccggccgccgccgccgccgctgccgctgccgcgccgtggtgcgccgccgccgccaccagcccggggtgcggcagcccggacggcatgttcatggcggccgccgccgcggggtgcgacaggtggcccaggctgtgcatatgcgggtgagggtgcgcggagccgcccaggagcccgccgcccgggccgccgccgccgccccccgggccgccaccgccgcctcccccggggccgccgcccgggccgccgccgccgcccgggccgccaccgccccccgggccgtcgtgggcgccgccgccgccggccgccgcgcccgcgccgcccgcgccggccatgagcgcgagcgacggcgaggagatgtggtccagcagatcgccgggttcgagcgcctggtggtggtggtggtggtggtggtggtgcgccagaggcaccgtggaagtggacgtgcacggcacgctgttcatcgtgtggtacgtggcgtccggcttgaaaggatggctcttgccctgggacacggcgatgtccacggccgccagcgcctcggcccgcgccagcagcgtctcgtccaggctggcg

SEQ ID NO: 224595 - DNA, 1223 bp, Homo sapiens
  chr13:79176851-79178074
  hyper
agagggggcacattgacgaccagggagggggcagacgagaagggatgggagcgtggagagggggacagaagtagggagaaagggggacacaagaacacattccggaaacgggcgtgggagacgaaaaagagggaaaagaagaaatggaaatgtaactcgcagctggggacccgtgtcacacacccgagcacgcacagagactgcctttctgaggcgtgaaattaacagagaaagtagagggaagtcgagagtcctggccccagcgctccctactccgatcgcaggcgcctgacgcggaggcagaggcagacaggaacacgacattaagggccgccggacaaaacgtgcctcgctgcgggactgctctacaccccctgcccgcagttccccgcaccgggacctgcacacaccagcccccgacatgcagcgtttcggagacggggaggggcgggcgcgcgggccggggccgcgggcgtggggcgcttaccggcggcgtgggcaggcaggcccgccggatggcctcggagctggagtgcagcgacgggtacttgtgctcagggagggtgggatgcatggcaaagtgaggctgcttgctgttcatggacatcatcgtggcggcttggcatgtatatccacaaacactccgaaagtccgcgggaaagtgcgtacgccggctcacccggcctcccttcggaggctgcagccgcggcggtcgcggcggctggcggcggccccgccgcgggctgctgctgctgctcctgctgctgccaggcgctccctctgaccgcgcagagcgccgcgcgccggcctcgcggtcccgcttctccgacagctctagccccgcgcgccgacgggatgcactcctctaacacctgagccccacttctcgcggccgtcccggggagctctcgcgagagctcgcggccccaccgcgctgacaggcatcagctgtctccgtctgtctgacgcgcgctctccttctcggcggccccgtgcgtctgcgcgcgcgcgcgctcgtccggccgcgaccagcgcgtgggagccgctcttatagtgaccaccagcaaggacagcgcaggtgatgcacctgtagctacccgggcatgcgcactgcccgcctcacctttcccaccgtggtctggaaagatcagaaggtccagctattgtctaagggtgggcaccttttagaataaaaaagacgagatgcgcgcacgcccctctat

SEQ ID NO: 224596 - DNA, 313 bp, Homo sapiens
  chr13:80916947-80917260
  hyper
aagggaagtggcatgcgttatttccgggcgctggcctacgtcccccgacccctaaggtgagggtggacgaggctacaacggcctgctcccgagcgtcccgggactgcgggcgcaaaacagctgggcctctctggccacagccgctcgccggacgcccgaatccattgagccgacggtgaacgcaggcgccgctgcgctcgcggcccctctggccaccagggggcgcccgcccggcgcggggctaaggctgctttcttctccgggacacgacgcggacaggctgggttaccttccaaaacgtgtgtgcattagg

SEQ ID NO: 224597 - DNA, 360 bp, Homo sapiens
  chr13:88323541-88323901
  hyper
cctacgaatgtgacatccaagggggccccggttgcgccgccctagcccagggacgccttcgccctcggctgccatctatcggccaccgagcgcccgcttcgccccgggcccatcatgtctgctgcagcttggctcgcaccagaggcgcgacaataaacaagtgcactggactgggccctgcacccgctccggagcagctgtctcagagacccggtgttgcttaccgcgttgccacctcctcggcgcccgggaggaagacgcaactttctcggagttttttttagagccaccgggctgccaggacaagccacaggcatagaacgacgcggttgctgcccgccccccccttcccccagaaac

SEQ ID NO: 224598 - DNA, 720 bp, Homo sapiens
  chr13:88323971-88324691
  hyper
gaaaaaaaccctgcaaacaccgtgaggatgaaactgccaaagggatgcaagagcctctcaaatactaattaggggccgcggcggcggcgggctcggcgcggagacagcgtcggcgggatcccagcgcggtggtcgccgctgcgctggggggcggaggacagcgcaggagctgcagccgccgccttcgctggagcagccgaggggccggtgccacctttgctcgccccctcactaccatgtacagtgtgcgctgcaagaagaaggcgggagatgcatgcacacccccgcgacccgctccctctggctcgtcccccggcgtgcgccactgaccaggggggaatgtggtgaagacggcgaggaggagagccgaggggggaggggagggccggccggcgcgaacccaggccggagggtgcgaggagccagaggaggctggagggggcggcggccacagctgggtcggagaaagttgccccctatgcagatggcaactgtgagtacccctgtgggggggagggtgcagcgaaggctgccagggaccccgcgatcgcgccttaacacgtattggagcgagtgtgcgagtgatcatgagtgtgagcgggtgcgagcgctcggcggggctgaccgtcacgttggcggggccggcggggccaggcagtcttctccgcgtccccctcctcccgctccgtgcctcccctcccagcagctccccctccccgc

SEQ ID NO: 224599 - DNA, 180 bp, Homo sapiens
  chr13:88324801-88324981
  hyper
tccaccccccaaccctgctgcccgctccgactaccgcggagagcaccggggagagccttttggggagccccggaacccgcggtcgccaccgcggcggcggccccaggctggaggcgtccgggcgcctctttcctccagcctctgggactgcgctgctcgcagtctcctcgccctgcctgg

SEQ ID NO: 224600 - DNA, 240 bp, Homo sapiens
  chr13:95201509-95201749
  hyper
tgggatgaaggtgttttgctggccccgtggacagaccagacctcctcccatcggagcctcgggtctcacaccagccccccaggcggcgcgcggccccgtctcgccaccgcggcccgggtcgttcgcgtcttccggcgccgagggtgcctctgggtcccagcaccaggctccgtggcgcgcacgcgcggcagcttcttctagccccgccaggagacggcccagaagggctatgcggcgcgg

SEQ ID NO: 224601 - DNA, 180 bp, Homo sapiens
  chr13:95354546-95354726
  hyper
ggccttctgtgagcgctgtgtcctccccggaatccgcggcttaacacattctttccagctgcggggccaggatctccaccccgcgcatccgtggacacacttagggtcgcctttgttttgcgcagtgattcaagttgggtaacccttgctcaacacttgggaaatggggagaatctcccc

SEQ ID NO: 224602 - DNA, 480 bp, Homo sapiens
  chr13:95354802-95355282
  hyper
aagaaacggtgtccaaagaccccggagagttgagtgagcgcagatccgtgacgcctgcggtacgctagggcatccaggctagggtgtgtgtgtgcgggtcggggggcgcacagagaccgcgctggtttaggtggacccgcagtcccgcccgcatctggaacgagctgcttcgcagttccggctcccggcgccccagagaagttcggggagcggtgagcctagccgccgcgcgctcatgtttattcacgcggccttgagcagccgagctccaatccatattaatcaaccgctcgacctacacaagtctaagtttacgggagaaaacctagtccccgaaaaggaagaacagcaatccggacaagcagttggcgcctttgtcccgccagccccttctccaaccagcccaaagttgggcagctgctgcgaaggagggtaagggcgatgatcagaagggggctgattgatgcccccaggcgctcg

SEQ ID NO: 224603 - DNA, 455 bp, Homo sapiens
  chr13:95359621-95360076
  hyper
agagattaataaagtttggacggctccctcggcctccgctgggccgcgggcgcaagaaagacgcggaccctcgaggcggacgagttgcgggaacttcgcttgcctggaggacacggcggcccaggcggccgggagcgccggcgccgagccgcgctctgattggctggcgcgaccgtccctatctgctccggggagagtggaatcttctctccatcttctgcgccccgagcctggggtgagagggagatccgcggtgctttctcctatcttcttgggggagggggaggaggaaattgtcaagggaagtaacaatcgcggccagcaaccctgctctcccaaagccaccccctcgcgcgacagcgtccccagcaccagttcttactgcttacacagcgcaattccacctgtttgcacaaagcccgaagcaacatgcctggccccttggatacgaggct

SEQ ID NO: 224604 - DNA, 180 bp, Homo sapiens
  chr13:95360281-95360461
  hyper
agccagcagcagctctctgcccaatcacagcgctgcatttgtgggccactttcagacgcttacaccacccacccccgggcctttctctacgccctcttgccccggagccgctccccccgctccaaccccttacttctgcacagtctaacttggcaggaggctctctgcaggcgcaaaacc

SEQ ID NO: 224605 - DNA, 1260 bp, Homo sapiens
  chr13:95363549-95364809
  hyper
gcggcggctgcagcccggggctgggccacgcgctgcagttgcacgggatcatgtagcccgggttgcccgggctggggtgcgagtgcgtgtgccccccggcggcggcggccgccgctgcagccgccgccgccgcgccgtggaaggcgcccgcgcccgcggtcgggtagcccagcgacgacgcgtacgggaggccggacgaggacgacgagatctctgccattttggagcccaggtcgagcagcgagtaggggctgcccgcggcggcggcggcggcggcagcggcggcggcagcggccgactgcgggaagaagacgcgtgcggcggcagcggcggcggccgcggccgccttctcgggattggcgagcagcgactcaggcaccaggccgccgcccgcccccgcgtgcagcccggcgcccgccttgagcgcagggtgctcggcgtccgccacgccgcccaggccgtagggcaccgggaaggcgaacttgtccttcttgagcagcgtcttgggcttgcgccgcggccggtacttgtagtcggggtgctccttcatgtgcatggcgcgtagacgcttggcctcgtcgatgaacggccgcttctccgactctgtgagcagtttccactcggcgcccaagcgcttgctgatctccgagttgtgcatcttggggttctcctgggccatcttgcgccgctgagcccgcgaccacaccatgaaggcgttcatgggccgcttgacgtggtccaccggcttggacatgctctcgccctgccgcggctgcagcccgccgcctcccgggccctcgccctcggcccggaggaaatcaatgttggctgcccgcggagacccgctcggccggccggggctcgtcgcgccccggcgtcgctcccgccccggaggagggggctgggggaccagcccagggccacgccgcgccccgggccgccttagtgtctccggccgagcgctcgagcaggttgtctctgggacactctaacttctcggcggtgccccctccccgcggcggcagtttgccctttacgttctttgggtccttcgtctgcagtggcgtttgctggtgagctccccgcaggtagcggcggccgggcagagcgctcctcctcctcggtcgttctctcttaaatgcaaagcgtccccaaaagttgcgtcgcggagactcctcgaagttgagccgaggagcccgccgccgcgtgctgccaagtgccaaagggggctctcagcggctggagtgtttgggttctcct

SEQ ID NO: 224606 - DNA, 696 bp, Homo sapiens
  chr13:95619804-95620500
  hyper
gagtgggttttgctcgggcgacttgattgtctttcaagttggcgttaagagttttcaacaggtctccttccctgccagccgggaccccgggggtccctcggagcagggcgggtgggaccgctcggcctccttctctcgcccgcacgggcgccgccgcagacccggagcaggcacccggcggccgccgcgtgggctgcagcttagcctcctctgcgggcgcccggcagggctgcgcggccgagactcggggcgccggcgccggggcggccgggagctctgtcatttggcaactccctgcagactgatgacacggcgctttccatggtcgagccccacaaagtgtagggctgcggggcgcacctggctgggctcctaattacccggcctgggacgcacggggcagccgcggagggtggcgcctggggtcgggccggggtccccttcgccgcagtcccgcccacccgcagcctccgaggggtcccggccagggcgttctccacacgctcggctacctgcaggggttcgccactgcaagccgggccagtagaagtttgggggcgaaggcagagagcatttccttctcggcttttggcgcctccacgctgcacagaggcaggggcgactctgcaggccccgtttcccccatcctcccctccaccccagttccccgcaggacgtaggcgccgtccctagctc

SEQ ID NO: 224607 - DNA, 420 bp, Homo sapiens
  chr13:95620570-95620990
  hyper
ctacaaaaagtgggggccgtcgcagagcagagggaagctaggagcgggcaacgaattgaatcctggagacccgggaggagcgaggctgctgccgtccccggggaaagggcgacttcggcggggataccccgtgccaggccctgcaactcccgggccctcgggaatgggatgggggaggcgcggggtgcgcgcagctcccggtgatgttaaggcgtccgatggagacttgggttatttgcttcgcgtatcctcccctgttcctctgcaccgagctcctggctgccgctgcggccgctgtgtgcccgaggggcggctctgtaacccggctccaggcatttcttaggtttcccatccccgccctccaagctcccgggagcgcctgctccgctgcccgcagacaggcgtcgttcaaacctcagc

SEQ ID NO: 224608 - DNA, 579 bp, Homo sapiens
  chr13:96705319-96705898
  hyper
ccagacacccgctgcgagcacgaagaaagcgcggctgagggtggcagcgcgcccacacccgcccggacgagggcccggcccgcacccaccttgcctccagcagcagcggggtctcgggccacttcgcggccaagtgggcagtcaccgacttggacgcggcgaccgtcccggagccgagctgcgaaagccacagcgctgtggagcctagtagcagccgcaccacgttcgtggctttcgctggcgccatggcacggagagaaaagcgcgagtccctcggacccggtacccacagtctgtggccgccacgcttcggccggctcttcccgctgcgcggctgcccacttccggtgggaggagctcgagtccgttactgggtgccgggtccagaccggcgcatgcgtgtcccgctccggcgcggtttagtgggtgcggcctggagagcccacgccagccggacactgggccacgtcggagccgccggggcggcgccgggttgctgagcggcgtcacagatgctcccgcgggtccgctcccgcgggtccattcccaggactttgggttctcggacagaggccttag

SEQ ID NO: 224609 - DNA, 240 bp, Homo sapiens
  chr13:98795437-98795677
  hyper
ccgctgcccgctttgcgccgctcctccctgcgcgagtagcgctggccccggcgtcgaggcggccatggcgacccggagcccgctccccacccaccccgcctgctccgccctcccctccgccccgcgccacctttgatggctcggacctcagccggccaccgccagccctgctcgcgcgcccgcgccgccgccgcccgcgggtattaatagccggcgccgccgcgccctcggccgccgggg

SEQ ID NO: 224610 - DNA, 105 bp, Homo sapiens
  chr13:99129012-99129117
  hyper
ctgccttggctcgcaggcctgccctggtctacacagcaatcccagggtcagggccactctcagaggtggcctctcctcacacactggcctcgctgggactctggc

SEQ ID NO: 224611 - DNA, 297 bp, Homo sapiens
  chr13:99229764-99230061
  hyper
ccctgagggcaggatcggagtcgggggcacctggggaaggagagcgccccgtggggcctcggccggtggcctgtgccaaaaggccgggcagagctgcttcggtgtctgggtgaagtttccagccaacccaagaaggaaaccgaaagggaagaggccgagagagaggttaattcctagtgctttggttaccgaaaacagcccggctgggactgctgggctgggaacttagctaagcagtgcggaggctgaaccccaccatctctgggatccgcagcaaatcagaagcccccacccacg

SEQ ID NO: 224612 - DNA, 105 bp, Homo sapiens
  chr13:99739098-99739203
  hyper
gggaaggtggggggtcggggccgcctccgccccgggccgcacgtccgaagaccggaggaggggactgcgcacgccaccaagagggcgcacagccgaggctggacg

SEQ ID NO: 224613 - DNA, 435 bp, Homo sapiens
  chr13:100620292-100620727
  hyper
gcccgcgggacggttataaacgggactgggggcacgtgggtcaggaaaggggccttcggaagtggcccggggattagtccctttgatcaatccgttccgggatcccggataacccccaaaagggagagcggcgtggcagggagggaaagaagtccggatgggccctctcagaacacaatgtccaatagctgagcggcccagggaccgccagaaacaccaagcgcgggttggagtctgaacccgaggcgcctgcgtccctcccgcagggacccccacgctccaccgggtggggcccacgcggccgccgggagggggcaggaaatgcaaccgtccgcgagacgcagagccaaaaacccaaatgaccgcgggtcccctcgccgcctggggtcccccgcgccccccccgaccccacgcacgcgcgcgtgccccgggaag

SEQ ID NO: 224614 - DNA, 180 bp, Homo sapiens
  chr13:100621835-100622015
  hyper
cccctcccggaaggcctgcctcgggcggcccaaatccggcagcaaatcccacgcccggtcctcggagcgcggagactgcgcggggcctacgacccggtgggaagagaggcgcttgccggggcggcccggcctctctttccatcgccctcccagacttcccagggccgggcgggtggggac

SEQ ID NO: 224615 - DNA, 420 bp, Homo sapiens
  chr13:100622065-100622485
  hyper
cgaggtggcggcggcggcggctggcgcgcgttgcgggtcccggccgaggggctgcgggcgcgctggagactccgccgtgtgggaacccaacgcggggcctgtgtgtgctatcgaattacttattcatagaaaaaaaaaagggggggagagaaaaaaaaagaagtcacatgtccgggttatacgtatgcgaagagaagcagcagaaggagaaaaaaattaaggcgagcaggaggaggaggagaagcagcggcggaagcggcggcggcgcaggagctggtggcggcggcggcggcgcggccggggacagacacccacctgtatgagtacgcttgtggatcttgaggttctcggagcgcgcgaagaccttgccgcagccggggaaagggcagggaaagggcttctcgccggtgtgcacgcgga

SEQ ID NO: 224616 - DNA, 692 bp, Homo sapiens
  chr13:100632528-100633220
  hyper
gttagccacctctcgagcggcctggagtgctcgggccaggcgtccccggggttttcggtgtccgctgggagctgctcagatcccggggaagtcggtggcctacgcagaaagactggagcgctgggttgcctcccattcctgacccggctgagggcgccctgaccccgcggcccgggcccgcgtccgagccacgctggacgcccggctcccgggagcgccgcggtcggccaggactagaagccgcggcgccgaggtctcgggagaagcgcggcaggatggcaggccgggcccacgggcacgttcggcggctgcctgagccggcagcagctcagggagcgcgaggactgaggggcgggcccggcagcggggcgggggcgcgggactgactaggccgcggcggccaatcgcggcgccgggagggcgggcggggcgggagccgccgttaaaggggcggtttgaccgggggggcccggcctcgagctggagggagggagggaggccggggcgggagactagggggtgcggggggaggggagaggaaaaggaggagacaaaaaataaaaaataaaaggctgccgctgcagcgttggcggcgcccatcgaaatcaacggaggcggtggcgaacgcagcccaccgcagccgagacctgggagcccgcctgggcctcacactccctcgggtcgcggactgc

SEQ ID NO: 224617 - DNA, 466 bp, Homo sapiens
  chr13:100633420-100633886
  hyper
caacttaaagaaagggggagcggcgcggctgctgccttcatctggggaaattcgtggccactgcaagtttactacgcgaggcgcagccaatgccaagcgccgaggccgaggagggctaaacactgcggccgcggctccgaacaataaccgccgcgcgcggggcggcgcgagtagggccgcgggggagggagctgtcgccgcagagcgccgcggagaggacgcctggactccgcctgccgccccggcgcccccgccgcggtcaggtggagccgctggtgcgctggccccgggtgccgagcgcggagctcgcctcggtcctctcctcgcccgtctgcctggcgtgcgcacggccgccgcggttgtgactgcattctaccggcgctgctcggtgcggccgggctccgggtccgctgggcgtgcgagtgagtgtgtgcgtgcgcgcgcgggtgcgcgcaggggtgggggc

SEQ ID NO: 224618 - DNA, 458 bp, Homo sapiens
  chr13:100634132-100634590
  hyper
gaggcagatccaggcggcggcggaggcggcgggcgcaggagagcggctcccagggctgaagtggccgccaccaccgccgcctgcgcctggagcccggtggccgccggacgcaccgcgcggatcgggagcgggagtcgaggcggcgcggaggcgcagggctcgcaggggcgggcgggcgcgctggccatgctcctggacgcgggtccgcagttcccggccatcggggtgggcagcttcgcgcgccaccatcaccactccgccgcggcggcggcggcggctgccgccgagatgcaggaccgtgaactgagcctggcggcggcgcagaacggcttcgttgactccgccgccgcgcacatgggagccttcaagctcaacccgggcgcgcacgagctgtccccgggccagagctcggcgttcacgtcgcagggccccggcgcctaccccggctccgctgcggc

SEQ ID NO: 224619 - DNA, 376 bp, Homo sapiens
  chr13:102068159-102068535
  hyper
cccacctccccacccgcgcgttggcccagaggtttacccaggcagcggccctggtgccgagggggcaggtgcagcgctgtagtgatgcccagtggcctcgtcctcagccacctgccccccaacacctgctagatgcccaggcggggcaggcccgaggtgtcgccggccctgggcttcccaagccagcccaggggcatcccgcggcaggcgcccccgacacccacgcgcaggaatagggagggcgcatcgcggctcccgcgccccggccaggccggcaaggaccccaccgccccgctctcgggtggaggcgcccctccccacccctcccccgcgcggggcccccgcccgcagcccctctagcagcccctctcgcagc

SEQ ID NO: 224620 - DNA, 180 bp, Homo sapiens
  chr13:102068703-102068883
  hyper
cggcggcggcggcgacagtgggcgaccggcaggatcagtgccaggcgcggcgcccagggcgggcggggacgcgggcccctcacctacggcggctcagctcaggcagcgcgctcggcccggctggggccgcggctcacgctcgccgtgtcactcactgagcgccgccgccgccgggcaggc

SEQ ID NO: 224621 - DNA, 900 bp, Homo sapiens
  chr13:102568742-102569642
  hyper
tccgtttaggcggggagggggcgacccggggcgcatctcccgaccatgacccccacagaccttggcgccgcaacctgcgcttcttgaggccgaagatgcgcactttggagaagatatccaccaggttgccgttgcagagcccgcggttcttgctggggctgctccgcctcctgctggcagacggccggtcccagtgctgctcccgcgcctgccgcttctggcggatcaagccgctagcgatggccgcggccatggtggccccgggaacgggtccggggagggagggcgcgggaggacggcgagccgggggcaccggaggggaaggcggcggcgcagaccgtggctcgccctcggggcagaggagggggtgccaggcgggactggggagaggggaaggggggctcagtcctgaccgggacccatcgccctctccgcggggcgcggggccaggcgcgcagatgcgcccagggcgcagccggacgatcccgggaagccggacgtcgtggccgccgccgcttggccacgtccgagtggagagcgggaccgcggctgcgggcgctgctggtcaccgctcgtcgcaggaaccccggcgggggtcgccaccgccactcgcgctgccttctcgccctgcccggctcccgggcgggaggtagagccggccggcggctccccgggcgccggctggagggcgggtcccggcagggtctctgcgcgtccgtcggtccgggtcgcgctgggcaggactcagcgccgggctccagctgcccgcgggccggtgccgccgccggcgccgcccgctctcggcttctgccggtgattgtcaagtgctttggaaatcagcatctggagagaccaatcttctcccctgagatctctaatcaaacgctccgttcccacccc

SEQ ID NO: 224622 - DNA, 180 bp, Homo sapiens
  chr13:102569765-102569945
  hyper
ggtgctaagaggccgagccaaagcaggtggaattgaaggaacatcggggcgctttttcttagatgcaactcgctggttcccgagccttccgcggcttggttggggcttctcggtcttaacgtggttaccggtgcactgaaactctcagcagcggttggagggcgaggtggtttccgccct

SEQ ID NO: 224623 - DNA, 803 bp, Homo sapiens
  chr13:103046525-103047328
  hyper
agaatcaccagcaacgccagctcccttccctttccttcagatgggtctcgggtccagagctggcgcccgctagcgggaggccagaccgggagggccaaggcagccacctgtggctttcccatccctcaggtccagcagtgcacatggggtgcccccgcgtcaacgccggaggagtgaccttgcaaacccgcgccccgcgggcggcagagccggccgctcactgcccggtccccggccaccacggaagagcgaagatctctgccagggcaggagccctagccccgacccgcgccccaagtctctcccgcgcggcggcttccggccgccatggtttccatagcaacaacagcacaagctgccgggtcccagagacgccctagggtcagaggtcatctccgtggcaacggaaacttcccgcgctacggcggctccaacgggccgcttccgccgcattgcgtagcgaagcccccggcgagccgaggctgggagcgcggtgatggccggtccccgtgagcagagggcagcggcggcgggaccggggactctgggccaatgggtaaagccaggaggaagcccgtgcctggcccgttgggctccctcctcctcagagccgaagcagtccacactcggaacccagcttcacccggattaccgaggggttccacgcctggaggcagagctgcagcgtgggcccgctcgcggctttgcagaaaacaaataatgacacacttctctggaagcccggggcctgggcccagagccgtggcttctgccaaactttctggtcccggacaccaactccc

SEQ ID NO: 224624 - DNA, 205 bp, Homo sapiens
  chr13:103450867-103451072
  hyper
atagaaatagcgggcgggaaggacgacgtctgcttttagcccgggtccccatatttcgctcttctccgggctcagctgcctttctccgccggtctcggcgagtgctggaactgtcgccagaaagaagcaataaagtagcaaagtgccaaacatttacaagacggactctcgaaatgatccaccgataaatgaagaagtgtaagag

SEQ ID NO: 224625 - DNA, 2299 bp, Homo sapiens
  chr13:107186847-107189146
  hyper
cctagattgtggccatgtccttcgtcctcgaaaacaggagagggtcaggtatcgccatcggacaccttcccggacttgacacccgagccgatagtagcttttagcgcctgggagcgttcgggggaggaaaggcggagagaccgtccgttccagcggggctcgggttggaaagccgagcgaggagtctccacctagtgaaatggggcgggggttgggggtgggggacggggaaccgaggttccagaaacaggctccgaggccccgcggactgacccctcctcccgcccggacggcgcggcggaccccggggcggggacatagggggatcgcggacgccacttacttggagttcgaggaattccaatagataggctctaaaactatcgatttggaaatcgcagttctgcataaaaccatcaaaacaccccagcagtacttccacacggagtcccttctcacagccatggcgaagccactcccagctccgcgcactccgggccaagaagggactgacgggacgcaggctgggacccccaatcctccggggcagactggcggggaagacggcgtgcgcccgcaggcagctccgaggcgcgctgcgcagctccagcggtcgccgggccaggtgcgctcgctctccggggccctcagggcgcggggcgggagcgcacgcgcggggcgcggcggcgcggcggactcggggttccggggcgccgcgccggacgcagctcggacggccgactcccgtgcggctccagggtgccgggccggccgcggctggcgggtgggcgcggggcgggtgcgggctgggacacaaagacccggagcggagacgaccggcgcgggcggcgggcgctgcgccccgagcggggccgcctgtgactatagatccagtgcagcgggcagcggcccgagcgcgcgggcgccgcgtcggcgcggttccatgtcccggagcacggagcggagtagggcgcctccgggcgcgcaggagccttctcagtccgcgcggctcccggcccccagggcaggaaagagggagctcggtccccgccgcgggctccggacgcgcgcgggcctttgtgtgcggggagggcgccgggacccgctgcgtgcgcagctcctcgctccggccggcgccgcggtccccgccgaggagagtcagcgcggccgccgcgctgtcagagcgctataaacgcggggccccgccccgccgcgcgaagcccattggcccgcggctccgcggccgcgcgctggttggacggccggtccgtccgtccgccatcccctcccgacattgggtgccgcgaggcggggctcgggctgacaggtgagccccgcccctggctcccgcgggcggcgggagcggagcagaagccgggcaggagaagcgctcagcgcgtgcacagggcgcccccggggcggcgagaggccttctgggcgcggtgcagacgtggaaacagcgacggccgagtagcgggccacctgtctccgcgcccgggggcgccttccccctcggcggaatcagagggcgcggctttccctcgagcagtgcggaaggcagcaggctccgctcggcgtcccttctccgcagatgcggcgctgccccgcgtgcaagacttgcactccgcgcgcacccttagagctcccggcttctgcgcgcttctcccgacgcctctcggcgagggcttctcacttgattttggtaccaatcgcctacggctcagtttcagtcagtggggccgggaattgcaagacgattcctgcgacgcggcgccggaatttgcagctctaatcagggcctgagcatcgtcgcctcccgccttctctgcgggcgtctcccttccctcctggccccccgggaaggtggcgcccctggagctttccccgcgtgtcgccggcacaggcacgacgcggggaccgtctcactagcctctaggagacacgcgcgcttcccaaagtgaccagagatttagagggtgtgagatggaaaagtcaaggcatgtgcttctcactcggcgtctgcaagaccccagagcagagctggcaggaactcctcgctactttcccggtcgagcgccggtgctgacgctcgtccgtgacttccacggagccacagcgcccactagcggccagctttgcttctccgcatctcgagcgctctgcggtccaccgacccggatccagcatactgcagcatctaatcaagtcacagttccaaggaaaatctttttatatgtccaacagtaggaagaacacggtagaaataaggcacagtgcaaatgtacgattcagtatgaaa

SEQ ID NO: 224626 - DNA, 189 bp, Homo sapiens
  chr13:108518460-108518649
  hyper
cagagtttcctagaaaaagagccttgccccggtcgtctttgcctcggttgcccttgccgccgccgccgccgccgtctcccggggaggggggcagggtgggggacgaggaggcggagaggagtctgtgtgcctgggcggcgggcgaggactcccccatgctcgccaggagcgcgggccaggagggctcct

SEQ ID NO: 224627 - DNA, 180 bp, Homo sapiens
  chr13:108519263-108519443
  hyper
gagagacggaggaggctggtgctggtggccggcggcgaggctgggtgcagggggcgatggtggaggtgacagggtggctggcgcggctccggtcacccaggcattgtcagcgcgcgggtccccatggccccgcggagcccagcccgctctcccctgccaggggcatgccgcgcctccgct

SEQ ID NO: 224628 - DNA, 180 bp, Homo sapiens
  chr13:108519619-108519799
  hyper
cccccccaccccccaccccgcgctctaagtgctgccgccgccgccgccgccgccgccgctgccgcagggccgcccgcgggcgccgccgccggggctccgactgctgacgccgcctcccgcggagctccgggccgaatcgcctgggctgggcctcccgagagccacagtcatcttcagtcc

SEQ ID NO: 224629 - DNA, 180 bp, Homo sapiens
  chr13:108519860-108520040
  hyper
tttgcgtcatctcctcccgcgccgagctcgctccatcctggcgcagtggcgccggctcggcccgggaggagggagaaggcgcgcgggggcgggcggcggcggggccgcggggcccgggggcccccgcccggctccccgggctcaggcgcctgctctttcctttctgtccccctgtccacg

SEQ ID NO: 224630 - DNA, 180 bp, Homo sapiens
  chr13:108520164-108520344
  hyper
cccgggcagaggtctctactggtgcgagggtctgggcagagtcctctcaactaaggaccgagccacttcggatggaaggtgggggtccgcggaggaagctcgaattggctagaggagggatgaggtgacatttggtctctgaatgcgtctcggatcccggaccgcgagatccatcgctcc

SEQ ID NO: 224631 - DNA, 420 bp, Homo sapiens
  chr13:108520599-108521019
  hyper
acctggaccctctggagcggcttcgaccctccctctgcccccgctgcctgcgtccagaccccctcccgggtgggctcctccgaggacctccgcagccgcgggcgagctgggtgcctgcgagtcgccgccgcagtctgagcctctggtgccccttagcgttggctctcggagttctgagaagggaaaggagacagacactctgggaaaatctggggtcacctcgattccggctcctacgctggatgccgtgggcaagcatcggtctcctttgatctgaagatcctgcccactccgccccttgcccctgccagacccgcgggagcagcaggtggcgtgggtgccagacgctgccggtgcgcaccgagtgcagcgctgccccggctcgccccgggggtcgcgtgggacagcggtttgcggtgt

SEQ ID NO: 224632 - DNA, 760 bp, Homo sapiens
  chr13:109147714-109148474
  hyper
tcaggagtgagctgcgttcttagaattgtagcagagagagaggagggagagagcagaggatcggagggcaggagtggagagaggcgcggtctcctggaacgcgcgggggaacgtggaaaggagggcgcgggagacccggagggctgccccggcggggattagaagcgaggcgggttcagcgtcctgggcgccgcaggaaagtgacccgcagagcgaggcgcggcgccccgggagctggagctcagccccacgacccgcgctgcggcgggcaccacgcggggggcgcgcggggaggggagaggcggggccggcggggactgtgtcgccgccgacgccgcggctgcgggtcgcagaggcgggcagagagagccgccgccgagcgggtggcggagcagtccccagcctccagccggcctggctgcgcgcaaccgcgccggccccgggcacaggggcaactgccgacccctctcacccgccgcgcggggctggtttccgagccgagtcccggccatcgccgcgtcgcctggcgcccggctccggcggacccttctccggcaggtaggggcgtcggcggggcgctgcgcgcggtccaagcgcggggaacgcggcggggcagcctctccgagtctggaggtacgcggggcgcagaggctgttctgcaccgccgggctggggacgccgggagggtgccccgggtcggacttgcggcgctgggtccccacccagagttcccgcacggtgagggttggacgcgtctggg

SEQ ID NO: 224633 - DNA, 720 bp, Homo sapiens
  chr13:110434530-110435250
  hyper
gaggcttcgggtccggccccaggagctcttgtctcccggctgaggaagcggcggcggcggcggctgcggctggggtggcagcccgggctcctccctcacgtcgatggcgatgtagttgagaccattctggaagccggcagaggtctctctgcgcatgggcgatccaccgctcccaggacaaccgaccaagcccccgggctgacccggggtccacggccggccctgcggtgccaaagggggcgccggctgcaactgtcgtggggaggtgggcggctcgtcgccccctccagggccgacacccacgccgccctcgctgcttttcctgagagagacattttccacggaggccgagttgtggcgcttggggttgtgggcgaaggacggggacacgggggtgaccgtcgtggtggaggagaaggtctcggaactgtggcggcggcggcccccctgcgggtctgcgcggatgaccttggcgccgcggtgggggtccgggggctggctggcctgcaggaaggcctcgactcccgacacctgctccatgaggctcagcctcttcacgcccgacgtcgggctggccacgcgggcagcttctggcttcgggggggccgcgataggttgcggcggggtggcggccacaccaaaagccatctcggtgtagtcaccattgtccccggtgtccgaggacaacgatgaggcggcgcccgggccctgggcggtggc

SEQ ID NO: 224634 - DNA, 300 bp, Homo sapiens
  chr13:110435353-110435653
  hyper
ggcggatacggggaggaggcctcgggggacaggaggccgtccaaggagcccacggggtggccgctcggggcgcccggcttaggagacttgggggagctgaagtcgaggttcatgtagtcggagagcggagaccgctgccggctgtcgctgctggtgcccggggtgcctgagcccagcgacgaggccgggctgctggcggacaagagcgaggaggacgaggccgccgacgccagcaggggaggcgcgggcggcgacaggcgggccccgggctcgccaaagtcgatgttgatgtactcgccg

SEQ ID NO: 224635 - DNA, 180 bp, Homo sapiens
  chr13:110439043-110439223
  hyper
cccccgacggacggcgcgctcggccaatcggcgcggcgctcgcgggggcgggccgcgcgcccccgccccgcccccctttctccccgggccgcgtttcccgccgtcccctccccctcccgcgaaggccccggcccggccgggcggggtggggcggccccggcctcattaatcagcggcttg

SEQ ID NO: 224636 - DNA, 480 bp, Homo sapiens
  chr13:110959492-110959972
  hyper
aagcggagacctgagcgcggcgggccgagctccccaatttgttggcgctgccccctcccccccggcggtgcgcgggcggcgcctcaaaggggaggaccctgcggcgcgggtaagaggcggcgggagcgcgcggcccgggagtgtggctgcagtgcgccgggacaccagggctccgcgctccgcactcaagaggctcccgcgtcccaacccctcgcgcccgcgcgttcgcggatccaggccgaggaccgaaaggggccgcccgagcccccggggccggcgcccagagagcccagcaaggccggccgccctgccggtgtgccgccggcgggtgcttctggaagggccaatgcgttcgggcagcagcccctgaagccgagcccgaggtgagagcgacccccgagcggcgcccagaccctggcccgagagcaccgacttggagcgccttgtgcaggctagggctgcacgctctcctgcttggga

SEQ ID NO: 224637 - DNA, 360 bp, Homo sapiens
  chr13:110960108-110960468
  hyper
gcaccgcgctgtccccgcgtctcgcggaccgagaccggcggtgaggatgggctgcctccctcatcctgcgctaaactcgctttgtctgtcgcctctaggctaagtgggactgaccggggcccagagtggacgaaccgccagcatggggagagaccagcgcgcggtggccggccctgccctacggcggtaagcgactttctgcctggtccccgtgggtcacgcgcgcatggacccttcggtgtaactctcggggactgacaagccgggcccgcacgttcacgtctctcttcctccctttcccatgcaggtggctgctgctggggacagtgaccgtggggttcctcgcccagagcgtcttgg

SEQ ID NO: 224638 - DNA, 240 bp, Homo sapiens
  chr13:111213793-111214033
  hyper
accgctgcagcagcgacgtcttccccacgttcatgtcccccaggagcacgatcttgctgtcgggcttcctcatcttcccgtaagaacccccagcgcccccgcgccctctccccgaggctggccggctcgtgcgccctgggcgcagctggaggagcggaccccggactcgccgggacccggattctcgtgaacgctccgggaccttcgcctccggacgcccgggagctcaagagaggaagc

SEQ ID NO: 224639 - DNA, 258 bp, Homo sapiens
  chr13:111214122-111214380
  hyper
cgcccccgcccccgggccctttcaccgccgcggccccgccctatcctcctccgcccaccgcccccgtcccgcccctgctggacctcgccgtttcgcaagcatccgagttctccagccgaggctcgggactgctgcagggtggaaaatgaaagttctgagagcaccttccgcccctccgcttctgcacagccggggctgcggtgcgaggagcttggccgcggggcccgaacgaggcgaaggggccggggcccttgggga

SEQ ID NO: 224640 - DNA, 265 bp, Homo sapiens
  chr13:111268043-111268308
  hyper
gaactgccgtcgccggcgcggtcgttgtcgcattgctctcggccgcactcgcgctgtacgggccgccactggacgcaggtacccgaccgctgaccgcctctgctggctcgcgggggggaagcgccgccgaggggcagcccgcgcgcggggccggggcgccgtgtggcctgcggggcggagtagggagaggacggaggcctcctggaacggcgcggcgacggctgggcgcggcttgggtgatgggagcctccgtgcggggtgacag

SEQ ID NO: 224641 - DNA, 585 bp, Homo sapiens
  chr13:112708093-112708678
  hyper
ttgcaaaccacgaggaaaagccagtttccacccagacggccggctgtgggcaaagggaataaagcgccggtgccgccacgctctgcacttggctctgggcctggcgggggtctggcgcggccgcagacacctgggtgacctgggccgtggttgccggctctgctcggacagagagtctttttatttgtcgcctccgccttctcaccactgaggccgcaggacagcctcgctgcccggggccgagttcggtggacaagggggcagcgcccacagcaagccggaaagagggaggcgcggggccgcgcttggggcctgccgctgcacgccagcctgggcaaagagctgccaccttctgcgggcgaagcgggtcgggacgcaggacggcagcggggctggaggcagctacgtgggtccacacccccatgccctgcaaggctccttggccctgcttctcctctgtctcggcgggagaggagcagcctcggttttacagaatttcagggtcgcgtctccagcgccccgggcgaggccactacgtttaggagcgctcgccttcgctgcgctgtgtaccgtgtacacactggc

SEQ ID NO: 224642 - DNA, 180 bp, Homo sapiens
  chr13:112710243-112710423
  hyper
gggggggagccggagctgctcccaggggaggcctcgcgcggcggcgcccacggccacggtgtccccgctgcgagccaacaaagctgaggcgctgtccgcgggaggagagagcccagcgcggggaccggcgcgggtgggagtgggggcgcggcgcggaaaaccccagggaaggaccgggtg

SEQ ID NO: 224643 - DNA, 167 bp, Homo sapiens
  chr13:112710671-112710838
  hyper
gagggggacccgcggcgggaggcgagagcgagcgaatggggagaggagcggggagcaggaggggacgcaggggagaggggactggggagcggcgagaggaggacgggagacgcggctccacctcccagctcaaaacggcgtcccagctgctcgcaaaccaactgctc

SEQ ID NO: 224644 - DNA, 141 bp, Homo sapiens
  chr13:112711044-112711185
  hyper
gcgcgcgcgcgaggcgaggagagaggcgcgtgtgcgagtgagtgtgctagcgggggtgcgcgtgtgagtgtgcgcgtgtgtgtgcgtgcgcgtggcaccggcgcccgcggctacggggctggcgctgccggagccgggccg

SEQ ID NO: 224645 - DNA, 600 bp, Homo sapiens
  chr13:112711704-112712304
  hyper
cacagctccgcgccccctccccgcccctcgcggctcccccaccctcgcgttcggcagcgccaggctgcgctctccccggtgcacacccggccgcgccgagaactaaatccgcgggctgaaattacgttttaaaaattaacatgttgaagcgtgtgccatttagtgagaggtgttttgggcaaagaatcaatttaactgtgactgaccgacgggcttgactgtattaattctgctaccgaaaaaaaaaaaaaaaaaaaagcaatgagccgcaagccttggactcgcagagctgccggtgcccgtccgagagccccaccagcgcggctcacgcctcagtctcgccgccccaaggtgggatccgacgcccaaaggagggcgccccaaggtgggatccgagcgggccgccctaggaggagtgaaccccgcccgggcgcacagctccgtgcgcctgtcctccctcctccagcgaaatcacacccgctttgcctcctcttgcagcaccgcgcgtgcctaggttctcggtctgcgcagctgggagtctcccccaccagcgccgcggagccgcccgcttccgctccctctttccgcgggtttgagcct

SEQ ID NO: 224646 - DNA, 720 bp, Homo sapiens
  chr13:112722239-112722959
  hyper
aaggtcatgtccgaggccgagaagcggccgttcatcgacgaggccaagcggctgcgcgcgctgcacatgaaggagcacccggattacaagtaccggccgcgccgcaagaccaagacgctgctcaagaaggacaagtactcgctggccggcgggctcctggcggccggcgcgggtggcggcggcgcggctgtggccatgggcgtgggcgtgggcgtgggcgcggcggccgtgggccagcgcctggagagcccaggcggcgcggcgggcggcggctacgcgcacgtcaacggctgggccaacggcgcctaccccggctcggtggcggcggcggcggcggccgcggccatgatgcaggaggcgcagctggcctacgggcagcacccgggcgcgggcggcgcgcacccgcacgcgcaccccgcgcacccgcacccgcaccacccgcacgcgcacccgcacaacccgcagcccatgcaccgctacgacatgggcgcgctgcagtacagccccatctccaactcgcagggctacatgagcgcgtcgccctcgggctacggcggcctcccctacggcgccgcggccgccgccgccgccgctgcgggcggcgcgcaccagaactcggccgtggcggcggcggcggcggcggcggccgcgtcgtcgggcgccctgggcgcgctgggctctctggtgaagtcggagcccagcggcagcccgcccgcccca

SEQ ID NO: 224647 - DNA, 180 bp, Homo sapiens
  chr13:112722997-112723177
  hyper
gatgatcagcatgtacttgcccgccggcgaggggggcgacccggcggcggcagcagcggccgcggcgcagagccggctgcactcgctgccgcagcactaccagggcgcgggcgcgggcgtgaacggcacggtgcccctgacgcacatctagcgccttcgggacgccggggactctgcggc

SEQ ID NO: 224648 - DNA, 180 bp, Homo sapiens
  chr13:112726642-112726822
  hyper
gcagcggctccagaggcgtcggcggcagaatttaacccccggtctgagtccttggaaacttcaagtgaaaagcagacttggccttggcgcggctctctttccagcgtgactatctggcgagactgaaaggccaggccagatggggaaaagtgagcggggtgcgggcccccagtatccggc

SEQ ID NO: 224649 - DNA, 540 bp, Homo sapiens
  chr13:112726970-112727510
  hyper
cgagctctcctcctccctcttcctccccgcctcccccgttcttccctccctctctccctcctccctccccggcccttcctctccagctgcgcgcccgccgggaccacgctcctcccgcccccgggagccgagcggcgtctgcggctggtccggacgtgtcccctccgggcgggggtggccgggcctcctcggggcctcgggcctcccgggcgcacccccctgcctgcgcctctccaagtcgccctttctccggctctgcccgcggctgagccccgcacaccgcgccgctgtccttggggtcccggcacacggcgttccctccccgcccccgccatccactcccaccgcctctccagtccctgtgccgtctccaccgccctctgactcccgcaccgagctgcgtctccgccgccggcctctctcagcgcggcccggcctcctctttgtctttgaagctcccccgccgaggcccgcgcgcggctcccctctccgtccctctccggcccttgggcgcccagtcggaggtcggggcgggatggg

SEQ ID NO: 224650 - DNA, 180 bp, Homo sapiens
  chr13:112727615-112727795
  hyper
tgggagcccatctccctcaggtccgcgccggtgtcagccgccggcggggggcgggtggagattaagatgagtgctgcgagggacggggccgagggttttgtgtagaaggagagcaggattagtggagagaaagtgctgacccggggtcagccgcaagtcaaacccttttacactcagccg

SEQ ID NO: 224651 - DNA, 180 bp, Homo sapiens
  chr13:112727872-112728052
  hyper
ggtccggcgtgagagaggggagggggaggggacgcggccacagcgccccagggcctcagcgtcatcggggacgggcgccgaggggagcgcgcaccagcgacccgggcgcggactggggcctgcagggcgtgactggctgccccccaggactccatctccttcataaacacctgccttttc

SEQ ID NO: 224652 - DNA, 245 bp, Homo sapiens
  chr13:112728205-112728450
  hyper
cgactgcgtccccaggctctccaggaatcttcgccttatccgagcttcttcgcagccctggatctatttctggggggcgtgtgtgacgcagaatcggggtataaaatatcaatgctgtttgtcacgacaccgctttctccacccgggcagagctgcggctcccgggcgttgcgcgtggcgtttttcatcacggagggaaagccgcggctccgcgggaaaggagtgaaaaccgagtgtgggtgaag

SEQ ID NO: 224653 - DNA, 35 bp, Homo sapiens
  chr13:113261127-113261162
  hyper
cccagtgccagagacgactccgagcgagatactgc

SEQ ID NO: 224654 - DNA, 710 bp, Homo sapiens
  chr13:113597560-113598270
  hyper
gcctgtgcccgcggcgcctgtgctgagtcccgacgctgtgcgccccactcccgaggctgtggttggggggtcgcggtcgagctctagggcccccggccgcagagcccaggcgcggggagggcggcggctcccagctcccggtccccggctccgcgccgcaggcgtgaacgcccaacggagggcgccggcgcccgggagaggcgccgccttggttgcaggggccggggcgcggcggcccgggctttgagagacgggccgctcttcccggcgcggtgccttccagggaggctgcgcctgcagcaccgcagccagagccgagactccgcgcctttcaaggaggaggccccgtgcaggcgcccaggcgcagaggaggcgcggggggcgggacctgccggccagtcccttacccggggacagacggggaaggcgggagcgctcgcagttccctcctggagggaccacaccgccgggagcccgagcagcctgcggtggctcggctcgggccggcggagatctgggagcattttctggaagcctccacagacttcaggcggaccggaaggacctggcgggaggcgtagtaggcggggtgaggggatctcggtggcagcggggacagcgcggccccgagaactgagaactgagagggagacgctctcgggcctctcagaccagcattgaggagctgagccctgcgggccaggggcgca

SEQ ID NO: 224655 - DNA, 87 bp, Homo sapiens; identical to SEQ ID NO: 203465
  chr13:113951225-113951312
  hyper

SEQ ID NO: 224656 - DNA, 180 bp, Homo sapiens
  chr13:114017970-114018150
  hyper
aaaggttcctccccctccctccgctccgggagcccggactttgcccggcccgtcccagcccaacccacctgcgccctcgggacccacctgcgcccccgggacccacctgtccggctcctggggacgcccccgccctgcagcagccgggaccatttgatcgccctgcgggtgagcgtgacc

SEQ ID NO: 224657 - DNA, 105 bp, Homo sapiens
  chr13:114285598-114285703
  hyper
aacttgaccgttagcgccttgtgtgcggtttgggggtcacgctctgccctgtcctgttcttgcttgcttgggtcgtccgaagtttcttgttgcttttgtctaatt

SEQ ID NO: 224658 - DNA, 420 bp, Homo sapiens
  chr13:114285861-114286281
  hyper
gcgaacagatggtgggcatggcaccctcgccgtgtgggaggggactgactgtctgaattgtctttttcgactgtaggtaattggtacgcctcagagaccggcagcgtcaaacaccctggtggtaggaagcccacacacccccagcactcactttgcctctcagaaccagccttccgactcctcaccttggtctgccgggtgagcacttccctctggacccttagagttgtaggactgcttgcggttcgcacctccacgttctcctgggccacgtgtgtcacacagtcgtgcgatggggctcccacgcgcgttgacgccagcctccgaatcacactcacccatcatcgtggcctgcacaggtgtgcagccgaggcgcactgcctcggtcatggagaagtcgggctgggcaccgcccacccc

SEQ ID NO: 224659 - DNA, 342 bp, Homo sapiens
  chr13:114566180-114566522
  hyper
gacgaggcgcggcccgggggttcctcacctccagcccagcagagggagggccgcggggaagcggtttgggttttaaccattgtgtttctctcgcactttggaaacggactcccggcttccccgcggggaggcgtctgacagcgagcgtttcccggacagccccgcagcgtctcaccggcctgcgcggggatcccggggtcgccgggggatgggcgtgggggacgcggggcgggccggggctcctgggaccctgaggccaggcctcgccgcgcggagctggggggcggcagcagcgctgcctctcgggagcggttggaggcgcgcgggcgccaggggttcccc

SEQ ID NO: 224660 - DNA, 171 bp, Homo sapiens
  chr13:114776329-114776500
  hyper
gaggcgccaggttaggccatctgcctggcctgttcagccgcttcccacacctgacaggtcagatgctgctcctgccacggggccggcgacgagccacaggctcccgaaaaaggcaaggggttcactttaggaggggagaggtgagcgggacggggacgctcaggtcctggg

SEQ ID NO: 224661 - DNA, 105 bp, Homo sapiens
  chr13:114776782-114776887
  hyper
ccagatcgaggggacgaaatgcaggagtcacctcagagctgctgtggcttgtgcatgagctacggagaaacaggggtagcgacgcagatgggactggagggggtg

SEQ ID NO: 224662 - DNA, 176 bp, Homo sapiens
  chr14:21121403-21121579
  hyper
tgcaactctagtcgtccaataagctttaagttggttggaactcgccttagagagataatcctgcgccgatcgccaccgcgctccttttgcggcggaacaaaatcctctggctgtggttgactggctttccccggcatcgataacaacgacccatgaggggcgagccgggtaggggg

SEQ ID NO: 224663 - DNA, 165 bp, Homo sapiens
  chr14:21150255-21150420
  hyper
gggtctgggcatatttggagtagagatcaaggttccacttctgaaacgggaagagccagcaatggccgctccggccaggcgtccagaagagagatgcacgttgtgaggcaaggtttcatgtgccagtggggttttgggaaattaagggcccgactttaggggcga

SEQ ID NO: 224664 - DNA, 180 bp, Homo sapiens
  chr14:21150453-21150633
  hyper
gaaatgtggccttccttttgaatgagctgcaaatattatctccaaaagcgaattcacacagaaacattgggtttgcccagatgtcctctatttcaggggttcccaacccttgggccgcgcacctgtccatggcctgttagggacccggctgtacagcaggaggtgaactccgggctagct

SEQ ID NO: 224665 - DNA, 264 bp, Homo sapiens
  chr14:21152787-21153051
  hyper
aggattcaaaagaacatctttgcgttttctaccggctccccatcatcgtactagggaggaagaagcgggtgagaaacaaaacttctttccattgtcctgcccgtttctgcggacttgttctgaggccgaggtaggttcacactcctgctcctcctcctcctctctggtagcttcataaggggcgtttaggccggggagtcctttcctagtagaggcagcttgggactccttggggaggagtttgcgggacggggctggagaggg

SEQ ID NO: 224666 - DNA, 464 bp, Homo sapiens
  chr14:21493801-21494265
  hyper
agttccgactccctcgtgcccagagtcctggtacctctcctctctttgctgcgtcccgacgcctgctctccggctgctccgggagaagttggacaacaaggcggggaggtgggggcggggaatgcggggggccgctataaatagagggcgatcgcgggcaggcggggggtggggagaggatggccaacagggactctggggtcaatgcctcaaggggcgcgggggaggggccggggacccccagaggctctgactcctgggtaaacaggcgcaggggcggagttaaccctgcgggggtggagtaggggcttggggaggacgcagtgtcctgggctgggacccaagagaccctgtggcttcgccgctaacccctcccagtccggcccagaataggagaccagctcaggcccgctgaatcgcaatgcccgggggatggtctcagggtctgccgcgtccctctcggt

SEQ ID NO: 224667 - DNA, 338 bp, Homo sapiens
  chr14:21769056-21769394
  hyper
gtcccaaataacccgtagaaataataactgtcatgaaaggagaagccacgtgctctatttgtccacaggctgaggaccaccttgctgcggttgaccgctgctggccgggacctgcgggtcgcggaggaggcggcgccgctctcggagaccgcaaggcgcgggcagaaggcgggatggcggcagcgcctctccatgcaccagcgcccccagatgcaccgactgcaagggcatttccactgcgtcggccctgccagcccccgccgcgcccagcctcgcgtccaagtgggacacagacagctccacacagccggtgcaccggtgccggagaaacccaagag

SEQ ID NO: 224668 - DNA, 196 bp, Homo sapiens
  chr14:23355351-23355547
  hyper
ccgggctgggaggccgcaccacgacctacccgttatcctcgttggaaacaagagcgacttggcccgctcccgggaggtatcactggagggtgtgtatcctgaacagattccatacttgcgatctcaggggaatgctctcccttccaagtcacctcttctccctaaggcctttttaccatcgcggacgcactcactt

SEQ ID NO: 224669 - DNA, 188 bp, Homo sapiens; identical to SEQ ID NO: 203499
  chr14:23776071-23776259
  hyper

SEQ ID NO: 224670 - DNA, 582 bp, Homo sapiens
  chr14:23834817-23835399
  hyper
gacgcttgccccaagttgcctggagccaaaggcccccgagagcgtggccgtggggctgggtcgctggagtggccgcttcggcccagacactcgcacccccggcggtgcggcggttttcacgcgcgcactcactcagcgcgcccgggggtctgaggtcgccgctacggcgcctcgccccgggcagcagcaaccagcacgcaggcacccctggaacaggcgggactgccttcccgacgcgcggcctgcgcccaggcggcggaggggcccagcccccttccagtcctcggctccagggcgcagggccacgagctcccgctcccaccctcggcccctggcacccggcgccggctccgccgccctctctcacacgcacccttggcagggccccgcggggcgccccaaagcttgggggcagctcccaggtgtctctgggaagggaaagaaaggccacaaagcaaaagaaggagcaaagagaaggcgagggaggagcaggggcccgggtcctgtggactcgcctgggctgggagtggggacactgagagggctgcgaaggctccgggggtcgcgcgtggcccgcaggct

SEQ ID NO: 224671 - DNA, 104 bp, Homo sapiens
  chr14:24550914-24551018
  hyper
gcagtctgtttcggtccagagcccgccccaggccccgacgctccccgggccccccagctgaccgttgctccagtcaggcgggcgccccacggtgcagggccggc

SEQ ID NO: 224672 - DNA, 180 bp, Homo sapiens
  chr14:29235944-29236124
  hyper
ccaaaaatttttttacagccctagtgtgcgcctgtagctcggaaaattaattgtggctatagccgcctcgatcgctgtctccccagcctcgccgcggccgctccgggacgcgcccgcccgccgcccggctctccccccctttgggctgctgctgctgctgctgtgactgctgctgcgaga

SEQ ID NO: 224673 - DNA, 180 bp, Homo sapiens
  chr14:29236302-29236482
  hyper
tttgctacatgacttgccagcgcccgagcctgcggtccaactgcgctgctgccggagcgctcagtgccgccgctgccgcccgcgccccccgcgccccgttcggcacccaccggtcgccgccgcccgccgcgccgctgtcccgctcccgcgccgccgccgccgtttccccccgacgactgg

SEQ ID NO: 224674 - DNA, 145 bp, Homo sapiens
  chr14:29236671-29236816
  hyper
ccgcaaccgccgccgccgccgcagcagcagcagccgccgccgccgccgcccccggcaccgcagcccccccagacgcggggcgccccggccgccgacgacgacaagggcccccagcagctgctgctcccgccgccgccaccgccac

SEQ ID NO: 224675 - DNA, 282 bp, Homo sapiens
  chr14:30397158-30397440
  hyper
gcgcgggagtcgcaggagcagcggccgcagtggccgcagggtgcccggtcgccgccccctccgcccgcagttcccggggcctgagcctccgcgagccgggataggaccgagtggcggggctcggagccgcctcggcaggcgcggcccttccctccctgcagggattcccgtcctctcgggtcccgctgccccgccccgactgcggacggagtggatggggtgcaccgcctcagacccgcttcctggggtcgcgaacttcccgggccccaaggtccctgccac

SEQ ID NO: 224676 - DNA, 540 bp, Homo sapiens
  chr14:33403736-33404276
  hyper
caccgccgccccccaaaagggaaaaaaggccccaccctgacacgttttgctgtttgcaagtccctcgcacgccccccgcacctcctcctcgcgcttgcggccccccccacccccagcccgctgcgcgcacatcaaagctcctctccgccgcgcacagtggccgcggctcactaatgggattgcaggctggtgcctggctccgctgctgccgccgccgctgctcgcgctgctgctgctgccgccgcccgagcccgagcccgagcccccgccagccagagcccagagccgccgcgcccgggggccgaagccgcggcgatgatccgaatctttccggatttcagcgtgcaggtgacggccgcggcggccggcggggcggccgcgggggtgccggccggcgcgggcatggggagggccggcgccgcggccaacggcaccccgcagaacgtccagggcatcacctcctaccagcagcggtgagtagtcccgcctgggctgggatagtgcccccgccccggggtgctggggtgggactcactttgc

SEQ ID NO: 224677 - DNA, 420 bp, Homo sapiens
  chr14:36003248-36003668
  hyper
gggagaaagccccgcccccggcgcccgctcccactcctgattggccgggccagcccggggaggcccggcgggaccccggcccgcgtctcagctataaagatagccccggcatgacagccgcggcgaagctcttctagttcatctgctggccggctctcagtccccgtggcgccccctttcctcttgtcccagagcgctctcgactccaccatgccaaggggattcctggtgaagcgaactaaacggacaggcggcttgtaccgagttcgccttgcggagcgtgtcttccctctgctggggccccagggggcgccgcccttcttggaggaggctcccagcgcctccttgcccggcgcggagcgggcgacaccccccacccgagaggaaccaggaaaggggttgacggcggaggcggcccgg

SEQ ID NO: 224678 - DNA, 1140 bp, Homo sapiens
  chr14:36003716-36004856
  hyper
ggcgggcgggaaggcgcggagtggcgggcgggtggcagggaaggtcccgggcccagccccagccccagccccagtccagcgaagccggcaggcgcagagctgcgtcgggcgttcctggagcgctgcctcagctcgcccgtctccgccgagtctttccccgggggcgccgccgccgtggccgctttctcctgctccgtggcgccagcagccgcaccgaccccgggggagcagtttctgctgccgcttcgggcgccgttcccagagcccgcgcttcagccggaccctgcgcccctctcggccgcccttcagagtctgaagcgggcggccggcggcgagcgccgcggcaaggcacccacggactgcgcgtctggacccgcggccgcgggaatcaagaagccaaaggccatgaggaagttgagctttgccgatgaggtgaccacatcccctgtcctgggcctgaagatcaaggaggaggagcccggagcgccgtcccggggcttggggggcagccgcacgccactgggggagttcatctgccagctgtgcaaggagcagtacgcagaccccttcgcgctggcccagcaccgctgctcccgcatcgtgcgcgtagagtaccgctgccctgagtgcgacaaggtgttcagctgtcctgcgaacctggcctcccatcgccgctggcataagccgcgtcctgcggctgcaaacgccgccacagtctcctccgccgacgggaagccgccttcttcgtcgtcttcgtcctcccgggactccggggccattgcatcttttctggcggagggaaaggagaacagccgaatagagcggactgcggatcagcacccgcaggccagggacagctccggggcggatcagcacccggacagcgccccgaggcagggcctccaggtgctgacgcatccagagccaccgctgcctcagggcccctacacggagggggtgttggggcgccgggtacctgtgccgggcagtaccagtggtggcaggggatccgagattttcgtgtgcccatattgccacaaaaagtttcgtcgccaagcctatctgcgcaagcacctgagcactcacgaggcgggctcggcccgtgcgctagcgccgggctttggctccgaacgcggtgcc

SEQ ID NO: 224679 - DNA, 180 bp, Homo sapiens
  chr14:37132679-37132859
  hyper
tcgcactccgtcaccgacatcctgggcatccgctccatcaccgaccaaggtaggggctcagaggctgggcgtgtggatgtgcagcgtctgcccccgcactctcgcggaggtcccagtatctgcagcctcagggacactgtctttcccaccacctgaggctttttcctttggaaacgtaag

SEQ ID NO: 224680 - DNA, 229 bp, Homo sapiens
  chr14:38080395-38080624
  hyper
cgggggagggcgcgcggctcgttgctgggcgaccgagcgcgtcctctcttcggtggagccagtcgagcccacccggcccctaggcacaggaaaggcctgttggacactcgccgagcggcggggccaagctcaccgccacctgaattggagcggaggcgccctcgatgccgggtgagaggagaacgcggcctggggcgcggtgacttcgtgtgggcgctttgcgaaggag

SEQ ID NO: 224681 - DNA, 180 bp, Homo sapiens
  chr14:38678039-38678219
  hyper
acctttggttcccacccgccctccagtaaggccgaggaactctcttggttcctctgagagcaagaggcagatggtgctgcgagggaaccccggaaggagccactaaagttgagcagagtgcaggactgggaaggaaaaaaatggggggcgggggggacaagccacctatgtgctctcctc

SEQ ID NO: 224682 - DNA, 213 bp, Homo sapiens
  chr14:39735565-39735778
  hyper
gtcctaaatttagaaggcaaggtgctacttttagctcctcttctcggaggaaaacagcacgcaccgcgccaggccaaggtccacggggatttgatttagcatttgggtaactggccgctaatggaactgaagacagctgggcctaacaagtgcccaggtgactcaggtaagcgaggaaaccagatcgaggttctcttgcgtgggacaggttaa

SEQ ID NO: 224683 - DNA, 105 bp, Homo sapiens
  chr14:42075355-42075460
  hyper
acctcctttccagtcgcacctctttcctgctttagaccctgcgtctgtgccggtgaccttagagactaggtctggcttatgaagactgttgggctccctttctgc

SEQ ID NO: 224684 - DNA, 600 bp, Homo sapiens
  chr14:42075695-42076295
  hyper
ccctaagcagccgaagcttgactcagtgatgattctctctatcccgtaactgcgaggaagtgggcgatcagcaaattgcccttttgcaggaggctggggacgcccctggaagttcgctttcattctccaggttttctgccttttcccttcccccttcctgcaacgcccccgcgcctcctcagcctggggatttcctggcgcttcgccggccctctccgcaaccccctgataaatcggttcagaaccagtctggctgggaggcccgagggctgacagcagcggagcggccccggccggggtctcacggactctcggggtctggccgacacggccgctcccgtcactgcagcgcgggctgagctcacggccgcgcgcccgccgccgccgccgccgccgccttcatgctgcagcgcagggctcagttccacgcggccaggaggccgccgttgcccacacgcgacgctttgggaagcccagctcccgggtccgccccggccgcggccgcagccccggacctcggctgcttgcctcgcgcctgaactgcggactcgccccagcgcggtggccagcgggcggggcgctgtgttccgcggcgcgcag

SEQ ID NO: 224685 - DNA, 116 bp, Homo sapiens
  chr14:45431367-45431483
  hyper
caccatggaagcaatcggtttggtcacgtggtgcccttggttacgcccggtggcagctgtggggtctagggctcagacgggggccattttgccagaggctgcctcccggagttggg

SEQ ID NO: 224686 - DNA, 574 bp, Homo sapiens
  chr14:48145028-48145602
  hyper
cggctgcgtggcgtccgctcgggccgctgctgcggcagaggtgccctggttgggcggctgggcgcctggggttcgacgccggccgggatccctgggtgtgcgcggagatgcgcgccgcggaggcgaatggagggaggaggagaaggagaaagaggagaaagaggagaaggaggaggaggaggaggagggcgaagcggcaagcgcggggcgcaggcggaccggcggccgggctgctgggctgctgggctgccggggaggaaggctgtgtgtggtcacgttgtgcgctacgtgctgagagcgcgagctgctagccgcagccgggcgacgtcaaagccgggtgcgcggctctgccgcctgcctccgcgcctcctctgcccctcctttgctctgccttcctgtgtcagccgagctcatcagtatggacaacgccgaaaggctccgcgaggccggcggcatctggcctccaacctcccccgccaaagcgctccctcgcctctcggggagctccgcggtggcgaatgcccgttatgtatttctgatgccgccgtctgcgtttgcacgctgaagggccagc

SEQ ID NO: 224687 - DNA, 258 bp, Homo sapiens
  chr14:50999540-50999798
  hyper
gggcattcgtgggccaacgggccttggctaaaccgtccccacatttgtcaggtaggcctgtagggtgacgggtagaggaagaagggcgatgggaacgtagccctccaagttaaacacggaaaaggtacgttaagggcaccgggccagaagtaacctggcagcggggcgccggggaaggaggtgggggagtgccaggttaactaagtcccggcacaccctactgcaccttcctgttttgcaaaccgatcccggtggtac

SEQ ID NO: 224688 - DNA, 300 bp, Homo sapiens
  chr14:51027699-51027999
  hyper
cccgacgtggtaccccattcagaccagccccaagggtggctttgttctttgattttaccttttggagacattgggctcatgattcagcaccaggccgaggggaggggaaaggagaggcgagacccagtatgttcacaccgcgagtgggtgggcggtgctcacgcaggcggagaagaacgggcgcagcgatgcggaagaaatcgcggccccgcccgccttgctgctccagacctagttctggacggttagtgtgggcaggctgggcgtctttttgtcgtaggttcccgatttcttgcagtc

SEQ ID NO: 224689 - DNA, 600 bp, Homo sapiens
  chr14:51410479-51411079
  hyper
tccagggcagagaatagtgtccggcatacaggacaagaggcccccgtcacctcttgattaaatgctgagagtcaaagttccaaaaaagtttgtgaagtggacaggcgagaggggcctgggcttttgcccacctggcggtttccaggggcggacggcacagtggtttgggcgggacactggcgggtggcacctcggagacatgagttcggcgtctgttgggaggcctaatctgtcccccaggctgcccgcccacagcctagacacgtctcctctggacttcggggcaaggaccgggtgcaagggaccactctgaggggttctccacctcgtcccgcccggccgcggccggagactccgactccgggctggaccccggcccgccgtcccgcccccggttaccttggggcacttgtcgtagtagtgctgctgcgtgcggatccagcgccccaccaggtggtcgcgcaccgtgtgcgccagcgcgaagtagtagtcgcgggtggtggccacgttgcggtccttgaccagcgtgaagtgcaggtgccggttgaaactcttcttcagctctgccacgttctccacgcccacgatgccgcggatgct

SEQ ID NO: 224690 - DNA, 1500 bp, Homo sapiens
  chr14:51560876-51562376
  hyper
ggctggagtgtttgccctcctccaagcactggtagcacacgggcatcttgcattgcacgcagtacatgctgtggttctccagctcgtggtctgtgcaggtggagaccttgcgtgggctcagcctccggctcacacgaccctgggccgggggcaccaggcggtgcttggctaggggcccccggggcgggtggcagcgcaggcggcacggatcgcagtagaagacatcgcactgttcgcacatgacggtggcttccttgggcgccttctcgcagagctggcacttgagggccgcggctttgctctgctggtagcggtcaattaccccttccagtacgcgattcttggggaagccgcggagcccccggtcatccaggatgaggctgcggtgacactgggggcaggtgatacaggagttgcggggcaccggggccagggccggtgacaagtgggtggccggtggcggcatagccgggggaaacacgcggacgccgttgggggacttctggcacggggtagtgggggcgctggcgaaccccccgtaggagccatagccgctgtccgcctcgctgtataggctcatcttgtccaggtccagatagtcatagtcggagaccccggagcccgcggcccgatggctctggggggattcagactctggggtctgcaccaggatgttgcgggcgcacgcctgacacaaattgtgagagcagggcaggatgatgggctcccgatagaaggagccgcacacggggcatttcaactcctcttccatctcctccatggggaccggtctgggaggagacagcgacggctgcagcgggtgcctgagctggcgaggtggccgacgggcccgtcttgtccagcaccctggccagcggcggcggctgtggtggtggtgccttcccgcgcagcactggcacggacacccagagaggcgctagctctgtgagccgcagccgcgtagccgccgcgccgcgcgccagcccggaccgcccctacctgccctcctagtcccgccccggcccatgagcagcggcccattgggcggggggcaagagatcgaagctctcattggccaccagacccgtccgtctcctcgtctccgcaggccacagggggttcggtagagtctgaggatagggcagtcttcgctcgcggctgcaagatctctgaagggggccggcgtgcggaggctaggggaccgggaaggaggagttaggcgggatgattcatcctcgcccggcttacttccgacctccggtgcagtctcccaggagctgggggcgtgagaaacccctccccgcagcgagtgggctgccggagggggctggggcttctcgccagcgtttgcgtttggctcccagctctgagctccgcgcccacctaccgcgggcgagtgctgcgcagcacggaggacgccccttctcttccgctgctggcagccttcgcaggcgtctcacccgggcctaggcttctgcacggcagtggggcttttctcct

SEQ ID NO: 224691 - DNA, 240 bp, Homo sapiens
  chr14:52118254-52118494
  hyper
cgcacctccgtctccacagcagggggaaaggccctgatcgccgtggtccacaccaccgcgtccacctgaggctcgcctcgcttcctgggtccctagaggggtggcgtactccgctttctcctgcccccaagtggccgcacccctccgcgggacgcttggttgggtccagggcggggcgggcgggcgctccccgtactgccgcgagctcagcgcgcagctcccgcggctcggctgccgccg

SEQ ID NO: 224692 - DNA, 38 bp, Homo sapiens
  chr14:55032358-55032396
  hyper
ggccccagaagggccgagggtcagccgagcggacgaac

SEQ ID NO: 224693 - DNA, 155 bp, Homo sapiens
  chr14:56047824-56047979
  hyper
ccttggggacctcgccggaaaactacgcgggaagtctagagaagtcgtctggctctcagccatacgtctggtgtgggatgtgcagccccgcatgctggcggtgaaggcgctgggtgcactagatgtgggcagccccggacgcgggcagcggcgtc

SEQ ID NO: 224694 - DNA, 567 bp, Homo sapiens
  chr14:56585472-56586039
  hyper
tggtcccgggcagcggcgcgggcggggagcgcccgcatcctggagcggggctggcggggtggctcggtgctctttggggaccgccggggcgctcggggcggcaggagaggctctcagggcccggacggcggcgcgggggcgggatgcgccccatcggcgcgcgctcggggtgctgcggcggacgccgggctgcgctgtccgcgcggaggacgcggcggaggaagtggccagaactcgggcgacccagcgggggcagcgccgggcaccgggtccgcggccgtatcgtgggggcgggggcaggggctccacttcccgcgcgccgcgtccgggccggggagggcgggcagggactccatgtgaggcgccgcggtcgcgggcgcttcgcggggtcgcttcccgaagctgagaggccggccggcgcggagccccgtcttcccacctccctcgcggaccgtggtacccgcgcccccgaactccgagcgcggcgccgtgagcttgggccgccgcgggctgtgggatccccggctgcgctttgcaaattgttccgatgaccgccgcgggccgccg

SEQ ID NO: 224695 - DNA, 176 bp, Homo sapiens
  chr14:57265894-57266070
  hyper
gacctctttggaggacggcgtcatttcagtaccaagtatcaccattattgggcttattaacttcattaaaaccggtcttgactaggagtggagatcggaactctctggatgtctttaagccagtgttcgctccccgcctccttccctccctccgttgccttcggtcagaggaattc

SEQ ID NO: 224696 - DNA, 240 bp, Homo sapiens
  chr14:58862950-58863190
  hyper
ccactgggcccacgcgtgcctctggacgggcctcccagccagcatgtgccgtgttgtgttcgcagaaagaagagcagagcctcaaaaggctgaggagcagggcacgcaggtgcagtgctttcgatccgcacaggtagctcagtagacgcaggtccgggctcgctgggttgcttggctcctggcgggctcggcagcaggtagttagttccctcagccgcccgtgcccgggaagaggcctgc

SEQ ID NO: 224697 - DNA, 283 bp, Homo sapiens
  chr14:59932020-59932303
  hyper
gccgggggctagcggccgccgcggggagctgggctcggccggaggggtggcggtcgctggggacctggcggagcctttgacgtgggttccagcgttgccgagggaaccgcgtgtttacgcaggagcgcggggcgggacggcagcccagtacccgctgcaaagccgacccgcgacaccgccactccggaggttaccggcccgggtgttcgggtttccgagagtgccaggtcgacctcctgagggaccaatgtccggccagataaagtgccgactggcatgcaaa

SEQ ID NO: 224698 - DNA, 401 bp, Homo sapiens
  chr14:60097172-60097573
  hyper
tccagttgctccacacacagtccatcttggtggaatcggcagtggcctgcatcgtgcgggctttgggggctcgccgtggctctcctcgggggcgccgagcgtgcactcaagcgttggtgcccggctgctgcggctgggctcgcagtggccgcgcggctgcggagagactgaggctgcaccaggcggcgcgcggtgaggggcgggagcgtcgctggcgccgcagtctgcgcggccggcagcgaatcagcgcggcgcggccccggagccgcctgcgcgcatggggatgcgggcgccgctccacgcgacagcgttggctgggctgcccaagggtgctaccctggagacgggtaaagcggttctggccgcgaaggcgctgacgcggacagtgggtgggaggtttg

SEQ ID NO: 224699 - DNA, 840 bp, Homo sapiens
  chr14:60385922-60386762
  hyper
tcaaaatacaatgcgtaccttacagcacatgtcaatttggacaagccacatttcaagcgatcatgggccctgcgagtctgtgggtagcggctcaccctgctggactgcgcagatccagagaacgacacgagacctgcggttgctttggtttgccttttactaagttcatttctcagcctctctgcccactctgaaaagtctcccctttccccccttttaattctactctattttgtaaattactgttgtctcctgaaaattttggaatgcttaaaaggcactcaaaagcctgtccgagatcgactagaagaccctcggaaggtccctctcttctctggacctcactgggcgttcgtttgcccgcgccgtccttccattcggcttgccgggcgcgcagcggcttgcggctgtggtcagccaccttcccgggaggcggtggtcgctggccgcgggaaggatgccgcgctgggggtcggggttcgtcccggctgtcacgccaccttgtgacatcacagggccatgccctcggggctcaaggccagagaggctccgcgcttccaggacccgagagctaaagataatgaatgggagagagcgagactggaggaggtaacgaataagtccccaccaccttgcccataacgcgttgctttcagtcacgttccgcgaactggcgaaggtaagtgaaaagataagcgcaggtacagaaaaacctgccagcgagaagctcccgccgtttcccaggagccccaggtggggtcttccggttggacccctgcttccgctgattggttggaggtcgccaccacgtgatgcaaacccgggtcggcctccgcttcc

SEQ ID NO: 224700 - DNA, 344 bp, Homo sapiens
  chr14:60973758-60974102
  hyper
cctcagcagctaggcgctgggatcggggtcggctctcggctcggctcgcgggctgtaaggtctccgcggaccccaccgcctcttctgcgcgctaagggtgagcgccaagcaatttcgcgagcaatagccggcaaagtaaccaccccgagagggaaaataaacctctgcaaactggagcaagggggtgctttcctcccctggccagaagctccgggatcgcagccctcccgggtccggcttcatccctgcccggccaccgaggccctctttttctgcaccgcggattctcctccgcctgcgtgttcggggcccttgtatccgatgtttctttctaaaagttgtcc

SEQ ID NO: 224701 - DNA, 447 bp, Homo sapiens
  chr14:60981478-60981925
  hyper
caaagagaatgtgaatggggcgggaggagaggagaagcagcttttcgctctattcaacggggacgcgagagcgcggacgatttccgctccttttgtgaggcggagcccgggggcggccgtgaatggggggtctgtggagcggccggcggggctgtcaggcggctctgcgtaatcagggctaatgacggcggccgggcgctcggcgggacaatgcgcggggccgcggggttttgtcggcctgaatggctaataggtttgcctgtgagctgcgagggggcggtgtcggggaggaggcggcggcgaggggagaaggggtcattgtccgcgcgctggcccgggcgccgaggcgtgtccctgcctgcgccgcgcggctacccccgtgcccggcgccgccgacgggaaggcagcggcggggaggccccctggaggcctgctgggaaatggcgg

SEQ ID NO: 224702 - DNA, 660 bp, Homo sapiens
  chr14:61123308-61123968
  hyper
gcggcgtttgtctgaatcaccagtcctctgagcagtgggaaaagagatactgggtagagggtgctgggaaggtgcccactcatccatgcccctctgcgcgtctcgcccactcgcttaggcttggactttgcaacaaggtttccaacaccgctgcagtgcttgacaaagccctcctggaagccagcagggtgaggctgccagcaagcaggcgggctgcgagggacgcttttaggactaggaagaaggccgtaagatctttccttacctctactcaagttcacccgccaccctcacccatcaaccctcgtgcaggcccgggtccacgtttcgcggactgatcctgagcctcagtataactcgctgtgccaggtgcgcgcgcgcagccaagtatccgcgcgcggacgccggggaggcttcaccgcccggtgtgctggcggccccgcccgctggctcgcagagcggggtctcgcagagctgggcctcacccgtcgccccgccgcctgcaccagaaactccctccccgggctgtgcgggagctcttgggcgccgcgtctgcgccggggccgactccgcccaggcttgtagccagaggtcgcgctatctcgccgggctggcccggcgctctctggggttgttccctcgggcggtgcatggggccca

SEQ ID NO: 224703 - DNA, 585 bp, Homo sapiens
  chr14:61124041-61124626
  hyper
gtggagcggagagccggcgcaggccggcggcggcgcggccggaggagaaagagggcgctgtcttcctggcaaaggagttttcgcctggccggcaggaaccgaaacaacaacaacaacaaaaaaaaaagaaagaaagaaaatctgctccgccgagtccccggagtgaagagcgcgcggcgggaagggtctggggtagcggagcggattctcggcccaaagcctggggaccgctcagcccaccttggcttcgccagcgccacgtagccccggacggcactcgcgaggagggagttttctttggcttctttagctgtttccataatcgccttcttttagggccatccctccctcactttttccctccaaaaactggaggcgttgggataaggacggcgacgcttcgctggcgaatgaggtgcctcaatttgcccgaggcgagcggggaaatcgggatctcctttcatgaagccgagttggcttctcggtttcgtggaatctgcggccggaagccgcgaccccagccagtcattcgcgttgaagcgccgcagcaagtggcaatgcttttggccgcgcattgcccaggaa

SEQ ID NO: 224704 - DNA, 840 bp, Homo sapiens
  chr14:61747192-61748032
  hyper
gcgccgtgccctggaaggccaacgccaggctgccgttgaccagcggcgggttgcggaacttgacgtggtagtcggtccaccaggcgatgccggagcggtcgagcggcacctcgacgtagggcccgccgggctggcgctggtgccaaagcgagaaggagtcgttgaagaggctgttggcgatggcgccgcagggcgcgatgggcaggccggccgcgctgcgctggtagggggcgcactcgttgacagggtggcgcagcgcgctggggagtccgctcagctgcgcgtcgtcgcgggacacgccgtagcgccggttgttctggtagaagttggtcagctcgtagtagaggtacactgggccctggaagagctcgggcagcgagaagtaccaggcgcacgagcaggggggcggcagcgcccggccctggccagccgcggcgcacaccgagcagttaccggtgcccgggtcgcctgtatagtcgtactccagctccttgatgccgttggaggagtagtagaggcccaggcccaggccgatgaaggccaggcccgcgcagaagaagagcggcagcgcgatgctggccgacagcagcggctgccaggcggggaggcgctgctgagtgaaggcggtgttgtcgggctggtgggcgccccgggccgtggcgctccaggtcatggcggccgcgcggggaccgacgcgcgggctgaccgagtgggggccccgccgcggggcgcctccctctccgcgccgcgcaagcccggggactgctcgcgggtcgggtttcccgccagctcaggtgggtttttgcccgggcccctcctctgcctccgtcacaggtgagt

SEQ ID NO: 224705 - DNA, 256 bp, Homo sapiens
  chr14:62105861-62106117
  hyper
gcattaatcgtaaccgctaactgcatcaaattaactgtagtacatactgtactactgtcatcattttatagccatctcctgttgccgttgtggtgagctcaactgttgcaggtatccacttaaaacgcgtgtgttgctaatcgtctccaagtaagcagtttatctctctactagatttcttattgttgtaaaaagtgatcttgcggttctcctgtgtctttcatcctgtttagtgcaatactgtaaaccttgaata

SEQ ID NO: 224706 - DNA, 88 bp, Homo sapiens
  chr14:62161813-62161901
  hyper
ttgggaccaggcaaccgaaatcccttctcagcagcgcctcccaaagccgggcaccgccttccttcggagaaggcgcagagtccccaga

SEQ ID NO: 224707 - DNA, 392 bp, Homo sapiens
  chr14:62162324-62162716
  hyper
ggagaggctcggagccgggcccggaccccggcgattgccgcccgcttctctctagtctcacgaggggtttcccgcctcgcacccccacctctggacttgcctttccttctcttctccgcgtgtggagggagccagcgcttaggccggagcgagcctgggggccgcccgccgtgaagacatcgcggggaccgattcaccatggagggcgccggcggcgcgaacgacaagaaaaagtaagcccattccctcggcccgccgccttctcccccggcgaccccgcccgcctgcccgccctgggctcctgggccggcctcggcgttaatgggattggggggggcagcctttttgtttctgctgctgctcccctcccctctcttcccccaacctcgccg

SEQ ID NO: 224708 - DNA, 240 bp, Homo sapiens
  chr14:62162826-62163066
  hyper
gtgggggcctcgcgccgcccacctacccgcctcaaaaacccagcctgctctgtggccccatccggaggggactttacccagcctgaaaaccccgggaagagaaatgagctgcagctcggtagccgcggtttgcacccggagcttccgctccttcccgcccccatcctctccagttccattgaaaactcggccctggggcggaccctgcacgctggtcctggctttccagtggacttgggg

SEQ ID NO: 224709 - DNA, 780 bp, Homo sapiens
  chr14:63512282-63513062
  hyper
ggcgcgggctctgcatctctccccctgctggggagcgcaagcgggaactcaagcccccaccctcccaatccccctcagctcagaccgagaccccttccccgcgccttcgtctcccggtctcctcgtccaccccctcgcgcagcgagctccgggctgaacagcgtagcccaacttctgggctgtgcgcctggtggttgctcctctccccggagatcgaggcaagcgatcgctgtccaatcgggccggtggaatgggagaagagggtgccagagagagcagtggccagtcggaggctcacatctcggcgtctcccgctcgggtcccgaatccgggctgctggcgcggacgcggctcccggggcggaggtgcgggcaggctccagctccagccccagccgaggctgagagcagggcagggactggctgggcggcgcgcggggacgcagagcagccacctgacgctgctaccgcccccctccgggctccggcgcctgaaaccttcctgaacactggcgctttccgcaccgcccttaccccaccccggagcgggagcgcgagccctgaagtccgagcgcacagccggcgcccggaatggcccctgcgacccgggccgggcttggcgtctgggggagcgtgcggccgcccaggggagtttcccccaggaccgctgagcgcaggaggcgatccgcgagcccgccaccgctgcaaagttgcgggaaaggttgcacttgatgtgaagagtaggggaagagggtgaataattcacacccgagagaggggg

SEQ ID NO: 224710 - DNA, 104 bp, Homo sapiens
  chr14:63513093-63513197
  hyper
cggtaaaggctgtgggggcgaagatgcgccagggtggagcagggcacgaatcacctctaacaaaccccccaatttccaggcgttgagaacggacagcagcggca

SEQ ID NO: 224711 - DNA, 35 bp, Homo sapiens
  chr14:64182960-64182995
  hyper
cagcactttgggaaacgggggtgagaggatagtat

SEQ ID NO: 224712 - DNA, 562 bp, Homo sapiens
  chr14:64760753-64761315
  hyper
gcagataaacacaccggccttgccttctctaaaatgcggacacgtgcttttcccgcattagggggggtctcccggcgcgcgccccgccgccacctgttgaggaaagcgagcgcacctcctgcagctcaggctccgggcgccagccctgccccgcagccccagagcccgtcgcagctcgggtggtccctccccggcccagcgctcgccgcctgctcttcgccctgcaagtttcaagaggcagttatttctcgcagcctccgcgcttgcaactgcctcctggcgggggagtgggtgtccaaaaagccagcagctggagaaactgaaaagatcacaagcgacttaacgataagccccttcttccttttaaagaccgagaggagggtagaggggagtagtgcctgagcccacgtgaccgagccagggagcccgacggtctcaggaacgcccgacgccgcgcgtgacctctaagtgggagcaccctcgaaccgactcctggtccacccacaaggatagtggcgcacagatggcgctccccgcagccccagtctcagatttaagaggt

SEQ ID NO: 224713 - DNA, 89 bp, Homo sapiens
  chr14:65006319-65006408
  hyper
gccagccgccctcacgcggcgcgggaaaacggtcggcctcgccctgggctcaggttctctccgcccgccaggcagtggggttttttttt

SEQ ID NO: 224714 - DNA, 105 bp, Homo sapiens
  chr14:69259400-69259505
  hyper
gccagcaactgttgaaactcaaagggtgggaaggacggggccaaattccttcaaacttgggagaaatgccggaggagaaaagaatcatctcgctgcaccactttc

SEQ ID NO: 224715 - DNA, 515 bp, Homo sapiens
  chr14:69444793-69445308
  hyper
ggcggggcgcgcacccggcacaccgcgcctgcctgggatgcagctccgtggctaagtagggatccccagtgactggccccaaatatcccctaagactgaccctcgttctgcagcccctcaactcgaaccgagctgcccacctttcccgggggtcggaggggcaggacgtagcgcaagcccatgtcggggttacagcttccaacccactgagttaagcaataaaacggtctgctgtcctgaccccgcccccacagggcccgcgggggagcccgcgtacgccccccagttttctcgtccccagccgcactccagctggtccttctccaggcagatccggaggcggccgccgatctctccggcgctctcccctccgcctaaggggcagcagggtcccgggaggcccgccgctcaggttgaacccagggcggcccaggaagcggcgctgccaccgcacgccatatggagaggtggccaggggcggaagaaaagggaaaatcgatccggagcaagcagcc

SEQ ID NO: 224716 - DNA, 299 bp, Homo sapiens; identical to SEQ ID NO: 203651
  chr14:69445727-69446026
  hyper

SEQ ID NO: 224717 - DNA, 104 bp, Homo sapiens; identical to SEQ ID NO: 203653
  chr14:69618203-69618307
  hyper

SEQ ID NO: 224718 - DNA, 95 bp, Homo sapiens; identical to SEQ ID NO: 203654
  chr14:69658738-69658833
  hyper

SEQ ID NO: 224719 - DNA, 353 bp, Homo sapiens
  chr14:70041211-70041564
  hyper
gccgcccaggttcccgcagctcccggtacccgagccggtttactcaccccgcgtcctgggcttcggccccgcgccaagggcttttgttcgcagctcgccgctgtcccctgcgcttcttcagtctctgcgccggcggggtcgggttactgccggctgcaaccgtgaaaggagccccatctgccgccgccagcgtctctccatggggtctgcgaacagggcgcacgcaccccagatgctacctacacgtgggagggggagtgcgacaatgtctccctaaaataacgcggctctgcacccttccctcacattgattctttaaaaaagaagcccggttccgtcgctgcggcatccct

SEQ ID NO: 224720 - DNA, 485 bp, Homo sapiens
  chr14:70346062-70346547
  hyper
aatcaggcccgccgtgctccgccccgcccctcccgggggtttataacgggaattcccatggcccgggctcaggcgtccaacctgctgccgcctgggccccgccgagcggagctagcgccgcgcgcagagcacacgctcgcgctccagctcccctcctgcgcggttcatgactgtgtcccctgaccgcagcctctgcgagcccccgccgcaggaccacggcccgctccccgccgccgcgagggccccgagcgaaggaaggaagggaggcgcgctgtgcgccccgcggagcccgcgaaccccgctcgctgccggctgcccagcctggctggcaccatgctgcccgcgcgctgcgcccgcctgctcacgccccacttgctgctggtgttggtgcagctgtcccctgctcgcggccaccgcaccacaggccccagggtaagtgcgcccccagctttgcgcccacctgcggagggaggggaggttgcttc

SEQ ID NO: 224721 - DNA, 420 bp, Homo sapiens
  chr14:70654387-70654807
  hyper
ggagggttagttatatatttcgattctctccaccgagtcccggatcacgcagaccaccaggggctggagagtgcagcactggagaaaccctccttctccctcgcccccttggccccagcggtgggtgctctggggctgcagctcccgacccgcggcggtggagtcccgagattggggtgagcgcgtgcgtgcgtatgtgcacgcgggcgcgcgccgagtggataacgcgcttccctgctagcccccaaacccggcggacactcacagcaccagaagcacaacacgccctggcccaggtggcacacatatgccgacatgcatccagcacacacaacacagcagtcagtctccccaaacagcacccgctaccaacccagcatgctcacgatccaactgtacccacctgcccaggcatctctc

SEQ ID NO: 224722 - DNA, 1171 bp, Homo sapiens
  chr14:70654966-70656137
  hyper
gaaataacttaaccccgttactcacaatcagggatcctcttaggggcatcccaagccccccaacctctacctcccatgtctcggctgcccgctaagggggaagggcaggaggctcaccccattactcaccgtttcctctcggcctcccgagcggagtgggcaagggaggggggtgaggaaggtacgcgatgcccccgccgcccggcgcctcaccggtcgcagcggctcatcgcccccgcgggctgcccgccggccgcagccgcgtccggggcatgtcagtccgccgccgccgccctcccgccggggttcgtgggctcgcagctgtcagggagctgcggggcagcgcatctggagcgcggggtctgggagggagggtgtctggggccagggcgaggggccccgggaggggtccttccgcacggatttcagaaagagggaaaccccgacccagagcggtgactggaatctacgcccgggagaggcccggagtcccggccgcgggcggcgggggattcctgcaggaaggggcaggaaggcaagcagcccggcgcgccctggcggctccgagggacctgggctcgggcttgcggtcgcgtcgcctgggctttccctgggctgggagcgcgccgggtctccgccttgcacgctgtcaccgcgggagacgtctcggcctcgccgcgcgcagaggggacgcgcggagaggctggtttctgggcgagcggagagctttgcccattaagctgccggaagaagccaaatcaaaaagccaatctccaagcctccaaacggaacgtcaccctatcagctgggagacagcgccgcactgactgacaagccgcgcatatttatcctcgcgcgcggaggggagactctcagaacgctcctcgaccagcagcgaggaagtcgagcccgcatcccgcatcccgcatcccgcatccagagcccccgagggacgaattcagatccaacccctgccccgcggccacccaccctagtcgttggagcctggcgcccgcgcctcccggccggcagcacgtcaaaacggcggcgcgtcctgacctggattccgccgagttgggagctccaggcagcaggcgggcgcgcggcaccggctttccccttgtcctcaggagacgctgcctgcaattccgaaattaagtctccaccaaac

SEQ ID NO: 224723 - DNA, 146 bp, Homo sapiens
  chr14:70826412-70826558
  hyper
tttccttggttatttggtgctcggtccttagtgaatggtttccgctaggcaaaagcaatcgagccatcgtaacatacttgtgcgtccgcccagaaatgtgggcgtcagcgtttttggttccgtaacgtcggcgtgcaattgggatt

SEQ ID NO: 224724 - DNA, 60 bp, Homo sapiens
  chr14:71108798-71108858
  hyper
ggcggcgggcagatcgcggcgcgcaccaggcgccggggcggcggccgaatggagagaaag

SEQ ID NO: 224725 - DNA, 771 bp, Homo sapiens
  chr14:73358889-73359660
  hyper
tttaccaggtggcatcagcccggttatgtgatttcggctggaaatggggaaactgaaaatcagttgtgggttcggtagaaacagcatcagcggtgttgcagcgaaagcaaccggcagcgaggatgcggcgaagttacgcccatttattctgccataaaacattttctttcttgggtgaaacgctgtggcgttcaagcgcagtgtatccgagcttccgagccagaactgaagccaggagctcctatctgatcagcctcagcttccaacgtcctcttaacggcagctttcatataaatatatttgaaacctggggccttcctacccctttccctatttctgatgggcgacgagctggcgcaaacacgtccgattctccctgtgcattcctttgcgttaggaaccccctaccgtccccgggagcgaacctggttttcaactccaggagtggccaggggtgaagacgagaatgcgctgaattaaaagaaccagggtcgacagcggccacgcaccagggagaattcggcatgaaccgccccccacccgacctgcacctccctctgccacttcgcctgcggcttcgtccgggcggggaagtcccggtcgaaggggtgaggaccccccagcccacctcggatacggagggagccaccctctgccgacatcacccaatagcacccctttcagagcgacactagttttccgaggccacccctggctccgcgatcgcgagcggacttggcggcttaacagttccactgactggaaggaagg

SEQ ID NO: 224726 - DNA, 403 bp, Homo sapiens
  chr14:73359847-73360250
  hyper
agtctccccgaggcggccagaggcacctgcccctcgcccggccgggagcagacgctgccccctcgggccaggagccccaaaaccgcctctccgcctgcctcagcgcctcacccagaggtggcgagaacaccattcataagacctgcggcttccctgcctccaaatccaccccaagttaacccgagtcgttaatccactaaagccagctcgctcgcaaatacacgagcagacacacgctcgatcgcccggagcgcctccgagatccgggggctgccggggaaagcccggggcgaccacctgggccccagcacgcccgggacccgctgcttcccccgcggtgctccaactccggaaggtttgcacaaactccccgcgagcgatcggaaggcgaagagcgccctgc

SEQ ID NO: 224727 - DNA, 240 bp, Homo sapiens
  chr14:73393373-73393613
  hyper
cggggaggagtgagcacgtggaacgccggcgccaccgggcctaggtggcagctgggccggcgcgctccgcccgttctggggcgcgtggggccctccggccggatcagtgctgcaaccgtaaacacgcagggagggcaccccgagtgtcgccgctgagggcgtttctctaagcgcttctctgagacctgctgctgaaggccccacccgacacctggcgggggctgggctgcgggccttggg

SEQ ID NO: 224728 - DNA, 417 bp, Homo sapiens
  chr14:74100395-74100812
  hyper
gtccggggtaaactcgcgaggggatcctacctcttccagatggttccacacgggacctctaggagctcaaaggaccctgggccctccgaagtcgtctcttcttgcagcccgttgctaagtggcgccgcaggaccagcccaggtcccatcacgtggccctgcagggttttgccccacagggccacgacctgccaggccgggcccccctcctccctcctcttcagcgcggaacctcggccgccagtgccaggccgcctcgaccttggcggaggtcaaagccgcgacagtcccggaccatgtggccggcggtccgggcagcgctccgagcctctggggtccccctccaggcctggaggccgatatccacatcgtcctttttctcccaaaaggccgcgaccctgaccgtcacgcccaagac

SEQ ID NO: 224729 - DNA, 137 bp, Homo sapiens
  chr14:74111442-74111579
  hyper
ttaaggtttttaactttaggcggacaagtcactacagatcagctgaaattgctttcggtcctgactactcctgtgcggggttaagacctaaggaagcaaaagggcagccagcaacagccggacgggaggaccccggc

SEQ ID NO: 224730 - DNA, 240 bp, Homo sapiens
  chr14:74180521-74180761
  hyper
aggtgcactcggagccgagctcggggacgctgaggcagtcacgcggccgtcgccatcttgcgtctgggtctgggtccggtcgggtccgccgcctgcagcaggggcgtcgcgtcgtcgtgcagcgggcgaggagcgacggcgggcggcgaaggcaggcgcgctgggccgagagccgccggggtgtggtcgcggggcgtggccgccgggcgctcgctgcggctcctggagaggatcgggcgt

SEQ ID NO: 224731 - DNA, 140 bp, Homo sapiens
  chr14:74253324-74253464
  hyper
tcttcgtcccaggaaggccaagcaaataaaagtccggggaaagttcctttaacttccttcctgcgccctcgacaagggctgcgaagaggaagaggtcatttcccagggaagcaccgggcaggggccgagagctgcgccca

SEQ ID NO: 224732 - DNA, 1320 bp, Homo sapiens
  chr14:74706588-74707908
  hyper
ggcagagcatcggggccgctggacaccagccagacggccagctcgggtaggtgaggagaggttgcgctgctgcctgactggggggcgacagccgggagccccgcgccgtcggctctcgcttgctggaccaggcctccaggcggaaaagttcctgccaggccgggggtcgccgcctgggccttgggccgacgcgcctggtgatggggcccgggaggatgcttcggcgtccgcagggtttcggccccaagcgtttcgggcggccgcgcagttctccagtccccgcgtcgggcagggctcggccacggcactctgttggagccccactgaaaactgggtttggggtgtcggagcccgtggtgcagagtcgccggccgtgtcggagggccccagcaccgctgctccactgcggccccggcctggtgtaggatccgcactcctcgagcccgatgctgttccggctccggccccatccctggtgtccaaagttgtctgattcccaaatcccgcgctggtcaactggggtttatttttcacccccacgagctcagacaacccggccatcgcggcagctaaagcggccgccatcctctcccacgtaagcgccactatatactggagcccggggacgcgcgggctcggggaccctgggtgacctctccgccttctccccgcgctgctttccgggaggtgtgtcgcggcccgctcgaacctccgattcctgtttgagcttggcaattcccccgatttttcgttgcgttttactttgttttacgtggaaaggcaacgaaaaccagcgcgtcgcaggctctcgggcctcgagtagggacgcattgtgccgccttgcgaaaaggacggtgctcggcagcccccagtcttcccggagcccagctccccacgcctccgctccgctcctcgctcctcgaggccaactttccggcccggggcattggggctggccgcgcagggcagggcgcagcagggtcgcgagcgctgccggggatctctgcggccccctaaggctgcctcgctctccgtcgtcccggtcccaagcgcgccggggcctttgcctctcttacaacgaaatctgttcaaaacctccggattcgggccccggcgcgggagaggtcagcctgagctcagggatgggacggccaccggggcgcccgcaggcttcctggggagacagagcaggtccccgccgctcgcggaggcagcccggggtggggccctcgcgggtttcgggcacagcggagcgcgtcccccactctgccgcatgtccctacgcccgcttttcagattctgaagatgtttcctccagcg

SEQ ID NO: 224733 - DNA, 180 bp, Homo sapiens
  chr14:74707946-74708126
  hyper
aaacggaagaagcggcgacacaggtgaggcccccgctttctgttacctctcctgcccgcgcaccccgctgccgtcccccgttccgggatcgggtctctcggaccctattttcgccgacaacggatctgaggtccgaggccgtgccagggcgcagaccacgggttgtttggcggaatctgc

SEQ ID NO: 224734 - DNA, 180 bp, Homo sapiens
  chr14:74708226-74708406
  hyper
ctccaacacaggccaaactgagccacagagtgggggcggtccccagatccccgcaccagtacattctgagagccacacagacccggcggcgggcagattagctcccacctcctgccagagccggttctttgccctcggcctcaaccgccgcccccatttctctcccggggtccctgtcct

SEQ ID NO: 224735 - DNA, 196 bp, Homo sapiens; identical to SEQ ID NO: 203675
  chr14:75743668-75743864
  hyper

SEQ ID NO: 224736 - DNA, 165 bp, Homo sapiens; identical to SEQ ID NO: 203676
  chr14:75743897-75744062
  hyper

SEQ ID NO: 224737 - DNA, 300 bp, Homo sapiens
  chr14:76605098-76605398
  hyper
aggggggaaggctccaaattgctaattagcgcctgtgaaaaggcctagctctgatatgcgcgccgctgaaaggccgacgttaatgaagccgcggcgcgcccgcttccctttgactggccttcatccctcctccgcgccccgggccggcccgaacaatgcggcggggagcgcaggctcccccaggcctcgccgggacggcccgggcagcgcgcgcggggggcggcgcggcgccggcgaaatgtggagggggagataaggccgagcgcagggaagaggctcactcccaggggcccagggaaa

SEQ ID NO: 224738 - DNA, 227 bp, Homo sapiens
  chr14:77493532-77493759
  hyper
tttggggaagccgtttgggccccccaggccgttgggcagtcgcgcggtgtggctgctgcttcccaggctcaccggcggtggcgggtactcgaagcggctgcgctgttccaccgcagcggcggcggcggcggcggcggcggcggcagcgcttaggccgtagcgctccaggccagacggggccgccagcaccgcaggcttgctggaaccatcaacgtggttgagctgtt

SEQ ID NO: 224739 - DNA, 826 bp, Homo sapiens
  chr14:77591041-77591867
  hyper
agctcaggaatggtcgctattgtgacaaatagaaaacccgccaggagacagagaggaggtgggtccctggaccgcggtggcacatgagggctaagaacctcccaggaggggctgggctcggagcgcgctctcggagacgcggtgatgcgcggggcccgggccgtggacaagactgcagtgtcctgcactacctgccgcccactcatcaggccgattctcctcaccttacgcttagatgagtttcgagtaagaccactgctggcatcaagagtctgggcccatgatctcgccctttcgggctaggcgaggcagacccaggttggctgcggcccgcggtccccgcgcagccaacactggcagccaagcgcggggcgcgcgcgccgggagagtggagcgcggaggcccgacggcgccccctcccggcgggcccgagccacggccgcgggctctggcgggtgccggggaggccacgcgcgacggcgtcgcagccggagcccagacagacgccccacgctgcgcggccttcatcccacggctggggcgatggaaaggtggtcccgacacgcgcaggggtctgaggaatcggcttcgggattctgtggtctttgtggtccgcagccggcaccactgcttcctgtaatttaattttctctcccgaaagcgttgctaattaaatcctttctccggcgagccgtcgccccccgcccctgctagtctgtttattaagtacccggcacctgcgagggaatttttgccctcggcggccggcgggtcaggtggaggggccgcgctgccccttagctgcgcctcctggcttccttcccca

SEQ ID NO: 224740 - DNA, 670 bp, Homo sapiens
  chr14:77605688-77606358
  hyper
gaggcagaacaggacgaagttgcgcatgttcctgctgccgatgcagttgccggtgaagaaacagtgatggtcgtgcctcagggtgactctggcgcacactcggcagaagtgggtgctaggtgaggggcatggagtcttcctggccgaggccccctggcaggcccccaggtcgtctggggagttctggatgacaaggacgtaattgcccagggcgttggccgagaggaataggaagagcgccccgtggagcagggcgggcgagaagagccgggcggccgcggggtcctcgcgcatgctgggcaggaagaggaagagctgcagcacgaaggtcaccagggagatgcacaagaagtaggcgggggccaccacgttgagcagccgcagggccagcatcctcgattacattcctgcggggcccggggtgagaagaggactgactgactacggcgtccagggggcgccctcgcccgctcctccgtgccgcgcgtctggggcactgcacgcgactccacgcccccaaccccctgtcccgcggatttcccctccccagttccctaaccccggatcaggcaggccagagacccgagcccgcagcggcctcgggtctaggccccacctgggggtgagtgttgcctggggttttgagcgagctcggcgccttggcgcggca

SEQ ID NO: 224741 - DNA, 872 bp, Homo sapiens
  chr14:77736779-77737651
  hyper
cggctctcggggcaccccagtaccctgataccggcagcggggtgcacccctgcagtcgctacctaaggaagacgcaggaggcacaaggcggggtggaggcgccgcgcagggacggaggtccacccgcccagatgtggggagatccgcgggaggggatcccgcccggcccggtgagccccgctgggagagtggtgtgcggcgctggttggcaacaggcgcccacggtcgagagagaggcagaggggctgtgccacccgtcgccgcgccccgctcctctggcgcacatctggcaggcgccccagcgccccggcagcggccagttttccctccttcggggccggtcctgccgcgtgacccctttcccgccgaggcagcctccacccgcatccccgggcgctcgtgtagccctcacctggcaaacaggacggtgccgtgctccagcgggctgcggctcactgcccgccagctctgccggatcagctcgggctccgggcgctccatgctgtcccggggacgcggagcgcggggctgggaccctcagggctcgggtgccgtcaccgcacgtgccgcgccatctcctccgcgacgcggtcccctccgcccctcgtacgccccccgtgcctccgcccggcgggggccgcagccgctccttccctggcgcgggagagaaaaggcgcgcggccagtcgtaggtggagacaccccagctgtgcttccggggaccccgcttggccgctgcgccctgcgccccgcagccgccagagccgccccaccccgcgacgcctgggctgggcgctttaaagccgccacggcccccgccccctccaggccagcaaggcgcgcgctccctccgccagccgctatggtggcctg

SEQ ID NO: 224742 - DNA, 1070 bp, Homo sapiens
  chr14:77964582-77965652
  hyper
cagcggccctggcccgccactccgcaaagcgccagattcctcgcaccggcgggactcctctccgagctagcgcgcacctggaaagggggctgcaggcgaggtccgctcagggcgaggaagcccggccaccgtggagtgtcggccacctcactccgcacagaagtcaaacttgtcacccggctggtccgcggcagcccggctcgcggtcacgcgcgaggagtggaagccccgaagtccggcgcacctgggcaacgcccggtgtccgggagcttccggccggccccggcccctctctccatcggggggtcgctgcctgtgtgtgtcccggtcccgctccccgcacggctggagccggcgggctggggaggtgggaccgacagcgcgctccgcagcccggtgccgccgccactcacctctgcgagcctcgtgaggctcccaggccgtggtccgcggagccgcggcttcttcacggggagccctagcgccgcctccagcagcgccgccagcagcagcacgcagaggaggagcccggctcggtcgcggagcgcacgcatcgtctcggttccgaggctgctctgcctgcacctctgcacgcggccgcgaacccagtcgcgccccgcctcgcctcctccgggggcgggacccggcgatcctgaggggcgcgcggggcacggggccgcgcggggcgggggcgcgcagctcgcacagcctctctggccccggctcctcgcgtgggcgcccgcacagctctagggtccgcgcacctggacgtcccccaccctcctccgaggggcccctcggcgctccccgacccgtcttgaccctgtgggcggctctctttgatctggccgcctccccgccctcagtccccgccgctgtcgccgtcgcagcccccagcgaattcctgttcgcgggaagctgcggcccggcgcgctccggccctgcgctgcgactcctgcggggccctgagggtccgacgccacctctgccctccccgaccgcgctccaactgcgacctggaccggcggtgccgcgcgggcgagggaggcgcagcccgacgggagagtggc

SEQ ID NO: 224743 - DNA, 752 bp, Homo sapiens
  chr14:88458957-88459709
  hyper
gactgccatctccgcgatgaagacagcctgtgccccactgcctgggacgagggttccagccccggctacttcactacttagacctgtcactttactctctgcacctatactctctggacctccggatcctcatttgttcaaacctaactgcctgtctggttcgtgttaaacgagaaagcacccgccccagccccgcagcgggcccgccccaaccgcctgctgactggcaccctaggggaatgcggcggagagtggagccggtggaaacgcagggcaacgccgcgggggcttgtggggctggccccacggggcgggctcttgccgccccccgcgtatccccgcagcttgccgctcaccccgccgccgctgaccgcgccgatgccgtcgaactcccggcccagcccgtcggagtcgtcgagcacgtacgcgccgccgggcgccagcagcgcacacagcagcaagggcaccgcggcgcggcccgccgaacccgcggccgcagtcatagctttcgctcggcgttgccaggaagccgagagtagccactcagccattgtgtgggtcacatgactccggcgcccagggaggcgggtcccgtcgccgccacgatagatacgggcaggaggccgctgatgctgacgccgccgccgccattttgagtgcgggtcaagggcctctgacgcagctggcggagtgttgagaaaagaagcagcgagctttttcttatcgctcgcgtgtctgtggtcagctactgg

SEQ ID NO: 224744 - DNA, 1118 bp, Homo sapiens
  chr14:88789388-88790506
  hyper
aaaagtaagatcggcgaggggtggatgaaaggatggagaggaaggcttggggagatggaagagccaagctgcttcccaaaagcggtgccggcaggttaggggctgcgcagcctgaaggctggggctacggagaagcccactgcagtgtcactccagcccccgaaggcgtgtgcgcacacactcccgcacacacacacccgcacacacactcccgggcgcgcgcttgggcgggcacgtcagcctcgctcggccgcgctgagcgcacacgccccaccccggccgcggctcctcgcccccggcgacgccccccacttcccgctccccgaaagccattggatgtaggggtggcgcggcgcccgggcagcgcgcggcgagggcgaccctccccgcggcgcgccccagacgccgcgccccggcaagagggagcagggcgagcagcggaccgaggctcccagctgggaaggcgcgctgagcccccggcacccggctcggggcagcgggaggcggtcgcggacttgcccgcggggcggcgggaggcggtgggcggtggcggggaagccgcggaggggcggggaacgagcggtgggcgcgccgctacttactggctcggccggccggcgggcgggcgtggaggcggcagcggcgcgcttgctggagttgcagccggagacacgcttggttgcctggaaggcgctgcaggaggcggaggaagggccgctgcggctccgccgcagacctcggcctccgggtcacctcttctcaccgctctcaccctgagctctccctccttctcttttctcacttcattttttttcctcccgcgtctggctctctcgcctgagtcccgaacccacgtccccgccgcactccaaggaggcccgtgccagccatgagccttttgttctgggaccgctccgcatctgctgcgctctccccgcccggggaagctcgctcccaaggcacagcttggtcccttccccagctacctgcagccggactggggccgctggtcgttggctggaaaggaggcttgagagaggcacgggggcccccggaggaaagcggagttgccaagacccggcagctcccggaagcggcggccccgggatcctgggacc

SEQ ID NO: 224745 - DNA, 503 bp, Homo sapiens
  chr14:89020910-89021413
  hyper
gctccggggtccgggcgagtggacacaccccaccgctcgggccagccgcccgcccctcccgccggccggggaccgcgccctcacctgctcccgctcccgctcccgcatcctcggggccgcgcgccccgctcagcgacccgcctcccggggccccgccgcgcggccgccgcagccgcacccgcacgccagcccgggccgcggcgcgctcatggggctcgcacgcctcacttcctgtctccaaaaacccggctcgcagaccattcccctgggcagagtccggcggtggcgacggcgaggggcgaggcctggaggtgggaccggccggcgaggagcgccgcacaaagaagccccgtgggggcggggggtggcaggaggacggacagaccgtcggaccgacgcgggacgcgcggccggagcagcggggcggccgggcccaggcgtccctccccctgagccgggcgggcggatccggggaggcggcggcggcccgtgacctcagagag

SEQ ID NO: 224746 - DNA, 325 bp, Homo sapiens
  chr14:89290890-89291215
  hyper
ggttgtttttctttttcctgttctcaggcgcgctgcgggcacctctcggacaaggccccagccgtcgcgggttgccgggcagagtcggacgccgccagctcttcactccacgcccacctctctcctggagcgctgggccttcgctggccgcaccggcagccatgagctcggagatggagccgctgctcctggcctggagctattttaggcgcaggaagttccagctctgcgccgatctatgcacgcagatgctggagaagtccccttatgaccaggtaccggccagctcccgtcagcctgtgcatcctgacgctgaggctgcggg

SEQ ID NO: 224747 - DNA, 104 bp, Homo sapiens
  chr14:89506995-89507099
  hyper
agggagaacgacatccttatgacttgctttaggctgctttctggatgtattttcagagctggggatgaggagaggttgcgtaaaggtgccggcctgctgctggc

SEQ ID NO: 224748 - DNA, 574 bp, Homo sapiens
  chr14:90085338-90085912
  hyper
taggaggcaggaaatgagccccattttcgttaccttcgatcgcctgcccccccgctgcttctcgcggccgcattggggggctgcggcgacgctggactcgcgggtggccccgccgccgggtcgcgccgtctcccggccgagctgcagcagatcgcggccggaaccccggctcctgcgcccggcgcccgcccggggtcggcggcgcggctcccaccccggcctggagccctgctgggtcctagtgcgcgccgcgcgcccgcctcgcggcccggtctgcagcccgcaccgagggcaggcagctcccagcgccgcgagtctccgggcgaggccgccaccctctcggtcccttgcgaaagcggccgcggggtgtgcggatgaactggagcttaatgtcaaatcctggcacaagatgttcaaaagaaagacattggctccaactgaactcttagaaggcagatgctaggatctgcagcccgagggtaagcgtaggggcagtacctggcagacagaggtttgccgggtgcactggtgacattggccgttcacagacggtgagacgcggtacgggatcgat

SEQ ID NO: 224749 - DNA, 182 bp, Homo sapiens
  chr14:90167708-90167890
  hyper
cccttggcctactccggccccgaagaccaactcagaccccaccagacaaactggaaagtctccaagctctcagtcgccccagtcggcgggggagtgagtggggccgaccggccttgcggccctgccacctttcggggcgactcggtttctccactgacacccccgggcgcgaggtctggtcc

SEQ ID NO: 224750 - DNA, 578 bp, Homo sapiens
  chr14:90420751-90421329
  hyper
cctggacggggagccaggagccctgcagctccaggatcagtcattaaccacgaccctttggacaggcagcccaggtcttatctgcacacccggcagagtgagacccagacacgggagaggaagcgagaggcccaggccaagctgaagtccgaggctcagtcgccctccggaaacctacttccacccacttcctgtgttccgagggactggcttcccacgtccgcgacctggctctggcctcggagaagaacatcgcgactacaacaaccgagccccagcaacccaaccagctaccaccgctttcccagcctggctggcagcctaccgcggccacgcccaccgcggctcaggaagccgaacttcaccgcgcaactccgacgtctcctcccattggacaacctgccagccactcgcgttaatcccgcagggctattggccagagtctttgtttaattacgtttccttggagccgccctggcagtgaggcgcccaggcctgcccccagcacttggctccaccccctgactgtcccttaactcgttgagcgcggctggaaatccaagcgcttctaggtgctg

SEQ ID NO: 224751 - DNA, 660 bp, Homo sapiens
  chr14:90422122-90422782
  hyper
agaccaggtttccccagccccgtcctgggtaaacacccggcgggctttaggacccagcggtgggctctccggaaggggaaggggccgggcctcgaggcacaagccgctgccgccagggtttgaactgcgcgcatgcgcggcggccgccgaaggggcgggatccgaggcaagcgttggttctgtgcgcctcaggtacgtgttgggcggcagtgggcgcggactcggtgcggtctctcgcgggctgcggtcgggcccgggatcctgctcctggccgagtcgcggtgcgcgggctgctggggtccggcagggctggaggcggaccgcgaggaagcggcgcggccgggaagatggggcagggtcgcctcggccccggggcctcggtttcctccgatcacagcgcctcagggggcgcgcacgggcgctgcggagacctgtgtcctgccggggcgcggcgctaggggcccctgctcgggtttttattcccagacctaagcttacaggtgcgtggtcccagaaagtgagtaggaaagcgcccaccacgtgccaggcgcttaagctttctgtgctcggtttcccagtataggaggacggtcacggtacgtagtatagagttgtcctgagggtgaagcgagtttacacttggtgaggcgcttcgaatcg

SEQ ID NO: 224752 - DNA, 300 bp, Homo sapiens
  chr14:90526942-90527242
  hyper
ccactacccagatctgcgcgccctggtgggagcaccgcagccccgggtcggcccttcgaacgccgagcgtctacccgcggagaccagcgcaggaggcgggcccgcgcgcaaggaggcgggcgacagggtggagtcgccgcagctggcagccgcacggctctacctgttgcagcgtcggagcgcgcccgcctgagaaggcagagcgcggtgcggacctgtgctccgcgcgccggctggcagggcagggccgcggctgccaggaggcccgggaacagtcccgacggagcggcgcggagaggg

SEQ ID NO: 224753 - DNA, 600 bp, Homo sapiens
  chr14:90527422-90528022
  hyper
caagcccggggggaagagatggaacgctccaaggtcaaggtctcctggccgcggagcccttccagcccccagtgtttggcctcctctccggaagcggggctggctcgcggtgcgcgcttggtccgggcggagcctactagtaggcgcagaggacgcccccgcgcaggatccagagaccaagggcgctctggcatggtcaaggcgagggaggctgcccgggggagaagcccctaacttcctttgctccctgttccaacctccctttctggtctcctctctccagcccgtccgcccaacggatgcgcagcgttggggcccggccggaggtcggagccctcggacgccgcagccctcggacgccgctcagcacagcccctctctccgtgcgcccgccctggaccccctccatccctaagccccggcagccgattcggagactcgggaggccacaggctcagcgcgacaccacgaccacaactaggaggcaccatcgtcgatctacctggggaggcacctacaaagccagcagactgacacccgtgtcctagccgtcggcggcctgcgaagcgatagtcaaaggaaccaggacccaggaccccg

SEQ ID NO: 224754 - DNA, 360 bp, Homo sapiens
  chr14:90528121-90528481
  hyper
ttggctcgagcttgccctgaagacgcgccacgccccctcccctatctgagccggacagggagccggggtggaaactgcgcccgcatcccagcgccaagcagacgtgaactctgcgcccgttccccgggaccttcagcgttaaggagaactccgaggagagcagggggagtggaggggaacggcggcgacaaagcggatttgaaactaggagtcaaggaggacgtggggagctggcgccacaggagctaccgaggcggcggccgggggagcctcgcggcctgcgggagagcccggcggtcatgggcgagccggcggtggggcgcccgggagctggctgagcgccggggcccttatttcccg

SEQ ID NO: 224755 - DNA, 360 bp, Homo sapiens
  chr14:90528549-90528909
  hyper
atggctggccggggtttcagctggggcccgggccacctgaacgaggacaacgcgcgctttctgctgctggccgcgctcatcgtgctctacctgctgggcggcgccgccgtcttctccgcgctggagctggcgcacgagcgccaggccaagcagcgctgggaggagcgcctggccaacttcagccgcggccacaacctgagccgcgacgagctgcgcggcttcctccgccactacgaggaggccactcgggccggcatccgcgtggacaacgtccgcccgcgctgggacttcaccggcgccttctacttcgtgggcaccgtcgtttccaccataggtaagtgtgctggccggactcgctga

SEQ ID NO: 224756 - DNA, 300 bp, Homo sapiens
  chr14:90849732-90850032
  hyper
agcctcagcagcgccaactaagcaaccggctacagaccgcgttccggtgcgtgtgtgacgacaccgccgtgtgctcctccgctgggagatatagtgccctcgcccttgcctcgccccgcccgcgagcgctccaaaggcttgggcgtgcggcttgctcttcctctccgcttgacgggcggtggttcccccgagacagaaacttgactgaaaaataataccaaatacccgtgctgcggcccgtggccctccatagggccacctgaactagcctcgcctgtccccttgctctttgccgttcgt

SEQ ID NO: 224757 - DNA, 288 bp, Homo sapiens
  chr14:91755343-91755631
  hyper
acccacccctggcacgttcctgcacacgtgtgcacagccaccggtgcgggacccttcaggacacccccttcctcacccgaccacggccaggacggccgcccctacctttccccacagacccgttgtgggcgtcgcgctcttctgcacagttggagcccagtgcgggggtgtcggggttctcggcctgtgatctgagcggctgagaggccgccggcgaggcggggtctgaggactccagctgccagggagggctgtccacggtggattttaagcgttccctcgaaccct

SEQ ID NO: 224758 - DNA, 514 bp, Homo sapiens
  chr14:91883365-91883879
  hyper
cggggcaacagacacgagacaggaggaaaaacttcctcgccacttttctcccgcgttccagagcggaagaaataaaaataaaaaggacttttcaataaatgtctcacgtctcaaatccattgtaaatcagtgcgcccaccccagtctgttcgctttcccattcggcgccccccattccccacccgtcaccgccatccaccggctggtctcagggattcagaaaaactacatgagatatttggttgggaagaatggggtccttttcgggagtggctaaaccccagggacaggagtgaccactgggacccggtccgccccgaggcagccagcctagagccccagcgggaacaggtgtacccgcccggctcctggcccggccgaaagcgcggcggggtcccgcgccggacgcacaacgggggcgccggctccagagttacaaagctccggactccaggacgcggccccaaccccggccgggagccacttgctgcgtccctcgcgccccggagccacc

SEQ ID NO: 224759 - DNA, 144 bp, Homo sapiens; identical to SEQ ID NO: 203720
  chr14:91976436-91976580
  hyper

SEQ ID NO: 224760 - DNA, 960 bp, Homo sapiens
  chr14:92789418-92790378
  hyper
cacgtgctgggaagggcggggggtgagaggcgggcaggaggggaggagtagggaggcgagagcagcgggcgggaggcgccacggcctctcagacgctggcgcccgcagccgagaagccagagagaaagttcccggggagagctcgcccctgggagggccgacgtcgagcctgctcgccgcgagggtctcaggtaccgcgcgtccagccagccttcccgcggcgcgcactcggccgcccgggctcggctcgtcgggaagcaggggaacatcgccggctggcagccggggcggccgccgccaaacttggaggaggaggatgctgcgagtgggcgcggcggcgcggggcgcgggggcgcactgagtgctccctacggcgctgctgccagggctgtggccgggcgagccggccgaagcggagcgggcaggtagcggctctagcgccgggactgcgccagccctgcgagcccgggccgccagcgccaccgtgccggcgtcgcctcctcgccacggagccatggtgcgcgcagcgcgcacgcggcgcgcgggactctgagctccggccgcgtcgcgcgtccccaccttcccaaggggctcccccgccgacctcgccctcgggccatgaggctttggcccggagctcctcgcctctgagtcgcgcaccgcctgctccagccccagcgccgctcggccactgattgcactctggccgctgaagctccccatcctctcccagagacggcacccaggcgctccgggatggcgctccgcgggaccctccggccgctcaaagttcgcaggaggcgagagatgctgccgcagcaagtcggcttcgtgtgcgcggtgctggccctggtgtgctgtgcgtccggcctcttcggcagcttgggtgggtgctggtacgggtcccctcttcctggggagttgggggctttggctggggagtctcggggcggctgcgag

SEQ ID NO: 224761 - DNA, 1291 bp, Homo sapiens
  chr14:92979677-92980968
  hyper
aggttgcccttgaacgatttcgaggctccctcgggcaaggctgtggctccgagtgggacgaactccccgccagctctgggcctccccacctgccggcccgcggtcggcgccggcacaggcggagggcgtcttccttcccctgcggccccaagccaagtggaagacttttctctaagtttccctctccgaagccccgcgggcctcccgcgccccagccccagccacagcctgtggaggcggcaccccgaggttgggcgcccgtgcggcgccttggccccagcaccccccgccccgaggcccggccccgggggcgcggccgcccgggcctccgtgtgccccagggggctccgggccgcgagccgctgccgaatggcttttgacaaaaaaacccttgaccaccaaggccagcctcttcctgaaagccccgctcgctccgatacaggaagtagaagggagcgagagccccagagcgcggcggcagcggcggcctggcccttccagagggccagagccagggacatgcgggcgcccgggactccgcgttccgcgcggcccggcgcctgagcgcctccgttccccgtcccggagctgccggcggcatgatccgacacgccggggcgcccgcgcgcggggaccccacggggtaagtccgggcggccgccccctcctccctcgcgatccccacggcccgcgtcctggccgccccactccacttcttgtcccagagagtccttcgggcgcgtgacctcggggttgtcgggctgatacgggacccccaccgtggccgaggccagaacctggttctgcggggcagggggcggccctggtgactccgctggacccgatgttggctaaactttcaaggccaggcatttcactgggaacccagtgcacactttaggctgctggtggacggattacgagggagtgcgtcgctacctgtcagcgccggggctgcccgcgtggacgcggccccctccctggcgtctgccccgcctgaactttgcaaacaaaactcgcggtcccagccccgccagcctgctgcacccgctgctctgcgagtcgcagcgcgcgccctcgggtactagagccccgctgggcgtggggtcggagacccggacccccgcaactttgggtgcccgcggcccaacagctgaccggccctcctggaccgagggtccactgggcccttttcccgccgcccctctgccctggccgtagacggtgaccttcggaccggccctggtcgagcctagtgcttgggtagggtccagggcgcacgggctgcgcg

SEQ ID NO: 224762 - DNA, 360 bp, Homo sapiens
  chr14:93389462-93389822
  hyper
gtatataagcggggcgcgagggcgctgctgctgccaccgctcctgccactgcagtgctcgagccccgtgcaggggagcttgcgggaggatcgaccgacagacggacgcacgccgaggcactgcgcccccagccccgcgccggtgccaccgcagcccgaccccggccgccagtccagccgcccctcgcccggtgcctaggtgcccggccccacaccgccagctgctcggcgcccgggtccgccatgcgctccgccgctgtcctggctcttctgctctgcgccgggcaaggtgagcgagcgcggggagctcgcgggagagggttccgggcgcccctgcccaccttgaggtccgggcaccgcg

SEQ ID NO: 224763 - DNA, 104 bp, Homo sapiens
  chr14:93389943-93390047
  hyper
tgggcctgactcccaaccccccggggcaactcccccttgtgcccaccccttgtctgggcttggcgcctcggttgcatcagggccagtgccggttgcgcggtggc

SEQ ID NO: 224764 - DNA, 250 bp, Homo sapiens
  chr14:94405983-94406233
  hyper
tgcggctggtcaccggcagcagcatctgcacgatcctgccgggtcgaggggcgggcgcgggtgaggggagggtcggggtgtggacgggtagggccggccccgccagcaggagagctcgggcgccaggctcggctggtcgccctgaccgcgggctgcgacgcggatcccaccggcagggggcgccgcgggtcaaccattctcaccccactgggcagggtgggtcggctgccgtctccgctttacagataag

SEQ ID NO: 224765 - DNA, 71 bp, Homo sapiens; identical to SEQ ID NO: 203730
  chr14:94640376-94640447
  hyper

SEQ ID NO: 224766 - DNA, 36 bp, Homo sapiens; identical to SEQ ID NO: 203734
  chr14:95864478-95864514
  hyper

SEQ ID NO: 224767 - DNA, 47 bp, Homo sapiens; identical to SEQ ID NO: 203735
  chr14:95932542-95932589
  hyper

SEQ ID NO: 224768 - DNA, 230 bp, Homo sapiens
  chr14:96152751-96152981
  hyper
gctggaaagctacacgtgtgagcctagaggcgggtcccggttgcagacttgccatggcctccgaagcttctgtgcgtctaggggtgccccctggccgtctgtggatccagaggcctggcatctacgaagatgaggaggggagaacctgggtgactgtggtcgtgcggttcaatccctcgcgtagggaatgggccagggcctcccagggcagcagagtgagtcctgggcac

SEQ ID NO: 224769 - DNA, 339 bp, Homo sapiens
  chr14:96342210-96342549
  hyper
gcctctttcacccgcgtccccaggtccccatgtacgccacgtgggtgggagcgtgtcccacacacccgcgcgcccaaagccacattcgccacgctcccgccggggcgggctcaccgcgcgcctctgggtgccgagcctccacaggccacatagccgccacctgctgctgcatccccactgcggggacaggggcactcagtgcctccctccgtcccccccgccccgcgaaggcctcccatcctccagggccaggcggaggccacgtctttcccgggccccctccccaacgcggagagggaagcggagggaggagcttggcccgcagccgccggccctccc

SEQ ID NO: 224770 - DNA, 720 bp, Homo sapiens
  chr14:96342575-96343295
  hyper
tccccgcccctcggctgccgcagcccggctcgcagcgcgcgtcagcgggggctccccggagcgagtcgctaggtaacggggctggctccgcagacgcggggccggggaagcccgcgcgcgtcatcagcagcggcgccgcggggcggggggcgcagagaccctccccaatcccggcctgccaccacctggctcgcgcgcagccccggcccagaatgccttaacctgcgccgattgctgccgccgaggtgcccctcccctgtagggaccccgacgccgccagccccttcctcctttcccgcaggtgcgcactgctgtgcttgcggccgggtgggcgccccgccgctgcggtcgcggtcgccgctggtaagctgcgctctggggcttggggcaggaagcagtggggggcgctcgaagagcagggcagctacggccaccgtggccgccggaccggccatgtgctaaagtttctggggctcggcgccccgctgggcgcgcagcgcggggagcagacgcgccgtgggtggggcagcgcggtgctgctggcgcccggcccccgcggggtgcagctctgcgcgttctcatgctgtctctctctctttccctccgcgctgcctctccgaggtcctcccgccgagccccggcgcggggcatgaggagcccccgggtgccgcccagagaccagcaggctgcgcgcacacctagccagcggcagacggggac

SEQ ID NO: 224771 - DNA, 480 bp, Homo sapiens
  chr14:96505612-96506092
  hyper
ggggcgccccgtccgccgagccccgccccaccccgccccgcccgcccccgcgctcggggccctccgcctagtagagatctggagccagaagcccagagacagccgagtgcgccgtgcggtctccggacgctcgctgctcagcccgatccccgccaactgtgcaggcggctgacccgcagcggcagcggcagcagcgaggactcgagcgctggctgcagcgacaccatggatctctcctttatggccgcgcaggtaacggggcgtcccccccacgcgccccgggccgccaagtttggggaggttcggggccacggtctcgccctccacgctggggctgggcagtggcgcccgcccgcgatccgcgtcccggtcctttgtcccgagccggacacccccacttggtgcacgcgtcgggggcggcgatcgcggctctcccggggtggggcgggctgcgcgccccgcacccccgcggctcgagct

SEQ ID NO: 224772 - DNA, 300 bp, Homo sapiens
  chr14:96506199-96506499
  hyper
ggagccctccaaggccgggccagctcagacccgcgcgaacgtggatgggcacacagtctcgcccttccccactctgttttcccgaggcgccagtaatctgtctcttgccggtgacctcgggcgccccctttgccgccgcctgaggaaggctctgagacccgctttgtgaccgtgacccgccaagcgtcgacgcgccgcggtcgtttgtcctgttttgctttgtgtagagtctgatggagccaccagtgcccagcgcggccagaacccccccacccccctccccgacacaaacaggctccc

SEQ ID NO: 224773 - DNA, 524 bp, Homo sapiens
  chr14:97685492-97686016
  hyper
aagcctaattggagaagattcggttttcttcgccatggcaggtccctttctcctgacccgcagttgcaggggctgagggtaggcgcaggtccgccctggggtcgaagccaccatcgggcctcgaggttgcccccctaacatccggcctgcacgcctggcgggggcgcaacagtgtctcacggctcgggagctcgtttttggcttctgagcaaggtatttttttcatctgccgtgtgtttagctgaattcagtatatttttctcgcacttctcgcttttttttttttctttctgaatctgctcttctgctttgcgggcccctaatctctcccgaatctcgggcgcccggcccggcccaggcgagcgctcgcggttggggacgcgggtggggacgcggcggtctgggcgctgcaggatgcgcctggccgcggaggagacgaccagggagcgggtcgccagatcaagatctgccagtgccactacctctgcttatctccaggggcaatcatcggctgtctcagcttc

SEQ ID NO: 224774 - DNA, 240 bp, Homo sapiens
  chr14:100070301-100070541
  hyper
ggccgtcaccgcggcatcgccctcgccctcgcccggccggcgcttccccgcgccggggctccgctgggccggtccgcgcgcgggcggggggcggccgggggcgcgtgcggcccgccccgcgccgcctggcgcgtcctctcgccgcgcccgccggggccgcccgggagcccgcgcgcctcggggttgacgagcggaggcggctgctgcgtcggcggccgcggtgccgggcgctctcagggt

SEQ ID NO: 224775 - DNA, 420 bp, Homo sapiens
  chr14:100070591-100071011
  hyper
gccgccccgcccaccccgggcggagagtgggcgggtctccgaggcccggccccgcccccgagggcgactggggagcagaggcgcggcccccgccgtccccctgcgcggtgcgcccgcccgtccagtgccctctcagaggcgcgttccggccgcggtcccgccctcccggccgggcgattgggccgctccgggggtgtgcgggaggggcggggcgcgcgcgggggaagctgcggcggtggtacggtccatccgcggggtttccgacccccgcccgcggccggctcccggcggttcaagtttctgcgcccggaggacgcggccttagccaatcccagggctacagggcgcttttaaaatgcaggtacggctgcggggagggggacggtgggaaaggtagggccgggcttcccttaaaggcga

SEQ ID NO: 224776 - DNA, 240 bp, Homo sapiens
  chr14:100071337-100071577
  hyper
cctgcagggccagggccttgccagccgcgtcccgcagcgcggtcagtactctctgccccgatggggcgagagctccgggaacctgccccctgcccggagcggcgctcggagccccgctccacctccgctcactcgaccgctaaatccctgggattcgggagataatctgcaattcgcggggtggaaaccactgggaagggtgggaaggtctcccactggggcctgaacgccggggtccgg

SEQ ID NO: 224777 - DNA, 697 bp, Homo sapiens
  chr14:100149732-100150429
  hyper
tgggcaaggagacgcgggttacgacagagggggaagccctggtcattatttcgaaaataccttctcctccgctacccccgcctccccggcacatttcccgctttccctggagggcggacccagattttcatccctccaactccaactccttcgggcctgagccagcgcctcagatggggcttcgcctggtctaggagggtccgcaggcccccgagtctctgggagaacagcctccggccacgccgtgcgctctcggtcgcagacacaggcgtccctgggtcccgcaggatcctgccaccagcccgcgggccccgctggcggaccacgggcgctaggcgtggactgtccgggcggaggaggcgccccggggcaactggagaacaactttgggggtctggggttccaaggagaagtttgggaacagtcggcgttatgcggacttttgcaggctgggatggggtttccgggcaggtttgggggaaaaaggaaggggcctaagaccgcgcgcggaaagatgccgttatttggaggcgccgaagcgggcggagccagccagcaggacttcgcgccgccgccgggccagagcgctgaggatcggcgttgccagggacaacgcgttctgggcggagctgctgctggggcggacctgagtctgaagaggtgggggcggagcctggggggctgagccagaagcgga

SEQ ID NO: 224778 - DNA, 342 bp, Homo sapiens
  chr14:100150505-100150847
  hyper
ggggcggggcggggcgggggagggcccggagcgccggagccggaggcggagacgtggttggcggggactgtgcgccctgggaggggtcggagtcggcgggggcggagccgagcgggcggggagggtgctgggtcgcgcctggcctggggccgaggcggcgcgcggcgctgacagctgagtcggctcgcggcctcccggccccctcggcgcccggcccgaccctggcctggcctgccctgccccggagccatgagccccgggctgctgctgctcggcagcgccgtcctgctcgccttcggcctctgctgcaccttcgtgcaccgcgctcgcagccgctacgag

SEQ ID NO: 224779 - DNA, 1500 bp, Homo sapiens
  chr14:100437460-100438960
  hyper
ccggtgacctcgacggccctcggatcagggatgccccgagtccgagcgggcagggtgctcagcagggccaggtgatgggaatcatggggccatcgagcacggaccctggctcccccggtggcctctgtgagctctggggtcaggcggggactggaggagcgtccgcgccgggagggagcgcaccgcgccacgtgcccgcccggcgccccgcccccaccccggccacgcccctcgcgcttccctcaaagccccgcccctcagccccgccactctcgtccgccccgcccctcgcagcctcaagctcagcgctcccggaggcgcggacggtggggccccgcgccttttgtgtcgggctttgaccgccgcgcgcgctcattcacctcagcggccgcgggcggaggggcgcacgcgcgcgcagtcccctcggagggcggtggggcgaacagcaacgcgcgtaccctagctcttggctgctgtgctgagactagcccgcgcgcccgcgcgcctctccctcgaggactcggagccgcccgcgcactcgccaggggccgccgccccgagtctcaggcggacgcgcacgcgttcccgccgcccggaccccagccggctcgccccccgcccccccatcccccggcggcggcccccaggcacgcgcccgcgcacacgccggcccgggcacgcgcccgccaagatggcaggggccggggcccagctgtcagtcgccgccgccgcggcccttccccgcagctagcggccccgacgcccacccggagaagatgagcccccgctgccccccgcagcccagtcagacgcggagccgccgcgcccggggccggctcccccgctagcgcccgcgtcccgcgccccgccgccgccgccgccgccgccgggtcgcccctggcccggcgcgcccgtccccggcagcgacaatgaggtgagtcggggccggcgcctcgtgggaggtggcagcggccagcgtcggaggggctgggctgggggcccgcggtgcccccgagggcgggaggggggctccacgggcgcgggggcttccagagaaccgcgggggctctgcagagattcgggggcattcagagcgcgggaatggcttcgcgagagccgtgggggcgtctggagagccgggagggtctgcagggcttgtggggggcagtgttctgcaaggggcaggcggcgctggctttggctgcttgtggggtcctcttaggctccggggggcctgcggcggcctgggaggcagacccccgcgggcaggtgtggccgtgtcccgaccgcgcgaggaccgaagttggcggaagcccctgtgcggtgccttccagcccggaggaggctggcctgaagcccccaggcgttgccgaagcctccccctgccagcgcccagagccgcgtttgggcttttacaggtgtagtttcccctcgacttggagcccgtcaaccccttcgtctcctaattctcaaccccccttttttttcttcttgcacgcc

SEQ ID NO: 224780 - DNA, 185 bp, Homo sapiens
  chr14:100613202-100613387
  hyper
ctgcggcaggtggtcgtagtactcgggcgcgatcttccgcacctgtagagaggagggcggggctcaggggctggttctcctcggggccgcacccgcgagcacacacgcagacacctgagcacacgcggtgggcatgcacatgcatattcatgtacgaacatgtttgcgcgcgcgcacacccacac

SEQ ID NO: 224781 - DNA, 863 bp, Homo sapiens
  chr14:100625496-100626359
  hyper
tagcgcgtcccggggccgcccctgcgccctcgcgtcccagcatcccagagccccggccctggccccgggagtggctcgcgaggaacagctgggacgcgctccctggcgctcggacccgtactggggtcctcggaatcctcaggtcccagggagtttcagacccggccagggtgggggaccctcggggagccggccggggaccccagggaggggagcggcaatggcggaacgcccactggaatttgggccagagctggagcggcccgtctgggctcgaccccacgacgcgactccagacgggccaacggggcggtccccaccggggtgggccccgcgcggcgctcacccagtatctccttgcgccgctgcgtgtgcggctggtcggtgtagacccactcgaagtcgctgcggctcgcgctgttgcccatggtggggcgggaggcgccgttcggagcgcggccggctcggctctgctgcacctgtcgcggcggccgcggcgcggaaccagctctgattagggcgggggcggggtcccggcggggcggggccaggtgcgccaggcttggggcggggcacctctggctgggcggggcggccgggccccggcgctctccagaccccggcgggtagctggcgctttgggaacctcagttgcctcggttggaaatggggctccccggcaggaccgaggtggccgcgtgccatctgcgcgagtccctgggtccctcgatgcgcgggggcgactgctgccaccgcggcctcccaccggctctgcgcgccccgcccacccgcgggcagccgtcgggtttttaccccggcccgttctctccgcagccccgacccgctcgcgggcacgcccctgt

SEQ ID NO: 224782 - DNA, 206 bp, Homo sapiens
  chr14:100751381-100751587
  hyper
gggggggggcggggtagctagggagggagaggaggcaaggaggcaggacggggtctgagcacgcccctcaggtgtttgcatggcttcttcttggcctgccacgtgcgtctgtaccggaccctaggaatatcccgggagctggtggccagccctagcccctgcccgcctggcctttggccagcacttagcgcgggcagccctgcccg

SEQ ID NO: 224783 - DNA, 300 bp, Homo sapiens
  chr14:100771916-100772216
  hyper
gcgaccgcgcctcggagaaggtgccccacaccggctcgcccgacccacccaccaccccccttccgcccccaacagctcacaaaaccgcgtaggaaggggcggcgttccaaggcgtgactcggcgccagagtggttcagtgccctccaaggccagccgagtagggggtcggctccgtagccccaaccccgctggatggctgcgcgggacggggtggagtcagtcccgaaatatacggccgggggaggggaccctgctcccagtgcgcaacggatggggatgggggaggggaaggagatgag

SEQ ID NO: 224784 - DNA, 370 bp, Homo sapiens; identical to SEQ ID NO: 203757
  chr14:100773262-100773632
  hyper

SEQ ID NO: 224785 - DNA, 104 bp, Homo sapiens
  chr14:101192406-101192510
  hyper
gtttcagcgcggctaaggccctgactgagatgctgtgtgtgcgggggtgggtgtgactgaatgcgggcacgggtgtccgtctgtttatacgtgtgtttgcgtgt

SEQ ID NO: 224786 - DNA, 273 bp, Homo sapiens
  chr14:101192969-101193242
  hyper
gtgcgcggcggccgcgtgctgtacagtgtgagggaacgtgtaccaaacgctcgcgggatacctgtgcccgtctagccaagagtgcacccgtgtgcgcgagcgggcttctgggacgccgccgtggtcgggggcggccctgcgaggggagggggtcacagggactggccggcgccggccccgtgcgcacggaggcgggggcggggggcgggggccgcgaggggggaggcggtacgaaaagggcggcgcgcgcggcggcggcggcagctccccggc

SEQ ID NO: 224787 - DNA, 261 bp, Homo sapiens
  chr14:102975797-102976058
  hyper
tgcgtgcgcgtgtgccggaggaggagggggcggcggccgcgggcgcggcgcgggggacggggactcaccatggggggcgcgggggccacaggccgggcgtccccgcccctgccgcggaccggagcgcgcgctgtcccccgcgggcgagcgggcaaaggtcccacgacggacgcacgggagggagccaccgccgcccgcgcccgccgcagccgcgctctgagccgccgcggccggatcgcagggcggcggtgccgtcgccgg

SEQ ID NO: 224788 - DNA, 127 bp, Homo sapiens
  chr14:103242436-103242563
  hyper
gtggctgtagaacaagcatctgttgggctaatggagccagagacatggtccaatgtctctgatgtccagatagacttccagcagccaggtcggactatctggggttctggaacgttccatgggtgaa

SEQ ID NO: 224789 - DNA, 180 bp, Homo sapiens
  chr14:103394639-103394819
  hyper
gctcgcccgggctccttccgtgcacagggtctcggcttctcgtcccaggggactgggggcggggtgggcgcggagcaggcccggacccccgcgtggcgccgcctcagcccgtgtctcttgcagctcctgccgctggatggggaactcgtcctggcttcaggagccggattcggcgtctca

SEQ ID NO: 224790 - DNA, 420 bp, Homo sapiens
  chr14:103394908-103395328
  hyper
agggaaggcgcgtcgaggggggcgaggaccggagggagggcgcctccgggggcgtggtttagggagtggcggaagtgtcccgaagcggggcttgggaggtcgtgctcagacgcgtggcgtggcgtggcgtggcgtggtgtggcgcggcgcttgttccgtggagctcagggatgtgctccggctcaggcgaacctgccgtcttccgcgactctgaccgcttctcctggcatgacccgcacctgtggcgctctggggacgaggcacctggcctcttcttcgtggacgccgagcgcgtgccctgccgccacgacgacgtcttctttccgcctagtgcctccttccgcgtggggctcggccctggcgctagccccgtgcgtgtccgcagcatctcggctctgggccgggtgagcactgagggga

SEQ ID NO: 224791 - DNA, 160 bp, Homo sapiens; identical to SEQ ID NO: 203769
  chr14:103430222-103430382
  hyper

SEQ ID NO: 224792 - DNA, 104 bp, Homo sapiens
  chr14:103430529-103430633
  hyper
gacagcggtgtgagtctcgctacccagcgtgggggcacaagcacccgctgccgtcaaaacacggctcgcaccgcaccacacccccccgcggcaggcaaggccct

SEQ ID NO: 224793 - DNA, 1440 bp, Homo sapiens
  chr14:103523076-103524516
  hyper
tcgaacgcggatgtcgagcctagggagggcaaggagggatgaaaagctagcggagggacgagggtgcaaggagcggctggagagagatgggctgcgggcctgggggcgctgccagagcgagaggaggcgaagcccacgagctgggtgggcaggagggcggcagggtctgtccgggcggggatgggcgggcgtggggatgcgcgggctggggcgcgggggtcgcagagccgcaggtccggccctgccggcgcgcacttaccccactcgaggaactcggccacgtacttgtcgcggcgcagggccgagtggctgcactcggtgtacaggcagacgagcacgtcgagcagcgtttccacgctcagggcgctctcgttgcgccagggcccgtccaggagcagctgctccagcttcttgagccgcaccttggccgacatggtgccgcgcggcccgctcccgacgcgccggcctctcaccgccggctcggccagtccgtcagggcgcgccctcgggggctcggcggctgcgagccccggcagcagcggcgcctcctcgccgccccgtccgcgtcgtcgcgccccggcctaggccgacatcttgggctccgtcccgacggcgcagagtctggggcgccgggccccgcgggtccatgggccgctctcctcccctcggcgccgccgccctcccagctcgggcggcccgcccccgccgccctcagccccgcccgcggccgcgccctccccgccgccgccgccgcagactaggagcggcgaggagcctagcgctgcgcaagcccggccggcgcccgagcccgaccccagccccgacccggcggcccagccccgcggcccgcagccaaccagggcgcggccagcaccagcgcagccaaccactacggggccggccgccgccgcgctgacctcagcgcgccgccccgccccgcgcccggctccctgctcccggcgggctcgggcctcgccgcttgccgtagggagccgggatgctgggaaggcagggccgggcctggggagcggcgcggggtgggggtggggggggcggggcggggcgagtgggccgctgagattgcggagcccgcgcatgcgcagagcgcgcctggtgggcgtgtgcgccttcgccctgcggacccggtgccttcagtattcggggtccgaccgcgcgcgtcgcggatcccggggccgaagacgaccccaagtatcggagaggcagagtcgcgatctcaggccgtcgagccccgtcccgcagtccgcgggcccatgttgcctgcggggcctcggacctgcccggccgaggtgggggtcgagggcggcccggcaggcgcagctctgatggcctcggcgggttgtgggctatttaaaacggcttgtcccagctcgaagcggtcctggaagactcgggccctacccctgactttaccgatgagag

SEQ ID NO: 224794 - DNA, 77 bp, Homo sapiens; identical to SEQ ID NO: 203771
  chr14:103541957-103542034
  hyper

SEQ ID NO: 224795 - DNA, 389 bp, Homo sapiens
  chr14:103593755-103594144
  hyper
ttctgcacttgggccgcaccatgaaggaggacctggaggccgtggtggagcggctgaagccgctgttccccgccgagttcggcgtcgtggcggcctacgccgagagctaccaccagcacttcgcggcccacctggccgccgtggcgcagttcgagctgtgcgagcgcgacacctacatgctgctgctctgggtgcagaacctctaccccaagtgagcagaccaggggctgggcccgggccggcagggagggtgtcctctgtaggaggggtgtcgaggggtgtcgaggtgtgccgccggcagcttttagtgaggtcggtgtttgcagagttttgggtccgagaatgcaggggtgggacttggactccctggggcagagcctggacaggca

SEQ ID NO: 224796 - DNA, 138 bp, Homo sapiens
  chr14:103988425-103988563
  hyper
ctcgatgatggggtcgaagagatccttgaacacttcgtaggactcctcgtcgcccgccacgcagcccacggtcatgatgtacgggtggcctgggggagggggcgcgggacggggacagtgacgtcactgccgggcccg

SEQ ID NO: 224797 - DNA, 1119 bp, Homo sapiens
  chr14:103988600-103989719
  hyper
gggggggccgggaccccggccccgaggggtcgcgtacccgggttgtccacgcctgtctggatgacgtcgtccagcgtgaagccgctcggcgtgctcttggcgcgcagctccgcgtacagctcgggggtcagcaccttggccatgtggttgttgtgggcgctcaggtcggggaactcgtcctcggccgggaagcgcagcttcagtgcgttgtggctgttggagaagggcatggcggcggcgggctgcggggagacgcggggtcagaggggaccggcacgccggggttcccgggctcccgcgtaccactcaggcccccgccgccgggccccccggcgccccccgggacgcggccaaggtcagcggggtccgcagcgcgcgcggggagcgccatcatcgccggggacccccggccggtccggcgcgcgctccaggcgacgcgccccctttgcacgcagcgcccctagcccgggcgcggacgcccccggcccccgggcccactcaccgggcggccgggcgggggcgggggcgctccgtccgtcggcagctcccggagcgacgcaggcgaacagcggccgctccgcgctcccgcggctcttaaggggcacaacgcgggccgcccattggcggctatttatagcccattcattccattggcccgcgccgcggggtggtgccgccgctttgtccgccgcccgcagcccccaacaccctggccgcccacccgagctgtcccctcgctgggaccccgcgcagcctgcccagtcccccgcccaagacctcgaggccgaaacctcaggtccttggatatctggatcccctcgcacgcccttgcctctgggcgggaaactgaggcggagagcctccgggcactcgaggacgcttgggttcatccgcatcctcgagcctgcccgcctagtccagccagcccccgcggcggcggcgaggggccgggcgaaagctttcggggcttccgcagcaggtacggcccccgccccacccccggccagtgcgagctggcccggagccgccgaccttcctcaaggtgcccgcaggcgtttcctgggcgatcctggtgcaaagcgaaggcgcgcgggaagcgcagtctggctgcggcccagc

SEQ ID NO: 224798 - DNA, 1331 bp, Homo sapiens
  chr14:104604264-104605595
  hyper
ccgcttcccgggcggcacggcgcgcacacccacttgcgggcacacgcgcggctgtaaagacacgtgccgttcgcagacgcgccgaggcacagatacgccggcgcggtcgctgcccggctcgaggcgcacaccgcggcgacactaacccacgcgcgacagttagacctaaagtggcccgcgacacgcagagtacgctgggcttgctggaaaggcgcctgggagtctcggggccggggtcccgccccttcctcggcccacctcgccgtgggccttgggcaagagcgtcccctccgcagcctcagttttcccgcctgtagagggaggggcgtcggcgcctcctgggagacgcgcagccctggtgtcccgggagaggggcgggaggcgcatgcgcgcgcgcaactagatcctcgccgccgcccccagcgcccctccccggggcagggactcacctaacaggttggggtccttggagtgcgcggggccgcgtggggaagcggggaccctaccccccccacgcgccgcccagcactgggcaagggcggggcactctctgggctcccgcccctcgccgcccgccccgggagcccgagccccgcccttccccggccccgccctcgcctcccgagcgcgcccaccggagccaccgcgctcctcgcgacactcgcaggctctgcgaacttccgagcggctgggccgggccatgggggcgcctcggggccggatcacgtagccgcggcgcccccggagagccagcgtggccgggagcgcctgccgggctcttcccgcgccccggccatggtcggccgcggcgtccctctgtgcgctgcgcagcccgcggtacgcgcggcccggcctggagagggaggcgggcggcgggggcccgggacggcgaagatactcgcggtgtgcgctggatccctgggggccgggcctcctgctgagggtagcggacccgcaggcgggacctccggggatggagggagtgggtgagcgccagggtcgtgcccagggctcctaactttggcaagagcgtcacgctggggcagggcgcgcaggggtctggatccgacggacgtcccaggctcactgtccgcttccgcccccacaccctgcaggtggccgagggcggcccggcccgcgagccgccgccgctgctggaggtgtccccccgaaagaggctacccgccgggcccgaccaggacccatgcggcagccgccctgctcccgaaggcgccggggccggcccagagcagggccactcggccggcggaggcggctggtgccgccactgccacacgaagctggtggagctcaagcgacaggcgtggaag

SEQ ID NO: 224799 - DNA, 237 bp, Homo sapiens
  chr14:105189936-105190173
  hyper
gctacagccaggcccgagccacagcgcgcccgggcgggacgcggggcccctgccgtggggcagaagtgcgggcagttgcggggacacaaagtcctcggagaggacgcgctgcgcggctcttcgcggccgccagggggcgcgcccgcgcccagggcactcggggttccacggggggcaggtgcgctcctcgagagtgcggaccctctaggtggggtgcaggacgcagctccccttttg

SEQ ID NO: 224800 - DNA, 314 bp, Homo sapiens
  chr14:105195591-105195905
  hyper
gtcaatggacagcccccaagccaggcagatggcaggtggcatcccaaggatttagggacggggtggacaggagcaggacgatggctgcagggcaaggctgggacccgcacgggtgacaagctcagtgcaggggcagggcatgcgccatctgggcagtgtggaggtgaggagcaaggacaaagcctgtgtgtggagacgccttgcacgtgtcagcagcatggcgtcggcgtgggagggaggaggtagcgtcggcgtgggggaggagcgtggcgtcggcgtcgtggggaggagcgtggcgtcggcgtggtggggag

SEQ ID NO: 224801 - DNA, 172 bp, Homo sapiens
  chr14:105196124-105196296
  hyper
cgtcgtggggaggagcgtggcgtcggcgtcgtggggaggagcgtggcgtcggcgtcgtggggaggagcgtggcgtcggcgtcgtggggaggagcgtggcgtcggcatggtggggaggagctgtggggtggcaacccagaggcaaggaggtgggcagaggcccacgaacctgg

SEQ ID NO: 224802 - DNA, 87 bp, Homo sapiens
  chr14:105196474-105196561
  hyper
gtcaaatgcaggaggccacacctgcctgcccaggaggactgcaggagccggatccttaacacctggaggggagcgggtgggtgcggt

SEQ ID NO: 224803 - DNA, 180 bp, Homo sapiens
  chr14:105269059-105269239
  hyper
ctaggctgtgacactatcttcctctcccgtcccctccagccaagttctgaggggtgtccaaccagcacctggctctgcccccgtttctccgtgtgagatggcacatccatctcccggcccgggactttcctgaccacctctctggcaggcttggggaggtcttcatgagcctggccccac

SEQ ID NO: 224804 - DNA, 743 bp, Homo sapiens
  chr14:105331155-105331898
  hyper
aggttggggactcgaggcgcggctggagcctacagctcctggagcgtagttaagcgttaacccgctggccctgggccagggcgcggggctgctgtgcgcacccggttccgcccgtcgagctggggccggaccgggaggcgaagcggggggcgctgccgagacgggagggcatggggtctgcgccgggtgcgagatgagccggggaggccagcggggcctgggcggtgggggaaggtgggcctggggcaggggcgggatggcggctcgccaagcctctgccgaccggaccacgcgcggggctaccggggcgggctcacctggcggccgcggacccgccctaacctggtttccggcggggcggcgcggggtgcggcgcggccgggcgggggcggggcgggcgggggcgtgcccggggcggggcgttccgggggcggggctgagcctcccgcagacgtcagggacccgcgcgcgaggccgccggcggccgctctgccgtgggctcggcccgggctgccacgagcgtgcgggcctcgccgggcatgtcctaggcggcggccccgcccagcgctcggccgggcgggcgggcgggcgcgagggcagggaccgagccgggccgagctggggaacaagccggggaccaagccggggaccaagccggggactaaggcgagccggagaccgagcccgaacagcaggtaggacgcgccggcccagcgctggccgcggcccgggcctcccatcgc

SEQ ID NO: 224805 - DNA, 86 bp, Homo sapiens
  chr14:105511596-105511682
  hyper
aggacaggaatatccgggtctctttgcacggtgtttgccaccttctgtaaattgggattttttttttttttttttttttttttgag

SEQ ID NO: 224806 - DNA, 420 bp, Homo sapiens
  chr14:105511975-105512395
  hyper
cagtatcgcgtattttccacgagtgcctgtgcaggcaggtaaggatttaggaaaggtctggaaggatgtgcaaaatgttccgcctgcgaaggttccgcggtggcggggacactgctccggctccgctcccgcccgcccgagcgctcggatggggccgcctctgcactgcgtggccacaggcgcggcccggctgcccacgggcgccctttgcagctgctgccccctggcggccgcgggcggctactagcgggaaagcgaaacccgcccggtccattcaagccccgctgcctggcgccctctagggtcgttcttgggaacgggcggacctttcgtcaacactttgcctgcaagatcccccattgggggaaccgaggaggaagttaaaggaagatgtgtgtttttgagcgctgctttgtgcca

SEQ ID NO: 224807 - DNA, 144 bp, Homo sapiens
  chr14:105647609-105647753
  hyper
cccgacaggagccttcgggcgggcgcgtgaccgcggctctgagcatgctccgtgggcgcgcggggcggggcggccgaggtgggcggggcggccgaggtgggcggggctcgcaggtgccacctgtcgggtgccgcgcgcctcggg

SEQ ID NO: 224808 - DNA, 57 bp, Homo sapiens
  chr14:105714400-105714457
  hyper
gcgcgactaacctctctgtgcctatttcctcgaggaaaatgccgggaaatagcagcg

SEQ ID NO: 224809 - DNA, 52 bp, Homo sapiens
  chr14:105714486-105714538
  hyper
tggaccgcgctctctgcaagcgctggctgctggcgtccgtagcaagctaaat

SEQ ID NO: 224810 - DNA, 105 bp, Homo sapiens
  chr14:105781805-105781910
  hyper
ggggcgcgcaggactcggttgtatcctccgtccagcgcgcggtggagatgccctgtcctgcggggcggggtcgtcctcgcgggtacctggttggcgctgtctctc

SEQ ID NO: 224811 - DNA, 202 bp, Homo sapiens
  chr15:20478123-20478325
  hyper
gaaggctgggcagggcgaggggacaatgcagctgtaagctgaacctggctctgcagcacagccatgctacggccaggtgagacccatcctgggggcatggaaagccgaattctgctgaaggctcctccaggctacgcagggtgggaagccaggtttgtggctgtccaggcaacaacaagaggaggagcgactgtcctgagtc

SEQ ID NO: 224812 - DNA, 509 bp, Homo sapiens
  chr15:22892004-22892513
  hyper
agttttcctaaacacgcctgtgaccagctgactccactcagcgtttccgtgtgaggtatgtttcttcaccggcctttcaagattgttttttggcacgagctcaaatcaggttttcttccgtccgccgttcccgcaggtctgcgcacggatttgtccctggttcccgcaggcaatggggccgcaggggccggccgggggggtccccagcgggctctgcgcgccgacctgcagctgggacccgcgcctggaaccctcccgacgagcgcaggtgagcgcctcctgccaagtggggcggcgccacacgggcgtcctgggtgtccccctgagctccttccgcagctcaggccaacccccgccctgacccggtggagccccgggacagggtgcggaccccgttccttcgcgctccgaaccggacggacccgcaggaggaccccacgcccgctccgctccgaccccgccgtcccgcgcaggctgcggtgacccaggccggcaggtagccaggggct

SEQ ID NO: 224813 - DNA, 932 bp, Homo sapiens
  chr15:29130656-29131588
  hyper
gaggccgcgatccccgagagttcttcgctcgagggttcttcgctctagggtcccccattacagctgcgcggggccgagcaagcagggcgcggcggccggggcaaggtgcggagcctcgcgttcaccggctctacctgcggagcctcgcgttcactggctctacctgcgggaccagacccctgcagctccccagccagcacggccggggcacgcccgggaatctgtgtgctccccagggcccggggcgttcggggcgccgcgccttccagcgcctgggtcccagccccgatcccggagaccggcccggggggacccggggtcccgagtgcaccctcctgccctgcagactgtcccagcgccggggccagggggcgcaggacctcgcgcacgcccggcacggacgcatctttgtcttccctctcttcacggcgcgcgatctagccgggaatcgttttccggccccagtgtgcccggcgcgggtgaggcggaagcggccggggcgggggcgcaggcccggcagccgcaggccggtgcgggatgcgccccgcagccgcgccgcgtgcgcccggcagaggcggccctgcgtgccgtacgctgcgtccggggcgcgcccgccgctattcgggaagctattcagcttcccgggctcattagcagtcgcggtgtgcggctcggcgcgggctcacaaagagctcggcctcgcggactgagccggcggcagcggggcggggacggcggcgtacccgggcagcccagcgccctggccaggtaagctggggaacctgggctgcctgacttgccggcggcggcagcctggggccgcccggggcgccgcgaggacccggacgcgtggggggcggcgcggaggttgcggcccgagcgctccagagcgctgccctcccgactcagcgtggctgcggggcggccgccgc

SEQ ID NO: 224814 - DNA, 346 bp, Homo sapiens
  chr15:29395803-29396149
  hyper
cagccccgcggagccggctccccgggcttggagcttccgcgggggcggaggatgtcgtccaaggggaggaagaatggcggtggcccgagggagcccaagtggagtccgagggccgtgggtggtggagccgggcctccggggctccagggctctcaggccgtccttcccagccaggtggcctcgtcaggcggagacagaagcagaggcctgggggccgccctccgctcttcccaaaggcccgaccctctcctgcgcgggcgctgcccccggccctcctgccgagccccatcagctcgccaactccgcaggccagcccggcggcgccatctggcggtccccgggcgtc

SEQ ID NO: 224815 - DNA, 180 bp, Homo sapiens
  chr15:30113792-30113972
  hyper
ctcccggccagcaggaggtggcaccccaagccccgacccgctgagagccggcttccagcccccgaaccctcactggagccgagtttctccgcgagggacctgttgcgtgtccccgccctcagcgagccgcagccaggcacaggcgccggcagctatgcacctgcccagtacggcggccgg

SEQ ID NO: 224816 - DNA, 360 bp, Homo sapiens
  chr15:30114028-30114388
  hyper
aggggctccccgcggcccgcggcccgcggcccgcggccccgcgccagccctgcccaccccgccgccccggggcccagacagccgccagcgagggagggcgggacgcgggccagatgccggtgggcgggcggcgacggtcggcccggtctggccctggcggccgcggaggcgctcaccttggcggccgcagctctggcggacatcttgtctctctccagcgccgcgcgaggctcctcggacccgaaactccgcggcgctggcccgcccgctcctcacgccacagcccaaataaacatctcccgagagcgagcggggcacgggcgggggcggccggaagggcccggcccagggggagggaat

SEQ ID NO: 224817 - DNA, 300 bp, Homo sapiens
  chr15:30114565-30114865
  hyper
gcgtctcctcggaagccggcttcgccacgtaacttcccgggaaccggcggccgccaaggaacgcggcgtccgctggctcagccggcgccggcaactcagcggccacgcaaacctgccggcccggcccactgagcatgcccggcccggcgggggcggggctggacgaggcgaggcgaggcgaggcggggagggggcggggccgcggcgggggagggggcgggacgagcggccggggtcccgaccccaagcgcggaaggaaaagccgggtaacccaagtaacttggaagacagtttccgctg

SEQ ID NO: 224818 - DNA, 161 bp, Homo sapiens
  chr15:31508793-31508954
  hyper
acagttcagcccgccggaggcgtgtgcgcttccagatgagagcacttgttcactgaatgaccgtgcgtacttggggggacatctggccccagaacctccaggagcagggtggctaatgctgagtgccgtggcctggcactgggaagcgccggtcctcagtc

SEQ ID NO: 224819 - DNA, 276 bp, Homo sapiens
  chr15:31620729-31621005
  hyper
aaggaatgccctggccgctgcccatcctccgtgctgccctctcgcctgcccacctctcacctgccctgggccggtgcggggcgggcggcacctgcaccagggcgggcgctgagcctccagcctggggatcaccgcccgcccccgccagcccagcggcaacagttcccacgcgcggcccgatactttgtagttgattcatctgtggcggttccctcccccctttttgtttcgtttttaacataaagatgaaaatattttaatggacggcaatccttc

SEQ ID NO: 224820 - DNA, 180 bp, Homo sapiens
  chr15:31774864-31775044
  hyper
tgaatggtgcttgagccggggctgggggaggaggttttgcttatgaaatggagctgtgtgtttctaaagggccacagtgaccaccagggcgtcagctggcggccaggtacccgccttctcctaggcctcgggatgggaggcaggtagagctcacagaggagcctccaccgcagccccggg

SEQ ID NO: 224821 - DNA, 540 bp, Homo sapiens
  chr15:31775362-31775902
  hyper
accaaacacgtacacggcactgacagaggaggcgccggccttccggtggaccagggcatgtaaaaaagacaccgacacaatggaaaagaaatcctcgaaggtagaacctcgccgcccgcgccgcgccgcgccgctcagggccgggccccgcgcgcctcgcgccgccgccgcagctcctcgcggtagcagtaggagcagtagtgctcggtctcggcgcgcccgtagaacgcacagttctcgcgctggcagcgccgctgcaccggccccgggccgccacggccgcactcaccgttcgagcgcgcggtcggcgcgtcggcgtcggcgaactccaggccgtcgcgcagggcgccgaagccgttggtgtaggtctgcgacttgtgctcggccgcccccgccgtccccgccgcgcccggtagggccccgggcaccgcgcgcgccagcgactcgaccgtgttgacggtgcgcagggcggcggcgcgcgccgggctgtagctctgcgacgacagcgagcggttctgctgcgggtacgtggcgcacggc

SEQ ID NO: 224822 - DNA, 1082 bp, Homo sapiens
  chr15:32162216-32163298
  hyper
cgcagtcacagctccggtgcccggcgagcggcctcgcgcgcggctcggggccgggccctgcccggccgtctgcaagagccgcgggacccccgacgcgcgcgcacggaccgaggggtcggtcgccccacgcctggcatcacgttccagtgcggacagccaaagggctgagcggaggcagcagccccgacccagcggtagcgccgcgccctgcccgagagaggcgcgccacgccgggccggagccggtggcccgggagcccgcggggtccggagcggagcccgcaatgcagacgcgccggcgagcccagccggggcccgcgccccccgcgtccccgcgccccggccccgcggtcgcccggcctcaacgcccacctgcctcgccacggagctcgggaaggagacggcgccggccccgcgcccggagagcgcacctgcctggtccgcgggcccggccccgccgcccgccggcagcaccgcggccagcgccgtcttacctgccgcgccgcgccgctccgctccgccagcccgcagcgccgcagtcgccgctacccgacttccattttctctcgctttaaaggaaaaccagatcagctgttttgctcccgctcgggctccgcggccccctccccagctgccgctcgcggtcccggtggcctctcctcccccgcctcctcccgcgctccgctccgcccctcgcgcccctccgctccgcccgcggccgcgcacaacgcccgcctcccggctccgcctgctgcctccgggcgcgcgccctcctctgacgtcaccggtcgcgttcgcgccccgcccccgccccgcgcggacgtgcgcgcgccgcgcctgtgccccgcccccgcccctccggggccgggcacggagagcgcgtgctcgcggccgcgagccgaggaggggacgtacagcgcccgcgcgcccgcgagcccgctccggctctcccatgcttgcccctcggggtgctccttctgcgctctccgcctggactgcaggaaaaggctgcttaaacagcctgccttttcctgctgcctgactcgcgccatctgcggccacctgtctcgtttcttccccctg

SEQ ID NO: 224823 - DNA, 180 bp, Homo sapiens
  chr15:33010322-33010502
  hyper
cgtcgaaagcgcaggccccgaggacccgccgcactgacaggtgagcgcggacgcacccggcagggatgtgagtgggcggagggaagagggccgcaaaccaacccaggacccgctcagttccacgcgcggcagccctccgtgcgcgcaggctcgggtgcgttgttcgcgggggtgaattgt

SEQ ID NO: 224824 - DNA, 1286 bp, Homo sapiens
  chr15:33602692-33603978
  hyper
cacaggcaaagtgggcaaagcgggcaaagcgagcaaagcgagagggttggtacccagtctgggcgcgctggagctaagcaactggcctttgtttgtgaattggagcagtttaggggacatcctccggtcgccgcggggcgcgcgcctccgctgagtgtgcggtgcggtacccagcggtgcgggggaggctccaccgcgccagcccagggcccccgcaccgcccccgccagctcgacgcgcccagcgttgcgctctccacggagcgggcggccgcagcgcacttggctggggcgagaggcgagaggggtgggcggactgcttggttggcgttggcgctctgcagtgcagtggagtgttagcccagctccctatatggtcggggattagcttggcgctgctgaggctgaggctgagccaggagctggaggaggaggtggaggacgaggacgaaaaggaggaggagaaagagcgcagcagcagtcagcgcacgccgagcggctgccgggggaagcagaggcgccggaggctggggcaccgccgacgcctcgggagccatggccgaagggggagaaggaggcgaggacgagatccagtttctgaggactgtgagtctccgcggcgggggcgaggccgtgggcaggtggggaggagcgcggagcgcggcgaggaggggctggctgcgctgcgccgcggtgccgggtgcccggtgccgggcgctttctccgcacccgcgggctgcagaggcggaccggccacctacccgcggggccgcgaggggctgcgtgggaaggggcaccatctcctgcctctcccttgttcccctaccgccacccctgccccaggccctccacctaggaccgctcgctctccaggcaacttgctacttggtctgaaacccttgatgcccaaacttcagccggggtttgttcgcggttgtcctgacccataagatcggcgttggaagccctcgccccggggtcggccctctgacacctccatactccaccccagccccattcctcttccagggcgcccccacgcacaggggaacctccgggaaggagccagcggggcaggggggagtgtggggagccgggtcggagaagcgggcgcaggcgcttggtcctagccctgggatcgctcggaggggaattcacccagcgctgcccctctcgtgttaagccccacgccggcaactgctgctggagcctgacttgactgactgcctgtcgtgtgttcgagagctgtggcttctgctcctggctcccgcgagccccgcaggacag

SEQ ID NO: 224825 - DNA, 891 bp, Homo sapiens
  chr15:34728767-34729658
  hyper
tgctgcaggacaggcccctccgcgggcgttccccgcaccctccctccgcgtcggcccggagaaaaggaagttcgcccctagcctgggcttaccaaggcccgccgcccgacccatggagccctgcttggggaccgggggcctcgatgttctccttcaccatctgcggccagatctccctccagcagccttgccaggcagtgcctggcgtggagaaggggccctgcagaggcgcaggtccgcaccgtgcccccaacccggcgcctgcagcccaggggcaacaaggtgtggggtttttgagtttttccctctgggccttattatacagggaaagggaaggggcgaagatccgggctcgagttctcccagggaagtgaacccagaggcgatcccaaactcagtagttgccgcccggcacggggacttgatgccggcgccaagccgggcagcggaacgcaccagcggcccgaccagcccggcgagacgcgagcgggcggccccgccagacagcgccacttgccggcgccgagagtggcccctcgccgcggtgagcccctcccgggatgcgaaagccatcgcctagtccccgccgcacccgcccgcccatcgtgggaggaggatgggccggtccgagaggcgtaaggccgccgggctgcacccctagatcccagcggcggcctccccgcagccccgccgagtccggggggcagcgctcgggagctcttggcccgcagcttacgcgccgccccccacgcgtccgggtccccgcggcgccgcgggcggcccaaggctgccgccgccagcgagtcaggcagccgaggttccccagcttacctggccagggcgcggggctgccccggtccgccgccgtcctcgccgcgccgccgtcctcgc

SEQ ID NO: 224826 - DNA, 105 bp, Homo sapiens
  chr15:34729901-34730006
  hyper
cgccgtcctcgccgcgccgctgccgggtctctcccgggggctgagctcccgcagagctcgcgcctagccgcacacctcgactgctgattagcccgacagctgaat

SEQ ID NO: 224827 - DNA, 685 bp, Homo sapiens
  chr15:34786529-34787214
  hyper
ccggccgccgaacaaaggagcaggggcgccgccgcggggacccgccacccacctcccggggccgcgccgcggcctcccgtccaccgccaccatgaccgccaacggcacagccgaggcggtgcagatccggttcggcctcatcaactgcggcaacaagtacctgagggcggaggcgttcgggttcaaggttaacgcgtcggccagcagcctgaagaagcagcagatctggacgctggagcagccccctgactaggcgggcagcgcggccgtgtgcctgcgcagccacctgggccgctacctggcggcggacaaggacggcaatgtgacctgcgagcgcgaggtgcccggtcccgactgccgcttcctcaccgtggcgcacgacgacggccgctggtcgctgcagtccgaggcgcaccggcgctccttcggcggcacggaggaccgcctgtcgtgcttcgcgcagacggtgtcccccgccgagaagtggagcgtgcacatcgccatgcaccctcaggtcaacatctaccgcgtcacccctaagcgctaggcgcacctgagcgcgccgccggccgacgagatcgcagtggaccgcgacgtgccctggggcgtcgactcgctcgtcaccctcgccttccaggagcagcgctacagcgtgcagaccgcggaccaccgcttcctgcgccat

SEQ ID NO: 224828 - DNA, 105 bp, Homo sapiens
  chr15:35046505-35046610
  hyper
gaggaggcagaggacggactggggattggagcgggagactcagtccaggtgtgagaagggactcccgggggccgcccgacggggccccctgaccgccggcttggc

SEQ ID NO: 224829 - DNA, 660 bp, Homo sapiens
  chr15:35046843-35047503
  hyper
ttattgtacttaaaagagaagaaatggggaaagaaatccaagcgcgtcccgaccgatggggcagttggcgcggtctagagagagggcacgaacctcgggcgccgtccggggttcgggtctggatcccgcggacgccgggacgaggggcggggcggggtggcagcctgcaggtcctccagcgctcgcccgcccaggagaagtctcagcgccgctctccgccgcaggttgggggccaggggagggtccgaacaccggctctgttcctgctacttcagcgggcacctggcgctccggcgcggcagcctgcgaggccagggccgagcgcgcggagccgaatgctgggctcggggatccgcggccgccgcctctaatccgcccttaagtagtctccgcctgcgtcacgccaggtcggcggaggggagcagagcgcgccgtgcggctgtcgctgcgcgtcggagcccgaggggccggggacgcgcgcggggggagaggggcaagagtcctggaggcccggcggggagcggggcgatttcgaaaggaaggactgcagcgcccctcggggcttctcggggagcccaggtaacctcacctgaccgccagacccaagcaggcggagggggagccgggagcggacgcgtgggtgagtggggaggggagtga

SEQ ID NO: 224830 - DNA, 679 bp, Homo sapiens
  chr15:37393563-37394242
  hyper
cccgtgcgcgcgcgcgactagtgtgcgtctccaaagtggatctcactcagagctgggaagcacaggaggaaaagacggagagagtgggggagaaagaagttgccgggcgaggaggagtggccggcgctcacagcccagctttgttgtggtcgcccgaggcgcagcggcgggccgcggtaacgcctgctaatggctgtgttaattacacaggggcgatttcgcggggtcagggagatggggccagctccgaaagaacttttccaaaaaggaaaaggaaacgaagggaactaccccacaccgtttgggtggaaactagttgtggccggtgccctgtcctccctggcccgagctgcaccaggcttcacctctgcgcggctggtttcccggcggccgcgcgtcaatcactacgagcccggagttgggggcggagccacggtcaccccgcgcaagccttgccgcccagcagcccccatgcccctcggccccttgtggcgcggccgggcggacaggcgctggaagcgcgtcctctccccaacttctcgctctcgccctcccagtccctggcccagagagtggaaagcggactgttgttctccaacagccgcatccctccccaactttgaacccattctgagaagtggagagtagtgtcttccgcgagccgcgtctaaccgacttt

SEQ ID NO: 224831 - DNA, 135 bp, Homo sapiens; identical to SEQ ID NO: 203833
  chr15:38365202-38365337
  hyper

SEQ ID NO: 224832 - DNA, 105 bp, Homo sapiens
  chr15:38543129-38543234
  hyper
cttcattcttaggtcgcacaaatctgagaaggaagagaaaaacattgcacgcagggcgagacttatatctgggaagatgcgtcaggaacttgggagcacttggga

SEQ ID NO: 224833 - DNA, 136 bp, Homo sapiens
  chr15:38857268-38857404
  hyper
gcacctgtgcccgtcgacctccacctcagctcgggaaacgggctgcgcctagcggctcccatgggaccccctttcccgcagccgacccgcagcttccacgcctcttcctgcggccgctgctcggagcactgcagtg

SEQ ID NO: 224834 - DNA, 45 bp, Homo sapiens
  chr15:39958298-39958343
  hyper
agcaagaaactctgcgttaatcaactatgtcgatctgtcattctg

SEQ ID NO: 224835 - DNA, 131 bp, Homo sapiens
  chr15:40074971-40075102
  hyper
tggaagaagccgccggtccagatccctcctgcctgtgggaccgctgtttccctggcaaccagatgcgcgatgcttccggtctcgcgatagcggaaagggctgtaccatccggaaatgggaccggggccggc

SEQ ID NO: 224836 - DNA, 66 bp, Homo sapiens
  chr15:40094250-40094316
  hyper
gttatacaccagaacgtacaccaggtggcccaaggagttgctccagacttccgtgcaggtggacgt

SEQ ID NO: 224837 - DNA, 36 bp, Homo sapiens; identical to SEQ ID NO: 203836
  chr15:40559555-40559591
  hyper

SEQ ID NO: 224838 - DNA, 376 bp, Homo sapiens
  chr15:40575342-40575718
  hyper
gggggctcagcggcgcgggagctgccgcccgcctagatacctgactttatagccttgggggtctccatggcaatggctgtcctgggagcggactgcgccgtcagggcagagacggacggggcgggggagaccgctcctgacccccaccccttcgtgggccacgaagtaggggagcggttcctcctccgcgctcccctgggaatgcggcggcggttgcggggcgggggcgggggctgctcgccgggggccacatgcacccaaccgggccaatcccaaagtcgcagtcttctctccccgccctccgcccccaaccgagtcggtgccctcggctccttagaaactggcgggacctcggcctcgtcggggaagactgaaa

SEQ ID NO: 224839 - DNA, 56 bp, Homo sapiens; identical to SEQ ID NO: 203838
  chr15:41046993-41047049
  hyper

SEQ ID NO: 224840 - DNA, 156 bp, Homo sapiens
  chr15:41136285-41136441
  hyper
agctctccgagcaccgggtcggaagccgcgacccgagccgcgcaggaagctgggaccggaacctcggcggacccggccccacccaactcacctgcgcaggtaacccgggcccccgcgcgcaaggccgaggcgcaggcggagcgggctggagcatgt

SEQ ID NO: 224841 - DNA, 489 bp, Homo sapiens
  chr15:41136702-41137191
  hyper
ggaacccagaggcccgcgctctgaaggtgacccccctggggaggaaggcgatggcccctgcgaggacgatggcccgcgcccgcctcgccccggccggcatccctgccgtcgccttgtggcttctgtgcacgctcggcctccagggcacccaggccgggccaccgcccgcgccccctgggctgcccgcgggagccgactgcctgaacagctttaccgccggggtgcctggcttcgtgctggacaccaacgcctcggtcagcaacggagctaccttcctggagtcccccaccgtgcgccggggctgggactgcgtgcgcgcctgctgcaccacccagaactgcaacttggcgctagtggagctgcagcccgaccgcggggaggacgccatcgccgcctgcttcctcatcaactgcctctacgagcagaacttcgtgtgcaagttcgcgcccagggagggcttcatcaactacctcacgagggaagtgtacc

SEQ ID NO: 224842 - DNA, 200 bp, Homo sapiens
  chr15:42112223-42112423
  hyper
caaggatccaaagagcggagatctggagaaacagttctaaagatcccggttaggaggtaagcggagaacttccagaatagttagagggaaaaggccatgaggggacccataactcagcgactgccctggggtggccaaagggggatcaaggtgttcagagcaagttcccaagcaccagtaccttccgttgtcagcaacag

SEQ ID NO: 224843 - DNA, 157 bp, Homo sapiens
  chr15:44038552-44038709
  hyper
cgcgcagccaatcagcggctgccacacagcggcccaagccgggtttgggggttgggacctccggctgcaggtccgcctgggccagacgcgcgagcgcaagcagcgggttagtggtcgcgcgcccgacctccgcagtcccagccgagccgcgaccctt

SEQ ID NO: 224844 - DNA, 877 bp, Homo sapiens
  chr15:44486764-44487641
  hyper
aaagcctgcgcccccgacggggcggccgggctaggagcctaccgccctacccgcctccctccgggcgccccggaaaggtgcaccttactcgggcgggctcgaggaaccaggacggggcgccctcacccagggagagcagggtaggacttaggggtgtgggacgcggagactcgccccgcggcggcggtgacacaccgggtgccagggctccggcaggggctccggtgaagacgccctgcactagggcggtccgccgcaaccaggaacggacaaagcacggcgctggggctggggcgacccctgggcggcggccgccgccggccaagttgaccagacttgggggacaagggggtcccgcgggcggggcggggcggcgcggcgctgacctggatggtgcaggtgtactcgctgtcgtccagcagccgcacggtgcagctgtactcgcgctccaggctcctgctgctgccgctcatcaacctgctcagcatcttcccgcccgcccgcccgggagcgacgcggcggcgctgcggaccctggaccaggcgtccctcagcccggcagctccgcaccgaccccaggcacctgcaccatcaccccggccccgtcgctgccgttgcctcctgctggcctcgttcctcctccttatcctcctccttccctcagccgccaccgcctccccccagcccagatcaagcgccgggctctgtctcctcggcgccccagtgcccgtgcccagctcgcggggcggggcctcaactggagggggccaatgggggtcagcgcggcggaaccgagtggcagaccgaaaagccaatcgagatagagtactgggatgatgggcgggataaagaagcaatcacagaaaagcagtcggacc

SEQ ID NO: 224845 - DNA, 347 bp, Homo sapiens
  chr15:45479541-45479888
  hyper
agaagctgagacaccgaggggcccgggccaggccacctttgtccctctcgcagcctccagacccctgaccgccttccctcctggccatcccggcccggcgcggcactcaccctatcgctgctggcggggggtccggagatccgctcatcagcaggcggcgccgggggccccggggtctcgacccgaataaggcggtgtgggggagagccgtggcgcgggggcggcgtgggtccgggggcgacaggggtggcgagggcggcggagccggacgaccccccggagtaggggtcttcgaagtcgcgctcccgctgcagcctgtaggcggccaggatgtccgggggcggcgc

SEQ ID NO: 224846 - DNA, 839 bp, Homo sapiens
  chr15:45670210-45671049
  hyper
gcctccgtcgtcccaaccccttgctccgagcgggaagcttggtgcagcgcaccaaggtccggtagaggggggcggcgccccctgcgccgtgggccagcaggccgcggacgcgcagacagcaagtggaccccaagggctggagccgcaacgcaagttccccctgactgggggacgccgcccagctcctggagcctgcgaaggctcttgaagctgagcttcccagggataccagaagggacactctcgtgcaattccggctagggaaagcgagggaaggtggcggctccgggcagggagcgagcgagtgctccacgccgcccgcaggatcgagtgagtcacgcggccgccagacgaggccggtggcgcacgcacccgagatccgatgtagtgcaccgcctcggcgccgcggctcccgccgcgcagacaccgcacccgcagcatcgccctggcccggctggtccacgcgcggaatgttcctggcctctgggccgcgtcggtccaagccttcccgagagcgcgcccggagcggggtgggcgggcgcgcggggcccgaggccttttgtagccgcgctccgccccggccgccccccgcggccccattggctgccgggaacaggtggtggggccggcgtagcgccccgaattaggaactgtcgggaagcgccgcggccgctggctcgagcctccgatgcttgcccttttttagccagcggggccactgacggcttctgttgcacgtccggacccggacccagacccgagcgtcgcaagaaggcccgttggagtctcgcgcaactgggcaggacgcgacttctgacgaagtgacaatggtctatgca

SEQ ID NO: 224847 - DNA, 337 bp, Homo sapiens
  chr15:45722622-45722959
  hyper
tcgggcgcttcacgtcagccgcagaatgtcctgcagggggcgcccgggagtcgcgtgcccaacggggaaagcgagtcaggtccctcgcgctccccgccccacgcgcgtgaccagagcgcgctggcccggcccacccggggcggttgtggtcgctatatataaggtggggaggccgccggcccgttcggttccgggcgttaccatcgtccgtgcgcaccgcccggcgtccaggtgagtctcccatctgcagagacgcggacgcgccggcccgcagttggcctgcggagcgcggtggacggtttggcgcccaccaggcgatcaatactttggattttta

SEQ ID NO: 224848 - DNA, 1958 bp, Homo sapiens
  chr15:48936639-48938597
  hyper
agtttaaccacgaacggggtggggactaaacaaccctagcacctctaaggtgcccccaggaggtcttgccaaggagtcttccacagggagagtcatcctgcccgttgttctggatcttgaaacttgggagacccacaccaaaggagggaaccggttcctttaccctttaagcgcgtcgtgtcctccaccgcctcttctcttggcccgactggctctggtttccttcacgttcccagcctccaaattggcgtccgccccatggctcgtgtaggacgctaaaagcacggtaaatcccagggcgatctccagcagacgccctcgacgcatgatgccgagccgccaccggctcccgccgcctcttgccgcgcccggggctcggtctgcggccgccgctgcgccctgaagcgcaccgcgccgccggggtcccgctatcccgccgcccgtcccccgggccgggctcctcccgccttctccaggcgctgctcccacttcaggcggcccctgccagctgcaacacagagacaaatccccgaggcggggagactttcagggcatcgggatgctgaagcctcgcggtccccattcccaagcccaacccgtgcgccgcctgcgcgtggcgcagttaatttgggtaagggaagaccgtttggtccacagctggctggaaagcccaggcccccggcggcagcagccccggccgatccctcggcctcccgggccccgccagaagagcgcggcgcaaagtacccatatccccagcggtcctaagccccgggcgagctctctgggtttattttttttagcggcacgaattgcgcgcgatgcgcgctctgaacgccccactcctcagcctgccctctccgccaggctggaagccagccgcgccgtccccgccgactccgggcgatgccaccgccccccgaacatctgacgcggagcccggcaccaagagccccgggccaggaagctgtcaggcaggggagggccagcgccagctgtggacgttccgggacagcccctcaccccagtccctgtccctgccctcggcgcggcgcaaacgcaaaagcctccgtggccgcagctccagccccggtggccgcccgacccccgtcgggaccccggctgcacccactggagaagcggcggctccgactcccgaggaggcggcggcggctgctcccagtcgtggccgctacagccactgctcggctccgctcgcagctgtcccagctgtggctcctgtccgcttgtggcacccacagtctctgccgcggctcccgcagccccctcctttccccacctcttcaagtatcgtccgcgcagcggtttctcgcgagagaaatactttttttaaaaaaagaaagaaaaagaaaatgacaccccctccttcgtcgccctcatcaccaccccaccccccggccccatccatcctccctttccactcccctttgccagcctccgcctcggtgcggggcctctcgctcgcaggattagcgcagtgggaggaggcagaggtgatcaggtcctgcccggcctgggactttttgtcttgaggtggggaggggagaaatgggaagaggtggagtagcggttttagcccgctctgcggctgcgaggtttagatccgagattaacctctcccgcgataggtgaagccctaccggagcagaaagctgttccacctgcaccaagaatgcgcgctggagacggttgccccggaggccctggcccgagagaaaaccagtccccgctgcccgcgcctcccggtagcgcgctccctgcgcctctcccgccggacactcagcagacgccggaggccgggaggctaagactgggcgcgtcgcaggccgggaccgcggcagaggctgctgtgccgaccgaggagagggctctgccgcccccacttgccctgggtgtcgagagcccactccagacgcggctcttctgaggctcaattc

SEQ ID NO: 224849 - DNA, 366 bp, Homo sapiens
  chr15:50474766-50475132
  hyper
agcggcggccggcgcgcaccatcctgcgggcgttcctggagaaagcgcgccagacgccacacaagccttttctgctcttccgcgacgagactctcacctacgcgcaggtggaccggcgcagcaatcaagtggcccgggcgctgcacgaccacctcggcctgcgccagggagactgcgtggcgctccttatgggtaacgagccggcctacgtgtggctgtggctggggctggtgaagctgggctgtgccatggcgtgcctcaattacaacatccgcgcgaagtccctgctgcactgcttccagtgctgcggggcgaaggtgctgctggtgtcgccaggtgagccccgaggatcgccctgccctggca

SEQ ID NO: 224850 - DNA, 438 bp, Homo sapiens
  chr15:51633890-51634328
  hyper
ggcgctgagggaggccgtggggacgcgggttggggcctgcgtggcgccctggcggccgtggcgctgctctcggcgctcaacgctgcgggcacggtgttcgcgctgtgccagtggcgcgggctgagctcggcgctgcgggctttggaggcgcagcggggccgggagcagcgcgaggacagtgccctgcgctccttcctggccgagttgagccgcgcgccgcgcggggcgtccgcaccaccccaagacccggccagctcagctcgcaacaagcgcagccacagcggcgagcccgcgccgcatatccgcgccgagagccatgacatgctgatgatgatgacctactccatggtgccggtaggcggggtctctgttccccgtggcgccccggccaggtgggcggctgggggtgtggggcgaggacgccgacgccctcttctc

SEQ ID NO: 224851 - DNA, 480 bp, Homo sapiens
  chr15:52404392-52404872
  hyper
tgcccgtcccgccccgtgtcccggtgtccgccgcgtgctcacccagccgccctgagcctgcagccaggcgcggtgctgccccatgagccgcgagctcagcaaggccaccaggcgctggcagtcccgggcgacgtcgccctcctgctcctttagccgcggctggaagccccacttcttccaccgggcggtcaccagcggccctctctccagcagcgtccctgcgaaggtcacgagcgtcaccactctgccccaggtggggccggggctgtcggagagcacggaatccgccatcagcgccaccagctcgaagcggttcccggggtagccgaggtaggcggagaaaaaggaccggtgaatctgccgtaacctggcggccgcggagcgcagcacggcggcctcgggcgtggatggcgccggctcgggggtgccgggttcccgggcgcagtaccccaggtagtcggccagcaacagctcggtgcg

SEQ ID NO: 224852 - DNA, 616 bp, Homo sapiens
  chr15:52587633-52588249
  hyper
ccccggtccccgtggcccctccgcggcgcctccgcggcccccagcgcgcgcccgcccgccctgccgtgtcaggtgcgcaggtgtggcaggtgtggcccgggcgccaggtcgagtcagcgttagcagggccggctcccccacagcgctcccaggagcccagcggaccctcctacctgcgtgtacagctcggccaccgccatgggcaggaggggccggggccaggccggggctgccgaacgtgcgaggctcgggggctgggcctgcgccgcagaggccgggcgcaggagagaccgccgcggaaatcaccgccgggccatcttgcccaaagttttccaacggcctcctgttcccgttcccgagttggcggcgaggggagggggcagcggcgggattggtccctccaagcttggcccggctagtcggcgctgccattggccggggccgggcggctgcacctggcgggagcgcgggtggagaaggttggggcccggggcgcgctgccaggcaggaacagatgcatccggaggctgcccggcccgagtgttagctcctcaaagagcagaggatacgaccatttaaatggaagacccaagggaatcaacgtactgaacacaaa

SEQ ID NO: 224853 - DNA, 300 bp, Homo sapiens
  chr15:52820625-52820925
  hyper
cgccgggaattttccaaagccaagcaggaggggaggcacgcccgccctgctaaatccacatgggccccctttccactccgaagcccgctctgcccccagctcgagcagcgcggcaggggcctgggagacccccgaggcgggccaccttccgccgccttcaccatctcgcccgaaagaggaaggtgccgcagcgggcgaccggctggtagggccgagggttctgaggcgctgaaggggatggcgctggtggggctcgcctgggcccggcgctcccgccccctccccagcctgacagctggc

SEQ ID NO: 224854 - DNA, 89 bp, Homo sapiens; identical to SEQ ID NO: 203885
  chr15:55699900-55699989
  hyper

SEQ ID NO: 224855 - DNA, 753 bp, Homo sapiens
  chr15:55880357-55881110
  hyper
gccggcatgtgctgagggcgagtgcgccgccgccgccgccgcctcctcccactccttcttcttcgccgccgcctcaggagccgctgacaggggaagcaggaggctcgcggcccggccctggcggcacactcacagcgccctctgaggaggaggtctgctctctcgccgctcccgagtcgcagacacaaaagcccccagactggagccgcctgtaaaacccgctctggggcgggcgagggacgtggcgcggccccgcggcttccccgccctgagctccccagccccgcgcggggacgggcttcggggggcgggggccgctgcctcgtcccgcggcgcctcccgccaccgccgccgcctcgcgctccgcctcggcccagcccccacggcccgcgcgcgcctcttgctccaagccggggctcgcgggcccgcggctcttgcagcccgggtgggcagcgcgcgcctaggggccgccccgccccgcgcccggcgctccctcgccgaccgccaggcccgagaacgcccgaccccgcggccgacgctaccgggcccagctttcgcaaggaaagggcatctccgaacttcgtcggaggccacagcagcaggcgtctcggcctcgcagctagggatcggaaagatgaacgtaccatgcgaggaaactttgtaagcgggagctggagagttctcggcgggcatgtggggatccagattccccgactccgtgtccgcgtggccgtggtgtggacacctgtctgt

SEQ ID NO: 224856 - DNA, 510 bp, Homo sapiens
  chr15:56034400-56034910
  hyper
tccggggcacaaatcggccacttcacttccaaccctgccaattccaccctcccatctcctcctggctggatccagatccggcaagctggtgccgattggggttatgagttcacctattccctctcgcagccctaaaaagtgggggaactcccacaacagacacgggaagccgcgaggaaccgcggcgccccctgcacggcgaggctgccactaaggaaacaatataaataaagccacgtgcagccgcggcggccccggcgggctggcgacccggagtccggccggtcgcggaggcgcggacgcggccggagccgggacaatggcgcgagaaggaagagaccagagtggacagcggccgccagaactccgcagccacgggcgcgcggcgcggaggggcgtgcgcccggagaagctcccgcagccctgcccaagcagcgcagaggccgcaagcaactagtgtctgcagctggcggttccggacaggccgcagggcgagagcgggggccgggg

SEQ ID NO: 224857 - DNA, 508 bp, Homo sapiens
  chr15:56035251-56035759
  hyper
cggcaccggcgtggcgagcgtctctgcggcggcgaggctggtgctcggacggccgctcgcgagaagcaaggggcctgagagtccggctgggggcggagtgaggcggcggctgcagagggcgggggcggcggagtggacagcgccgcggccgcgggcctgggactactttctacatctggcccttggtctgggccagggaggtcggcgcggccggcggagggagacgctgggagggggccagtggcggccgggtcggagccctgggggaagggtacgggtcccgccggacaatgcacctgggggtcaagccccggctgagggtctccggcccgcgtccccgccccctctgcctccgcgccaccgtcggggacagagccacaaaggccgagcctcctggcccagccagcctccggggcccccctcccgcggctagttgaggattggggaaggggaggcggccggggagggctagtgttgagagacagggaaaggccggaggcttctccct

SEQ ID NO: 224858 - DNA, 504 bp, Homo sapiens; identical to SEQ ID NO: 203886
  chr15:56285864-56286368
  hyper

SEQ ID NO: 224859 - DNA, 340 bp, Homo sapiens
  chr15:57210212-57210552
  hyper
tctggtttgaggtacgttttgccctttctcccgcattcggctctgcatcgaatctgaccggccgcgcctactctcggaacggccgaggaggatgggtctcccgtctccacacgcgcggtgtctgcgccgactgcagccctcctggacgggagcctctgggcccagcttagggtggcgtccagcgtgacctactcgggaatggcagccttcagtgtcctgcggcctcgggttccgggaagctcggggacctgggcagcggatccagatgcttccacagctgtgtctccgtcgctccgcttcgggggccgagaaccagcaagaccaacgcgaggaggcgcca

SEQ ID NO: 224860 - DNA, 210 bp, Homo sapiens
  chr15:57598970-57599180
  hyper
cctcggcctctcacctccagcgccggggcgccccctgctgtcggaagcggctgtgaccgggcagaggtgctatctgggactctgggttctcagcccggggacagcgaaccgaggggcagatgatccatcagaaaagagccggcactgcccagccccgcgcccctgcccctgcctttttccgggagcgcgccgcgccgcacccgctacggc

SEQ ID NO: 224861 - DNA, 960 bp, Homo sapiens
  chr15:58357315-58358275
  hyper
gcccggaaggcggaggaccgagaggcgacggccaggctgcgtggccaagctgacggggaaccccggcctccatctgaggatactaagcggttccgacgccttcccccgcggcagtcgggaccgggagaatcggacagaaaccagcctcagagtccggggcaggagccgttgacggctgcccctcaacgctgcgcttcgggttgggttaagtccccaaggcgtcctcagaccacggcggggcttcaaacgccccagtcccgaagacaggcagggggtccctctgctgcgccgggatgacaggctggccccgacgaccccggccccgtcccgcagccctcacccgctgaagagatcggggaaaccgaagaaggttctagaaagtctccgtggacgacgggcgctgggcggccgcttaccttggtgtacttaatttcgagattgggcgtgggcgacggcaggaggtgcagcgacgccatgagggcggcggggtcggccttcacctcgccgggcatctctatcttgctggaagtcatggtggcgggccgggtgtccctagcccgcggcgtggggcagtgcgggctgtgcgcgcggtccgcggcccgggggcgcgctcgcctgtatataggcaggtgtcaagctggggctcttcttattggacgtgagggccgaggcgcggggggctggtccatcctacctaggacgcccggcgcagcctccatttacataaagcccgcgccgcgcggccgggacgcttggcgcccacggtcaagtccgcccggcgctcccgccccccggccgcggagaccagcccacgccgcctccacagtcctcgacggtgggagcggaacttgcgccgcggcccgcgggcctcggccagccggacttggtctccgggtccctgggtcagagtcggcgggaggcgcacagcggccgaagtcgagcgagggtcgtggcccccgg

SEQ ID NO: 224862 - DNA, 132 bp, Homo sapiens; identical to SEQ ID NO: 203894
  chr15:59663973-59664105
  hyper

SEQ ID NO: 224863 - DNA, 342 bp, Homo sapiens
  chr15:59664435-59664777
  hyper
gcagccatagcaacccggccacagaaagtttcgcgacgcagaaaccgacttggaataaagttttccttggcccctcgctcgctctcccccggcccgggtttacggaaagcggcaggaaatcagagctcgcgacgtgccggctcccgcgtccaccttctccacccctggccccggcagcgcgcccaaggtgggtgcaccacgccggggtttcctgccccgtccccgggtccggcgtcctaggacgcggcgcggccaactcaccatggtgactcgcgccgcggtcgcgtcttcgccgggtcccgctgccggggaactggggctggaacgcagtcttctgggcga

SEQ ID NO: 224864 - DNA, 144 bp, Homo sapiens
  chr15:60288754-60288898
  hyper
tcgggccagtgaacgacgtcagccgcaactctaagtggcaaagttttcgaaaaacctcgccgatcctctgaagatcgggttaatgatttaccccactcgccaaccacctgatgtagcctaccgctacgccgcggaggtgtgcca

SEQ ID NO: 224865 - DNA, 360 bp, Homo sapiens
  chr15:60289247-60289607
  hyper
cttggggcaacctggttttcccctgctgacaagctgtgtcagttaactgcaacccaccaagagtcagccaacagcccccgcgctgctagagcgcccaaagcagaggccggccgcgaggagggccagagtgcaccgcgggggggtttgcaccgcgctggggttggcaccgcgcgctaggacccacgaagcggcgcgctagtcccaggtgagcacgaaatgagcggaaggactctgccgcggaggggcggcgagcgcctggctgcgctgcaggccccgccaagccccgccccctagccattcttagctgggggaggccagcacggatcagccgctttctttcttttctctctttctttttca

SEQ ID NO: 224866 - DNA, 78 bp, Homo sapiens; identical to SEQ ID NO: 203901
  chr15:60690265-60690343
  hyper

SEQ ID NO: 224867 - DNA, 356 bp, Homo sapiens
  chr15:60884997-60885353
  hyper
cgggatcacctgtggccgccggtcgcttttctgcacgcagcgccccgcggaacgcgcctctgaccactttctgcccccactcggtggggcaagaggctcgcaacccgacgccactctcccgctggcttgccggagcactcgggggcgataaatgcgccagctcgttggtggaaaagacaggtttggtctggggagctacggtcacccgcatttcctagagtgccccagctctaatcggaaggtacggcccacttctgggccgtggagaacgaagccactgggaccgtccggggagtggagtaagctcctccgaagtctttctggagagactcggcctgggcgggggaactccgccc

SEQ ID NO: 224868 - DNA, 1259 bp, Homo sapiens
  chr15:62456139-62457398
  hyper
gccccgatcccggccgcgaccctcatcccgggccttgacgcgaacggccaggcggcgcacctcgtcttccgagaggccgtcgaagcaaaagtcctggtcaaaggaggccttgcggctgcgccccaccacagcgctgcattgccaacgcgcagtgcccggcggccgcaggacgaggctgaggcggcagcggacggcgcggggcccgggggcgcctccgaacaggctctccgcgcggagcagccggaggcggagacgccgggttcccggacagtactcagcagccaggcgcagggcgtcgccggcgcggcccagagccacggtgcccttggcctccaggcgctcaggaagcggggccctggatgacagcgggctcgaggagggggcccgggccggggactcggatcccgcgcggcgctcctcgtcctcgttcccgctggagacggagcggacgcgggccaggcggcgactccttccagcccgcagcgcgcgactcagcagcccgtcggggacgcgcaggaggcggcagcggcggggccccgcagcgagcgcgtcctggggcaggcggggaccgccgggggccgcgggggtggccgggcccggacctcgcgggccgcacagggtccccaggggggcgtccgggcctccgccgccgccgcagctgtgggcccggggccggggcgcgggcgggcccccgagcaggagcgactccttgcggcgcgtgtgcgggctctcgagcagcgcgcagaagccgtaggtggtgcgcacacggggcaggtgcggcagtgacagcgctgcctgcgagcgcgggtcccagtccgtgcggccggcgtcctcgtctgccgcgcggggccacaggtcgctttcagcggcgcagcgccggggcacggcggcggcccggattggagactcgagcgtgcaaggggccggcagccgcggcgggatgcagaattcggggatgcgattcggcgtgagcactttggcgaaggcgggcttcggcgcggagctgcctgcggccgaggaacagagtttctcgaggagccgcatccttggaggctggggctaggagtggcgggaagaggtgcgcctgcgggggagagaagctgctgagtttgggcgcctggagctgctgcagcccctcgacgcggctggatccctcccccagaccctgtaaacgtcccccacgtgtttaagaccccagaccagttccagccttcctctcccctgcacccacaacaaatcagccccgcttcagacctttc

SEQ ID NO: 224869 - DNA, 105 bp, Homo sapiens
  chr15:63130456-63130561
  hyper
ggacagccacattgccgctgctagggatgcagggattccggtcactgcccctgccttcaagttgctgactgtccaggagggaacagccagccacaagcgtggtaa

SEQ ID NO: 224870 - DNA, 360 bp, Homo sapiens
  chr15:63795799-63796159
  hyper
tccctcactaaaaagaggtcagagggtcagggatccaatctccatacagatcaacaagttacagactcggtttccccctgcggtaaaaaggggatggtaacagctggtagggtgttgcgaggcttaaatgcggtatgggaagtgcctggctgggagaccttaggtatctaacaaatgctagatcccttcccttcttatcgcctggtaatggggagtttagcttgcccagcaatcccaggctacgtttatctcacttgaacttcctggcttgaaagtcctacgatgtgctggaggtaacgcagatggtgagtcacagtgacaggatttgaacgtgggttcatgggcgcccctgcgggccca

SEQ ID NO: 224871 - DNA, 105 bp, Homo sapiens
  chr15:64454728-64454833
  hyper
aggagagaaaggattcggaatccggcaggcgtgatctttcaccatctccccagcactgaggggtgtttgcaaaaagcctgctctgagactgccagtgtcggcccc

SEQ ID NO: 224872 - DNA, 308 bp, Homo sapiens
  chr15:65203967-65204275
  hyper
tggtccgggactggggtggccggggcagctgcgctcctagcaggcggggcgtggagtctggaggagcgaccgccccgtcctctcggctccccgggccccgccccggcggacgcgcgcctcgcgcccgggcaccagcgcgcgcaggggctgcggagcggcaggatgcaggaggagctggcgtgggagaccgacggccgtgagtctgcctggaggagggaggggggcgggccgaggccgagaggacccccgcatccgtttggggagtgccaggggtgaggttggcgccctccgaacggccacctccgtgt

SEQ ID NO: 224873 - DNA, 212 bp, Homo sapiens
  chr15:65360173-65360385
  hyper
ggcgacgccctggacggccacgcaggtctgcggccggtgggccccgcgcagtgcgcccgcccgtcggggcccaggggagcgggatgcaggcttccctggagcgcgcggccccggacccgtcggcgtccgcgccctcggccccgcgtccagcgggctgccaccccgcggggaggaggggccggtggagcctggcgggcggggccaccccaagc

SEQ ID NO: 224874 - DNA, 159 bp, Homo sapiens
  chr15:65669256-65669415
  hyper
agagtggtggtgaccgagctccaggcagcagagccgagctccaggcagcagaaccggcggaccgcgagagccagggcaaggtctccgcgtgtgcacacttcggggaagggcaggggcacgtgagcatccccgcggctcgctcgctctcgctttcggtgg

SEQ ID NO: 224875 - DNA, 360 bp, Homo sapiens
  chr15:65669472-65669832
  hyper
ccgccctccaggaatctccctcgtcttctcctgtctctcccgcgcactcctcagcccagtaccagctccaaatgcaggtcgtgccatctccgcccagtgcagccgtcagagtcccggtctccgctccccaggctgctgtcccctgtcttggctgcctcgggctatgtccacggccgggcacccagcaccccagctcgtccgcctcggtcagcgcttagccttgcggtctcccctggctcgtttccctcggtctccacgccagcccgccccgcttgctcccgcttcgctgcactccttgctcctcagtctgggctccgggtcctgccccagtcttcctccggggggttccgtcctcaacac

SEQ ID NO: 224876 - DNA, 180 bp, Homo sapiens
  chr15:65669981-65670161
  hyper
ggctccgtccgcaaccgcccggtccggggcgctttcactcaccctcgctcggcgcgggcagcagcagcaacagcagcggcagcaggagccggggccagagcggggcgggcgggcggcgcggagacgcggcgcgctgcacagccatggggctctcggtcagctcggctcggcgacgcgcgg

SEQ ID NO: 224877 - DNA, 180 bp, Homo sapiens
  chr15:65715041-65715221
  hyper
tgagccagccccgcagcccgatgcagaccagggcgcgggcgcaccagcactccgcagtcgctcctgcctctccgggcgcccgcccttaccgcgcgcggccaacaggcagaaggtcaacgcgaggagcccgcggccgcggccggcgtccccccgcgccatggggctgggctcgggccgccg

SEQ ID NO: 224878 - DNA, 221 bp, Homo sapiens
  chr15:65715363-65715584
  hyper
agggccgctgccgcctcacccgcccctccatcgccatcttgggcgagcggcccgggagggggcgcccggcgagtgtggccaccctggccccgccggggaccctgcgcccgcgcgccacggccctgcgcctcgcgggggctcctctcggcccgggtctgtgtcccggtgcctcgccctctccgggtcgccgcgggcccccgtgaggccgcctgttgctgggt

SEQ ID NO: 224879 - DNA, 105 bp, Homo sapiens
  chr15:66994356-66994461
  hyper
acgcgaggcagaaagcgggccgcgggcgctgtcaggccctgggcgggggtgccggggtggtgtggggcgggggcccgagctcggcccgccccgggagccggcccc

SEQ ID NO: 224880 - DNA, 480 bp, Homo sapiens
  chr15:66995500-66995980
  hyper
gggctgcgacccgcgcagccggcgcctcgctgagggaacggacccccggtaaccggagaccgcctcccccccacccctggcgccaaaggatatcgtatgttcaggtccaaacgctcggggctggtgcggcgactttggcgaagtcgtgtggtccccgaccgggaggaaggcggcagcggcggcggcggtggcggcgacgaggatgggagcttgggcagccgagctgagccggccccgcgggcaagagagggcggaggctgcggccgctccgaagtccgcccggtagccccgcggcggccccgggacgcagtgggacagcgaggcgcccagggcgcggggaggcgccggcgcgcagggggccccccgaggcccatgtcggagccaggggccggcgctgggagctccctgctggacgtggcggagccgggaggcccgggctggctgcccgagagtgactgcgagacggtgacctgctgtctc

SEQ ID NO: 224881 - DNA, 807 bp, Homo sapiens
  chr15:68115496-68116303
  hyper
tgcagggtgctggacgcaggtgtgcggccgcttacctggggcgtgcaggccttgggctgcggggaggcggcgggcgccgcgcgtggcccgcgggcgggcggacccggggagggcgctagcgactgcgcgggcggtgggtgtggcgccccggctctcagctgtcaggcgcgcctgccccgccactcgggctgtgaccgcgccgtccccgccgccgcgccatgcgctccaggcttcggcctcttcttccggccagtccccggcctcggggtcaacggctcagggttcgcatctccgcgcccggggtcccggcgccccgtgcccgctgagagcgggaggggccgcgggtgggagcgcggagaaccagggagcacggctgtgcgcgcgcgcggggaggggccgcgccgtcacccggagagcccggcggatcccggactcccgcccgccgctcctcccgccgcgcacctccgctcaccgctcgcccggctccagccgccgccgcactgtgagtacccacgtccggtagcccgccgcccccgcgctctgctcctgcagcttttttttcgtttagttctgatttgggctcctgtggctgttgtttttatgattatacctaaagacaccaccgcctcgctcccaccactgccagtctcccgcttcgctgccctccccaagctcgtccatctagctccgggagccgacgggggttcctcaagctgctctggctgctgctccttgtcgctgcatatggctcttcgcctgtgctttccgctttggcccccgaaattccgttcctttcctagggacccc

SEQ ID NO: 224882 - DNA, 186 bp, Homo sapiens
  chr15:68116333-68116519
  hyper
cctctcactcagggaaaaccgcgcagggacccaggaccctcaactggggtacgctctcggctcgggcgctgtcttcactgtatgcgggccaggcatagttgccgatttcgagaaaccgagaagctgtcatttcccagcgctgcgcgccctccagccacctccaggagggcgcgaggcttgtcagcc

SEQ ID NO: 224883 - DNA, 71 bp, Homo sapiens
  chr15:68177208-68177279
  hyper
ccccgcccgccctgccggctccccgtcgcccgccgcgtgtgcagacgcaatcgcaccggaggaattctctg

SEQ ID NO: 224884 - DNA, 70 bp, Homo sapiens
  chr15:70388126-70388196
  hyper
gggatttgggtccccgccgtggggagggggatgtgaaacaattcgaaacttcccgcgagccaaaggactt

SEQ ID NO: 224885 - DNA, 105 bp, Homo sapiens
  chr15:70388412-70388517
  hyper
cccctccgtccccgcgggggatggcaggagccgcgcaggggacccacccctccccgccagccccggggcggcccccaccggccttacctgtgatactgagcttgc

SEQ ID NO: 224886 - DNA, 76 bp, Homo sapiens; identical to SEQ ID NO: 203948
  chr15:70391279-70391355
  hyper

SEQ ID NO: 224887 - DNA, 452 bp, Homo sapiens
  chr15:71184274-71184726
  hyper
ctcgcgtgtccaggcggcctgcttggtctccctcctctcccctcttaggtgccggggcgggcacccggtgcagggtgggcacggcgcctgccaccagcctcaggcgctgggagaagcgcaggttcttctggataaccgaagagacgtcaaaacaggctggggcaaagtggtcagagcagatgaccgagcggtcattgcctccgtaccagtcggcgcggcaaccccgcacgaagcggtcccagagcagccgcacggcccggtccttgggaaagcggaacagcgacttcccagacttggtggtgttgccgcagtgggcggccacacaacgggccggcatggcggccgtcttcggtgcgcgggagccgggttccctggaccttcgcccttgggcacgctcctcgcagcggcctcggcgaggcaagtcctcccctcctcacctgtccactccgggt

SEQ ID NO: 224888 - DNA, 1047 bp, Homo sapiens
  chr15:71407571-71408618
  hyper
ccccctcccgccctcgtggcctctgtctagaccgtactccctcctactgggtgatgtctcttcccctgggacccagggaccatcccgttgttgacctccggggtcaggggtgcggatgggggccggcccttcccgcggtcgccgccagggggcggcaggagcggctccagatgacagcgggaggccgcaagaggggagggaggaaggaccgagggagcgcggatcccgctctcggatcgcaaactctgagccagagctctccgcgcgcgcctgaaccgctggccgcccgcgcagcccgacgcggaatcggggcacagcgggagcccgtgcagggcgggcgcggggcggctgggcggcggtggcggccgtccatgcggcggcgctcggggctgcccggcgccgggaaccacgcgggggcgaggcgaggcgaggcggccgccggtcgctccgggacgcggaccgccaggtgagcagagccgcgcgccccgcgtcccctgcgcgccgcccgcgcggccccgacccggcttccgctgcccaggctccggctcccgctctctggccggcggggcgggctggcgcgggctacccagtgggtgtgtccggggcgccgcgggctgcgccgctccgggctcggggagccagcgcgcgcctggtccgtgcggacggctgcgcctccttctctggttctcttccttgctgggagtcttgctctgtgctggcgccggcgctcatccctccaccctcgactctagggacagtcttaaactctagggacaatccacctcagtcgtccccgggtcggggccccgtgctccccgggtcgggtcggaggggaccggcgagtgcacacccagcccgtgcgccccccacctcagcctcgcctccctcccgcctggggcccgagagccgggcaagtctcggtcagcgctccttgagtcctggcctggggcctcggatctgtgtgtctgtctgtctcagtttagttgctgcaacccagcgagcgcctggagcccgagtggatgggttgtttccgccaactctggacac

SEQ ID NO: 224889 - DNA, 180 bp, Homo sapiens
  chr15:72523039-72523219
  hyper
gaccagacttaaggaggaagaggggaaaacgagcacggaacaggcggcgcggagaaaggggaagcaagggtggaatcaatcacgagggaccgagagaaggcaggcgaggatggaggcgcattgaggattggggcaggaggaagaggatgggaccagaatgagggggtagggctggggcgg

SEQ ID NO: 224890 - DNA, 505 bp, Homo sapiens
  chr15:72564620-72565125
  hyper
cctccccaggaaagacgctctgggcccgatctatgccgcccggccgccgggcctgagtgaagcctgtccagcctaggaggggccctcagaacctcccggtccaagcctctcacttcgtccacccctgcggagacggggcgagccccgcacccttcccgtggcccggccgcaccgccctgtgcccgtggtggcggccacacaggccagcctggcgagtactcacggcgaccccgggccgcgcgcggccgcagccgacgggacgagcggcccgggacgccccgcgggggcggagcggcaggccaaggggcgggggccgggcctggcgggcgaggtcgcgcaccccacgcctcgtcgttccgtcacgggcgcgctcagccactctgcgcacgctcgcgcggtgacacgatggcacgtggcccgctcctgaccaacagcctgacggcctgctcctgggcgcgcctcagcagccgacgccagccttgagacgcctgcgcggcggtcgcta

SEQ ID NO: 224891 - DNA, 104 bp, Homo sapiens
  chr15:72565162-72565266
  hyper
ccgtgggtaggggaggcagtggagaaggaagagggactctgggggagtgcggggagccttccaaaggagaatacttgcatttagcgccccgagtggttgggagg

SEQ ID NO: 224892 - DNA, 164 bp, Homo sapiens
  chr15:73344008-73344172
  hyper
gggggaagcgcgcggcgacggcggcccggcttgggagccggaggtcagcggctgcgcggccggccccctcccacgggagccgcgccagggcccagcaagagtcgggcgggatcgctattgtttttggcgagcacataaatccccgggccgacccactgcgcacc

SEQ ID NO: 224893 - DNA, 992 bp, Homo sapiens
  chr15:74044728-74045720
  hyper
aggccacaggtgaccggggcgcggggaggccgaggagacgccgggcaggtcccagcgcgtgagccaaagtcggagggctgggagggcgccgggatcccctcagcccacgcccggcattccccgggctctgcaccgtccgggattcgctctgtccagtccagatcggccgggtccgtgttccgctggggtctgccctgccctaccccgcccggagtgagctggcaccgccgggcgcccgggacgcgctcagcccggacccagaacgtccgtgccccggcacccgcggcgtccggagcggccgcgagggtctgctcagcccagccccgcggtcggccctgggcgagaccgctcccacggctcagttcacgttccgaaaggtccggaatccaccgggtccccgaggaggggcgatgtcagccgcggggacccggtccccgccgggcccagccgagagcgcgcgaagccgggggccccggccgggctgggttcggcggcccgggcgcaggcgggagcagcgccgggcggaggagaggagaggaggcgagaagaggcgaggggaggaggcgcggcgaggggaagggaggggagggggcgagcggcgggccgggccgggccggggcgcactaggctcgcagcctccgctcggctccgctacctcccgtccgttcgctctcggctccccgcctcagcagcccccgggcgccgggtcgccgccggtggggcaaacaggcgccgggtcggggctgggcctcccttcaccgcctcgccctgccctgccccgccgggctcccggggcctgggcccgctccccaagcgccgcggcgccgcgccgcccgcgccccggccgcccccggcccgccccgccgccccccgccggactggccgcccgggcgggcgctggctcccttaaaggccgcccggctcgcttggctccgcttgcctcggcgctgtcagggaaggggccggcccgccgcgccgggagggagctttta

SEQ ID NO: 224894 - DNA, 171 bp, Homo sapiens
  chr15:74426591-74426762
  hyper
ggtgcagctgactccgctggctgcgcgctggggccctgggcccggcggggctggcggagccccgcgacccgggcggcgacccctgcgcctactctatctgtgtccagcggggggcggcgcggcagtgcagtggtcccgcgtagaggaaggcgtcaacgcctactggttccg

SEQ ID NO: 224895 - DNA, 678 bp, Homo sapiens
  chr15:74725114-74725792
  hyper
tttggggacagagccgaatcggactgggggcggggaggcatttgtgtgcaatgcaggggaggggagatcagttcctcgcggcagaaagcctcaaacccccgcctaaccggctttctgtcccatagtacagggtctaaactgaggtgccctgggggagactccagtcccccaggttcttattatctaccctggcctaaaggctgcacccccgccctagatccaccgcctgggggtcccaacggccgtgccccacccaacgggcactgccccccaacgctggagccgatttctggtgacaactgccacgtgcgggcaaggggggagcggccggtcccggcattgctgaggcagcgccctggtaccccaagccgccgcaccgcaccatgtcccgccgctcgctgcaggatgcccacccccttgcctggcccgagctccgggccggggcgggggcgggggcaggcggcggggtctttgttcccgctgccgaagcgcggcggcggcggcaaggggtccgcgccccccttgccggcccagcctgcgccccgcgcgccagcagagcccgcagctcaaaaggagggtacccgggttggggtcccaggcggggaaaggtcctccgccgaagcccccgagccagaggacccagagtggctcggggccgagagaggggcccgccccctc

SEQ ID NO: 224896 - DNA, 105 bp, Homo sapiens
  chr15:74912313-74912418
  hyper
cccagctgaccagcgtccccatcccccttttggcagccatgaccgcctgccctaccagaggaggtaccgggagcgccgtgacagcgatacataccggtgtgaaga

SEQ ID NO: 224897 - DNA, 541 bp, Homo sapiens
  chr15:75248549-75249090
  hyper
actagcggccggctcgccaggcgtctgaccctgcgtgggcccaggcgggaggctctgccacacctcgcgtacgctccggtagcgcagccgcgtgacctggtgcaggcccgccaggcggcgcttgaggatctcggcgcacgtgacggttttggtggtggcccggccgcagccgctgaagacgatggcgcgcgtggctggctgcgccatgctggcggtggcgaaggccatcaggttccggatcttgctgccttccttgacccgcatgtgcaccgcgcccggcgccaggtctgcgaaggggccggagcccgggccgcctccctcggccccgcaccccgctggcgcctcttcggagcgcaccttacggaagttctccatgcgccgtcgtcgccgggaccgccggctttgccatggggcggcctcagccccggggctgcatggccgccggtcgcgccttgcaagggccagcaggggtaagggcgccggagcagcgcagacgccggcgggcgggctgggacggcgcgatctcggccccacttctctc

SEQ ID NO: 224898 - DNA, 319 bp, Homo sapiens
  chr15:75640491-75640810
  hyper
gggagcggctccagcgcatggcggcagcccgcccgcctcgtcctggcccctgccctgacccgggggcggccgcggggatgtccggtccgtggggcaggcccggttctcgctgcggccaagcggccgattcggccgctcccgccgctcccccgcgccaggccgagcttcgctctttccctcggtggtgagcggccagatccaggcgggtcctaagtgtggggggaggggggcgcagggaggggcggccacgcgatcctaagaccctttcagatggtgggagagcctggagaaagagacagcgtgtgcggagggggtgctc

SEQ ID NO: 224899 - DNA, 104 bp, Homo sapiens
  chr15:75640871-75640975
  hyper
aaggcggagatgagatccgtgagtgaggggagccgggaagaagtaaggctgcagccgcggccccgcaaggattgggactttcgtctaaacgcggtggaagccca

SEQ ID NO: 224900 - DNA, 219 bp, Homo sapiens
  chr15:75976176-75976395
  hyper
gggccataatgttgcggggcaggaccccagcactaggcttctggagcaaacacaggtagatggcaccacctggtggctgtgctgccacacagccgtcctggcctgtggttccagagcactgtgtcccactctttggcggcttccgcaccaccaggccacccgctacgggcacatcctagaccaccaaggccccgcccccacccccgccccaggcacccc

SEQ ID NO: 224901 - DNA, 313 bp, Homo sapiens
  chr15:78110977-78111290
  hyper
cccgggcacgtcgccgcactcccccaactgaaccttggtgtcttcctcctgcctgcaaagacatcccaggccctgggcctgggagctgtccccgcgcggtcctgcctgaccctagcggggtcatagtagtctggcgcccggagcggctccagcgcggcgccgcgggcctaggtgggtgtcccagagagcgggcggctgcgcgactgaggagctggaggcgcacccctccgcccgccagacggcccggcccgcgcccccgccccactcccctcgcgttctcttctctggaaaggaaggccggagttgcaccctc

SEQ ID NO: 224902 - DNA, 680 bp, Homo sapiens
  chr15:78111499-78112179
  hyper
gcccaatcagaggccgcgcgcgccgcgccgccggcgggcagacacaccggctccccggcctgcgcccctgcggccctggccccgctgcagcgtcccggcccggccacactcaccgtcccgggcgcgccgtccgcgcgcggctccgctccgggccggcatcccccggctcggctgcctccggtccccgctccggcctcggttcccgctccgcagggctcggctccgcgatggtggccgcggcggcgagcgcggcagggagggcgtgtgtatgcgcgtgagagcgcgcagcgtgtgcatgtgcgtgtgcgcgggagggtcccggctcccctgcgcgtcccgctcctgcctcctgctcgccacgatgcgatgccggcagaatctctaccgcgcgcccccactgcccggcgcccacactcgcgcacacacgcgcacacccaggcgcgcacacccggctccgcactcccgactcgccctcctggagcgctcacaaagaccccctgccgggacggccggagcctgcggagcgcggccctgggcccctccgggacccgccggccttaggtgccccgctgctccccgtagggaccccgcgggcggcccggctcccgcaccctgcctggccgggccgcggccgcgctcccagcccgaacctgggcccaggtgccgactcgggcttctcg

SEQ ID NO: 224903 - DNA, 1020 bp, Homo sapiens
  chr15:78912573-78913593
  hyper
cagccccagtcccgaagcgactcccctcttcccgaggtggccttggccaagtcttcagccatctccgtcaaatgaggaggtgggcgggatgcagacggtggagcgggaggcttgggcgcgccagtttgggagccagtgcgcggggcagggcgacgggcagcgcggggacgcgaatccccaactcctgcgcccaagacgaaggacccggtctcgacctccccatcacccggcgcgtaccagcgcccgctcagtgactcccaggtttggtggtggctaggggtgggaggtgagccgaaagggaaaaagccaccccacccaagtcgccgccgggctggagccagtctgcgcgggttccgagtccccggcgacggcgccagccctctccgctcgcccgcgcggtgttctcgccggcagcccctccggaccccgcgccccttctcgggcgcccgtccctccggagccctaacgcctgtgcgcgtacctggcagcagagacagcagcagcagcagcagcagccgcggcggcgacagcgccaggggcagcgagagcgggccagagcccatggctggtggccgggctggccgcggacccggacggtcgggagcgggcgcggcggtcgcagagacggcctctccccgcgcggctccagcgcagaccccagacctggagccgtgcgggcggagacgcgcggggctcctctccgcttcgccgccgctgggtttccagcgccctcggacccgcgggaggacaggaaccatccggagtgaagctgcgccaggcgcgggcgggcgggcgggcgtgcgcggggcggggcgtacgtgcggtaggggaaggggctccaggtcccagtccccagcgccgggcgagctccttctccgccgggctgggtgctccggccggcggcgtccgaccagatctgagcaggtgctgtcaccaccaccaggaaggagagggactcagtttctgtcccaggtttccggggcgtgtgcagctcccgcagggggttgggaccaccgggct

SEQ ID NO: 224904 - DNA, 101 bp, Homo sapiens; identical to SEQ ID NO: 203989
  chr15:79237308-79237409
  hyper

SEQ ID NO: 224905 - DNA, 1520 bp, Homo sapiens
  chr15:79381728-79383248
  hyper
gctcacccccaccccgcccgggctccctgttagagccaggcctggctcttcagccttgcagctcaggaaaccagagcgcagcgctatagccgcgactgcggcggcggcggcggcgcagggggcgggggaggagagaagcgcccacttcgtcccgctgcctccgcagcagccctggccctagccccggcgcatcagagcggtccttgggaatctttgggcttgttgctccggcggccgccagctgggagcccaccaccgctcgatggtaccgaaccgacccgtgtagccccataaccccagcccaactccgaggagctagcgcagaccgctctccgccctcagctgcggcgaggcaagggctggcagcgctcggacgcctccgtcttgcccttcccatgcctaagcgcggggaattacacgttcccggtgtagaacagacgatcggggctattagggctgggcggtgggagtgggggttgggagcaccatttttggctggacgtgtgtccagactcatcgtctctggtccttaggaccccatcttcctctgcatctccaggtgtcggcccctctgtacccgcctcccacggggctcgtccggcgaagggcagccgcagcccacatctactccccgccctcaatccctgccccctctgcccgccgcagtcactcgcctggctgggagcaagcctcccctctcgctgagggtgcagagagcgcctagggcgccaagagtagaggggccaaagttcaagcgccatcagccagccgaaggccctgagcccccagggccgcggccgggacgcagggaggtcaggacgcgacgctcgcctcacctgtttctccagcggctccttggccgacagcgccggcttgggggagggcgcgcggtcgcagacgcagccctccagcaggtaaagccccgagggccgcgagctcgagtcgctctcgaagtagaagagcaggttctgcagcagcgcgaaccacttggtttgccattttgtgttgtccgaactccgcttgctcaggtagcctttgcgcgtgccgtccttgcgcgccagcagtcccagggacgcgacgtggccatcattcagccggatccccttctgcatggtgctcagaggccagcgagaccccacgcgcttacatcttctccgcgcagcagccccccgtccgtgcgcgctgcgcgctgcctctctctggcgctcgctcgctcgctccctctagctctcccctccccccaaatatctacactccaggatctggcgccgagccgcggcttcttgaatccagatataccattccccgctggaacctcttctccgctccgcagagccccagtacccggaagatgccgcccgaccctcctccggtgccgggcaaactgagggactggcgatctgcgcgctggcgaggggcaggcggagtcatgtgacgccgatccctcgaagagcccgtttcagcagcgcggacagggacacacgcacgcagccccgccgaggcgcagagccgcgcgcagg

SEQ ID NO: 224906 - DNA, 1342 bp, Homo sapiens
  chr15:79723976-79725318
  hyper
ttgcaaaccactgcagagtccgaagccccgagtgctccctgggaagaggagagccgaggacactcttcgcccctgcttgccactgggggccgcagtcaccttcagcataggggagtggggagacgcgaaccccgcgggtggctccgggtggtgggctccctccagcgcgcagcttccgctcgctttcccctcggcgctgcagccgcgacctgggaccgaacggacaccgccttcccggggctccggcggcgctctgactcccactttcctccgccgcagcctctggcagggcacccccttggcgcgacgccgcgcccctccccgggaccgccccctcggtcccccagggtgcgctcagttgctgcccgtgcgccccgccagcttgagcgccccgggcgggcggcggtggagaagcccagcccagctctccccagccgcgttcccggcccgcgctgctcccagcctgcaagcccatgacgtggcgacgccgaccgagacacaaagaccgaggctgagaccgccaggggttgagggtgaggccgcgtcccggggccgctggagcgcgggcgtcatgcgagactgtcccggctgcgcgccgccccagaggagtccgagcgcccccttcagccgcggcgcgctggccctggccgggactgcagccaggtgggcgccgcgcgtgtgagcgccgcgcgtgtgagcgcagacctggactcgggcggcggaggcgaaagtcgctccatccgcggggtgcaaccctgggcgcggaatccgggctgccgggtgacagtgaccagctgactctggagcctaccggaggcgcggcatcggaggccgtgcggaccactgccgaacagccgctggagacccgcagagaagggcgggccctgcgcccggggcgcctcggaggtaagttcggagagcccgggccgggcggagggcgggagcgcacgagtgtgtgtgtgtgtgtgtgtgttcgcggtgtgcccgcggctcggtgcacacgcgcgcgggttgtaaagtcaggagctgcgggagcgcctccctgcctcggcttggccccggagcattgcgggccgcggaggtgtgggggcccttgtcgctgcgctcagggcagcggcggaaaaggtgtgtgcggatgcggggcggggccgcacctggtggacagagcagggattcgggaagagaagccacggaagatgatcatgcagtttggggcaagttttcctggttgagcatcgcttcaggaaacggtgttttgagggttaaatatgtgagctatctgtgcaaaaagcctgacacatcagaggcgcgaagtaagatggaaagctggacaagccccagg

SEQ ID NO: 224907 - DNA, 984 bp, Homo sapiens
  chr15:80215560-80216544
  hyper
agaaggtggcgtctcgcagctcctcgttattcgtccgcctcgggtccatccggccccgccgcccgactttgcgctgagacccaaggggaagccccgaggggaccccgcgccgtaggagggagtggaggagccggcgaaccgcgatggagccggggcccagcacagcgcgagcggctcctcggctgttcgtgctgcttccccagcttcttcaccggcacctgcagcttccgcacctcctggtccgcgttcacgttagagttaacgtcctccatcccggccccgctgcctccgccgcccgcggccctctcgctctcgcagcaacaagggaagagccggaggaaagaggcgtccacgccgctcactccagccgaggcccccgcatatagcagggccaggccccgtcgccagggttcccccagcgcgggtcccgaagcaccgctggccacagatgaaccgcctcctcagcgcaggtccgggattcggggaggcagcgccaatatccggtctctgcagccatcttccctccgtccctccgcccaccgagggtcggccctgtaggtgacctcagagcgtcggggatgggcgtggccccgtcgggcgctaagaagacctagcgcagagaggaccgccgagctcccgacggggcggggccaggtgtgtgaggggcggggattggacccggaggggcgtgtctggactgccggcggaagtggaacgcggcctgacctgcgacggaaagccactgcaagcccggaggcgaacagaaggcattccgcgagccgggctgagttggtgaacacggtcctcgttcaccccgcctattggtctgggcgtgtggggtattctccacccacttatacggcgtgtgggaccgacgggcccgtcctgcccggctccggtccggatctcgagtaggcgctcaatgggattcggggagacgtagtttactttgttcagcaaatatttaaccgatgcctattttaa

SEQ ID NO: 224908 - DNA, 105 bp, Homo sapiens
  chr15:81294107-81294212
  hyper
cctgagctgcctcccgcgctcctccccgaggaaaggattttgatttcaaagaaaggaaggaaggaaggacaactcccagcttccccgtcccgccctccccgctcc

SEQ ID NO: 224909 - DNA, 533 bp, Homo sapiens
  chr15:82339664-82340197
  hyper
aggaaggaggatttgaggggcgggccggggcggtgcgcgctggtcctctccgcgcgcatccccctccgccgcccactagggcggacgccccttcgggccccgcgcgctctgctgtcctttgttccgggagccgccgggctcgccgcgccctttgcgtcccgctgcggatcgttccgcagagcggctgggcccgcggttcatagagtcgcccaagatcctcacagagggacgtcttcccaaaacaatgaggccatgcggccgcagccgcacacgggctgactggggagatctcgtggtgccgcggggcggtcccggggctcgaaggcagaggctcccctaggtgtgccctgcctgaccccggctacaggaacgagcgctgtgggcctcggtttctcacccgtaaaatgaagaaaataatccccgcctttaccacctcgtgggtcgttcggaagattaaatgcgacagtggatgggcgcgcgcttacaaatcagtagacagttccgcaagcgcctttacttttgagaacgcggtg

SEQ ID NO: 224910 - DNA, 1018 bp, Homo sapiens
  chr15:83316057-83317075
  hyper
gccctccaccttaaaggtgccgcgaccgccgccgtcgtggggctctccacagagcacggggtctacgccgtcagcagccccgccccgtcccgcccgggcgcccccaccgcgcgccgggtgctaaagagacccgcagggggcgtgagcttccagcgccagcggcttcgggtctcccgtgcgacggcagtgtgagaaagaaacgttccgggcgccggtgctcctttatgtccggtcagctcccgtctggacagacgctcgaggccgcctggaggccgcagtgcggctcggaggccccaccggccgcccccgcagggctgcggcgcctttaagcccaaaggccctgagtcacgaggaggctccctgcccccctcgccctccacccctccacgaggccccacgcccgcgggcacgtgaccgcgccccgcccgggactcgcccgcacggggcgggggatgggggtaccgcggcgccggacccggctgcgcgcggaccgttagctactgcggccgggacgcggccccgcccaggcgagcggcgggtggctcttaccagcgggaacgccatggggccggtgtggccctgcggggctgacgggctgaccggccagccggcgggcgagagacgcgcacgcacgtgggcactatttttgcagcgggccgcgcgcagccccgcaccccggcagcttatgaagctcctacgagccgctcctcggagccgccccccggccggatgcggagcacctgtgtcggccccgcccgggccctcgcctccgccccctcgcgccccgcccctcctagcaggccgagccgaggagggctccgccgcccacccggaacccggcggggactgccgccgctgctagccacagctgccccctggggggccagagacctaagcctgagcgcgccatcacctaagtgacccttgccgagtcactgtctgccctgggcctcagtttccctcttaacgaaagagggcacgatttacaagcccctgcgagcggcggcgatcgcttcgt

SEQ ID NO: 224911 - DNA, 180 bp, Homo sapiens
  chr15:83377955-83378135
  hyper
agctcaagttcgctgactcagacccctcccccacatttttgggaagccaacccgcctagcacgaaaaaggaagggaacccctaacgcaacgccgcaaaccggagaaacacctggaaccggagggtttctcctctcgaaactgagctggcccatcccccgccagcccctatctgcccccct

SEQ ID NO: 224912 - DNA, 540 bp, Homo sapiens
  chr15:83378181-83378721
  hyper
cgctgggccggggctccaggccgcaggagggggccgggcgggcttccggtcggcgcggccggggcggggccggcgctggggccgggcgctgtccatggtgcccgcgcgcctcgcccggtccccggccccaaccctcccgcgagcttcctggcgggctccctcaccgcttgtagtcggaggagaagatgccgccgctcgcggggtcgtggccgtactcgggctccccggggccagcggagccgcccttgtcttcgctgtaggcgggggcggccgacatggggcggccagggagacttcgccgaggaggaggttgcggggccggaggccggctggagcggaggaagggaaggcgggccggtccggtccgggctggcgaaggcggcggcgcggcaggggttcagcagaggctgcagtgtgcagcggcggaggctgcgcgcggatttctcaatcagggccgcgcgctgaggtcttaaaggcaccggcgccagccgagcggagggcgtgtccgcgaggaggcgacaggggcggtgcgtcagggcc

SEQ ID NO: 224913 - DNA, 300 bp, Homo sapiens
  chr15:83654649-83654949
  hyper
ggcggccggaaggagcccttccctcccttctccggtgattcccagaacttccgtctctacccgtcacctgctcccaatcaaaggagcttaatagacggcgacgttttcgactgcccagccaccaggcaggctgaaagtgcatggagggcatcatccacctttagacagctacttgcccacacctcatcgagctctgggcgttgtgccagcatttgaagaagcgatctgttgcaaagcgatccacacggagagccttagttatcgcgagacttgacaggcaccctcaactttagcccgccg

SEQ ID NO: 224914 - DNA, 91 bp, Homo sapiens
  chr15:83655945-83656036
  hyper
gaggtgagccaccgcgcctggccttagagcacttttactccaattctttccttgaataagactcttatgcgccaccctcccctacaaacac

SEQ ID NO: 224915 - DNA, 134 bp, Homo sapiens
  chr15:83680651-83680785
  hyper
tcagaattggagagcgcggcaaggagtgcacagggccaggtgtcttctcgctcccacagccaagcagcagatgcagagtcccacgcgctgcctgtggccatcaagtcgatatagagcctcgtggcggcttggcc

SEQ ID NO: 224916 - DNA, 1026 bp, Homo sapiens
  chr15:83775916-83776942
  hyper
tcccacttctgggccgtgggctcccccatagacgatcccgcgggcccttcctcctctgacaccctcggatctggttccacctttcccggaccgcagctcagccccgcgcctctccagctcttcgatgaccggttcccggccgtgccccgggccctccctcggagcgcgcgccgccaggggcacctgtccctgcgcgggggtgtcgccgcccctcggcgccgccgggcgcttgccgctgagccgtggcgcccctggcaggagcactgcaaggacgcctcccgggactgcaccgcggccctgcgcacttggggcgacggggccaggcgcgggggacggctgcgggctgggagggcgcgcggaggagacaccgctgaggggacgccgctgagggcgccacgcggggggcgcggctgaggcgcctcgaagggcaagcgccaagggggcgcgggcgccgccggaagctggggcggggcgcccagcgggatgcggtgaagggcgagcggcgcggcggctgcgatgagtgcctctgcggccaccggggtcttcgtgctgtccctctcggccatcccggtcacctatgtcttcaaccacctggcggcccagcatgagtgagtgagccggcgcggcgggggtcgcgccgaggggcggcgggagttggctcgccgcgacgggagcctcgcaacttttccgagggggctgggaccgtccgccgcgggacagaggttcgtggccgcaggggctccccgcgcctggccagactaggggggcgccccaggggtcgcacgggccgggtcttggagccgggccctgaggtgcccaggctggcgcatttcgggatgttggtgccagcaccgcgccaggtgcccggggtcacaggcgtcaatacggccatgcccctgccctggaggggcccaggggccggtggggagcggaacaaacacggacactacgaacctggccgtgtcagctcgtttgtgccttgttctttttgcatctcacgggaacgtttccatgtatggactttcg

SEQ ID NO: 224917 - DNA, 420 bp, Homo sapiens
  chr15:83953566-83953986
  hyper
gggcgctgcttcgccgcccgggaggccgcctcccgccccgggaccggataacgccctaaatcagcgcagctgaggcgaggccgtggcccccgcagaccgcggagacctcgccggcggccggcgcggaggtgtctgcccccgccgggcttgaaggcacttgttggtaaaagacacagacgtgtcggtgtttgcctctcccggggaagggcgaaacgctctgaagttctctggcgctcttctcaggagatgattcggcctcccctcctaccctggggcgccctcggggtctcactgccgcggaggaagaaggcagcgccgccctcgcctgcagaaacctcattcccgagaaagtgcgggacgagcgtcttgggatgtggaagaagggggtcgccaggaggttttcttaagaactcaaaacaa

SEQ ID NO: 224918 - DNA, 156 bp, Homo sapiens
  chr15:84034342-84034498
  hyper
ttagggaatgataaatcagcaggcgggacagttcccctgtacagactggtacgggcggaccgggctctgccaacgccctcgctcctgccagatgtcggcgcccgcggggttaaccctttccggcagcgcagccttcccctgcgtccggccgcttct

SEQ ID NO: 224919 - DNA, 180 bp, Homo sapiens
  chr15:84323185-84323365
  hyper
tggggtgctcctcactgctgggcacctcgggtcgggcgcgcttcgtgccgtcccggaaggttcagggagagtctttcggcggcagttcgcgggctgaggggcgttcttgattatgggggaactccacagggttggagtttttcaggattgggagttactaagcagaaacctcgcgggtcc

SEQ ID NO: 224920 - DNA, 180 bp, Homo sapiens
  chr15:84323447-84323627
  hyper
gtgggggtgaccgggacgcggcggaggcactggaggagcgacttcgaggcagcgggtagtcggaggagtgtgcactcggaaggctggtgcgagcaggcgagggtggcgcagagtcccagggccccgcactggccgcctcccttcagccaggagtcgccgcctcaggtcggaaacagcagc

SEQ ID NO: 224921 - DNA, 503 bp, Homo sapiens
  chr15:84748573-84749076
  hyper
attgggagtctcaggggctacgaacaaacgttttatccccgggtagccggcgggtgcggagcgagtattcgtggggcgggataagtgcggaagtcgctgcgccctcgtcccttcatctccgggggacggccactctcagggttcccgaggagcccgctccgtgcacctaggccctaggtcggctcccaagccctggcccgccgctacaccagcggtttcttacccgcaagtacaaatgtgacacagacaccagctcctcgtgctcttggctcccagggtttctttcaccgcgcctcagcacctgcagcttctccactcttacagcgcccgccgtcgtcaaggcaacagagggatgcccggtgacagactcggcgccggcttccggcgccgtaagagaagcgtccgcgcgggcgttctggacccgcagagttctcggcgtttccgaagctcttggtgtggccgggacccgggagaaggagcagggctggtggggctgctgcagc

SEQ ID NO: 224922 - DNA, 328 bp, Homo sapiens
  chr15:85143661-85143989
  hyper
gcggcagaggaggcggggcagggcgttcctccaaacacaggaataccacgtgcgaaaacaaaggggtgtgcgaagaccgggtgcatgtgtacagctgcaaactgggggaaaggcgccaggcttgggcgatgaggatttgttcccccatggattcccttcctgcccagggtccgctctcgccggtcgagggtgcctaacaatactccttgccacaaggttcgcagccgaaaaggtccttcaagtccggccatccaactttcactttttatagacaaatatacagaggccttagataagtgaaacggcttgtctcgggttacagctctag

SEQ ID NO: 224923 - DNA, 111 bp, Homo sapiens
  chr15:85200405-85200516
  hyper
cctggatttggggtgcggggcggctgaggctcacgcccagagccttctttagcaggaggattccgagcagatcatgactcagctgcagtcgctggtccctcagggaggtgt

SEQ ID NO: 224924 - DNA, 105 bp, Homo sapiens
  chr15:85258869-85258974
  hyper
aacctcgtctctcccgaaaccacctggagtcgctccgactggagaaatcaagagtccgccgccttaaaatgactaaaacaataagcaaccccaactcccacttca

SEQ ID NO: 224925 - DNA, 338 bp, Homo sapiens
  chr15:85525136-85525474
  hyper
caggaagggcatgttcggaggggcggcctcggcacgccacccgcctaagcgcccccttcccaccgcagccgccgccgccgcagcgcccgcaccgcgataaaaggggcggccgcgtttcctgacgcgagatccgcgctcgccgccgcccgcccaggcggcgatgacacggcgcccgcggcggcccggaggcgccgggtgggccgtttgctgaccggatcgcggctacccgccagcgtgtccgcggcgccgccgccagcatgggctgtgccccgagcatccacatttccgagcgcctggtggccgaggacgcgcctagccccgcggcaccgccgctgtcg

SEQ ID NO: 224926 - DNA, 180 bp, Homo sapiens
  chr15:88798937-88799117
  hyper
gcgcctcgccagggccggagtcacctggaatgcgcagccggagagcatctcccgagccagagcgagcctgacgcgcgcccagcgggcggcgggcagcggcgagctggggcgggcggagggccggctcccggccgcgggtgggcaggagggagacgcagagcgcgggggaggcaggctggg

SEQ ID NO: 224927 - DNA, 660 bp, Homo sapiens
  chr15:88799448-88800108
  hyper
ggagagcagggggggaaggaaacaaagacggcgagggaggggggaagggggagggggggcctctgcctttgaaacgccgagcgatcagatgcaaaatccttcagcgtctgaaaccatcgcggacgccgccgccgccgccgccgccgccgggtgggagccgcgaggagcgcctagtggcgcggtctgccgggcatggtggccggctcggcgatcgctgactcgccgggtccgggggctctggaagcgaggcgcgctctccgactccgagactttgcagggttgcaacagacggtggggaggcaaaaaaaaaaaaggaaaaggaaaaaatggtgctaaagtcaccaagtcccacctactgggcagaattaaaacggacacaccacgcacctgcaaaacacacacactcactctcacacatacacacacccggagcccgaggaaaggaagagaaggaagatgcagtaggagctgcagcagccgccgcgaatggctcgccgcgcggctgcagaaatgtacaagtgctccgagccttacgaaacgcacgggttatcggagcgtcttcctcggctccctccctcccttcctccctccctcctcccctccctcgtcgcggcctcctccccccgccccccgcccgggctgggagcggcaggagagcgg

SEQ ID NO: 224928 - DNA, 420 bp, Homo sapiens
  chr15:88800110-88800530
  hyper
tctccccctccctcccctccccacacccgtctctctccccgcctgtcctctccctcctccccacccacccacccacccactcgccggctcgcggctgtagccggcaccgccacccgcagcctcgcggcagcccgcccgctccacgcctcgcagcgcggcgcccgctagccgcagcccgggggaaaccgagaccgaagggaaaaagttgcatttgagattgcgagggtcggggctggggagggagagttggcgagctggctgcacgacacggaaaggcgctctcctttccactttttggccctcgcgctacccggttttgctgcaatccggaccgcggtaggaagtgaaatgaacgtggcggaggtgattggggagtgctcccaagccttgggtggggggcgctcccaagcctgggtgggt

SEQ ID NO: 224929 - DNA, 107 bp, Homo sapiens
  chr15:89248382-89248489
  hyper
ccccctccaccgggcgtcggggccctggaccccacagcaggggcggggaggctgacgggggcgcagcttttcctcctgagtgttcgctgcccgggctggcggcgcgg

SEQ ID NO: 224930 - DNA, 209 bp, Homo sapiens
  chr15:89248727-89248936
  hyper
cgccgcgcgccgcccgggctccctcgggctctcatttaccccggccgctggcagcgggacccaggcgccttgccgcctcgctgcggccgcttggtccccacgccgccccctccgcaggcgacgaggcctgcagaccggactgggcagccactcgggcgcccgcggcggtgggcatcatcatgcttcccgggcaaacagcacttccagcc

SEQ ID NO: 224931 - DNA, 480 bp, Homo sapiens
  chr15:89346119-89346599
  hyper
acccccaaaaaaactttcagccagctcctcggtgagggtcgttccaaatcgtggccgacagtagcgggctgcaccctccttagatcgcgtcgtggccagcctcagctgcagaaccccgccgggcgcccgggagccctgtcccgccgcggcggcctcagagtccgggcacttggggattctctgagggtgcagccctcctgggcccctccgactgcggagctgccgaccgcaatgcagatgcgggccctccagcccttctcgcgccgccttcctcccgccagccccggagctgccgggtccgcgccgccccggggagcgctcctctcccgccctgagcgcaggccggcttccccatcggcgcgccggtccggagccagggtccagcgcgctccagacgcctctgccttcccctccccctgtcggccgcccctcggtccctgggggtggggtttccctttgcgctcgccccctcccgccccc

SEQ ID NO: 224932 - DNA, 540 bp, Homo sapiens
  chr15:89346676-89347216
  hyper
ctacctccccgccgctccagagggggctcgcagagctgaggacgcgcgcagcgctgctcaaggtctctctctctcagcaccctcgccggccggcgtctgacgcgggtgccagggtctccgggcacctttcagtgtccattccctcagccagccaggactccgcaacccagcagttgccgctgcggccacagcccgaggggacctgcggacaggacgccggcaggaggaggggtgcgcagcgcccgcgcagagcgtctccctcgctacgcagcgagacccgggcctcccggccccaggagcccccagctgcctcgccaggtgtgtgggactgaagttcttggagaagggagtccaactcttcaaggtaactgtctccttccctccagagcgaggctctcccagggcgcccggcgagccaggaacgggactgagactgcacgccccggggctgggggctgcactgccttggtctccgccctagagctatgtgtgccgggggcgcagcacatccaccggctgcgtccgcggtggagttgagca

SEQ ID NO: 224933 - DNA, 709 bp, Homo sapiens
  chr15:89905478-89906187
  hyper
cccaggtcgttggtggctccgagtgagtctggcagcgcggggaggagaggggggacgaatggcgttgcgactcccagggaaaagctgggaggcaagcggggcgtggggaggaaaggccaaggcacacggctgggcgcccctcacagccttcctccgccgcctccattccgcactggtcggggtgaaggggggggcggggggagccgcgctgacgtcactgcgggccgtgcccgcccgagaaggcggcgctgggagccgctcagagcccagagaagcggcgcgcggccaggagcccccgctccgccactgccgtgcctgcctcccgcagctgtctgccatgcgctcgccggggcaggggcgcccggagggcggctagagctgggcctgagcccgggaacgcgcctgatcaggggtggcggagccgcggtccccacagccgccccacccgcgccgctgcctcgctggggcccgggcccccttcccggtccgtaagtgccactgcccgctgtgtctcggcgaggctggggagcgagggctagggagtgagggcggtggcttcggccagggcagcgtcagggagctgggctggactgagagagggggctggggcatccctgcccggcccccttgggcagctcaggcagctggggcttccctttgccgctgggcgggatgagaggtgcgctcccactgcgggtgggaggcagga

SEQ ID NO: 224934 - DNA, 539 bp, Homo sapiens
  chr15:90455670-90456209
  hyper
gtggggccggaggtcggcgtgaggcgaagcccagccttcggagacctgtctgggggtcgggaccctctctcgagggcaggcggacaggcggggagctttaagccgatctgtgtcatggggtcgctgggcgggcgcggcggcaggggcgccgggagcggcggactggaggggcggactgaaggcggagaggcggctttggcaaccccagttttcccccacccgcatcccacccccccacccgatcctgttgcggggttcgagccggggcaggggaggccgacccgaggccgtgagcccaggcctacccctggtgggcggcggggtcccaggcccctggcagccggacgctctgcaccgccttgttccggagcgcgccgtcgtggtagatgcggctcattctcccgaccgcccgggcaccccggcacagagccggcgcactgggctgggggcgcggcgcgggaagtgctgcaggacgcgcggggacccgcgattcccagccggcggatccgggaatggcgcggcccggccctcaggcgttc

SEQ ID NO: 224935 - DNA, 68 bp, Homo sapiens; identical to SEQ ID NO: 204032
  chr15:90628227-90628295
  hyper

SEQ ID NO: 224936 - DNA, 369 bp, Homo sapiens
  chr15:90631580-90631949
  hyper
ccagcctcacctcgtcggtgttgtacatgcccatgcccacgccgcctgcggggaagttgtacacttcccactccttgacaccactgccatcttttggggtgaagaccattttgaaagtgccggcccggtctgccacaaagtctgtggccttgtactgcagagacaagaggatggctaggcgaggagctccagtcggggggtgcccaggtcagtggatcccctctccaccctggcctacctggtcgccatgggcgtgcctgccaatggtgatgggcttggtccagccagggactaggcgtgggatgtttttgcagatgatgggctcccggaagacagtcccccccaggatgttccggatagttccattgg

SEQ ID NO: 224937 - DNA, 81 bp, Homo sapiens; identical to SEQ ID NO: 204034
  chr15:90634777-90634858
  hyper

SEQ ID NO: 224938 - DNA, 157 bp, Homo sapiens
  chr15:90792653-90792810
  hyper
ctgtctcccccacccaaggtagcctcggcccgcgcccaagtgggtgtggctgcgggaaagccccgcccccaggacgcttctccaatgggaactgccctcgtgtccatggcaacggcggcggccacgggcttgctagaggaagcgctgccccggcagc

SEQ ID NO: 224939 - DNA, 89 bp, Homo sapiens
  chr15:90891918-90892007
  hyper
tgaaaatgcgttgacggtgtgtgcggtgtaaagtttctatatgtcttcaccttctgtctcctcacggtgggagccgccctctctttccc

SEQ ID NO: 224940 - DNA, 72 bp, Homo sapiens; identical to SEQ ID NO: 204036
  chr15:91414358-91414430
  hyper

SEQ ID NO: 224941 - DNA, 718 bp, Homo sapiens
  chr15:91427348-91428066
  hyper
cccctcagtacccgcggacaccctgggcttccctgggcccagcatctgcctggggcctcgccctgggctccccctcctgacccccaccttgcgccccttcccggtgttcccggggcgctgccgggccctggggcctgcggggcgcgggcggctcttggctgggccattctttcccggccccctcctcccttccgtttccgtggccgtgcggccggctagaggctgcggcccagcgcggagcaggggggctggcaggcgtcggggcggtcgggccggtcccgcccgccccttcccctccacaggcccgccccggggcctgggccaactgaaaccgcgggaggaggaagcgcggaatcaggaactggccggggtccgcaccgggcctgagtcggtccgaggccgtcccaggagcagctgcccgtgcgggtacctctagccccggggcctggaggagcggtgggagctgggggcgcggcaggcaggggcagagcaggcgttccgagggccagagacccacccaggtgggggtaggggccgcggaagggcggggatggccgcaggggcagggctcaggctgtgggcgcctgaggcttcagctggggcaggcttggcctgtcgaggacctgggcaagggtgtccctgtaaggggtggtgggtggaagggcctggggagggaggctccaggttggctcctgttcccgaacgtgcggaggagacc

SEQ ID NO: 224942 - DNA, 376 bp, Homo sapiens
  chr15:92459274-92459650
  hyper
tgggtgtgatcgctagcagcttcgagatcgggaacctggcgctcatcctcttcgtgagctacttcggggcacgcgggcaccggccgcgcctgatcggctgcggcggcatcgtcatggcgctgggcgcgctgctgtcggcgctgcccgagttcctgacccaccagtacaagtacgaggcgggcgagatccgctggggcgccgagggccgcgacgtctgcgcagccaacggctcgggcggcgacgaggggcccgaccccgacctcatctgccgcaaccggacggctaccaacatgatgtacttgctgctcattggggcccaggtgctcctgggcatcggtgctacccctgtgcagcccctgggcgtctcctacatcga

SEQ ID NO: 224943 - DNA, 180 bp, Homo sapiens
  chr15:92936819-92936999
  hyper
cacttccctgggctcagctccgtacccggtcgctcgcggtggccagagcccagtctctctaggccaggagtggcgtccggctgcatccccgcgccctcgggagctgaataaagccaggcgggagaagcaaaggctagcgcctggacgctggagttggtgggaggaggcgagcagaggcgc

SEQ ID NO: 224944 - DNA, 540 bp, Homo sapiens
  chr15:92937062-92937602
  hyper
ggaggggcaggcgggagccgggagggagcgagcgggctcgccgcgcctgagcaacccctgcctgtcgctgccgctgccgctgccgctgccgccgccggcccggactcgtccggagcgcagggtgtctgcccagctgcgcgcggcgcgcggaggctccggcgtccgccgctgcgccctccggcccctgctcctcgcgccggcccgcgtgggtcccggcgggcgcgaacccaccatgcagctgcagttccggagctggatgctggccgcgctcacgctgctcgtggtcttcctcatcttcgcagacatctcagagatcgaagaagaaatcgggtaaatagctgctcccaggcccgtgccacgagccctggcgggatctctccctccttctgtactctccaccctccgaccccctttgtgtgcgccgcgccccgctgtagctccgctggagagatggggacggtttggcagaaggtggcggcgacaggggcccgggacggtttggggagaggagggtgggggcgcggctgctgtggggtgtcc

SEQ ID NO: 224945 - DNA, 720 bp, Homo sapiens
  chr15:92937628-92938348
  hyper
agctggcccgcgtcgggaagcggactcgcccaccctgcccccctgcctggcgtgtccaagcgcagtgtcgccggggtcgagggagggcgccggggagtgtctcgggcgggcggaggggccgagagtggagggaggcaggagtttctttgtctccagcacggccgctttctcgccttggcaaagtgggcagggggcgcgcagggatctctgagctgggggaggggttcctggggccggagcggagggcggggttctgcatgggctactgggaagcggaatgtcccctgcacacacagacaggcacacgcgcctcccgccggcccgggagcccggcgtaggagctggcaccactagagaagggctcgcatagctggactgagaccccccgccctcgcctggctttggacgttcagccaagccacggcaaccccggcgaccctgggttcctgtgcgctcgcagcgcggagacggagacatttcgggaaagtctgtaccgccgcccggtgggcttctgggccctcaggcgggcgatctggcgctttttttctcccgacctcgccagaggtagggtgggaccgcgagcccggatcctcccggctccggacttcctggagtgcgcacttgaggcgcgggacgcaccggctgtgtgtcccaggggctgagactcgcgccccgccccgcagccttcggctcgccgggccgggcccctctccggaacct

SEQ ID NO: 224946 - DNA, 1036 bp, Homo sapiens
  chr15:94774274-94775310
  hyper
ctgtggatctgggcgggcatcttccacccacagtcgcgcacacgtggcataggttaataggctgtctggctcgggtacctcttcccagggtcagggcgttacaaagggaggctgctgtcttcccatgaatctattagggacctacaggagcgaagagaacccttctgagtatcagcgaagacagcttattaagactttacgagtttgcaagccatcctcgtcctatttcctcacttcggactttttggacacaccttccttttcctgtgagccaacccaaacgaatgagttacaagtaatcgccttctctacgcccagccagtgcccagcaccaagcatagcgcctccttgcaacacccggccgagctcccggcggcagcgcgggcgcttgggtcggaggctgctcaaaggtgacgcgcggccgcctcctcccctttaggcggggctcgcaagggcggtgggggggcccgaggaagtccgggggccctcggtgatgcccccgcccccgccgcgtcagggttgctccctgcgcttccgagtggcgactgcagcgggtccggtgcaggtgaggggcgcgcgcctgcccagctttgcagcccccgaacgcggcctcgcacaggtgagggcggtgccgggttcacctggcagcgcgcgtgggccgggcagcacggtcgccgcctgggggtgggcgtcttctctcaaccgaagctgggagttggggagctggagggtccaggatgagaattcagtggcgctactaccccggagctgcttgtggttcagagatcagaaaggtgtcctgaggactggaggcagaaatccaggcgtggcgtactggaaggcgcactaggggagggcagcctggcccagaatttctttgcattttaaaggccacacattcagtctccccggggcgctacggaggtagtcaccgccacatccaggactccttccacagaggtcagttcctcagctgggtgggctttaatacgctctcttcgtagagacccggaggttcaactttaattctttgcgc

SEQ ID NO: 224947 - DNA, 1057 bp, Homo sapiens
  chr15:96873421-96874478
  hyper
gggtggtgcgcgagcggcggaattcgtgacatcgccaagttgcgagaggcaaactccccgattccatccaaagcctctcgcggagcctttaagagacgttgtgtgtgcgcgctgcgctagtctccccgccggggcggaaacctcgggtgcgggatgtggggagagcagaggcagcgctcgcagggccagcacgggcccatccccctctcggcggcggcggcggcggcggcgcggccaccccgtccccgcccccccaacccccggtcccccgcgtgccccgcgccgcgccggcgacgccgctcgcgctaggaccgggctgcgcccgcggccgccatggcggggccgccgcagtccggccaatgacggcgagggggcggcgcgcgcgcgcctggccaggccaaccccggctgctgccttataaggcgcgccgtcgccatggcaacgtgcgctaagttgcagcagtcgtgtcaaagttcactatatagagagctcagtgagctgatcgcggagaagccacttctgccagccccggcgcctataaatcgcattccctcccgcgcccccctttttagcatatttgatcactttgattctctgttcttttctctccgcggtgtgtgtgtgcgtgcgcgcgtgtgtgttttcttcttctcctcctcctctccccgagttgcctcctttctccgggtgccgtactgccttttttcccctctttcattctttctctccgtctttttctcccccctctgcgcacgaaggatgtgcttctaggtggtgatctgccctcctctctctcttttatcatttctcccccgccgccggcgagttgactctttccctatgtgtgtgaggcggcggcggcagcagcagcagcagcggctccggcggcggcagcagcggcagcagcgacttcagcggcggcggcggcgctagacgcagcggctccgggcccgacccggcggcttcggcggcggctccggcggcagcggcggcccgggcggcccgcagggaacggcgagcggcctccacccagcgactgcgggcggcggcggccgga

SEQ ID NO: 224948 - DNA, 240 bp, Homo sapiens
  chr15:98503757-98503997
  hyper
tccctgatcacgcacggccttcctgcgcccacccacgcgtgggagcgccaatgaaatgactcagtgaccatctacaacaaatcagcaagaagcagggctcgcagctgaccaatggccgcccgccgggggtgggctgtcccggcccttttccaggcccaactgggtttgttaaagcgacaggcctctcggcgagccggtgccccatcgggtaccgcacggctgccgcggcggccttaccct

SEQ ID NO: 224949 - DNA, 282 bp, Homo sapiens
  chr15:98836145-98836427
  hyper
ggctgggagctgggcccggagccccggggcagcccgcccggccgtgctcgctgcgcccccgggctgcgttcatcaagcgcaactccaggcgcgcgccgcaaccgcgcagggcaaccgggggctctcccgccgaacccgccctcacttacatctttctcgtcgcccttcaggggctgctagtttgctaatgctgccaggaagctctcctcccagttttctagctgccgttccagcgagcagagagagagcctcggtggtaataagcctcgcacagaacacagc

SEQ ID NO: 224950 - DNA, 360 bp, Homo sapiens
  chr15:98971537-98971897
  hyper
ttacatcgaggcggacgagcaggcaggagcgtgcagtccgtgcggctctgtttctttcccctgttaagcgcagagtttctagctgcagctaaagacgcccacccaggccgagcgcccttggattctgtgggagggcggccccgcgtccaccgcctgggggcaccgactcggggctgcggacctcggagcgcgcccggcgggctttggtttgggcaaggctgccatcgtgtggccgccgtgggtatttccctcggaaagcggccgggcagcgagcaggcgcccgcgcctcttctttttacgggagtccgcgctctccgcaagtctgtcctgagatcgccgttttctcccaccagccagaat

SEQ ID NO: 224951 - DNA, 627 bp, Homo sapiens
  chr15:99191331-99191958
  hyper
tcccagccccgcactccccgcccacccctcccctctcctgcccacccctcccctgcctagcctttccctggctacccacccctgccccgccgagaccggaccggcggcgggggcattgtttttggagtcgggcgggaggggagggcgcgtgcggggtggccggcgcagtgcggtgggggcgggagcgggtgggcacgcgcgcgtgtctctgtgtgcgcgcgggaggcggtggggcgggagatgggggcggcgcctcgcagtctcgcgccccacgcccgggctccgctccgcacgtcttggggaaccgggctccggttttttgcgcgcgccggcctgggccgggccctcggcgcgccgctgctgcggcggtggccgctcgagtgtgcgagcgggcgcgtgtgcgcgggccagggcgcgcgcgcgcgcgcgagcccccagtgtgtggcagcggcggcggcggcgcggcgaggctggggctcttgtttaccagcattaactccgctgagcggaaaaaaaaagggaaaaaacccgaggaggagcgagcgcaccaggcgaactcgagagaggcgggagagcgagagggacgccgccagcgagcctgcccacggccggcgctcgcagaccctc

SEQ ID NO: 224952 - DNA, 570 bp, Homo sapiens
  chr15:99192162-99192732
  hyper
cgcggccggcccgccgctttgtgtgtgtcctggatttgggaaggagctcgccgcggcggcggcggcgctgagggaggaggcggcggcgagcggagccaggaggaggaggaggagggggagccgctcattcattttgactccgcgtttctgcccctcgccggcctcgcctgtgacccggacttcggggcgatcttgcgaactgcgtcgcgccctcccgcggcggaagctcgggcgtccggccgcctcccgcgcggccagggccgggcttgtttttcctcgcctaggcagatttgggctttgccccctttctttgcagttttccccccttcctgcctctccgggtttgaaaatggaggccgacgacgccgacagcccgccccggcgcgcctcgggttcccgactccgccgagccctgggccgctgctgccggcgctgaggggccgccccgcgccgcccgccccgtccgcgcacccggagggccccggcggcgccgccttcggagtattgtttccttcgcccttgtttttggagggggagcgaagactgagtttgagacttgtttcctttcat

SEQ ID NO: 224953 - DNA, 600 bp, Homo sapiens
  chr15:99192836-99193436
  hyper
cccgacctcgctgtgggggctcctgtttctctccgccgcgctctcgctctggccgacgagtggagaaagtgagtatgtgcccgccgcccgcggccactgcgggaacttttcctccgaggggctgcgccctgtttgcgaaacccgagttgccaccgtcgcagctgtcgggcccccgggctcgggagcggcggggtggggcgcagggcggctctgccgggagggaggctgcagcggacccgggacccgggctcgttcgtctggagccccgcgggccctggctccgcgcatccccgcgcgggaagggcttttctctttctccgtcctgacagcccagccgtgtttcccggctaggcgcgaggactcggtagggaagttggtgccggggcgggctccgcggttcccgggccccgcgacccgcacctcgccccttccatgcgcaagagcctctccgcacacagcgctgatcccctgcggcgcgcaggcagcagcgacagcaccctgggccgcaccgcgtctccgctgctggggctgaccgggcagtggggagcgggcagccgcccggcccgcggggtgcgagttgccctcgaggggggaggtgcc

SEQ ID NO: 224954 - DNA, 42 bp, Homo sapiens; identical to SEQ ID NO: 204068
  chr15:100273862-100273904
  hyper

SEQ ID NO: 224955 - DNA, 48 bp, Homo sapiens
  chr15:100273946-100273994
  hyper
cgcagctttctcgcccgtaaagaggcctttgaccccacttgtgggtaa

SEQ ID NO: 224956 - DNA, 1281 bp, Homo sapiens
  chr15:100881285-100882566
  hyper
gccggggtggccgagcacacggcccgagtagaagcacagctcggcggggcggccgcggcgccgggccgcgcccgcctcctccacctcgaagcctcgggacaggaagcgcaggtcgcggcgcagctgaaggtacaggtcgcgcccgaaggccggcaggtgcagcagcagggcgcgctctccgggccgggcgcgcggggcggctgggggcgtgcgggggcgtcgccgccgtcggggcccgggggctgcgggcagcggcggcaggtgcacgtcgtcggggcgcacccgccacgggagcaccacctccacgtcggccgccgcgtcgccgacagctgcggggagagaggagacgcgtcagcgcggcggggcccgcccggacgcccgccctcccgctggccgccagccgcgccagcgcggggacagcgcgacccggagccggcgctgccttcccttccctcgcccggcacctccacgctggcccgcgccacccggggagggtctccggcgcagccgcgcgagcacctcccggaacggcgccgcgcatcggcgagcggagacccggcggcggcgcgcctgccacggagccacccgattcccgtactccggccgcggcccgcgcctcctccgctcgggcgccgtcagcggtcccgccgccgcccccgggccgccaggacgccgcgagaacgcagagggaaggtagccgcaggacgcggggtgaagagggctgtgggagggggcgctacctgtgcccgggtccagtccccaaaccagcagcagcagcacgggcaggacgagcggaggcagcagggcgccgtcacacatggtacccgggaccggcagcccccccggaccgtggcggcgaagcaggagcgcgctaggcggcggcgccagccggagtgaagccctccagcctttggaaaaagtaattagcgctgcggacaaacccaacgtggtaaaccccaagccccgccttcccctcggaaggcgggaggggattgggccctcgctttcctccgccccgcctcctccttccctactggttgggatgggtcgaaaccacagtgcgtagttaggttgtcagcgctttcttacacgtggtttctgggcagtggcggggacacggcaccaggtggcgcgcgggagccgaccggagccgtgggaccctggaagagctggaggatgcggggctggtcttcagagcttgtcctcattttggaactctctcagcctgctgcccagtttcccgggaaggtagggcggaaatcgccccggccaagcggtttc

SEQ ID NO: 224957 - DNA, 180 bp, Homo sapiens
  chr15:101458490-101458670
  hyper
ggtgagaacaggattgcagaactgcgctcacccttttggaaagtcgtccagtggcagaagtagcctcccaggagcagagcgaagctgctcggtggtcccctctccaaccagggacccaagaagccgctcaagggaacacggccccgcggcgtccgggaggtcctgcaggagccctgcggc

SEQ ID NO: 224958 - DNA, 1225 bp, Homo sapiens
  chr15:101459065-101460290
  hyper
aggatatgcaaattgcaggtcgttaacgctttagaacgacacatttctgtatcgccccgtgaagagctctacgcacatgaatgttccccgtctgtttaactgttacggccgcagtgtgtgggccgcaggcgcgctgggggctcatctgctgattttgctgcccctggagcagagggatagcgaaagcggggctgagcgcagcacggaccgatcccatcgccgcgctcgccccgcgtggaggcagccgggtgcccgaacctgaaggaggacccggtgccggaagggcccgcggaccccggcgtctcccggggcatcgagcgccatcgcccgcgttttacggccagggaaactgaggcggccgccgaggggacgcctcgcgacggttcctgggagagctggcggcggccttgctctgcgcgctcttcgcgccgccctccccgcccgcccgcctcaggattgaggaagtgcgtctgggcccggccccggcgcggggggcagacggcggtgggacggccaggccccggccccgccagtgtgtccgcccggccccgcgtcccggagcgcccgcacccggccccgccgccgcctcaggtaagcgccgctcctgccggcgccccccggcggcctggctgcctcccggccccgcccggggaacccagagcccgcgcccggcgcccgcggggagcctcggcctctgcctgcccgcgggcccctgcgctccgggcggccgcgtggtcgggcacggggggccgttgcgcaggggccgcggcccgaggggcgcggagggcgtgtggggcgaccccggtctcacgtccccgctgcctcccgccgcgcccggagcccagccagcctgtgggaggggagcgcgcggggcccgagcagggaaccccgaaaccccgtccgggcagggtcgggaaagctgggaagcggaggcaagagacacgagtcgggagacacgagccggggagcccataggtttcctctgcctttggagcgaacccagtcccttagcggggagcgggcggagtgtgagcgcgcgggtgagcccgtgccggggtgtcggcaagagaccgcccgggagcctctcgctggtccggggcttcctggggttgcggggcggcccagcgaggcttcaccctcctcgatgtctgggtcacgcttcttgcccaggtggtctctggctggcgcagatacaactgctctgtctaccatggtctctgcaagc

SEQ ID NO: 224959 - DNA, 154 bp, Homo sapiens
  chr15:101791012-101791166
  hyper
ttatgagggagacccgatctgtcgggcccttctaacgagaagcttcgatttgcaaaggctaaagtgccttcatcagggtgagaggtacacccagcgaggccacactagtccatctgaccccaaaggccatgttcctgagcgccgcgctcaccat

SEQ ID NO: 224960 - DNA, 246 bp, Homo sapiens
  chr15:101835610-101835856
  hyper
ctagggtgtgtttcggagtctggaggacccctgattccagacgttggtgtttaaaagttaaggcgaatgtggaaacacccgaggggaactttctcatgcattagcgcacctcgaggtgggaggggaagcggtgactgtcctccctccaccagccgtcgcgggaacccgtggggttcagtgaagggtccagcagttcaggtgcccgccccgggcctgggccttggctccgggctacagtgtgagatc

SEQ ID NO: 224961 - DNA, 470 bp, Homo sapiens
  chr16:204416-204886
  hyper
cccaggacaggctgcggcccctcccccgtcctggaggttccccagccccacttaccgcgtaatgcgccaataaaccaatgaacgaagcagcgtccacctggtctctgttgtccgtgggcggcgggcgcttggggaggcggagcgggaggagggcgccccggctgtctcggggccactgctgggccgcagggatccttgcaccgaccccagggtctctaagaggcagagggatgtgcagctcccggggcgggagcgggggtcactcgggacccaggcgtggtggagaaggggtgcagttaggcctttgcggaggggggagcagtgctggcgcccacccgccgcggctctccctgggacctccgtggtcttccttctttatttctcccgaatgtgtactatttcctgatttcagaacgatcaggacgaagaggggagggatgggcgtctgcgctcactcattccttcttcca

SEQ ID NO: 224962 - DNA, 360 bp, Homo sapiens
  chr16:215352-215712
  hyper
gtcgcggcctggggttcacttggggggcgccttggggaggttctagcccctgagcaccggagctgcggcccgggtggagcggagcagtcccgggccggcccgcggcgtctcctggggtccttgagtcggacgggcgtttgtgcgtctcccggcttcccatatcgcacaaagattgtcacttcactaagcgtattggaagcgtgtcggggctcagggaacttttccacaaagcctgacgtccgaatcccgggactctggcagctacgggggtccctgaggccggtccctccccgactcctaagagagtagggggtttcctgcccggtgttctctctccggttcctcccatgtgctccctcc

SEQ ID NO: 224963 - DNA, 660 bp, Homo sapiens
  chr16:215863-216523
  hyper
cgttccccggcgcaggccgagggtccccgcgttcccgccgcgctcgggccgataaggacgggcggggtgcccggaggctctataaggaggccagggcggcgggcgcggcccccagagcacgtcaggcggcgccatgctcagcgcccaggagcgcgcccaaatcgcgcaggtctgggacctgattgcgggccacgaggcgcaattcggggcggagctgctgctcaggtcggtagaggcggggtctccgggagctcagggaggtggagatgagggttttgggcgcgtgggccgccaacgccatccaaggtccttcgggtgcggatccccgggctctgggcggtgtgggcgctagtgaagccccacgcagccgccctcctccccggtcactgacctggtcctgcaggctcttcacggtgtaccccagcaccaaggtctacttcccgcacctgagcgcctgccaggacgcgacgcagctgctgagccacgggcagcgcatgctggcggctgtgggcgcggcggtgcagcacgtggacaacctgcgcgccgcgctgagcccgctggcggacctgcacgcgctcgtgctgcgcgtggacccagccaactttccggtgaggcctttccggccggggcaatggtgcagcgcgcagccggggtgggggg

SEQ ID NO: 224964 - DNA, 780 bp, Homo sapiens
  chr16:230502-231282
  hyper
ggaccgggcgctggtgcgcgccctgtggaagaagctgggcagcaacgtcggcgtctacacgacagaggccctggaaaggtgcggcaggctgggcgcccccgcccccaggggccctccctccccaagccccccggacgcgcctcacccacgttcctctcgcaggaccttcctggctttccccgccacgaagacctacttctcccacctggacctgagccccggctcctcacaagtcagagcccacggccagaaggtggcggacgcgctgagcctcgccgtggagcgcctggacgacctaccccacgcgctgtccgcgctgagccacctgcacgcgtgccagctgcgagtggacccggccagcttccaggtgagcggctgccgtgctgggcccctgtccccgggagggccccggcggggtgggtgcggggggcgtgcggggcgggtgcaggcgagtgagccttgagcgctcgccgcagctcctgggccactgcctgctggtaaccctcgcccggcactaccccggagacttcagccccgcgctgcaggcgtcgctggacaagttcctgagccacgttatctcggcgctggtttccgagtaccgctgaactgtgggtgggtggccgcgggatccccaggcgaccttccccgtgtttgagtaaagcctctcccaggagcagccttcttgccgtgctctctcgaggtcaggacgcgagaggaaggcgccgcccctccccaaggaaaggcgagggcctggggcacacccccagtgcccagatccag

SEQ ID NO: 224965 - DNA, 105 bp, Homo sapiens
  chr16:325111-325216
  hyper
gccgcggaagcgggcgagggcgggacgagccgggcctcctctcccctatgtgctccccacccttgcacagcgcgctcagcagggctctgagaactgccagactcc

SEQ ID NO: 224966 - DNA, 322 bp, Homo sapiens
  chr16:325277-325599
  hyper
ctcaccctcctccgagacgcagaacttctgggccaaccactgcacgacgtcgctgcctgcacgggagagacagaggtggagggaggccgaggcgcgcacgcacccccgccccggcgcgcctcacctgtcaccgcgtggggaatgacggtgaccagcaggcgctggctccgcatcttcacgccctggtcggggtcctgcatgctcacgaccacccgctccatctgggcggagggagtcgtcagggggtgtctggccgccccgcaaccctgattccctggcaccggccgggatgccccggatccgggagcgcggagattaacgc

SEQ ID NO: 224967 - DNA, 212 bp, Homo sapiens
  chr16:325890-326102
  hyper
cggcgcggggccggcggccatggctgcggggcgaggccggcggggatgaccgacgtcccgcccggccccgccccgcgccgcgccgcgcccgggttaaccctcgggccgcgaggccagagtcgcccaggccccggttcgggttttaagagacacggccacggcccagaggcaaacgagccggccccccacgagcgacccgagtcacccccccg

SEQ ID NO: 224968 - DNA, 71 bp, Homo sapiens
  chr16:347205-347276
  hyper
cacgccacgcccaccttcccactgcaagggcaagagctgcgagtcgccctggcctccggtggccgaggctg

SEQ ID NO: 224969 - DNA, 317 bp, Homo sapiens
  chr16:374802-375119
  hyper
gcagaggcagcttccggcagccgcaggcccttcccaggcccagcccccgagtcccgcgcagggaaaggctctgcccaagccttcagggaggcagcagcgcccggtgcacagttcctaagggcgcagaactccgggatgaacaaaggcaaggaaacggctgtgtaaaaatcagctctactgacgcacggctgggtgctcagcggacccgcacagaaccacagtcctacctggcacgttctgacgcgcaccagatcacagcctcagccccgcgggcgcgccccaggaaaccatggcctcagccccgcgggcggccccgc

SEQ ID NO: 224970 - DNA, 130 bp, Homo sapiens
  chr16:565596-565726
  hyper
ccacacggctgacacggaccggggttcgcatctcggagcagccacacgggcgacacacaccggtgtttgcatctcggagcagccacacgggcgacacgcaccggtgtttgcatctcggagcagccacacg

SEQ ID NO: 224971 - DNA, 139 bp, Homo sapiens
  chr16:577540-577679
  hyper
ggggaccgaggcctcgggcccggccgtctccagcagcgagggcaggagaagtggcccgggcggtcggcggactgggagggcgccacccgaggactacaactcccggcctgcctcgcgcaggcaccgccccgagcttccg

SEQ ID NO: 224972 - DNA, 646 bp, Homo sapiens
  chr16:609994-610640
  hyper
cggcccctctcccgcgccccgcgccgctgacacccatcacgccgcggcggggacccgggagacctggcggcctctgtgcacccccgcggcagcctgcgggcaacgggggcgggaggcgccgggcgcccctgactcggccgcacacctgcgccgcagtccgctctccgtccgctgcctcccgggttcccggccgctccaccgcgcgccccgagagctgagccggtcccggcgcacgaggccggtgagtgcgcgccagggggcggcggggggcgcgcgggcggcgggggcgcggggttcgggccgggggctgctccttccctcccgccgcgagcgcggtcggaggtcgcagcgccccccggagcccggagcccaggcgcacgcgcgcccgcctctgccgccaacttcgggaggtgcgagcggcgtcggggggacgcgggcggcggcggaggctgcgggagtcgctgccgctcgagggaccgcggacccgggaggtccggctcccggcgccgggcctcagtttcccccacgggagccgcatcccacccccagagccccagcgcgtccgcggggtccgagtcgcggccggcgcggggcggggaggggcgggaagtttgcgccctacacgcggcctcgcagacttggcggc

SEQ ID NO: 224973 - DNA, 50 bp, Homo sapiens; identical to SEQ ID NO: 204077
  chr16:717960-718010
  hyper

SEQ ID NO: 224974 - DNA, 837 bp, Homo sapiens
  chr16:745046-745883
  hyper
ctgaggccagtgtccgtgatgcgtacacacctgtggttgcaccagaggggacccccaccttcaaatcacctggccccggccatccctcgtcttcctgggagtgcccctggcgtgaatcccttcctgccccacccggagcagccgctggcccctcctcgctcccacccaccgggaaggacgggggtccagccaacccgtgctgcggttctgcggttcccactccccaggctccgagggctctgcccgccgcgccacagccccagccccgccggaagcccccgcccccggccccgtgcagccccgccccgccccgccccgtgcagccccgcccggcccagccccgcccggcgcggcccgggggcgcgcacctgtcgagcacgagctcctctaggcggtgcaggtcgcaggccacgtactccagcgccatgtcggtgatgcgtgggcaccacgagaggtcaaggctgcgcagcttgcgcaggttctcggccacgagctccacgccgtcgtcggtgaccttggagcagcccgagaggctgagcgcggtgaggttgggcaggctgtgcaccacgttgaccacgccgtggttggtgatctcccagcaggagagcaggcgcagcgtgtgcgtgctgtggccctggcgcgccgtgaagtaggccagcgccgtgtccgtcacgtggtaggcctgcaggctcagctccgccaggttgggcagcagctgcgagatggccgcgatggcgtcgtcggccacgttgatgcagtcactcacgctcagcgaggtgatgcgcgcgctcaggctggaccacagcccggcctcggtgaagtcgttgcagcccgaca

SEQ ID NO: 224975 - DNA, 111 bp, Homo sapiens; identical to SEQ ID NO: 204079
  chr16:765207-765318
  hyper

SEQ ID NO: 224976 - DNA, 62 bp, Homo sapiens
  chr16:765586-765648
  hyper
cctcacccaggagcccggcagcgtggggcagctggccctggcctgtgcggagggcgcggttg

SEQ ID NO: 224977 - DNA, 105 bp, Homo sapiens
  chr16:778111-778216
  hyper
gcagggaccacgcgcggggaaacccggagctggcgcggcttcgtcccgggctggcggtgctgggcgcggacgagcgcatcttctcgctgacgcgcaggctggcgc

SEQ ID NO: 224978 - DNA, 121 bp, Homo sapiens
  chr16:778761-778882
  hyper
gcgtgcgcgctcaccgagcgctcttcctccagaaggtgttctgcggccacgagcacacgcttagcaacctggagtttgcccagaaagtggagccctgcaacgaccacgtgagagccaagct

SEQ ID NO: 224979 - DNA, 640 bp, Homo sapiens
  chr16:1031783-1032423
  hyper
ggcggcggcggcggcggcggcaggggcgagggtcggggccaccgcgcggcgacctcgggtcccggagcgaccgcagggcagccccgggcgccggccccggtgcgcgtctcctgtgcgcgcccctccgcgcgcggccccgatgctggacatgagcgaggcccgctcccagccgccctgcagcccgtccggcaccgccagctccatgtcgcacgtggaggactcggactcggacgcgccgccgtctcccgccggctccgagggcctgggccgcgcgggggtcgcggtggggggcgcccggggcgacccggcggaggcggcggacgagcgcttcccggcctgcatccgcgacgccgtgtcgcaggtgctcaagggctacgactggagtctggtgcccatgccggtgcgcggcggcggcggcggcgcgctcaaagccaagccgcatgtgaagcggcccatgaacgcattcatggtgtgggcgcaggcggcgcgccgcaagctggccgaccagtacccgcacctgcacaacgccgagctcagcaagacgctgggcaagctgtggcggtgagtgccggcgccccgggggcggggttcgggaccttggccgcccctggtctcggactgcgagcgggggcctggaggg

SEQ ID NO: 224980 - DNA, 564 bp, Homo sapiens
  chr16:1035087-1035651
  hyper
acggcgaccagccccgaggctcgcccgactacggttcctgcagcggccagtccagcgccaccccggccgcccccgccggccccttcgccggctcacagggcgactatggcgacctgcaggcctccagctactatggtgcctaccctggctacgcacccggcctctaccagtacccctgcttccactcgccgcgccggccctacgcctcacccctgctcaacggcctggccctgccgcccgcccacagccccaccagtcactgggaccagccggtgtacaccaccctgaccaggccctgagggcccagccgcggggagggactcgcaggcgtcagggggcagccttgtcccggcccagtgtgtgtgaccagggcgggaggggccccagtggctgagctccaagtgcctgctgaagtctgcagggaaacacgcttgctgcccgtggccctcggcctccagatggccacacctctgccgacgacggaccagctccctctcccttctatctttctttttgaggtggtgggattattccacaaagaagggctgccgtttggtccctctt

SEQ ID NO: 224981 - DNA, 148 bp, Homo sapiens
  chr16:1202438-1202586
  hyper
acaagttcgcggaaactgcccgtgcgtgtcggggagagatgcgagtgcaggagcgcccagccgtaaagcacacccccgcccgcccccgcgccccatcacacacgcgcgcgcgggcacacccgggacacacacgcggcggggaaggggc

SEQ ID NO: 224982 - DNA, 691 bp, Homo sapiens
  chr16:1203076-1203767
  hyper
gccccgccccgccccgccccccgccgctcagcccgaagtttcctgcgccgcgcgcggacgggctcgaggctcgctcgctgcctcaccggtccccggcccgcgccccgcgccccgcgccccgcgccccggcctcacccgtccgctcagcggcctccacgccgcgccgaggccgccgccgtcgcctccgccgggcgagccggagccggagtcgagccgcggccgggagccgggcgggctggggacgcgggccgggggcggaggcgctgggggccggggccggggccgggggcggaggcgctgggggccggggccggggccgggcgccgagcggggtccgcggtgaccgcgccgcccgggcgatgcccgcggggacgccgccggccagcagagcgaggtgagacgcggcgaggacgcgcgcccgggaccctcttcaacttgcgcgaagcgggccggggagcccctcggggtgggggtggggccgctggagggagggagggggcgggcgggggcggggggcgcgtttgtctctaataagaaaagacaaagacatcccggcggccgcggctgttcccgcagctccgcgccgcgggaggcagggcgggggcgtcgccaccggccccgggtcaccccctgtcctctgcaggtgctgccggccgccaccatgaccgagggcgcacgggccgccgacgag

SEQ ID NO: 224983 - DNA, 420 bp, Homo sapiens
  chr16:1203856-1204276
  hyper
ggagcgggggtccgagctcggcgtgtcaccctccgagagcccggcggccgagcgcggcgcggagctgggtgccgacgaggagcagcgcgtcccgtacccggccttggcggccacggtcttcttctgcctcggtcagaccacgcggccgcgcagctggtgcctccggctggtctgcaacccatatccttcccggccggcggggggcggggggcggggggcgtggggagggtgggggcccggggcgcgggactccctcggcatgcgcccccgcgcgcccctgttggtgggacctggcgtgggccgggcgcgcgggggtgcagggcaggggctggaggaccgcgctctaatttctgagagtggcgggcttggggggccaccgggcgcctccggactcccttccccagggccggctccggacgg

SEQ ID NO: 224984 - DNA, 210 bp, Homo sapiens
  chr16:1384032-1384242
  hyper
ggagggtatccgggcgctggcgacggcctcccccgcacttgagccgccaagcgaggcttcgacccccgcgcctccctccccgggggagcagacgggcccggggcctcccagcacccctcccgggcgggctgcaccccccagcgtcctcgtcccttccctcctcccgcaggtcctcgtaaggccctttagtccccccgaaatccctgcgag

SEQ ID NO: 224985 - DNA, 130 bp, Homo sapiens
  chr16:1384575-1384705
  hyper
tggaccttggcagccgtctgaggcttcggggagcccaaggccaccggcagcgcttgttagaatgcagattcccggggttcgactggaatgagaccccggggagcagcgtttgcagcgggcccgccaggtg

SEQ ID NO: 224986 - DNA, 243 bp, Homo sapiens; identical to SEQ ID NO: 204080
  chr16:1429037-1429280
  hyper

SEQ ID NO: 224987 - DNA, 434 bp, Homo sapiens
  chr16:1660449-1660883
  hyper
gcgacagccatagtccgacgagcgacctggaccccgcgccaagcccgccccagcctcgatgggactcgcgaggggccgcggggactcggcggcgccgggatcgtgggaggagacgggagggtcccgacgcccgccaccggtcacatcctcggccccaaaccccggcctggctcctaaggacctgggtcggccgccctagccctaaggccactcacctctgccaggccgctgagccgccgcgcgttgccgggacaacggcgcgccaggaacgcggaaatagccgaaggtgagcgaggcggccccgaggactcccgaagcgccccgagcggccggaaagagccgaaggcgatcgggcacgcacgtgcagctccgaggcccgagcgtcgggggccaggttattccgctctgcaagagagaagcgggacgagcttttt

SEQ ID NO: 224988 - DNA, 700 bp, Homo sapiens
  chr16:1664481-1665181
  hyper
gggccgcggcgggctcgggcgggctcgggcgggccgggccgagccgccgagaggggatttggaacaaacaacggcggccatgttgagagcgcgtcggggccgctaaacttcccggcctgcgcccgcctcaccggccgcctcccctctcccggccgcaggatgacagtgaagttgggcgacggcggcagcggggaggacgggctcaagaagctgggcaagcgggcggccgatgaggagtccctggaaggagaaggggccggcggcgcagacgcggccgaggagagcagcggcacaaagagggacgagaagaccccccgggccggcgccgacggcccccccgcgccccccggcgcgccgcaggcgccgtccccgccgcagggcagcccccaggaccagcaccacttcctccggtccagcgtgcggccgcagagcaagaggcccaggaaggatcctccgagcgctgtggggagcggcaacgccggtggctcggggccccgcggaaaaggtagggcggcccgtccccttgggagaccccagcccctctccggggtgtgccgcgggggagaggaacccctcgccccagccgggctccaccctagctcacccatcccgcggcctacactgaggctctcaatttgggtggcacttatggggcatgtgtcccctctctccttcgaagaggctgcgactttctatattt

SEQ ID NO: 224989 - DNA, 693 bp, Homo sapiens
  chr16:1968286-1968979
  hyper
cccccggccccgccgcccaggccgccgctacctgccatggggtcgcgccgctccaggcccgggagcgggggcagcaggcgggcgcgcatctcggcccgcgcgccgctcagtccgtgggtgcccggcttgtgctctgcgcccggcggtcccgcagcctgggagcgggcgcggggcgggaccgggggcggggtctggacgccctcccccctccccctcccccgcccactccgcctccgaggccactgcctgggctggacccgccggcagccgccaccacccgggcgcgactcgagctgccgggaccaccaggacgctcctgctccgagatcccaggccctggctcgcttgactccggcatcttcacctctgcgcggggaggatgcggcggcggtggccgttcgggacgcagggcagggacagggcggcgcgcgggcctcgggaccctctgtttgaagaccgatccccttccccccccaccccactccgggacgtgcgcggcaggtgcataggccaagccttggcctgcaggagcgggagcctcatcgccaggccaaggggacccaggaaaagcgtcgatccgggcactcggcctgccaagggagaaagaggccgggacagcaccctagtgtgcagagagggatcccagaacgtgtggggggagtctgcggccgggaatggcgtgcgtcctgcact

SEQ ID NO: 224990 - DNA, 390 bp, Homo sapiens
  chr16:2041790-2042180
  hyper
actaaacggcccgtgttgtcaataattactaaatacgcgagggttcgggaaagaaagaggtgacaccgccccccacccagatacgggcctgggaacgcagggacaggcccaggggcgtgggcgctcgaggcgggctcgcagaggtcgggtcgccgcagggccctgagcgccgcgccgcacgcaggtgttctccatcgccgtcttcgggcccatcgtcaacgagggctacgtgaacaccgacagcggccccgagctgcgctgcgtgttcaacgggaacgcgggcgcctgccgcttcggcgtcgcgctgggcctcggagccttcctcgcctgcgccgccttcctgctgctcgatgtgcgcttccagcaaatcagcagcgtccgcgaccgccg

SEQ ID NO: 224991 - DNA, 346 bp, Homo sapiens
  chr16:2042499-2042845
  hyper
gaggcgggacctcgcgccacgcggcgagcccaggcgaggcgccccaagcctcgggcccaccgacctttcctcctccgggcgaggccgccgtgggccaccgcgtggagcgtcgccctgacgcgccgcactgttcgcaggactctggtccttcctgtggttcgtgggcttctgcttcctcaccaatcagtggcagcgcacggcgccagggccggccacgacgcaggcgggggacgcggcgcgggccgccatcgccttcagcttcttctccatcctcagctgggtgagtgcggggcccgggagggcggggcgaaggggcgggcgctcggctgatcccggctgaccccgc

SEQ ID NO: 224992 - DNA, 146 bp, Homo sapiens
  chr16:2295263-2295409
  hyper
accccccaaggctgtgggtgaacttgttcctgcagctgaacccagctcaccctgactcacacaagcagagctgggtggatgtttaccccgccctgtctgcaggaaggagggcgacagccacctaatgtgtgcgaggaggaggcggc

SEQ ID NO: 224993 - DNA, 317 bp, Homo sapiens
  chr16:2521659-2521976
  hyper
gtcttggggcccggccactggctgacccgcagcggctccggccatgcctggctggccctgggggctgctgctgacggcaggcacgctcttcgccgccctgagtcctgggccgccggcgcccgccgacccctgccacgatgaggggggtgcgccccgcggctgcgtgccaggactggtgaacgccgccctgggccgcgaggtgctggcttccagcacgtgcgggcggccggccactcgggcctgcgacgcctccgacccgcgacgggcacactcccccgccctccttacttccccagggggcacggccagccctctgt

SEQ ID NO: 224994 - DNA, 326 bp, Homo sapiens
  chr16:3096720-3097046
  hyper
cctccgggaccctccgctgactccaccgcgcacttcccgggacccccacacacatcccagccctccggccgatccctccctactcggtgccgggtgccccccgccctctccaggcccggatctcctcccccaggtccccggggcggccccagccaggcccccttcgaaccccgccggcggcccgggctggggcgcaccatgcggctgcggctccggcttctggcgctgctgcttctgctgctggcaccgcccgcgcgcgccccgaagccctcggcgcaggacgtgagcctgggcgtggtgagcgcggggtccgcaggctcctgggg

SEQ ID NO: 224995 - DNA, 290 bp, Homo sapiens
  chr16:3200695-3200985
  hyper
aggcgtctgattccggatcagaagattgagggttcgagtcccttcgtggtcgttgccatgttaacgttttcttccagctccacttaaaatttcttcacctgggactgcaccctgggcgactacgacactcgaactgagtgcgccggtcgctctcccctcacccccgtaggaacactgggacctcgccctgcgcctccagtcgcgaagctaaggacccagggccagaatagcagcgagggcgacttagagaacgccggcagggccctggcggactgcggagcttgaagcca

SEQ ID NO: 224996 - DNA, 300 bp, Homo sapiens
  chr16:3209083-3209383
  hyper
tccgtggcagctgcaggcgccggggccgatccgacttcccgcttccgtccggcttgcggcccctcgccttgcccggctacaggaaggactcgcctgcgcctcctgactggagccttccacctgggagttctgagtgcgcctaaggcctggcgctgaggcagtggaccccagatccgggacccgaaaggagggcaaacacctccaccgccgcgtctgcctctgcggacgtggccctagatcccgggtggccatggaacttggtctgggcgtgtagttttcctttgagtgggtcggttctaa

SEQ ID NO: 224997 - DNA, 840 bp, Homo sapiens
  chr16:3232774-3233614
  hyper
cagcagagcagagctaggaggagactccgatttcctgaagtctggaagagacaagttcaagcgcgggtggacgcggagggagccctgagcccccgcttctccctgcgccgcacaaaatggggagcatcccctgtgcccccacaatccggggccccccgggccctcgcccgcctccgcctctcagccctgggctggggatccgcgcgtcacgccgcgtcgcgtagtgaggagctccagctccggcgggacatgggaacctctcaagagctggcagcggctgcgcggagggtccgcgaaccgcgaccactggacgcccgccttggaaacgctgcagcccggcggcgtggtgcagatgggtggtcagtagaggcctcgccagtgcaccaggaaccagccaccaggccccctacctcgacgcgccccacgcttctcccgctccggtcctctcttctcccccagggaagccaaaacccagaaggtgagcttcccacgtggaacctcaattcaagaggctgacactgagcgtcgcttcgctccaccagacccgcggcgcccgccggagtcagcgatgtacccccttccctttcactgggggaactggcggaacctccggtcaccaggacgtggggaagcagaggccgcttggggcagcagaggccgcgtccaggtgtcggttccggggcaccttttactgtcactctgtccttctctgtgtccaaatttcacccggagcccgagaattcggcaggtctggactgaaaacgtctccccatcccctccggatccaagcctcgaatttcctggctcagtgggaaggcctcggggtctgggcgtggagac

SEQ ID NO: 224998 - DNA, 157 bp, Homo sapiens
  chr16:3781398-3781555
  hyper
gcagggggtcggggtcgacgatggggggcagggtgttgatgacaggcccagcgtgcaggtggatcacgaagaagacctgcaggagaggaggggctttagtcccacacaagggacatggcacctccagtggtgagctcagggcaggcgcagccaccca

SEQ ID NO: 224999 - DNA, 180 bp, Homo sapiens
  chr16:3781616-3781796
  hyper
tggtgacacgttgcatgatgtcacccaactggtccacttggtttcctgggggccacttccctcccaccacagacctgcacacgggcccacgcccgccagctgcgagtctttccctcctcccggccagaggcacggctgcagcaccgcagcccacgcctacctccttgtgcttctccatgg

SEQ ID NO: 225000 - DNA, 148 bp, Homo sapiens
  chr16:3931082-3931230
  hyper
acgccagcccgggcccgcccgtcccgctggggcggcgctgcgtgttcccagctcctcgcgtccccttccccagaccctcctaggtggcgtcggtcgggaacggtcggggcgaccccagcccaggccgcgccactagccttcgccgccg

SEQ ID NO: 225001 - DNA, 111 bp, Homo sapiens
  chr16:3989147-3989258
  hyper
gcccaggccacgctcgctcagtcccggagcttgggacttctgaagacgcggggcctcgtttggggtcgcaagtctgagcgctccggctctggttggcgctaggtggcgccc

SEQ ID NO: 225002 - DNA, 1016 bp, Homo sapiens
  chr16:4165532-4166548
  hyper
cacgcctagaggcccgggacctgctcctgtcctaaggggcggctccagcacgcgacctggacaggcaccatctgttcctgtggttcccggctcagcggtgctcccaccgcccccaccgcccccaccttcgaggcgcacgagaaccgctcgggacggacctagaacgcccgggggtccccgccgcgtggccgccgtggctccgggaccgctttgctcgctcgccttccgcgcctctcgccccgagggtggcctccgcgccgcgcggcttctcctcctcgcgcgctcgcctcctccagctgcggctccggagggaagttcagaccttgagcgctcccagccccgcgagccgcctgcgcacaaacaactccgctggcggcgcggagccctccatcctgcaggagccgcgctccgatgcgtcaaaggcggcgcgcggccggccccgggcccggaccccgacccggagcagcgagcttcggcgggcgcccccggctcgcgctccccggccgccccccgcgctccgggccggccctgcccgcggcggcgggcgctgggggtgggggcgccccgggctgcgagtgcgcggagcccgtcggcgcggcccgtctagtggggcctgcttccccccgagtgcgccgccgctcccgccgcggccgcagctgtcccgggaccgagcgcgtggaaccacggacgcgggcccctcgccgggcggcggtgcagacgctgccgcagagccgggctcccgcgacgccggccgggacgcccgcccgcccgcgcccacgccgggggccgcctccccgagctagagatgcggccgccgccgcgcccgccgccgtgtcccccgcggccgctgcctcatgtcggaagagctgccgccgccaccatctccggcccctgccccgcccgctgtcactgacagacgcgcgcccgcgccgcccctcgcccagccgcagcgcgcacgcgcggcccgcgctcgccgccaccgcctcctggccccggacacgcgcacgggccgcgcg

SEQ ID NO: 225003 - DNA, 240 bp, Homo sapiens
  chr16:4166570-4166810
  hyper
ctgggctggggctgcggggcggggcggggcggggcggggcgcgcgctcggctccgccccccgccccgggcggcgccgcttctaggcggcgggctgtggccgctgtccgcgctccgggcgctgtgggcccgccctccctcggcgtcccagaggccgcgcgccgcccggggtcccgaccctgcggagagacctgaaggcgcctgccgtggaagaagccgctggccgcaacgtttgggaaatc

SEQ ID NO: 225004 - DNA, 553 bp, Homo sapiens
  chr16:4233232-4233785
  hyper
tggagttttcattcgctaagggctgcccttcggttttcaattactggcggagagggcggttcgtttctggcggggaagggaggtgacattccggtaggagaatctcctaaaactcgcatttcctgtttgccctgggcgccggcctcaggtggaaacctcaccccgataactgagggcagcagtcggccttgggcgttcttccgtcacccaggtctccagaacctcccggactcaatggcaagtcactgcacaagttcagggccttttcggtcccgatcgaggatctggagatctcggggcttcccggtcgtctgccccacagcccacgaggcggaccgacctgcggggtgaggcaccgggagcgcatggcagccccggcctcggcctcctggcgccctcccagccacgcggtgaatgcctgagaggacagaggttcgcggccctccccatcccaccggcagcgaccgcaaagcccgggagctgagtccgcggcgtgaagcggcggaggtcagcagcgagggggcagggccggcgctggcggccacggagcttg

SEQ ID NO: 225005 - DNA, 204 bp, Homo sapiens; identical to SEQ ID NO: 204104
  chr16:4234087-4234291
  hyper

SEQ ID NO: 225006 - DNA, 377 bp, Homo sapiens
  chr16:4357423-4357800
  hyper
tgtgacatccgaggcggtttcccaattcgactacctgtggctcttgcgcctggaacgtaagccccacgaggacaggactgtttcacttctgactcccgtgtccgcagcgatggaaagaatgactgtgggcgcctacccccggaggatgctgtcggcgcccagtctggcggctcccggcgcgcgcccgcgaggtcacgtccggggcgcgccggccggaaggaggccccgcgtgggggtaggggcggggcgtccgagccaggccacgccccccggactcgcgcccccctctcagcggcagagccagccagcctggggccgcctcgcacttccgctcaccagccggcttgttcatattcatgaggcgggcgagaggcggg

SEQ ID NO: 225007 - DNA, 105 bp, Homo sapiens
  chr16:4852797-4852902
  hyper
cagactggcggctgcgggagtgaggctcgctccgcctggccagggacgcggccggcggctgcacgagtcaggcttgctccggctggccagggacgcggccggcac

SEQ ID NO: 225008 - DNA, 215 bp, Homo sapiens
  chr16:4852975-4853190
  hyper
cgcgctcactcattggccggcaggacagtctgtccccgctcctcctccctattggcccgcttggctccattggtcgtggttccaaccctgccgcggacctcgccgccactcccaagtccgtctcaccccggacgcggaggtcccgaaaacccaccccggccccgccgctgccttctcctcccacccatctcgccgaggacgagggaagcaggact

SEQ ID NO: 225009 - DNA, 180 bp, Homo sapiens
  chr16:5007975-5008155
  hyper
ccggactcagggtctgcttggaggcagagctagattagggcggggtcgtcctgtggcctaccattccccgaggctgagggccttggagggcggggccagtgaagggggaggggacttcctgaggtgtgaccaatctagagaaaggactgggctgagggcgtggtcaaacaagcgacatct

SEQ ID NO: 225010 - DNA, 105 bp, Homo sapiens
  chr16:5121901-5122006
  hyper
ctgctgctgggaggatggaagcgctggcgccgggggcgggcggcccggcatgtagtagcggtggtgctgggcgacgtgggccgcagcccccgtatgcagtaccac

SEQ ID NO: 225011 - DNA, 240 bp, Homo sapiens
  chr16:8768181-8768421
  hyper
agggtcagggtccccacaacttgacgggggtcctcagccgtctcctccccagtcccaggactccctcccagccctcgcggtccctctggtgggtcccgccccagcccccgtctcccccgcccccggaggctggactctgcccccgccccgcctgccacctccctcctgggggcggtggcccgtggcgggcgcacccattggctgtggcgaaagcgagggccggggctggcggcgctgatt

SEQ ID NO: 225012 - DNA, 262 bp, Homo sapiens
  chr16:9186867-9187129
  hyper
accttgctgcattgccgattcagggaagggccgcctgcgtcagggtgtctgccctgcgttccaagtgtgttttctgctccccagcccagctgctaaccttgaataccttgcaacttgagaatcgcggcggtgctctagctagatccaccggaggcgattttgacacctccctccgccccccgggacagatggcaacgcctggggacgtttttggttggcttctcctagaaggggctgttgttgggcacccagtgtatagagg

SEQ ID NO: 225013 - DNA, 772 bp, Homo sapiens; identical to SEQ ID NO: 204120
  chr16:10673913-10674685
  hyper

SEQ ID NO: 225014 - DNA, 114 bp, Homo sapiens; identical to SEQ ID NO: 204121
  chr16:11035552-11035666
  hyper

SEQ ID NO: 225015 - DNA, 416 bp, Homo sapiens
  chr16:11348663-11349079
  hyper
cccagttaatgctgcgtgcacggcgggcgctgccggtcaaatctggaaggggaaggagctcaggtagtcgcggaggacggggttgagggggatgcgagccaggttctcgcggcccacggtggccacgatgcgctggcggcacagctcctgcagcggccgcacgcggcgctggcgcagcggggcccccagcatgcggcgcggcgccgccacgtagtgctccagcagctcgaagaggcagtcgaagctctcgcggctgccatccaggtgaaagcggccggcctgaaagtgcacgcggatgctcgtgggtcccgaggccatcttcacgctaagggcgaaaaagcagttccgctggcggctgtcgcgcaccaggaaggtgcccacgggctcggcgcgcagccgctcgtgcgccccgtgca

SEQ ID NO: 225016 - DNA, 105 bp, Homo sapiens
  chr16:12211191-12211296
  hyper
aaccgtggaaacaggcgtggtcaatacgtgcttcagtgcggacgaaccgtggaaacaggcgtggtcaatacgtgcttcaatgcggacgaaccgtggaaacaggcg

SEQ ID NO: 225017 - DNA, 564 bp, Homo sapiens
  chr16:12897345-12897909
  hyper
aggaggctcctagaccagatcgctctctcggcctcgcctctcaactgcgcccctggaatccctaagagcaggctttgatgcagctatggcggctcccaggccccggtgcagccccggatggtgtccgactggcggagcgcacacctgaacaaaaggttcccccggcggaaggttccgcagccccagagtcccctccccgggtgaggggcgggcagtacctgcgggaaacgcggccagggtcctgcccctggctctgtggaaaacaccccccgcctctgcagccgacatggcgagcgagtttctggccttcacttagaacactgcgtgggtggaagccgcgcgacttcacacagaacaaccgctggacctgtcccgctttgggcgacgccctttgatctcggggcgggactggggcgggacggggaggggcccggtggctcggggcgccactagtgctgcctgggcggagcggaggcgccagcggcccctctgggatcgacctgcgcgcctggcgagtggagactgtctagggcacgcgtgggcggggataaggctttggggtca

SEQ ID NO: 225018 - DNA, 420 bp, Homo sapiens
  chr16:12994899-12995319
  hyper
agctccgcctgggtccttgcttgggcccagagagttgagccatgcgggttgcgctcagggctggagggcgcagccgggaagggcaaggaggccccgcacgcctgggaggggcgatcctgaccagactgcacccagtctgtcttggagtgaaagccatttagtctgtccccatcctctccgagtcatccttcccctgatgcacagatttcggccgccgctcctgcacacgcaccggtgaaaaagctacgagctgagccgcctctgcgctctggacagggctgagccgcgcctcctacccagagagggcgcgggaggtcctgccgcggttttccacctgcctggaaatccgagcggctcctctagcctcggctgctgccgagctcgctcctccccgtccgctcgcctggctcagctctgcac

SEQ ID NO: 225019 - DNA, 960 bp, Homo sapiens
  chr16:12995437-12996397
  hyper
cctcctgccctcccttcattccacaagtgtcgcttcgctctcttcagcgcacttggcgagctggtgaggtgagagggatactgcgagagggctaggggcggccagtccggggctgccggccaaggctaggcgctgccagcccgattctcctctgctctccacccccgcctcacccagtggccggccggacctgcaccccgcgcttgaccccgctcatcctccccccgcccggccgggcgcgctcctccccggccggcccctcggcgcgcggcgcgctggaggcgaacgcgggctgaggcgaacgcgggctgagccgagcgcagtggccgccgaccaccgagcgccccgcgccgctccctgcatgtgcggcccgcggcggctcgcagctcccggcagcagcctcggcagcttcggccgcgcctcgagaggcggccgcagaggctccagcggcggccgagcggccgagcccgggctgggagacaccatgcgccgcgtccttcggctgctcctcggttgcttcctcaccgagctgtgcgcccgcgtgtgccgggcgcaggagcgagcgggacacgggcagctggcgcaactgggcggcgtgttgctgctggcggggggcaaccgctccggggccgcctccggagaggccagcgagggcgctgaggcatcggacgcgcccccgacccgggcgcccacgccggacttctgccggggctacttcgatgtcatgggccagtgggacccgccgttcaactgcagctcgggcgacttcatcttctgctgcgggacttgtggcttccggttctgctgcacgtttaagaagcggcgactgaaccaaagcacctgcaccaactacgacacgccgctctggctcaacaccggcaagccccccgcccgcaaggacgaccccttgcacgaccccaccaaggacaagaccaacctgatcgtctacatcatctgcgg

SEQ ID NO: 225020 - DNA, 180 bp, Homo sapiens
  chr16:12996602-12996782
  hyper
cgctgggggatgtcaccgggaagccaacttcggcttggaacacggagaaggggcgctgggctcagcacaggtgtgggtctgagcgtgttcgtgtgtgtgtgagcgtgtgtgtgtgtgtgtgtgactctgctccctcaccctctggccgcctcctcccgctggtgactgaggcggacttga

SEQ ID NO: 225021 - DNA, 177 bp, Homo sapiens
  chr16:13877530-13877707
  hyper
acacagaccaaccctcgtacaacgtgggaggaggtcatctttgagtgtgaataccaggaggccagggtcactggttccatctttgagaacggctaccaaatgttgggtccattattattctttagtactcacttgttttggaaacacacacgtgctgagtgacgcttttgaaaagga

SEQ ID NO: 225022 - DNA, 180 bp, Homo sapiens
  chr16:14396889-14397069
  hyper
ggggccgggccccggggatcccggactagccgggaaccaccgtccccagagagttaccgccgccccctaaagttgtcagctccctccccccgagaagcaggcagccctggcgcgttggctttagcttctgcaggacgggggcaaaaaaactaggttccggggtgcggagcggggtgtctg

SEQ ID NO: 225023 - DNA, 210 bp, Homo sapiens
  chr16:15952216-15952426
  hyper
cccctccccgggagcggcgggagcggcgggcgggagacaacccaaaaagggcaggcgcggactccttcctgcaggaattcccagcgccgcataccagctctgggctgccggctccccctgactaaatatggtgccgagtggccttcctgctccccggcgtcgggggagggggcccttcacgcagccaccggccgccgttgccccgcgggg

SEQ ID NO: 225024 - DNA, 143 bp, Homo sapiens
  chr16:20817490-20817633
  hyper
ccccagggttcgtccgcctcgggctcctgtcaccctcgggtagaaggtggcccaaggctgaagaccgaggtccagggaggcgcctttccaaccgtgccagagagggcaggtcgcagacgccggggctgcggggaatagaggcc

SEQ ID NO: 225025 - DNA, 429 bp, Homo sapiens
  chr16:21831535-21831964
  hyper
acatcctttcaatccgctcctctaagcgcggtcctgagctttggtcccagacgcgcagaaggaagcggcctgaatcttacccagtcctcgacgcgcccagcgtcttgactgcagaggacgaagcggccgcatctcccgacaaacaacgtgtgaagcagcggtgccgccattgggccgaactaacgcgaccgctgcgcctcaggccggatgcccagctccttccagccacagcctctgtcccggaagttgcgcgtgccagcgcaaccttcagacaatcaggggccccgtgtggggagggcgtatgctctcggcgggctagagcgccgctaaaacgcgctcttcgttctacttggaggacttgttccagccagcgtgagtgcgcgagtgtaaggagagacgggaaggatcggctccatccagccctgagga

SEQ ID NO: 225026 - DNA, 158 bp, Homo sapiens
  chr16:22217232-22217390
  hyper
acatacaaacaagcgatgggcttggatcactaatgattttggaaaggacaggaatacaggaactaagcgagaagcaggcgagaatggcgaggcgcggcgggagaggacggaagttggtcactccctcgaattgccccctcgctgccggatgctaggcc

SEQ ID NO: 225027 - DNA, 360 bp, Homo sapiens
  chr16:22825592-22825952
  hyper
gatcaggaatggggcttcgggcgctgggcgcgctccgaacccggcgcacgtaagagcctgggagcgcccgagccgcccggctgcccggagccccatcgcctaggaccgggagatgctggaaatgcaaccgcctgttccccgaggagccgctgcccccgggaccccctggcactgtgcgcaccctggtcagcagcccccggagaagacggcgcccccaacgcccgacccgcgtggccgtggcagcgccacgcgagccctctaggcgaccgcagggccacagcagctcagccgccggtgccccctcggaaaccatgacccccggcgcgggcccatggagccatggcctatagggtcctgggc

SEQ ID NO: 225028 - DNA, 443 bp, Homo sapiens
  chr16:22825977-22826420
  hyper
gggcgcgcaggctgctcttcgccttcacgctctcgctctcctgcacttacctgtgttacagcttcctgtgctgctgcgacgacctgggtcggagccgcctcctcggcgcgcctcgctgcctccgcggccccagcgcgggcggccagaaacttctccagaagtcccgcccctgtgatccctccgggccgacgcccagcgagcccagcgctcccagcgcgcccgccgccgccgtgcccgcccctcgcctctccggttccaaccactccggctcacccaagctgggtaccaagcggttgccccaagccctcattgtgggcgtgaagaaggggggcacccgggccgtgctggagtttatccgagtacacccggacgtgcgggccttgggcacggaaccccacttctttgacaggaactacggccgcgggctggattggtacaggtaa

SEQ ID NO: 225029 - DNA, 160 bp, Homo sapiens
  chr16:23193738-23193898
  hyper
ggcagtaatagggggcagcaggcgctttgaggcgccttggggtaagtgccgcagagacccagcgggaatgcaggatggcagggcggcctcggggcggcagcaggcactgcgcggtggcccaggaagacgcagcgcggccgggctggggcgcagggcggct

SEQ ID NO: 225030 - DNA, 436 bp, Homo sapiens
  chr16:23194201-23194637
  hyper
agggcgtcggacgccgtcagcgcggtgggtggccgagccagcatcagccggtggcggcttcccggtgcccgggatgctgggacaccttgcccgggcggtagcggccagctctcccgggtctacccacgccgtggcccggagcacgaagccagtcgagagccactcagagtccgggggtctgggggtcccgggccacacctggcctcttttctccgcccagcgcctgttcagcccccttccctgccggggtgagtcgcgtggacctgtccgctactgttccttctaccctctggaatgctttctccggggtgacttggtgcagaaagaagcaaacacttgaagtgggctggttggattcgctccagcgccttcagccggcgctcccccggggcagacgtggcttccgccacaggacagcgcccgctcgctccgcgca

SEQ ID NO: 225031 - DNA, 269 bp, Homo sapiens
  chr16:23313253-23313522
  hyper
tgagcgcgatgcttcgcctaggtgaacgggacaggtacacgcgtggggtgggatggagtgttcatatatgtggcttgtgatatgtactgaggggacgtggggtacactcggatgaggggtctgtggacatattcgtggcgcatgtgggtatcgctggtgtcccgaggtggggagggagaatgcggagcgcgtgcgtgcggggggcgtccagtgtccctgaacctggcgtgtgggggctggagcttattgggaggcgagggaggtggcca

SEQ ID NO: 225032 - DNA, 180 bp, Homo sapiens
  chr16:23313706-23313886
  hyper
gccaccgccgacagcgcgcatcctccgtgtccccgctccgccgcccgagcaggtatgacggcgaaccctggctcgcacccggtctcccgcgcgctgcccggagtccctgcgcgcgcgccttctcctgcccaaccccggcccgcgagctcctgtcccggcctcagtttcccacgggagggc

SEQ ID NO: 225033 - DNA, 579 bp, Homo sapiens
  chr16:23765898-23766477
  hyper
cccataggccacccgccttccagcagggcgtggtctctacagaggaggtcaggtctcccaggcttcctcagcgtcgacgccggggagcgccctggggttgggagcgcccggggcccgcgaaggaggaggtggctcaggtgtcagggcgcaccgtgggaaccggccccgggggaggcgtggaaacgcggggcctgggactcgaccagcctctcccgtgcggatcgcaaaatctcggagctgaaacagcccgttgttcgcagcctccctctgacccgccaccctgcacattgttttccattcgcccgggtcgcgggtgggaggagaggcacgccggggttctggagcttggccgcgcgccaggcttgtggccttcgtccccctggggccactggggcggccacgcctctccggcgggaggagagaacgcgtgggtccgggtggctgctccggcccttccgcctccagctcggccatggggtcgcgcagctcccacgccgcggtcattcccgacggggacagtattcggcgagagaccggctgtgagtgcgcccgcgtcggcggctgcggaggggacggggc

SEQ ID NO: 225034 - DNA, 1714 bp, Homo sapiens
  chr16:23846763-23848477
  hyper
gagacatataaaataaagatcgctcctcccctacctctgcagaacgtgtgtgtgtatgtgtgtgtaagtgtgtgcggccacaagcctttccgaatgagtgacagcgggagcccatccctccaggagacgcgtgcagaatgaccaatgggatggatgggggtggatgggtaccagtctccgcagaggccggggtggaattcgctgcgccccaccccttccacccgctccccttcgccccgtaggtctttccactctcgctcctcccctgggcacatctcctgaacgcagccccgggggccgaggacggggtggggtggggggcgaggctcgggtccgacgaccccgggctgcggtcccggcgctgcagagctgcggctgtgcacgcttagccgcgaggcccgcggtagcccgggcgccgatatgtaaagcagctggcagcgctgggcggggcctgggcgcgatgcaaatgaggagggcggggctggcccggggctccgcctccctcccccgcagctggggccagcggtgccaagcgcagctggacgagcggcagcagctgggcgagtgacagccccggctccgcgcgccgcggccgccagagccggcgcaggggaagcgcccgcggccccgggtgcagcagcggccgccgcctcccgcgcctccccggcccgcagcccgcggtcccgcggccccggggccggcacctctcgggctccggctccccgcgcgcaagatggctgacccggctgcggggccgccgccgagcgagggcgaggagagcaccgtgcgcttcgcccgcaaaggcgccctccggcagaagaacgtgcatgaggtcaagaaccacaaattcaccgcccgcttcttcaagcagcccaccttctgcagccactgcaccgacttcatctggtgagcgcgcgcgcgcagggcaccttcccgggcccccgagggcagcgccgcgccagggaccccctctccgcgccctctgcgccctccgcgccctccgcaccctgggaccccgcgtctccggactcccggctccggaccctgctgcccgggactcccggatggacagtcctgccgttgccctgtccccaccctggtcccagacgggccgccgcggggcgcctcctgccctctcctgctctcaggcgcctctagagcgcccaggggcggcgtcgcgggagcctttgctccacctgactaggagcgcgcggggtctgtgcctgccctggagggcagcgcctcgggtgctctccgacccggggttccctatctctccgcctgcttccgggcgcgaggagccctcgccccccaccccttgtttccggggggggcggcgccctgggtgtccttctctatctccctgcgggcatgggacatcctttctcactcctctgtgcctccgggcagcgccctgtgttatctcccattgcccctccccgagggcctgggttcccctttccactcctcggtcacatcactgcgggcccctttcttccccagtccctccagtagtggggcatcctttcctccttcccagtccccctcccagaggacaccaccgccgcggggtcactctcgccctccctctgaatgcgtctttatctcttctcttttcccgagggtgctcggggcatctatgggtacatctgtcgcctgccttcagcccctaccccgacggaaacgctccccactatcccgccacctggtggtc

SEQ ID NO: 225035 - DNA, 44 bp, Homo sapiens; identical to SEQ ID NO: 204140
  chr16:24354628-24354672
  hyper

SEQ ID NO: 225036 - DNA, 360 bp, Homo sapiens
  chr16:25703094-25703454
  hyper
gtaaacgaggtggggtggggaacaccccaagtgcgtgcgtgctgggggctggggggcacgatctccgttctcccgggtgccccagccctagcgcacgcctccgctcccccgcccccttcgcaggcgcgcgcgaggcgcaccccccttccctcggcggcgccgggcgcgcgcccggccccctcctcctcccctccgcgcctctcctctctcccggcagaaagttagcagcggggaaggaactccgggctgcaacagcgcgcggcggcggcggcagaggctgaagcagaagccgcggcggagccggggaagcgggggcgctgcagacggagcaggtgccgccggcgggtccgcgcgcccccc

SEQ ID NO: 225037 - DNA, 780 bp, Homo sapiens
  chr16:25703468-25704248
  hyper
tgaggctgaggggggggcggtggtgggggggccacccggactcggcgggcagcgtggggcggggggccatgcggccgggctcccccctggcgcagcgggacagcggccagggccgggggcgcagcggcgtcgcttcatgcagccggggcggctgggcagcggcggcggcggcggcggcggcggcggcggcgggggcggcggctgaaaccatgtccgggcagcgccgggggctgccgccgccgccgccgccgccgcgagccgggagccgcgatggcccggtggcccgcacctcctccgcctccgcctccgcctccacctctggccgcgccgccgccgcccggcgcctctgctaaggggccgccggcgcgcaagctgctttttatgtgcaccttgtccctgtctgtcacctacctgtgctacagcctcctgggcggctcgggctccctgcaattccctctggcgctgcaggagtcgccgggcgccgccgccgagcccccgccgagcccgccgccaccctctctgctgcctacccccgtgcgcctcggcgccccctcgcagccgcccgcgccgccgccgctggacaacgcgagccacggggagccgcccgagcccccagagcagccagccgcccccgggaccgacggctgggggctgccgagcggcggcggaggcgcccaggacgcctggctccggaccccgctggcccccagcgagatgatcacggctcagagcgcgctgccggagagggaagcgcaggagtccagcaccaccgacgaggat

SEQ ID NO: 225038 - DNA, 142 bp, Homo sapiens
  chr16:27121251-27121393
  hyper
agccgccccacccgccgctccccgctcccgccccgccgcgcccgctgcaaactttggcctctgcagccccggcatccgctggacggaagagagagagaggagctcctcccgtagctttctcccgaaaacgttttctcttccc

SEQ ID NO: 225039 - DNA, 140 bp, Homo sapiens
  chr16:27280121-27280261
  hyper
cccattggtggcctgcggcttattcgcccgtccgttgagtgacgcacttccggttctccgtttgcgccattgccctggtggttccgcctcgtgggttagatcccaaattacgcccgctctcgatccttaataatgggaag

SEQ ID NO: 225040 - DNA, 1252 bp, Homo sapiens
  chr16:28074002-28075254
  hyper
catctagtgccccgcgaaaggaagaggaggagggggcgagcgtggagatgagttcaggagcggaaagcagcgcgcgcccctccgaccggcagcgggggtgggcgccttcccggggcgcgggagcgtccccaaagccgcggggcgtccgcagcgggtaggagctctgccttgcacctctccacggcggggcgtcccgcacgtccccccatgctggtccccggccccggaacggcgcgcgccccctgccccggaacgtcgcccctagccaggcggagcgctgggagctgggcccaggcggcgggaggagggcgaacgggtccggggctcgggcctcgatggccgcgccgccccgggggagccggagccgagctggccgccgcccgcgcgcactcaccaagcccgctgagctcctcctcgcacgagtaccagatgccggtgtggaaattcctgaagaggaagcggtcgtcgccggtctcccagctgtagagcgcgccgccaggggggccgttccccgaggcggtggcggcggcggcggcggcggcgggggcggcggtgccgttggccgtggcgttggcgcccgagttggggcagttggcgcgcccgccctggccgcagcccggcttggggacccgctgcgtgccctggcaccagtgcgtggtgaggaaagcggtggtggcgaacagcagcgccagcaggttcagggccacggccaggagcgctcggccgcggcggctagtcttcatgccgcccgcgccgccgggacgggactgcaccgccggggagctccgcgcgcgaagttggcagctggcgccccgcgtcagcggccgctgcccgccgcgccccggggctcgggtgcctgagatcggcggcggcggacgcggcgcgggcccatgccccccccaaccccggggtgggggcgcggcgcggggggcgtgcggggcgggctggcggggcgggcggcggtggaggagcggctacggcgcgcccggagcccggagcgcgagtgcacctcggctaggagccgctggcgcctggcagcggccacggcgcagggacgcgcgcccctccgtggggagacacctgcaggcggccggcgacactgttccggagcccgcccgcacggggagagggggccgccacgccgggcgcgggcgggggcctgggagtggagggacgcccccgaaagaaatccgagccagggtgagggtctgagacgcaaggagaatcccaggcaaggcgctcctgagaaaag

SEQ ID NO: 225041 - DNA, 79 bp, Homo sapiens; identical to SEQ ID NO: 204150
  chr16:29606232-29606311
  hyper

SEQ ID NO: 225042 - DNA, 521 bp, Homo sapiens
  chr16:29624670-29625191
  hyper
gatggagaagacgccgcacgcggcccacatcaccagcgccagccccggcgagcctgcctccttaagcacgcccgtgggcgtcacgaagatgcccgagccgatgatggcgcccacgatgatggccacgccgttgagtagcgtgatgttccgctgcagggtcacgccctcgccctcgcctgccggcgccgcgccgtccgcgcgcttggaggccagcatcttctcccgcgcctcttccttctcctcggccaccggggccgctagcgcccgccgcttcgggcccgcacccgccatgctctgcttaccggccgggcctgggacacccgagagccgcagccgagcgaggattgtgcgcgccgctcgccgcccgcagctgcgtcaagaaccccgcccgcgccgccttttaggccccggcccgctggccccgcccaccgtccgcggctcctccccgccccgtggcccggccgcggctctcagccccgccccctcgacccagctcggagcacgtgcgtcctccggcctag

SEQ ID NO: 225043 - DNA, 35 bp, Homo sapiens
  chr16:29691806-29691841
  hyper
ggctgactaaactggcgccccgtaaacccttccac

SEQ ID NO: 225044 - DNA, 180 bp, Homo sapiens
  chr16:29822567-29822747
  hyper
aatccagccttgctctgccctgtgaggctgtgaggttctggctccgccctccccaggggcagccttactggcggcagcacagatacagggcggggccaaggctgtggctgtggagagcaagttccaggtctctggggaattcccaactcggacaggcccagaatagcccctggaggtttg

SEQ ID NO: 225045 - DNA, 136 bp, Homo sapiens; identical to SEQ ID NO: 204154
  chr16:29836031-29836167
  hyper

SEQ ID NO: 225046 - DNA, 160 bp, Homo sapiens
  chr16:29910605-29910765
  hyper
tgcagggggtggggccgagagggccgaaggggccgggtggcctgggttaccctcctgctcaggcgcctgggtccactgggctgtctggaccccaagctaggggactggggaggagaaagacagcttctgggggtttagggtggggtcgaggatcgagggg

SEQ ID NO: 225047 - DNA, 104 bp, Homo sapiens
  chr16:29938093-29938197
  hyper
aacagaggccaaaacgggtagcagtggtgcccgggcaccaaggatggaaggcctctctgaggaggtgatgccgagctgaagctgggaagcggatgtgagggaag

SEQ ID NO: 225048 - DNA, 562 bp, Homo sapiens
  chr16:30596384-30596946
  hyper
gagtgagttgggggcgggggttggggcttctccacggctacttatccaaatgaagtacctgcttcctgtccttggcccctgctgaaagctgcagagctctcaccgtcgggatcctgggcctccgggctccacgcctccacttctccttccacccacgagataaaagcgggtttgggaactgaaaatcctgcgaaggagaaacaatgggctcggctgagcgcacgggaggggagaatgagactgctccctcggcgccccgcttccagcccactagcctctggggacaccgatcaccgcttcccaccgacggactgggggtcccggccggagggcccggcctcacccagcgcgcccaggtggccgaaggtctcccgcatcacgtcccggtacagggccctctgcgctggccgcaggcattcccactcctcgggagagaagtacacggccacgtccgcgaagctcacggcgcccggcctgctttccctcgtcctccggggcccggcctccccgggtacgtgggccgggcgcggcgccaggggcggccccatgggaaaccctttct

SEQ ID NO: 225049 - DNA, 153 bp, Homo sapiens
  chr16:30905625-30905778
  hyper
gcgggagttgcgaccggacgcgcgaggcagggccgaggccgtgtgttcagaccacgtgggcgcggggtgcgcgacagggtctgtgtcctgcgctgcgtgagccgcggtgggtgtccgcgaaacgctgtgtgtggagtgcgtgcgtgtgtccgc

SEQ ID NO: 225050 - DNA, 412 bp, Homo sapiens
  chr16:30959757-30960169
  hyper
cccttcctcgagcgcggggtggggcttcgggaccccggggatgagccgggccaggtcccgcccctccgcgcaggcctccggggggccggggcttaccatgtaggggaggggagatctatccacatacctcaggtaacagggaggtgcgcgggtggggggagggctgggcggaccaaaggccggaggggtggggcctggggatagcgagaggcttgagaatggggccgcttgggggagggaagaggcagcccggcgaggggcaagcgggggacccagccgggctgggcccctgggccccgggtctgtacaatacggtttgctataaaactcaaaatcttccagccggggctgcggagttcgtgtgtgtatctgcggggtccctacctacagatgagtgggctcacctctcctg

SEQ ID NO: 225051 - DNA, 104 bp, Homo sapiens
  chr16:30960209-30960313
  hyper
gtgtccagctgtaccttggagggggctggggttggcgtgcacctcggtggggtccgggcgcttggataacgttcttggtgggtaggggtcgcggggaatctctg

SEQ ID NO: 225052 - DNA, 334 bp, Homo sapiens
  chr16:31075206-31075540
  hyper
cagcgtgagtacgccggtgcttgcggaacactgaagggtcagcaaagctcttgccgcagtcggcgcaggcgtaaggccgctcgcctgtgtggccacgctggtggatcttgagcttggagagcgcgccataggccttcgggcagtgcgcacagcggaagggcagttcgccagcgtgcgaggccaggtgcacgcgcaggcacacgggctgcatgaagcggcggccgcactcggggcacggaaagggcttctcccccgtgtggctgcgcccgtggctgcgcagctcgggtgccgtcttgtaggccttggggcatagcggacacgcatagggcctagg

SEQ ID NO: 225053 - DNA, 104 bp, Homo sapiens
  chr16:31117288-31117392
  hyper
cagaccactgccagtcctttgctgctttgcgcagcctgtcctccccgccaggagcacccttcccgctcccttttaccacgggctccagccgtggctgccttggg

SEQ ID NO: 225054 - DNA, 271 bp, Homo sapiens; identical to SEQ ID NO: 204176
  chr16:31153837-31154108
  hyper

SEQ ID NO: 225055 - DNA, 402 bp, Homo sapiens
  chr16:31453960-31454362
  hyper
tgaggtcccgtgcccgcgtacctcccgcatgacacttgggcgtgcggccgagccgggagcgcccctgccccgcgagccgcccccgagagacacggcggatcggaacccagccgggcgcgtagctccgggaaggggacgtggcgaggacccggcagccgcggggcctgtggggaaacatggtccccgcaagggaccctgggagctggaggcgtcctggcccggcgtccggagcccacggcccaggactaggatgccgggggtctcgggcgtcctccctaacctcagtcatagggcgctccgtatccagcccgccctgcttgcctctcgcttcccccaaatactgccccgacctgtcccctggccctcaccaagacagggagaaacgaccgagacactgaggac

SEQ ID NO: 225056 - DNA, 184 bp, Homo sapiens
  chr16:31487758-31487942
  hyper
gaaggcacggaggccgcgctgagtgccctctccctccctgcagaagatggtgaccgccttgggcactcactggcacccagagcatttctgctgcgtcagttgcggggagcccttcggagatgagggtgagagtgaactcgactcccatcttaaaagctgcgggtcccctcgacgtctcgcccca

SEQ ID NO: 225057 - DNA, 410 bp, Homo sapiens
  chr16:31712179-31712589
  hyper
ggcagctgggaccccgggcgcctcgtcccgtccctgcgcgacgaccttggtcctgccttgagccctctctgggcagtttcgcgcccgcagccccgtgtctccccgcgttgtgcggtgatgacgggaggggccgtaggggagaaccccggctcggggttcgggcgtgggaggagctgtggtccgtggggtccgtagtcctttctttcttttgttaaaaattaaactgaggtttggttaaaacgttaaagattttatctgagcaaataacgacccgtgaatcaggaagccacaaccatggattgtggtttggggtccaccggaggggcttgaaggaaagggtttaataagatgcatgaggaagcaaagccaattcagtaattgattggctacaattacgtagtccccttatt

SEQ ID NO: 225058 - DNA, 1278 bp, Homo sapiens
  chr16:47176462-47177740
  hyper
ctcagccgtaccctcgaaatttttaaaaaaagaacatgttacgacattacaaacacgtcagctttcaatttaaatcagcagggggaaaaagggaagtcctttactgagtggtggtgctgttttccctctggaaattgaaaagacgatttattcagtccgagtttcaggagcaactttgtatcccaatcctaattatctatgtatataaattttcatctaaattaccacctcctgggaaatgcaaagccggtggagtaggttttagagctctgtgctctggacaagccaactgttttaattcccagtacaacaaattagtaagaaccgaacaccagcggcggggaattctgagacctctggcggagcgcgaggagcgccgcgtcccgggaagcacccgagcagcagcgctccccgggggccgggacaagccgggtccgcggcgcccgcgcgccgcccccggagcccgcagtggtgccgcagcctccgtggccgcagcaggtgggacccggctggcccagcaggccccgttccccgccgcgaggtgcaggcgccgcggggctattcgaaaaccactgcacgacgtcacggccgcggcttttattgttctcgtggaattactttttgccatcacatctggagaaagagcggcctccgctccacgacaggaatctcacaactttgcaaagggatgcgcggaattctacggaagcggcgcgagggcgcagcccggagggccctgctgggcccaggggcctcctggccgccttcccgacccgatccctcttcccacacgcgccccgcgaacgtcggccggactcgcaggggtcggaagcggcgcgcccggagagccggcggagccgggcagggctcgcgccccgcggtccgctccgagtagccgcgagccccgccagacaaagaggcgcgtcgggtcccgggcgcgggtaagggacgcagaggcgcgggcagggcggcgcgccagcctcggcccgcagggggcgccgtccgtggccccagccccggtccttacctttgaggaccgagcagagccgctccagggccatgttcccgagctgcccggcgcttcgcgaagggctgaggtagcggcggcggtggctcggcgctcacggctcggcgcggcggcgacggccccactccgtccccatcgccggccagcagctgcctccccgctcccctgaggagagctcaggtcctgcggcccgccatgcccgagccccacagtgggctcccgcgcggcccgagcaccccgacgggcgccgc

SEQ ID NO: 225059 - DNA, 360 bp, Homo sapiens
  chr16:47177860-47178220
  hyper
ggcgcggggcgcccaggctcatttaaggagggagcgcgagcgccgcgtgccggctgcgccgcctgtgcgcatgtgcccgccccgccccgccccgcgccgcgcctcgcgcgcccgccgcggcctcgcgccgtgggacggcgtcgctccccgccggctgccgttagggctgggagccggctgggcgcgggggtagtgagggtgcctctcgccgtggctgcgcggcggcctcgtccgagaggccggcgccggggcagtgaccggcccgtgcccagccgccgcgcagggcgcccggggcagctggccgagccctcgatgcctcccgtctgacggaggcgcccgggaagcgccgcccacctcggc

SEQ ID NO: 225060 - DNA, 1020 bp, Homo sapiens
  chr16:49315445-49316465
  hyper
tcccgctccgaagccccctcctcagctccgtgcgcagctccgccgccgccgctctggacactacacctcttcctcgcactccgggactagcgtcccctccgcgactagcgtcccctccgcgctgtgttcccggagcccctcccgggcctcaggggtgccgcggctgcccagccgcacttggatgcatagccgctgctgctcggtcccgctgctgccgccgcctcctgcccgcacccgccgctgccgccgccgccgccgctctgaattattgatgcagccggcgctgcagccggagcgggcggagagcgcgcgccgggcacaaaggcgcggacctcggcctggccccgcccccgccgcctcccggcccgcctccctccgaggccctgcccccgccccggccgaggccacgccccccagccaatcctgacgcgccgcgctccccaccgagccaatggcggcgctgtccgcgctcggccacctgaccccgggcgccgttgttattaggcgcggcgaggcgggtggcgcgcggcagcagggttgggctctcgccgtgagtcgacgaagggagcgcgggcgcgcgcccgcgtccgcgcactgagagtcgcctcggccgctcgctttctcgactcccgcctcgcgcctcgatcctgttccgcctccctcggccctcctgcccgcccccactcgtcggccctcaggtaggaggcggcgcgccccggggtcgggagtggaatcgctggaggctgcgagtcgcctgcccgcctgtgggcgcgcccgttgggaggggagcgccccccagcgggcgcgggcgcgagggcagccggcgcgctgggcgagcctggctcagggtcccggcggccggggtgcagggcgcgtgcgcgcgcggcggggcggggcctgcgcggctctggcgggcgcacgtggtgcccgggagctgctgggcgggcactcaccgcggggactcggtgcggagccggggcgccgagtgtctccgtgtccctctgccccagccggcggccg

SEQ ID NO: 225061 - DNA, 66 bp, Homo sapiens; identical to SEQ ID NO: 204188
  chr16:50773734-50773800
  hyper

SEQ ID NO: 225062 - DNA, 180 bp, Homo sapiens
  chr16:51185391-51185571
  hyper
agcgctattcaaacccgctcgccttaatcaattagttcgtgatttgctgcagacccctgtctctccgcgcgctggcccaataagccggccgcggggctggctctgcgcgccgcgccgcccgacactgggttaaccctctttgcgaccgcccgggactccgcggcccggccgccgggggcc

SEQ ID NO: 225063 - DNA, 780 bp, Homo sapiens
  chr16:51185691-51186471
  hyper
tagcatgccctccccggaattgagccgccccgggtggggggtggggccgggcggcgagggctggggacccgggctgccggcgcgctgcgaacttcccaactcgggggcgaggcgcgccggcccgcggggggagggagtcccgcggcgggatcaggggggagggcgtcccgtttcgtgagtgtttcttcgtttctttaagagctaccagaaagcagcccacccccacccccattaaaaaaaaaaataagcgagtggggaagagccagccccacgccggtccgcctcccgcccacggctcggcctccctcccgcctggctcggcgctcctccgccccgagttctccatcccctggatcccgggctcgcgggggcgcggagaagaggatccaggaaaggtttgggaacctgatgggtttgtggctggggggaggggcagttctcccgccaccccatcccctccccgccaggggcactgatcctccagcttcttgcttgctccctcgctccctttctctacctcggacattcccaggacaattagggctgaagttttcgggagaagcagccccgagcccgtgggataagggggcggcccggctccgcccaggacccctcccggacctcccccccggctgccccggttggctgcagggcgcgtcactccgcggggaggcggcggcagcggtggcgccgcagagccccgggcgggcggagagcggggaccggcctgggctccgagttcagctccggccggggggaggggaggggctgcggctcaca

SEQ ID NO: 225064 - DNA, 321 bp, Homo sapiens
  chr16:51189084-51189405
  hyper
cagaccctcttttccgttccgttgacggtgcttggccaccctaccccagaaatggaggacgtctccaagtgctctccctgcacccctgtttcctcagtccccagctcaaggccccgctggcccccggccgaggctagaagggcagtagtggaggtttcgttttcttaagcaaggcaaaaagcggcgaaaaggcggcagcggcgccccgggggcgggggacgaggcacatcgatggtatcaacattattgatggggaaaagttcggggcaggagcccggagatcaggttcccagtccctcccctgcccggaggtgggtggga

SEQ ID NO: 225065 - DNA, 364 bp, Homo sapiens
  chr16:55357501-55357865
  hyper
gagtgagggggtggtcagaccgctgggcccagccgggcgtccaggaggagcgcagggaatgggccgccctcccggagcgctccactgcggctctccagcgccacccccagcggagcgcaggggctgcagcccggaccgggagccttcttcaggctccctggctgccccgcggccactgcgggaggcgcgcgcgcgaggcagccaagccttgccttcggaggagatgcccagggatcttagcaagcagcctgcggctgccagggatcggacctggcgagtttcccgacggaatctgagggatcccgaacctcggcctcgagggggcgctatccggcctactcgaggaccaggcagctgcagagaa

SEQ ID NO: 225066 - DNA, 360 bp, Homo sapiens
  chr16:55362704-55363064
  hyper
aggaggtagtggccacagctggggacaggctgacggagttccgaaagggcgcgcagtcactgcctgggccgtgcgctgcagctcgagagggccgattggagcgcagggagtgcggcctggctgcgccccgcttctccttcaatgacccttccggatcggaagaagctgacttcctctcggcggagacaggcagccctaggttgaccatgcactacccatgcttggagaaaccgcgcatctggtctctggcgcacaccgcgacagccagcgctgttgaaggtgcacccccagcccggcctaggccacgaagtcctgagtgccgtatgattcctggacagcctcctgcctctgcccggcgac

SEQ ID NO: 225067 - DNA, 900 bp, Homo sapiens
  chr16:55512771-55513671
  hyper
ctcctagtagtaccgctgctctctaacctcaggacgtcaagggcctagagcgacagatgtttcccagcagggggttctgaggctgtgcgcccagatcgcgagagaggcaagtggggtgacgaggtcgtgcactgagggtggacgtagaggccaggagtagcaggcggccggggaaaagaggtggagaaaggaaaaaagaggagaaaagtggaggagggcgagtaggggggtggggcagagaggggcgggcccgagtgcgccccccgcccccagccccgctctgccagctccctcccagcccagccggctacatctggcggctgccctcccttgtttccgctgcatccagacttcctcaggcggtggctggaggctgcgcatctggggctttaaacatacaaagggattgccaggacctgcggcggcggcggcggcggcgggggctggggcgcgggggccggaccatgagccgctgagccgggcaaaccccaggccaccgagccagcggaccctcggagcgcagccctgcgccgcggagcaggctccaaccaggcggcgaggcggccacacgcaccgagccagcgacccccgggcgacgcgcggggccagggagcgctacgatggaggcgctaatggcccggggcgcgctcacgggtcccctgagggcgctctgtctcctgggctgcctgctgagccacgccgccgccgcgccgtcgcccatcatcaagttccccggcgatgtcgcccccaaaacggacaaagagttggcagtggtgagttgctgcgctggcctcaaggaaccacgtttagacaaacttcggaggcaaaggatgggggtgtctctccccctgccctcggcggtgggcacacagcgtgggggaggggcttcggtaaacagct

SEQ ID NO: 225068 - DNA, 180 bp, Homo sapiens
  chr16:55513971-55514151
  hyper
gcctttggcaaacagctacaggggtcgtttttgctaatgtaggactttgggaacggtgctctggcacacaatttgggtaaacttatgcgcgcataaggatgggagggagcttggtcaaagcggggcttggcaaatttctaggaaccttcggcacagatccggagagggacctttaaacaa

SEQ ID NO: 225069 - DNA, 1620 bp, Homo sapiens
  chr16:56224727-56226347
  hyper
gaaacgaaaagtccgaatctgtccttacgcccccaaggcgaattctggggcgcgcgggtttattccgacccactaccacatcgcgtttcctgaggtaacccggcctcggctctgcggccccagcggctggagagccacggagaaggcgggctacgggcgacaagatggagagccggcccgagagggacagaggccgcgctggcagcgagctggggggcccacctgaccgtcctgcgggcagcccggccccgcgctcccattgacaaggaggtccgcgccgccggcgcgtggggcgggggcggaggcggggtggggcgccccggcgcgcgcccggccccactccccgcccccgccagtcccgcaagcacccaccccgggggagccgcgggccgggagggcgctggggggaggggcaggccgctccgcgagcgcgtgtgcgcgccgccgccggctgacgcgaactccggcgcgcgcctcccccgccccgcgccctccccgtcccgggggcccggcgcgcggccctgctgacgtcagctggcggcccgcggagccgggtgcgcagagccgctggcgcactcgcgcgctgcgctggcctcctccccgccccgggcccaggcgcgcgcgcgcttgttcgctctcccattttttttttcccctccctccctgcctctctctctctccctctccctcgagctcccggctggctgcggctccctggcgctctccctctctctccggtaggctcaccgagcgatgcgagctctgggagacagcgacgccgcctcccgctagagacctgcccctcggcccggccccctgcccaaccctgcccagcgcgcgggggtcggcgaaggcgccgcggacgcaccgacggctgaagagcggcgatgcacatgcactagcagcaccccctaactcactccctccacatcccgcgccgccgccgccgcctcctccacctcctcctccgccgccgccgcctcctcctcctccggcagccgcggcagcaggacccaccctgccccccaccccaccctctgtcggctccggctgcggctccagcctcgactattattttatttattttgggtcgtgcacaagcctcagtgcctgcagtccgcgcctcctcggcccgcgggcgcctcctcccttggctccggagccccagaccccggccaccctcgattcgacaaccccagacccctgccagctgccgcgagtctccgctgctggaatcttgttagcggctgtctttttggagggttctggtttcccgacatttttgtttccagcccaggagaggatatcgtgattttccccccttgagcccaggctctgctctctgggggggtggggggcgctccaagccggggagccgtgccagccgagtcgtgcgggctgtggcagggaaggggccaccatgggatgtactctgagcgcagaggagagagccgccctcgagcggagcaaggcgattgagaaaaacctcaaagaggatggcatcagcgccgccaaagacgtgaaattactcctgctcggtaaggaccgccgctgctacccccatcccccgaccccggccactccgcaccccctgccaccagctcccccaccccactcgcg

SEQ ID NO: 225070 - DNA, 55 bp, Homo sapiens
  chr16:56227984-56228039
  hyper
cgggttctaggcggcgccatgatggtagggagtagcgactcggagacaattttcc

SEQ ID NO: 225071 - DNA, 382 bp, Homo sapiens
  chr16:56228280-56228662
  hyper
ctcccgaggggggacgttttaaaacttcagaagtctgtaatcagcagtggcggactcggagcccagtagaagccccagccacctgagctggatgaggtttcaggcgttgcaagtggtggacagcgcccagccgaggccggaaaagtcgatggggctcagttcggcgacgctcggctaggttcggtgcggtctgggcgcggggctcggagggagtcggcggtgttcggagccgagtcggtgctccggcggagagagccgagccgcttcggagggggtcgaaagcattcggaaatactcgggggaggggagtgcgcaggaggggaaggaggagggggagaggccagagtctgcaaattaactttgcatccgccaaagcaactgc

SEQ ID NO: 225072 - DNA, 556 bp, Homo sapiens
  chr16:56623201-56623757
  hyper
agtgggtcgtgcacgcggatgcggggtgggagtgggggcgcacgcgcgggcgtgggcgagcgggccccggcagtgcacacacacggcaggggcgggcgacagatgcagtgcgtgcgccggagcccaagcgcacaaacggaaagagcgggcgcggtgcgcaggggcgggcgcccagcgggcttggcatgcgcgcccccgcccgaggctataaaagcatcgccacctgctgccactagccaagccgcgcgtccagttgcttggagaagcccgttcaccgcctccagctgctgctctcctcgacatggaccctgagacctgcccctgcccttctggtgagcccccgcccccgctcgcatcctgcgcactgcgcgcccttgtacctgcaaagaaacccacgccctgcgccttcgctcaaggacacttgggggaagggcccctgattccctattcttcacctcgtgaagggcgggcatgcctgtgtcgcggagaacagggagacttggcaccccatctcctcgtgacaggcgtggggacccgagttcgtccacattaaccc

SEQ ID NO: 225073 - DNA, 185 bp, Homo sapiens
  chr16:56642263-56642448
  hyper
tccgcgccgaggcgtccccgaggcgcaagtgggccgccttcagggaactgaccgcccgcggcccgtgtgcagagccgggtgcgcccggcccagtgcgcgcggccgggtgtttcgcctggagccgcaagtgactcagcgcggggcgtgtgcaggcagcgcccggccggggcggggcttttgcactc

SEQ ID NO: 225074 - DNA, 633 bp, Homo sapiens
  chr16:56666028-56666661
  hyper
gtggacagggacaggcaaggcggggaaggaggagaaacgaaagccacattggtggcgggtgctctgcacacgactcgctccctaccacacgccccccgctccgcacacgaccgatccggggactggagcaggagggctgcaccgggactccgggacaggcccagttgaaaacggcggggcgagggggtggggtggagacgcccgcgacgccaaggctggggtcccggaaagcgcggggaggagggtggaaggcaaaggcaacttcggggaaactgggaaaggcggccgggacctcggggacactgcgtaccacccggcgcacagcccctcccgcgcaaacccgagccaaaggggcggtcgagcggcgcactcggagcggagctcaggggatggtgcgcccggcacttatgctgggctcagcccagcccagcccaggaccgctggcggtgcgaacccagccgggcgggtgcaagcgcggggcagggcctctgcgcccggccccctcccctgagtagaaaagcagccgcaggctgtggcgctccaccacgccgtccgggtgggcctagcagtcgctccatttatcgcttgagatctccagccttaccgcggctcgaaatggaccccaactgctcc

SEQ ID NO: 225075 - DNA, 100 bp, Homo sapiens
  chr16:56691992-56692092
  hyper
ccgctggtaaggaacgccgggttccgtgcctggggatgctcgattcccagacaccatagagagtgttcctgggtttgagaaggtcgtattttgagatctc

SEQ ID NO: 225076 - DNA, 270 bp, Homo sapiens
  chr16:56697000-56697270
  hyper
ggcgcccgctagtgcgggaggggctatgctcccggaggtacgtggcgcccctgccaccctgagagctattttctattcccaggtggtcgcgttatcctcatcccccgccctgcaccttcgtcatcagctttgcctctcccgtgtccgtgtgtagctccatcctcgtgctcgccttcttcattggcggaagctgggagccgagagagtgagccgtgcgcagatgtgcggcggtggaggtggcttttgtttctcctccgcgccccctccccc

SEQ ID NO: 225077 - DNA, 319 bp, Homo sapiens
  chr16:57126699-57127018
  hyper
gcggtgagtggggcccgggcaggcggggcagcttggcgtgagtgcccaacttcggccttggggctgggctctttgatccagctgcgggtccgaaggaacccgggttccgcctcggggggctgcggcgctctagcccccgccgccagcgcgaacccggactccggcgcttcggtgactcagctccgacccggccacgcgggggcgccccgccggctcccggactgcggggaagggcgggcggggtccctggggaggggggcgccctcgggggtccgagcccagctgctttggggacccttccacccgccccgaggggctt

SEQ ID NO: 225078 - DNA, 153 bp, Homo sapiens
  chr16:57318465-57318618
  hyper
gcctcccgaggtcgctacggccgccgtcgccgcccctccagcggtgggtgccggctcccgcgccgcttttcccccaggctccggatccctgtgtggctccaggcgctgcaggaggcgtcggggctgggagcctggggcgccaggtgcggccga

SEQ ID NO: 225079 - DNA, 752 bp, Homo sapiens
  chr16:58059829-58060581
  hyper
cccgtgcaggaggcgcgcgctccgggcagcgcccggccccgggcatggacagagggagctgggcgcgcagggagcgccgcgggaccgggcggccggagcgctgagccagacaaaggctccggagttgcgcttgctctcgggagccgggccccaggcgctgggcgccgaggctgcggaacctcgccgggggcagctccggtcggccccctttcccgccggctggttccgagctcccggacctgccctgcccgcttctcctcgggcttgggaatttgccgaggcgacctaggcggctccggcggggaccgggagcccgaggtccgcggcgcgcctgccgggccaggagccagggagcgtcgcaagtttccaaggcgcgtgcgaggatccggcgtgcagtgttccgagctgggctgggcgccgagagcatgggcagcgacccgagcgcgcccggacggccgggctggacgggcagcctcctcggcgaccgggaggaggcggcgcggccgcgactgctgccgctgctcctggtgcttctgggctgcctgggccttggcgtagcggccgaagacgcggaggtccatgccgaggtaagacccccgccctgccctttggctgcgggctgggggcttggagggagaggcgccacgtccgcaggctgggacttggaggtggagggagcggagacgcgccccctgttctgggccgtggcggggaagcaagcggacttggcagtctgcccctccccagctcgc

SEQ ID NO: 225080 - DNA, 105 bp, Homo sapiens
  chr16:58426279-58426384
  hyper
ccgctgctctaaatctgcagacttgatcgattgcttctgcctgggcggtaccgcccgaattgactgctcctgtctgatgcgtccccgggcgcgggaaacgagttt

SEQ ID NO: 225081 - DNA, 300 bp, Homo sapiens
  chr16:58497683-58497983
  hyper
ctcgtccgcatctccgcggtgagtcggcggcgccctcgcccctgagcccagggccagcttctctcgccgccgcggctgctgcgcgcgtccccgcccagcccagcccagccccgagcacgaccccagccccacgcacgaccctagccccgcgagtcccgcaccgactcgctcccgccccatttcgcctccgcgggggcggcgccccctcctccccgcggctcccgctctccttcctcgccttcccggccgcgctggggacccccagccgccgtccgcgaccccccaccgcgacgcccggag

SEQ ID NO: 225082 - DNA, 180 bp, Homo sapiens
  chr16:65156756-65156936
  hyper
tgccttggcccctaccccagccaggtatcagtggcccccgccggtagtgtcacttgttgccactccctcgctacagacccgccagggcccggtggagtgtgcgtttctacgggagaaagggcctaatggggcgcagcgccggagtcctagctccttcctccgctgttcccctcactgacg

SEQ ID NO: 225083 - DNA, 519 bp, Homo sapiens
  chr16:65157159-65157678
  hyper
agagaggaggcggaggaaggtggagacgccagtgggtgaaggctaaaaaggaaccgcctagggggacggggatgaggctgggaaaggagaagagatggacccgcgaaaaagacggggaaggaggctgcggagggaaagctgggcgccacagccaagcagtttgaaagggctagaggggaggagacgggcccaggagttaacggaaaaagaggccgaaaacggaagagaaagcttgggatcctgagcgcatggggaaggaaccccagtgcggggctaaggcaagagcggccgagccctgccctccagctcctggtcaccagcccgcgggtcccgagcgcccgcagccgcccgggtttccacacggcttggggagacgcccgcgggggcgggtgccggcgaggctgccccgggacctaccctcttcggcctgcgcgcccgcgtttttcttgacgactccaggatccgggtggcgctgcgtgcctgcccccagtccgcgtcctgcgcggagaggatgcctct

SEQ ID NO: 225084 - DNA, 704 bp, Homo sapiens
  chr16:66461412-66462116
  hyper
gtaccggcgaacgacacacccgggggcgcgccgcgcggagcctcggtgcgcggggcgggcggatgcgcggtccggaacggaaccgcagcgcgctcggaacggagcgggatcccgggtctcccgcggaccctcgaccccgggctggccactgggatctgcgcgagccgaggctgaccctgatcgcgccctcgggcctcggggaaggggaggtatccaggttttctgcctgactcgagtccccgacgagcatcaaccgcatttggggaacccaagacagcctccccagcagcttgccctcggtttcggggacccctgaacaacccaaccaagaagggaaaactagggcgcactctcggtcggggtgggagaggaaaggggctggggcttcacggagtttggagtttgaacccacccgcacccctttgagctaggaagtttgacccttcgacgagcaggtcgcctggggtatgcccctgtctccgtgcctctgtctcagcaccgagcgtcggagagagagcgcgccctccgcaccttctcccactttgggacagactttcccttgcgctgtcagagggacccgaggctgagtacgaggcgaggcggcaggcagctcaggctggctgcgcagcgctgagtggcaccgccgccgctccccaggggcagggcccaccccacacccggctgactctcgctgcccttcctcc

SEQ ID NO: 225085 - DNA, 360 bp, Homo sapiens
  chr16:66638116-66638476
  hyper
aggcgggtgcaggaccgaggcctggaacagccaacaaagaggccctggaggagggtggggctggccggggacaggaggggtggccaagaaagtcgcaagaaaactccggcccccaagaaaaagagagggcatgggttgcggagccgacatcacggccggggtctttgctgtttagacgcctgggttcccggatcccagacacgcgcacgggcaggaagttagaccggagacagcgagtatagacagcccttctggataggggcagacgggtgggagctccgaaggggtgccggggcggtgatcgggaggtctccagcggcccgaaccagggtgaagaagaaggtggagtctgcggaggcc

SEQ ID NO: 225086 - DNA, 500 bp, Homo sapiens
  chr16:66638521-66639021
  hyper
ggggtccgagggggaggggcgggctggaggagcgggtgggggcggggcggggcgtggcggcgggggatgcgcccctgcgcgagccagtgtcgcctgccctccttccgcacagcccgggtttccgcttccctccgggcgcgagaagaggggagccaggccgagccccggccctaccgccgccgccgccatgtggcccccagaccccgaccccgacccggaccccgagcctgccggcggctcccgtcccggccccgcggtccccgggctccgcgccctgctgccggcgcgggctttcctctgctctctcaaaggccgcctcctgctggccgagtcggtgagtgcggcgggaccctcggccgccccgctaggactgcgcggctcctttcggaggaggacgtcggggcgcgggtggggtccgggggcggccgccgtgctccgataccccctctccgcgccgcctcggccgacttctctcgggcgcctggcgaagttgggtcgag

SEQ ID NO: 225087 - DNA, 293 bp, Homo sapiens
  chr16:66730106-66730399
  hyper
cacgagggagagggggcgcgaggagcgggctccggcctgggcaagcgggtacgcggcggaggccccgcagcggggcggggagggaggcgtgcggctaggccgccctcgggcacctggggccccgcccggcacctaccacttgggcgaccttgaggcggccgagcgcgccgcgcaggtagtcggggtcgcagcgcaggccggccagcccgcggcgctggctcaccggctcggtggtgggctggtacgggctgctggcgcccgagatcatggaggtgctcgaggcctcgccctcg

SEQ ID NO: 225088 - DNA, 623 bp, Homo sapiens
  chr16:66958744-66959367
  hyper
ccgccgaagatgcgcgccagggcgctcttgcccacgccgggcgcccccagcagcagcaccttgtaaacgctctcgtctgagtcgctgccccctgagctgagcgagtcctcggagtcctcgggccagtccagcctgggaccctgggtccccgtcccggccgcggccgccgtcagggcacccggggtcagcgccgcctgcaggtcgcgctcgtccaccggcatgctgcggcggtgcagcggcggggcggggccccagggtgtgctgccccgacggcgctcgcgctcctggcccccaccgcggctcccgcccgctccgctgccgccgccgttcagggtcatcgcgtccgggaccgtctaggggatcaggaacccgagtggccgtgtaagccgcgagggaggcgggacccggggcgcacctgcccaacccggagtcaggcgggatgctccggccgaggtcccgccgcagccctcccccagcccccaggtcgcggcgccctcacccgggacccctccggacctggcgcatccatctgcagccgccccgaccccgctccgccaggacactcacccactcgcacacagacacgctcaggactaggatccggattaggaggccacgcactc

SEQ ID NO: 225089 - DNA, 453 bp, Homo sapiens
  chr16:67183854-67184307
  hyper
ccagtgggttcgcgcgccctccccaacttcgtcggccccgcccgagcctgcgcccctgggcacgcccagcaagaacacgcggcgcaccagcgccccctgcacgcgaccctccgcgccccacgtctggcgcacggcttggcgccgctcgaagtcctctgccaccgacttgacagcaataagcaggtccgggcggccaccgggtgcgccgtcgccgcggcacttgtgcggctggttaatgagcagtggaaaccgccgctggtccttggcgcgcaaatagcgggcgaagtcaaagggtcccgtaggcgtgggcggcgccggtgtgtccccttcgtaggccggcggggctgcacccgcgtcgggtaactggaacgcgcggggtccgggggtgggcctcggtgccgccctccctcgccctcgcggcgcgctcgccgtcggggccgcgccgtcgcgctg

SEQ ID NO: 225090 - DNA, 104 bp, Homo sapiens
  chr16:67184538-67184642
  hyper
tcctcccggccgtgtcgcaccgccgggaccggcagcctgaagggacaagaagttcacccatgtagccaactcccccgcggcctcagctccggcccaggactgcg

SEQ ID NO: 225091 - DNA, 334 bp, Homo sapiens
  chr16:67189018-67189352
  hyper
agaaaagtctgggcaggtggcggcggcggcggcggcttcacctccgacagagagggcaccgggggctgcaagggggccgaagcgacctccccgtcgccaccccgggcccccgagccgcacttcagatttcgcagcgcatcctccagctcagccagttcttcatcccggagccggtcgggctaggggaatggaacgtgccgtcacgggggacttaaccgcggatccccgccctaccccatcctgaccctagcccggccgcacctgctgggctaggatgcaactcaaacagcgctcctcgtccgccagcaaagcgtccagccgctcggcgccggcg

SEQ ID NO: 225092 - DNA, 215 bp, Homo sapiens; identical to SEQ ID NO: 204249
  chr16:67280008-67280223
  hyper

SEQ ID NO: 225093 - DNA, 240 bp, Homo sapiens
  chr16:67281281-67281521
  hyper
tctccgtccccgcggtcttccccgcccgccatggctctgcggccggctcacgcagcgcgcctccgagtcccggccccagtgcagcttctactcaaagcacactgtagctccgcggttcgggcccggccggaccggacgcggctggaggggcggggccagacggaggcggggccgaggaagggggtggagccaagattagtccccgagtgcgcgccaggaggtaaccactgccggaggcgg

SEQ ID NO: 225094 - DNA, 201 bp, Homo sapiens
  chr16:67563142-67563343
  hyper
ggccctggcacgcgcgctccctgggagcccttgctgccttcgccgcaggggaggctgggctggaaatggggagggggcgacgaagggtgcgggccggcctaggagctgagctaatcctcctagctctaggggccggcctaagcggctttgtggccggccccgaggtgaccgagcctgggctggagccgggctctccgccca

SEQ ID NO: 225095 - DNA, 65 bp, Homo sapiens
  chr16:67563576-67563641
  hyper
ccagccagttctaacgtgtgtccaggctggccgccccagcacctactgtgcgcagcctcgtgtaa

SEQ ID NO: 225096 - DNA, 145 bp, Homo sapiens
  chr16:67564103-67564248
  hyper
cccctctgcgtcgccgctcggactcagccctggccaggcccggcccgggggaggccgcctggctcccagcgcgcggccagggaatgtaaccagctgaccagggagggggccggcaggaagtgaggccacccgacagcctccgccc

SEQ ID NO: 225097 - DNA, 180 bp, Homo sapiens
  chr16:67571809-67571989
  hyper
ggcgacaaacccgcaccggctgggcctgtcgggcagctccgcagggctccgagcgtggccccgccccgccccgtgacctccttgggctcccggggtggggggccccgagctccgggtgccctggggggggaaatcgggggcagggctggggaggctgccccgcccccgggtaaacaggcg

SEQ ID NO: 225098 - DNA, 325 bp, Homo sapiens
  chr16:67678709-67679034
  hyper
ggaggggaccagccccggtgggccgcggggatccccaggcaggcagcgtcccctggtgttcgcggcagggactgcggggcggggtggaagccgggggcaaggacccgctggaggcccgccacacccgcgaccctcccggccacgccactgcccaccccgacgtctaccctggcggagaagctcctgggcgacggggcgggcgggcaggtgggactcggcccccctcccacaaccccgctcccgggcaagctctcgagccgcgaggccggggcggggaggggccgggccgggggcggcctggcaggaagcggcgcgcaccttccgc

SEQ ID NO: 225099 - DNA, 649 bp, Homo sapiens
  chr16:67700713-67701362
  hyper
cttgtagtttcggccgagggtgggctccgcggtcgccggtttctcttcccagctctgccctcgcttgctggccggtctccggggtcagcgcggggccaccatccagccccttggggcccgccccaagcagctgtcgaggacgcactcagcctgcgcagccatggcctcggcaggggcggagaggcggccgggggtccaggaggcgacggtcgtggggcagggacagctcacggaggagcccggcagcgctcagacctccgaggtgaccgtcaggctgtttaaccttcaaacacagggccgcagcgctctgagaggtggaactgagcgccccgacccgctaactgccaggctgggccctccaggcggggaggggcacaggctggtgtccttattcccgtttcggtgtctaacgttaggtgttcagtgacggatccctatgtcctttgcccggccatggtgaccgatggcctgtgtgtcatctctagtgtccagtggcgggagaccagttcctggtgcctgcccatgaggcccgcggaacccagagtgaagaccagcgcccagcaggcgcagcttcggagtcggagctccaggaggaaggacccaagctgggggaggagcggcccaagccgcatgccggggcgctagagga

SEQ ID NO: 225100 - DNA, 681 bp, Homo sapiens
  chr16:68118298-68118979
  hyper
ccccagaccccaggaggaggcgtcttgggccatctcgggaaggctagcttgctcgggaggggcagatcacgaaaacggttctttaggcagtgtcacttcctctccactgccagccacccaatttaggcggctccatccctcccgctttcatggatatgcagcaggatgcagagagcacagagctgtgattggcacgagctcacaacgggctttcccgctcaatctactcaacttccagcaagggacaggccctgcccattggggttcgctgaggcctcaaacgcgcatgctgtcaagggagcagctgcgggggcccgctagtggggacaaaggcgcagccaccggggcgaaagctccgccccgcagagggtgggcctgcggcgaccgcgagctcagagtccggacttgtcgcgcaatctgtctccttcggttccaccccaacctagctggactctcggtccggtccctgccctctggagactcagccattaaagttgaggtggggggatgaggatgtgggcggcgtccaggtaactctgaggggccctgatgccttccctagagccagccatcaggagtaacacgatgcgcccccacatcaccgaacccagaacctcagtgcttcagcaccccttcctcgacatgagctccgcccaatgaggagaagggtcttctgcattg

SEQ ID NO: 225101 - DNA, 490 bp, Homo sapiens
  chr16:68269813-68270303
  hyper
caggtcccgtcccagcgcacccgccgtagccccgaagaggacgaccagtgatccgggccaggggcaggggtccgcggcggggtcggccgcggggtcagggcccgggggagggggcggcggcggcggcggagtcatggccgcagaggaagggggctctcggccagacacgcggaccgacgaggcgcacgcacgcaccgaccgaccgcagacgcggatcagcttgggcgggacaccgtgtatcgggggcggcacctgcggcccggctggctcagtgggcgctgccaagacccgcccgtggcgccccgcggggcggggcggctaccggcccacgccctctccaggcgagttacctgccggccccgccggccacgtgaccggggcggctccgggaaccttgggggagggccgccagaactcaacccaggacgcaagagctcacgctcccggcctgggcgcacgcttaggatccggattcctacttccagggctg

SEQ ID NO: 225102 - DNA, 511 bp, Homo sapiens
  chr16:68270867-68271378
  hyper
gcgagcgctctggccgatggggggctagcgttgagcgtgtgtgcgcgcatgcgggctgcagatcctcccttttccatcccgcacctacaacccaattgacagccccgcatttggggctcccattcctccctttgcccagtggagcttggtgaggctcctttatggcgcgtttcccggccgttccttactttcccaaactctcccagggaggtgactgagaaactgaataagtgactgagaaactgaataatccagcaggaaggagggggctccagcgtggcgggaactgagtcacgcggttgcctagcccgactcgagactgagacgggagccgcaccacgcgctttcggacaaggagggtgctgcggcccggcccctggacaatggagagagcggggcacccgggcgcatcaccagagctcatgcccgggaaaggggcgaggcccggggggagagagctcagcgtagctccacttggcagctaaagaaacaggcgcccgggacggaaatg

SEQ ID NO: 225103 - DNA, 57 bp, Homo sapiens; identical to SEQ ID NO: 204267
  chr16:68298829-68298886
  hyper

SEQ ID NO: 225104 - DNA, 703 bp, Homo sapiens
  chr16:68482062-68482765
  hyper
atgataaaacgaaaactaacccaagctgctccgacctccggcgcccggccacgggaggcccctagtcagtcggcggctgtccgggacccgcggtcctgagagcaacgagaacacgtcccgtcaactccccagcccctcacgcctcggttcgcccgctccccaagaaaacaaaagcgaattcagcagcactgacctctgacggcgggcgggagggcggtcagcgcccggcagcgcaccccgctcctcccggctcctcacagcccgggctcccggccgcagatctggcggcggccgcagcggcggcggctctcgcggctctcgggtccggagcctccctcagactcagcacctggagcggcgaacagctccgcgcttcattcctctgaccccgcctccctcgcgccgccggagccaatggtgacccggaccccgcccaggagtctgcccattgggggcgtcctcccctctccctccggccccgcccgcaggttcctgggtctctccttcaagaccacatcccccagagaccggcggagtttcgcacagccttctgggacttatagttctttaaggacgcggagtgggctcacgccgcgggtaggcaaacagagcgggactgcatttcccagagtgcactgaagacacggaggcgcggagcagggcgggaggaccgtttccatagcaaagacgaccagccgaggat

SEQ ID NO: 225105 - DNA, 241 bp, Homo sapiens
  chr16:68544137-68544378
  hyper
taagggagagggaggaggctcgtggaccaagaggacgcactcggatctggagttctccggcccggacacccacgggccaccgcgtcgaggcagcgcgagccccgggcgccccctgcaggttgtacgggcctcagctgcgcagcgcagacggaggagggcgctggcggttaagaactcctacttgtcaaccggaaaaacatcccccataaaaaaacggtcaaagggccgggacagaagcatt

SEQ ID NO: 225106 - DNA, 91 bp, Homo sapiens
  chr16:68564224-68564315
  hyper
gcggagaagagaggtcggtgcctccaacccggggccgcggtcgaggggcgcgcgtcgttgctctgggactcactgtcgaccaacccccatt

SEQ ID NO: 225107 - DNA, 660 bp, Homo sapiens
  chr16:69139815-69140475
  hyper
ccgtcttgccttggcagctggtcccagggcgattgcagagccgcgtggccttcggccccactcgggggacccagcttcggagagggcgcaggggctgcgagtcttgcgagccggagccgcgtccacccgggactaggcgtccccgccgagcgctggcttgtggcgctccctgggaccgcgcggggtcgggggtgcgcccgcgggggccctcccactctggtcaactttcccggccccagggccgggggaggcgcctctcctggcgggcacgcgccgggtacttaagggcggctcggctgggcaggcggcagtcggagcgcgcggcggcgcggagcggagcgggaggaggggcatggagccgccgcgggcctgctgagctccggagcgcggcagccggcggcacggtgagcgcgggccggccggcacccaggaggggagggccgcgcggggctgcgccgaggccggggcgcgccgggtggcaggggtgcctctcgccgagccccccgcacccggccagctcccagccctgcgggcgccgcgtccggcgcggggaggcgggttgggggcggcggcagccccgggcttcccggcggccgttcctgcagccccctccccactgacccctcctccctttcttcctgcatcctctcctcttccagc

SEQ ID NO: 225108 - DNA, 89 bp, Homo sapiens; identical to SEQ ID NO: 204274
  chr16:69373055-69373144
  hyper

SEQ ID NO: 225109 - DNA, 105 bp, Homo sapiens
  chr16:70472498-70472603
  hyper
acgaactagggagtggactggaagtcgggaccagggcagagagctcttccgagggctggggctggggctggggttggggttgggggctgccggcaaaggagcgga

SEQ ID NO: 225110 - DNA, 637 bp, Homo sapiens
  chr16:71459795-71460432
  hyper
ccctgacgcccacccgcggctgaggtcgcacgctccagcctcagtccaccctggaaccctgcatttggcagccacgagagcccatctcccgcccaatcaagaggccgtcgccctggagacggaggaccccagctggggtcaccccttgcagcctcctctcccgtgcttgccggttcttgccaccctccgccgcttgcaccggacccaggcgctcatcccccgcttcccccgcgccccagcccggtcacgcctcggagcttgtccccacctggccgtgctcagagtctgcctgcccggcgtcccacacgcaccgcagggccccaccgcctcttggtgagccgcggtggctcgggtcccgggtccccaataggctgcgctcccggcaggcagctttcttcccggcgcggggctcgttccctgaggccaggccgctcagtggccgcaagagcgaccttcccacatgtccccaggtgtgcgcacaagcccggggtgagaccagaagctgctgcctgcagagcccgaccttgcgtagatgactccgcgagtgcaaggggctgcaggcattttcttacaggaggtagcaagcttgtctaagcagaggccctcttagcgcagtgggcagcgcgtcagtctcata

SEQ ID NO: 225111 - DNA, 149 bp, Homo sapiens
  chr16:72699010-72699159
  hyper
cggcttccgggtgggcggcttgaggtggcttccggccgccaggcgagactccgcgggaaaactccctgctagagagactaggagatttggggctgcggccgtttcctccggagcacccacgggactgtgtgctggggtccctccaccgg

SEQ ID NO: 225112 - DNA, 566 bp, Homo sapiens
  chr16:73091551-73092117
  hyper
agcggcgcagccccgagcccccgggagcccctagtgtccagggcagagtcccctctgggcgctcgcggcgctgccagtggggcagggcggagagcgcacaggtagaggatcgcgcggccgcctcgccccctccgggaccccgtggctccgaacgggctcccgcgtcgccggcaagtcgagccccagcgcggaaggcgctcgcccggccagcggtggcggccgcggcagcagcagtggctgcgaccgcggcgactgctccgggccgggtgcgcgccccgcgcggctgctcagcccggggccccggcgcctctcggggtggggcaaagttgggggccgggagcggcgggggcgggggcactcggcaccgcggacccccccatactccccccaccgccggccgccgcctttgtctccgagctggtaccccggccgccctcccgccctcggcccgcgccccggccggccctgcctggcggcgcctccaaactcgccgcgcgggcctcgccccgggcgcctccaccctcccgggggtcgccggcggccggcggcggcggcgcggggccggg

SEQ ID NO: 225113 - DNA, 152 bp, Homo sapiens
  chr16:73092394-73092546
  hyper
gggaaaaaaaaaagagggaaaagttgccacttacgcggttgcttctccggcggcggcggctgcagcggcgctgctggcgacggcggcggcggcgggagctggcggcgcttttaatcccgaaaagaggcgctcgggccgcggagcccatcaag

SEQ ID NO: 225114 - DNA, 105 bp, Homo sapiens
  chr16:74659520-74659625
  hyper
gcccacaacccggacttgtgtatatgctttctgtgctatcattaaacttgttctcctctattccctgcaactccagtcaatgaaagttagcgctagcttctagag

SEQ ID NO: 225115 - DNA, 79 bp, Homo sapiens
  chr16:74808949-74809028
  hyper
gtggttgtctgggcggacatcctcggtggcctgatcgctgctggaataacttcaactgcttccacggaggagctggccg

SEQ ID NO: 225116 - DNA, 40 bp, Homo sapiens; identical to SEQ ID NO: 204287
  chr16:75018963-75019003
  hyper

SEQ ID NO: 225117 - DNA, 363 bp, Homo sapiens
  chr16:75033799-75034162
  hyper
gggcaccggcgactccgagagggcgcccggcggcggagggtctgcgtccgactccacctatgcccatggcaatggttaccaggagacgggcggcggtcaccatagagacgggatgctgtacctgggctcccgagcctcgctggcggatgctctacctctgcacatcgcacccaggtggttcagctcgcatagtggtgagtccgcgggtggtggaggcctcggagggagggcgcgccggggcgccccaagccttcgcgtgcgtgccaaggtttgggaatgtagtgcacgaccgggatctgtctgcattccctttggttcccgatgccaagggataaatgggatacctaccgtctggaaactagg

SEQ ID NO: 225118 - DNA, 180 bp, Homo sapiens
  chr16:75263571-75263751
  hyper
ttgctgtagtgggtcacctggctgcgcacgtcagcagccttggcctgccgtgacagtgtgtccccgatgaacaccagcttgtgggcgctgaggatgacgaacttgctgtgcgccacaaagatcttgggcggctggttggtggccacggcggtaaagaaggcgtccacggcgttggtcagt

SEQ ID NO: 225119 - DNA, 161 bp, Homo sapiens
  chr16:75299751-75299912
  hyper
gggcctggcgggcagcggcgccagcgggctgggggctcgggtccgcccgcgccgctcagaggccccgcgaggggtcccggcgctttccggctcctccggctcctgagcgttcccggacgccggactgtccggccgctccagccgcgccgcgcatgcgccgc

SEQ ID NO: 225120 - DNA, 95 bp, Homo sapiens
  chr16:75529239-75529334
  hyper
tactccccgcgcgccggccggcaaccctcggcgctgcccggtgcagcccgcccgagcgcacacaatgaggcgctttcagacgtggctgcggtccc

SEQ ID NO: 225121 - DNA, 165 bp, Homo sapiens; identical to SEQ ID NO: 204293
  chr16:75529727-75529892
  hyper

SEQ ID NO: 225122 - DNA, 360 bp, Homo sapiens
  chr16:77246636-77246996
  hyper
tgtggggagcagggcggccccggggacagaggaagccgcggtggaggcctagggcagacgcgggcggacgcgaggagcgtaggaacctggtccgcagcctcacccagcccccggcaggccggacctgagctcccccgcgctcgcgacgaggaggatcccgagccgccggtggctgcccctgacgccctctaggccagcaggacccgcccgttcccgaccttccctcgagacccgccaagaaataaaggcgatgatttccgaccatgctcgcgttctccgcggagtctgtgctacaccgtggagcggggcggggcgtgctgggatctcgaggcggggcctctgccggacccctcccaccag

SEQ ID NO: 225123 - DNA, 283 bp, Homo sapiens
  chr16:77247377-77247660
  hyper
tcagatctgttaaatgtgtccgccactctggaggccggcatttgggacccaaatccaaaggcacccagcagcaggctgcggccattgactgagcatgtactgactaagcaggcatttgccgattgcctgctgggtaccaggcactgttctaagcactggattttaaacagcgcggtcagcgacggcctcacctaggaagtggtatctgagcggagaagcgaggtagagaagcgagggggtgagccctgtgggtgtctggggaaaggtgggcctggcagaagac

SEQ ID NO: 225124 - DNA, 959 bp, Homo sapiens
  chr16:77468256-77469215
  hyper
aaggaagggtcaaagtgctgcgaaaggcccttcttggggatggggggcaaatacgaaccatcatttaatccgctggcgccgctgctgctgtcactggctaaggccgcggcgaccgacgcacagcagaggcagcacagctggagcgcctgcaagagaaaaggtgacatcgcgcgtgaggggcgcggcggggctggcgtcgggcgccccctgccacccgctctcggagctccgctcggcggcacctgccttggccacgcgccccagtcccgccaggcccctcggcgggcccgaacccgcagccgggaaggcacacgcgagcaggagggcgcactccatggtcaggtgcggacgcggcggctgcgggtggccagacgcggcaggcggagcgcacgggcggcgcgcattctttccgcggccccggagctcggcgccccaggtgcggctccaggtgagagccgccgccgttcacatcgcagcgggggcgcgctgggacctcccctcctccggccgcctgcgcgccctcccttctcccggcgcgggcctgccgagctgcagtttgcggcaccccagagggtacggggggctccctgggccgggactggagcgcaaacggttgggagactgtcggtgtctgcccgcccgtctgtgcgtctgtctgtgtcggtgtgagcgtctgaggcgatggggaagacagcgccagctggctcccccagcgcgccggagccgagcgcccgcctctccaccgcgcggtgattggcgaccagcggctcccgggctcgtccgagcccccgggctggtgcaagggcgtgggattcccggctccagctctgagggagggggcgaagggggcggggaggctgggtgggagtgatagggagggagggaccgaccgccatgagaaggaggggagcgcccagggtcaggcttggaaaacgtaatttaagcgcactgggagatga

SEQ ID NO: 225125 - DNA, 104 bp, Homo sapiens
  chr16:77747330-77747434
  hyper
accctgcgtgtataatctgtgatattatgcatatttatgcatagtatcctcacgatctttttgctaatgtcacagtaagtgtacacctgcgatattaactatgg

SEQ ID NO: 225126 - DNA, 861 bp, Homo sapiens
  chr16:77822068-77822929
  hyper
acgacccaatttcccgactatcccgcccagcctcgaagatgggagggagagagggcaaccttgtcgcggtaaggcatcctccaggcccagacattagtctcggtccatttcaaggcacccgagcctgtgccgtatataaccaagtactgggcccacaggaagggggatgacagggtggtctctctaggctcgttttagtcacagatcttcggcaaatttgggtttagggccgcgatcccgaccctaacttgggactatttcaggaactggagttgaggcttcgttgggacaggaaagaagggtggggcgggggtgaagcgcttagggcacggctcttgtgaggattacggcggaggctgtggaccgcggcggcgctcgcagaggctgcagccattgcacagccgagcatcccacattcaacaggaggaacccgcgggagaggagccccactcccccagcgccgcagccaccgcagccaccgcagcccgtgcgccccgcgccctcgagcgccatggccaaggaaggcgtggagaaggcggaggagacggagcaaatgatcgagaaggaggcaggcaaggagccggcggagggcggcggcggcgacggctcgcaccgcctcggggacgcccaggagatgcgcgcggtggtgctggctggcttcggggggctcaacaagctgcggctcttcaggaaggccatgcccgagcctcaggacggcgagctcaagatccgcgtcaaagcctggtccagtatccgcgcctttctcgctttctctctttttgcgcgctgggcgctggggagggggtgggaaagctgcggctgggatgctgcccgggtagaaccgccgcgcgcaccccctcc

SEQ ID NO: 225127 - DNA, 40 bp, Homo sapiens
  chr16:78139962-78140002
  hyper
tgctgggattacaggcgtgagccaccgtaccccgccactc

SEQ ID NO: 225128 - DNA, 105 bp, Homo sapiens
  chr16:78322868-78322973
  hyper
aagcaaaactaacacgcagtgggaaggttctgcttttctcacaaattctcggttaacacaaggcgtgccaacagctggtagagcgagagtcagggtgccaggctg

SEQ ID NO: 225129 - DNA, 32 bp, Homo sapiens
  chr16:78425003-78425035
  hyper
actgtggaaccacccgccgtctgccttctgtg

SEQ ID NO: 225130 - DNA, 103 bp, Homo sapiens; identical to SEQ ID NO: 204305
  chr16:79636191-79636294
  hyper

SEQ ID NO: 225131 - DNA, 180 bp, Homo sapiens
  chr16:79804255-79804435
  hyper
cacgcagcgagtgctctcgcgagagttcaccgagttgataaaattattaaaacacaaaatacacatttgcgtgagggggaaaaaatacccgcttgtccgtcctgtcccttcaggctgcgcaacgctggagggcgatgggagctccacacaggtgggacgagcctagcaggtaaaccttcc

SEQ ID NO: 225132 - DNA, 251 bp, Homo sapiens
  chr16:79804534-79804785
  hyper
cgccgccgcttcccgggctccagccgcggcccagaagaggaggagcccagacgcccttcgcgcgccattggtccatccgcctagcaacagccgcggccggaccaatgggagccgcgaagcggccggccccgctccagaaacttggctgcggagaagttcgctgtcccagccaggaaaacaaaccaagagacccttcacaccccagccctaagttttctttcttaccctgcctaccctccccctttcccttt

SEQ ID NO: 225133 - DNA, 259 bp, Homo sapiens
  chr16:80837325-80837584
  hyper
gcagcgccccctttcgcccccagggagcacgacacccgcaagggccacccccacgcccgagcccggagggcgtccgagctggtgcgggggcagcaggtggggggtgagggaggtggcccggggaccccggggagcggtttggcggttgtccccccgaacccccacccagcctcccccttcgcagccccccgggaccccgcctcgccccggccaggctccgctccgatcgcccgcccccctcctcccccgcgcccccggc

SEQ ID NO: 225134 - DNA, 180 bp, Homo sapiens
  chr16:80837617-80837797
  hyper
ccgccggccgcggcgcgcccccccgcattcccagcacgtccggcgccgacttttacctgtactttctgtactcgaggcggctcgtcgggcgagaaacacctccccgggaccgctacctcccccgccccggctccgcccggcttcctccttcccctccaaggccgcaaagtagatggagta

SEQ ID NO: 225135 - DNA, 180 bp, Homo sapiens
  chr16:80837952-80838132
  hyper
ccggccccggccccggcccggtccccgccgcccgccgccgccgcccgccgccgcccgctgactggggccggcccgcgcccccgcgtccccgtacctcgtaaaggtccccagaagccatgccaggctgcggaacttggctcgccggtgtgcgcgtctgctcgctcgcgccctccgtgcgtg

SEQ ID NO: 225136 - DNA, 96 bp, Homo sapiens
  chr16:81813402-81813498
  hyper
tgtgcccagagctcgcggacgctcggagccacacttccctgtctcacttcggtggttgcgggtggcgggtgggagcgataccgcgggaggcgcagt

SEQ ID NO: 225137 - DNA, 843 bp, Homo sapiens
  chr16:84650988-84651831
  hyper
gcgccaggggcaccccatgtggccaccggttcctcccgggttcgctctggccggggctccccgggtgcagacaacctcccaacgaccgcgcatccgcccggcaggcgcgcctccctacctgtgcactgctggatgaagtgctggtactccgctccctgctcgccggggacgatggtggagccgtcatatttaaaagtcaccctttgggttgggagaagaaaaaaacacacacacacatcagcgctggtggccgcgcgacgcggcgcttgcagaggacaatctaacagacgcgctggccacggagaagcccgcgggggcctggcacgccgtcccggaataaggcgaggaagacagcgcgggaggcccgaatccgtcccgcctggaggccggctcggtgcacgaggccccgcgcgagcccggggagcggggcgtggagacgaatgaaaagttcctaccagatgacggccgagccgtcgtcgcgcaccaggttgtacgccgcccggcaagcctctttgtcgatcttggtggccatcgccgcggagccgcagcgggacactgtccggggcggccgagcgcgcccctggccggcggcggggatgggagcgcggcgggtacgcgccgagggcgcacgggctggcggcggtggcgacggctacgcggcgcctgcaagctgcgagcgcggcggcggcttccactgcggacggagagcgcgcggggaccccaggccgtggcccgccccgcccccccgcgcccattggccgcccaggcggcggcccgcctcttcattggccgtcgggctgcgggggcggagcgtcttgattctctggcggccaatcccagacc

SEQ ID NO: 225138 - DNA, 97 bp, Homo sapiens
  chr16:85143894-85143991
  hyper
cagctcggggttctcggagttggcaaagtcgatgagctgcttgaccagctggtccgccttgtcccgcagccgggccgtcttgcgcgtgtaggcggcc

SEQ ID NO: 225139 - DNA, 240 bp, Homo sapiens
  chr16:85202730-85202970
  hyper
gccctccgcccctccccgcccctcccgcccgccgccgccccgccccctcctccccaattaaatgaccccacgccttggcaggcgccggagctcgcacatgcggctgccgctccagccgcccgggccccgccgccgccgccgccgccgccgccgccgccgccgcgttccgggcgcgctcgccgcggcgccgcctcggcccgcgccgccgccggggggtgctcggcaggcccgggggggcgc

SEQ ID NO: 225140 - DNA, 240 bp, Homo sapiens
  chr16:85589963-85590203
  hyper
taccaggtaagcgagccgtgcgcctccctgggtcccgcgcggcgccggcgcgcccgggaccctccctcacccgacccccctccgccagacccccgagccagggtcggggcattgggtccgccggtgccccccgcagacgcgcgcggcctcggatcctcccgctgcggtcaagcccgcggtgtgcgcggctacgtgcggcggggagcgcccacctggcccgccgcccccatcgcgccgccg

SEQ ID NO: 225141 - DNA, 860 bp, Homo sapiens
  chr16:85932120-85932980
  hyper
gcgcctagcaccttcgatgctcctgtttcagtcgcggtctcagcgggcagtggcctcctttgaagctgggattctcctgcccctcccgggcagcgcaggccaccggtgacccgggacggtctgtaaacgaccttcgcgtccccgtccccgtggaataacgcgcggcgggcatcactgcccaatatccagcgctcgtgaaggcggagaccggcggggcagctagtttctggctgtggattctgattaatgggccgcaggcgcacggtctgcaccgtccggctcgttgctagtggctcgctcgggagccgccgcactcccggggctgtccgcccgagccggcctggaaggcggaggacgcctccaggtcgctccgcggggcctccggaattcctgggaaagcccccctgcagcgccgcccctggaccccaggtgtgaggagcggggctcggccagcggctccagaagaggcccggaccccactgccgtggctgccgggggcgggaaagtgatttctcggaaagcagagcacttcgaagaaggcgggccgcgcgagccaagctgacgctattggtcggtgtggccgtcgctctgcgcaccgcccgtcccccccacgaccctttttaaggccgcgcgaccgctggcgcatcgcctggagcgcggcagcaagcgtgggaacgcgggcggcgagacggcggcaggacggcggcaggtaggcacagtgggcgggtagggcgcccgtgtcccgcgcggtccggtcccgcggggtccccgacgccaggcggggcgtgggggtggaactacctaccgtaatgtccccgggcgcagctcagtggccacccgtgtccctctctgctttttgc

SEQ ID NO: 225142 - DNA, 180 bp, Homo sapiens
  chr16:86541882-86542062
  hyper
gcggaggaggcggcgactgcccggcaggctgcgccggcgagccccccagctcctctcaccgacgtgccaggcgccccgaaggcgacaggcgtctcccgccgaaaatgaaggcgtccgagccaggaaggtgggggcgggtagttagcgggagacaaggagtccggagaaaaccgagaggcg

SEQ ID NO: 225143 - DNA, 749 bp, Homo sapiens
  chr16:86542208-86542957
  hyper
ctggagggagaggccgcgcccggccagcagtcgctgcgagagcagcactcacctgggtctgtgcgcgccgcgatgcgccggggctcctgcgctgtcctgcgctccgctctcggcaccacctttcgtggctccaccgcccccagcccgcacccgagcgctgaggtggcaagggcaggtctgcgtgcgagccccctgcgggctggcagccaggtgcgcgagggccgcccttgccggcgctcccagcccgcgctgtctgctctcaggaacctggcctggcgcgcagtgtcagaggccccgcggcggcggcaggccgagcccacaggggcattaggccaactcccccctcccgccctgcgcacgcggaattctctattattattattaaagaatcccccagaacttgtttacgttaaaccctgtaaacttcctgccagggcctttgccatctctcgggaaatcggaacctgcgctttgaaaacggggccgcggggccaaataggcgggttttcagtgtgtgttgggggtgggggagggcaactgaactacgtgtgagttcagatccgagcgtggcgtgtgtacgcgtgagtgggagtgagtgcgaacttaagctcctgtgggccttaagcttccgtgtcaacgagtgcattagtgggtgcgcacatgcctgagcgccctctgcatatgagtgtgcacacacgcatgggtgtgtttacacgtctgtttgcgtaatttaccgggtttgcatgtgc

SEQ ID NO: 225144 - DNA, 110 bp, Homo sapiens
  chr16:86543364-86543474
  hyper
gctacagggctgtgcgcgtcggggaaggccccggcccagggagcgtttcccgccgcgccgcccgggcggggaaggcggggtccagcgcgcaccggggctgaaccgcgggc

SEQ ID NO: 225145 - DNA, 180 bp, Homo sapiens
  chr16:86543660-86543840
  hyper
atggagtgaaggctgcctcgcccggaatctcggagccgagcgccgcgggcggcggggactcagggctgctcccggctggggcgcacggccgtaagacctggaggtggtgcctccccccaaaaaataccggcgggggtagcttcctcacggccttcgcccgggctgccctcggcctcagct

SEQ ID NO: 225146 - DNA, 900 bp, Homo sapiens
  chr16:86543870-86544770
  hyper
gaaagagggaggagagaggtgggggaggcgggagttggagagagaggggctctgagccaaccgccggcggatccagcagctcctcggggagggcgggcgggagcgcgggggcgggcgcgccgcggctcgctcgggagaagtggccgccgatgacggcagaggtgcagccagccccgcgcgcgcagccccctccccttcgccctcctcccccccgtcgtcctcttcctcctcctcctcctcctcctcccggcccgtccgcggcgcagagcagcggcggcagcggcggcggcggcagcagccacccgatgtcttcggcgcccgagaagcagcagccaccgcacggcggcggcggcggcggcggcgggggaggcggcgcggccatggaccccgcgtcgtccggcccgtccaaggccaagaagaccaacgccggcatccggcgcccggagaagccgccctattcctacatcgcgctcatcgtcatggccatccagagttcacccaccaagcgcctgacgctgagcgagatctaccagttcctgcagagccgcttccccttcttccggggctcctaccagggctggaagaactccgtgcgccacaacctctcgctcaacgagtgcttcatcaagctacccaagggccttgggcggcccggcaagggccactactggaccatcgacccggccagcgagttcatgttcgaggagggctcctttcggcggcggccgcgcggcttccgaaggaaatgccaggcgctcaagcccatgtacagcatgatgaacgggctcggcttcaaccacctcccggacacctacggcttccagggctcggccggcggcctctcgtgcccgcccaacagcctggcgctggagggcggcctgggcatgatgaacggccact

SEQ ID NO: 225147 - DNA, 499 bp, Homo sapiens
  chr16:86600291-86600790
  hyper
cggggtcttagagccgacggattcctgcgctcctcgccccgattggcgccgactcctctcagctgccgggtgattggctcaaagttccgggagggggcgtggcccgaggaaagtaaaaactcgctttcagcaagaagacttttgaaacttttcccaatccctaaaagggacttggcctctttttctgggctcagcggggcagccgctcggaccccggcgcgctgaccctcggggctgccgattcgctgggggcttggagagcctcctgcgcccctcctcgcgcgggccgagggtccacctgggtccccaggccgcggcgtctccgctgggtccgcggccgcccgcctgcccgcgctgccgccgccgggtcctggagccagcgaggagcggggccggcgctgcgcttgcccggggcgcgccctccaggatgccgatccgcccggtccgctgaaagcgcgcgcccctgctcggcccgagcgccgccgcccgcgcaccctcg

SEQ ID NO: 225148 - DNA, 180 bp, Homo sapiens
  chr16:86600829-86601009
  hyper
tcccctcctctccccctctggctctctcgcgctctctcgctctcagggcccccctcgctcccccggccgcagtccgtgcgcgagggcgccggcgagccgtctcggaagcagcatgcaggcgcgctactccgtgtccgaccccaacgccctgggagtggtgccctacctgagcgagcagaa

SEQ ID NO: 225149 - DNA, 540 bp, Homo sapiens
  chr16:86601394-86601934
  hyper
tcctacaacatgttcgagaacggcagcttcctgcggcgccggcggcgcttcaaaaagaaggacgtgtccaaggagaaggaggagcgggcccacctcaaggagccgcccccggcggcgtccaagggcgccccggccaccccccacctagcggacgcccccaaggaggccgagaagaaggtggtgatcaagagcgaggcggcgtccccggcgctgccggtcatcaccaaggtggagacgctgagccccgagagcgcgctgcagggcagcccgcgcagcgcggcctccacgcccgccggctcccccgacggctcgctgccggagcaccacgccgcggcgcccaacgggctgcctggcttcagcgtggagaacatcatgaccctgcgaacgtcgccgccgggcggagagctgagcccgggggccggacgcgcgggcctggtggtgccgccgctggcgctgccctacgccgccgcgccgcccgccgcctacggccagccgtgcgctcagggcctggaggccggggccgccgggggctaccagtgc

SEQ ID NO: 225150 - DNA, 420 bp, Homo sapiens
  chr16:86601970-86602390
  hyper
cggccggcgcacatgtgcgtcccgcccgccctggacgaggccctctcggaccacccgagcggccccacgtcgcccctgagcgctctcaacctcgccgccggccaggagggcgcgctcgccgccacgggccaccaccaccagcaccacggccaccaccacccgcaggcgccgccgcccccgccggctccccagccccagccgacgccgcagcccggggccgccgcggcgcaggcggcctcctggtatctcaaccacagcggggacctgaaccacctccccggccacacgttcgcggcccagcagcaaactttccccaacgtgcgggagatgttcaactcccaccggctggggattgagaactcgaccctcggggagtcccaggtgagtggcaatgccagctgccagctgccctacagatcc

SEQ ID NO: 225151 - DNA, 105 bp, Homo sapiens
  chr16:86609633-86609738
  hyper
gagcggggctggggcgcaaagccggagttctacagctgaaacctcccggagactttgcacacttctgcaaacgcgcggggctgggtgtgcgtctccaaaccgcga

SEQ ID NO: 225152 - DNA, 151 bp, Homo sapiens
  chr16:86609895-86610046
  hyper
ttaccaaatcgggcagtatttatcaccgtacaaattcaagctcggatttgccttagagtttagaagacgcgccgggacggcgggagtttcggtagaggcagggatgtgcgtgctggacttcgggtgccgcgtggggagctccaggaggggc

SEQ ID NO: 225153 - DNA, 563 bp, Homo sapiens
  chr16:87417701-87418264
  hyper
gctcggcgaccacttcgcgccgcggcttttgtggagataggggtcgcccctcgcgcccgtgcgtcccgcttccggcgcccgaaactgtgccgcgccggccggtgagtagaaagatgcgccttacagcctccaaatacagaggcagcagccagaaccccaaagggcgcctagaagcccttttgtccattgaaacaacgcgcgttccatcgtctccgccttatggtaaccaaaaggcccgagctgcggagctctgcagggaccttcggggatcccgagctccctgcggaagccccggggagggcttggaggggcggcggccggcgcggcccaagagatccggggatgcgcgcccggtctggaaagggaggccctgccatgcggcgccgcccaaagggcgcctgttcctgcagctgctgggagccgcgcacgcctgctccagctgggctccgccgaggccgctgagcggggtcgtctcccaggtccgcgggtggtgaccgcgaaggcgtcctctcacctgagcagccgcgcacgtcgccgtgggctcgcctcggaccccatctctt

SEQ ID NO: 225154 - DNA, 696 bp, Homo sapiens
  chr16:87525805-87526501
  hyper
cacgccgtccctctgcagcgggcagcgcttctccaccatgctgccgcccgcgccgcgccgcgacccggggccggggaccgcgcgggggcggccggggggcgccgggggccgcggccggggcgcgccgggaccggggacgcgcgggccggggccgggtccgggcgagggcgcgcgggcgccgcgggccgggcgggcgccggggcgggggcggggaccggggccgggcaaggctcccgtcaggggccggcgggcgggcgcgcgcggggcgccgggggggcccggggcggccggggcggccgggggcggcgagcggcctcgggccccccgctcacggggaggcgccttccccgcgcccgtgcccagcggcggccggtgcgcggcggcggcggcggctgctcctcgtcgtcgtcgtcgtcgtcgcccgggaggcggccgcccccatctccccccgcgccgcagggtctgtcactgcgggccgccccccgacggagccgccccggccatgccgtcgccgccgcccgcgcctccgcccaggccggccgttaccccgggccgcgggcgcggcgtcgccgcctggggagcgctgggggccgcggccgcgaaacggacgctggagggggagggacgcgcggcgggaggcgcggagggatccggccgggacttgccggccttgctgctcccgcgcggcggacggat

SEQ ID NO: 225155 - DNA, 504 bp, Homo sapiens
  chr16:87526561-87527065
  hyper
gaggcgccggccgaggagcggagggatcgtcgcgctcgcggctgacgggcggccgggatcagcagaagtgggcggggtggccgcctctcgcgacagcccgggcctgccgggcccgtcccccccccactgattggctcaggcggcccgttctcggcccgtgattgtgccgggtccccaatcccattcgcccgttccgcggccacgcctccctgggggctgtcgatcatgttggggccaccgcctcccgtccctcggcggccgtcaagacgcgattggtccgcggaatcggagaggcggaaaacccgggctggatttctggttgcttttgttcccgcaaatttgcgtggagcattgtttttcggcgaaaacggggcgttcggccttcctgctttatttttgagcggtgtaagagggaggtagtgggtatcttcgagaaacggccgccgcggggtccggagccccgggttccaatcccgggtcggccactgcaaagctgtgtgacct

SEQ ID NO: 225156 - DNA, 180 bp, Homo sapiens
  chr16:87635357-87635537
  hyper
tggcggtcccactttgctccccaaaagcgcgaccgttccccgagtgggggggcgctacctgttggccagggcgcagggcgcacggaattcgggtgactttgctccaagatacacgcgtgtgtcccgactctcactcaatttataggggagagggactcgccaaatccctgttttctgggg

SEQ ID NO: 225157 - DNA, 720 bp, Homo sapiens
  chr16:87635682-87636402
  hyper
gggcgaggcgcgggggcgggcaggggcgagggtaggggcgctcagctggcaggtcctgctctgcaggcctcaccgcccagctcccgggagggggccgagggcgccctgagtgctgcgcgccttcccatgacgcagttcctgtgcctttaaatcccactcccggagggggcgggggcgccccggctggaccccggtttccagtccggcgggggccccggggaagcccagggcggggagcgcggggctgggggcgcggagggcggggcgcccggggtccccgcccgcgcgccgcgccctagcctgctgggccgcgcccctcttgggaccgccgcgctccgggggcgggggcgggggcgggggcggggggcggggggcggggggcgggcgggggcgcgcgggcgggcggggtgcgggcgcgcgccgcgcggcccgagcgcgcgagccgggcccggagcgcacgccgccgccgccaccgccgccgccgccgcccgagccgccgcattgctgctgctgctgccgccgccgccccgcgcccggcccgcggcccccaatatggtgcagccgccagcgccgccgcccgtgccgccgccgccgcccgcgggccccgccgccgccctcgggcgcccgcagcgcggcagccgcaggtggggggccgcggcccgggcctgagctgccccccgcccggcctcggcgcggcgccctccccgcggggctgccggc

SEQ ID NO: 225158 - DNA, 660 bp, Homo sapiens
  chr16:87636490-87637150
  hyper
ccggtcctgtctccagcgggagcgcgagacgctggtcaggctccgcggcgcagctcgaaaaggaataatcgcccccgattgactgaaattcctccggagccggcgccgcggccgcccgcgcccgagaccgcgctccggggccgcgtcctcctctcctccggaaaacgctcgcgacccagggccgccggcggccgcgactctgctgtgtcgatcgcctgagtccgttttcaccgtttgcgggatctggaaccgagttacatgcatgtccagtgggggcaggtttaattttgacgacggagggtcctactgtggaggctgggaggacggcaaggcgcacggccatggcgtctgcaccggccccaagggccaaggcgaatacaccggctcgtggagccacggcttcgaggtgctgggcgtctacacctggcccagcggcaacacgtaccagggcacctgggcgcagggcaagcgccacggcatcggcctggagagcaaggggaagtgggtgtacaagggcgagtggacgcacggattcaaggggcgctacggggtgcgggagtgcgcgggcaacggggccaaatacgaagggacctggagcaacgggctgcaggacggctacgggaccgagacctactcggacggaggtaggtgccgcgggcc

SEQ ID NO: 225159 - DNA, 780 bp, Homo sapiens
  chr16:87723365-87724145
  hyper
cctccgacctgacccccgacgacagccccctgcagagcttccccaccagccccgcggccaccccgccgcccgcgcccgccgccaggaacaaggtcgcccacttctcgaggcaggtgtcggtggacgaggagcggggcggggacatccagatgctcctggagggccgggccggggactgcgcccgcagcagctggggcgaggagcaggccgggggctccaggggtgtccgcagcggtgccctgcgcggcggcctgctcgtggatgacttccgcacccgaggttcgggccgcaagcagcccgggaaccccaagccgcgggagcggcggacggagtcaccccccgtgttcacgtggacttcccaccaccgggccagcaaccacagccccggaggctccaggctgctggagctgcaggaggagaagctgagcaactaccggatggagatgaaacccttgctgaggatggagacgcatccccagaaaagacgctacagcaagggcggcgcctgccggggcttgggggacgaccaccgccccgaggaccggggcttcggggtgcagagactgcggtccaaggcccagaacaaggagaacttcaggccggcctcctccgcggagcccgccgtgcagaaactggcgagcctgcggctgggcggggccgagccccggttgctgcgttgggacttgaccttctccccgccccagaaatccttgcctgtcgctctagagtccgacgaggagaatggggatgagctcaagtccagtacggtgagtgggcggc

SEQ ID NO: 225160 - DNA, 490 bp, Homo sapiens
  chr16:87902836-87903326
  hyper
gataatggtccccacgatgatggccacgccgttgagcagcgtgatgttccgctgcagggtcacgccctcgccctcgcctgccggcgccgagccgtccgcgctcttggcggccagcatcttctcccgcgcctcttccttctcctcggccgccggcgccgctagcgcgcgccgcttcgggcccgcacccgccatgctctgcgcaccggccgggcctgggacacccgggagccgcggcccagcgagcagtgtgcgcgccgcccgccgcccgcagctgcgtcaggaaccccgcccgcgccgccttttaggccccggcccgccggccccgcccaccgtccgcggctcctccccgccccgtggcccggccccgtccctcagccccgccccctcggcccagctcggagcacgtgcgtcgtccggcccagcctggcgggctattcccaggcccgcgtggtcctcgaaggccccagtcctcctgcgccatggagacccc

SEQ ID NO: 225161 - DNA, 130 bp, Homo sapiens
  chr16:88031994-88032124
  hyper
ataggttaatagcttctctgcgtgggctgctgtctgtgccatctgcgtgggctgctgtctgtgccatctgcgtgggctgctgtctgtgccgtgaaggtgctgccgacccggctcctgaggctccatggcc

SEQ ID NO: 225162 - DNA, 276 bp, Homo sapiens
  chr16:88060796-88061072
  hyper
cacctggtgtgggccgaccgagtcagagggatcgagaagttaagtaaatggaaagagtgtgtcatgacaccttagtgagcatttatatctcgtggggagccccgcctgtgggccagctaagcaccttctgtgcagtgggcctttccagacccttgcaggaagacggggccggcctggcgggctggggtgcctgggtgaggcctcttcagcgggccccggccctgcagccaggcagctcctggtggctgtcccgaacaggcctcaccgcttctcctt

SEQ ID NO: 225163 - DNA, 474 bp, Homo sapiens
  chr16:88496876-88497350
  hyper
aggcccccgggagccgcgcagaccccgcgccccgggtcccgagagccgccgccctccccgaggagacccgcagctcccggcgccgccggctgccccccaggaaggaccccaggaagaggaaggctcggggcggcgcctggggcaaggagctcattctgaagatcgtgcagcagaagaacaggcgccaccggcggctggggcggcgggcgggcaggtgcggctccctggcggcggggaggccccggcccggagctgaggaccgcaggctccgcgagtacgacttcgcctcggagtccgaggaggacgagcagcctccgccgcggggccccggcttcagaggccggcggggccgaggcgagaagaggaaggaagtggagctgacccagggtcccagagaggatgagccacagaaaccccggaaggcggcgaggcaggaagccggcggggacggagcccccgcgaaccccgaggagc

SEQ ID NO: 225164 - DNA, 271 bp, Homo sapiens
  chr16:88519038-88519309
  hyper
gggcgtcaaggcctcgggcttcctgagccggttgtcactgcccccaccgcgcacgtggagcgtgcggcagagcccaggggtctagggagggaccaagggctgggggcggagttacagtgcgggggcggagcctcggcgtctcaggacccaaccaggtcgggtcaggtttggaggcggagctggcgccgagaggcggggcgcaggatgcggtgccgcggggcagcagaacagaaccgaataggtctcagactcccagcgcggcctggggaca

SEQ ID NO: 225165 - DNA, 390 bp, Homo sapiens
  chr16:88700834-88701224
  hyper
gaagcccctcgttccgcatctccggaccagggtccgggggcgtggtctgctgggggcgggcccgggttgtggtttgagagccgctcggcctgtctgggcctccgcctccgggtcgccctccagccttcctgccgccgcttttccagtcttgcccaacccggtatttctgcgcttgcctcagccacccgcaggagcgcaggccgcccttcgtcctcccgtcctctgcgcccacaggaccccgggccccgcccagtccgcaggtcccgcaggtccccccgggcgtgtcttcctggccctgcgacccccgggacagcgctgagaacacgcggaaggtggggagacgcgcggcgctggccgggtccctggcgccgttctcgcggtgcagcctgt

SEQ ID NO: 225166 - DNA, 91 bp, Homo sapiens
  chr16:88721558-88721649
  hyper
cacgcgctacagcgcgagcgcagcctctgccctcccggcccgcgtcaccttggtgtccccgtggtgggcgttgaagcggtgcaccaggtgg

SEQ ID NO: 225167 - DNA, 133 bp, Homo sapiens
  chr16:88764923-88765056
  hyper
aggagaacttgtgtcggtgaagcaggtgctgcaggaagttggcgctcttgtagctggggtccccccagggcattgccgagcagatggggcacacctggaacaggcactggggtcaagccgagccggaccgcgg

SEQ ID NO: 225168 - DNA, 105 bp, Homo sapiens
  chr16:88817839-88817944
  hyper
acacgaaagaatcgcgctcggcgctgctacgggctcaaggcggcctcggcttagcgcacacatcgcggagtgccgggctccggggggcaccgcccgccctgctgg

SEQ ID NO: 225169 - DNA, 105 bp, Homo sapiens
  chr16:88851818-88851923
  hyper
ggacccctcccctcccgcagtcttggccccgcggctccgagcgtgcgcggcggtgggcaggggcgcttctcgctgggtgggctgcggctggggcccgggcgctac

SEQ ID NO: 225170 - DNA, 143 bp, Homo sapiens
  chr16:88878527-88878670
  hyper
aagtgcgagtcaaggcgcccttccttgtctcgggctacgcttctgactgcagccaggcagctgtgggccggggccttggcggctggaggaggggcgtgagctggtctcgcccacgcacctggcgcgcgtacgggccgcgccct

SEQ ID NO: 225171 - DNA, 294 bp, Homo sapiens
  chr16:88950011-88950305
  hyper
gtggctgtgcccatgggagacgtgagtgacgcccggcagtggccgactcttctgcggtggctgcgcccacgggagacgtgagtgaccccggcagtggccgacttccacggtggctgcgcccacgggagacgtgagtgatgcccggcagtggccaactcttctgcggtggctgtgcccacgggagacgtgagtgacgcccggcagtggcttactctttcgtggtagctgcgcccacgacttctggagacatcagaggcttccaggccccactgttttctgcatttggccactgcc

SEQ ID NO: 225172 - DNA, 1530 bp, Homo sapiens
  chr16:89007083-89008613
  hyper
gccgccctcggcctccccactcccgggtctccgtcacgcgggccgcggggcctttgttaggaaaaccgggcggccccaggggagcccgcgagactcccagcgcccgggcgcgtcgttcccctcgaagtttcgccgcagcccccgcaggtcaggctctgctcacggggggctgcgctcagcccggatgggtgggcgctgggcgggttggctccaccctgccgtgggcaccaactttgaaaacggcccgtgcgctcggcgcggctgcggcgcagatccgggaacggcagccgcgggcggagtcggggtagagcggcggcggcgcgcggggcggacacggcacttacggtcggggggtccgggggatccggcgggcggcggacggcgcacactcgcgactcggtccgggagtcgctgctccttccagcttggtccccgcctccacgactcaggggcggctgcgcgctgtcttctggcgccgcaccgggctcaggcgcgcggcggggctggggcgcgcggggcggccgcctgggccatgccggggactcggctccggccaccccgcgcgggaacaaagcgcgcaccccgcccggggcggtctccggcctccgcggcccgcgccgggtccagccgccgcgcctgtggctccaacgccgcgcgctcgcccgagagtctcacggggccccgcggcccccgccccgcgcgctccgcctccgcctcctgccccccgccgccgccgctgcgccacctgcctcccgcccggcgcccatggcgctcagctccgccccggggcgccggcctggagaggggctccccgccgccgagagccgcccccaacgcctccgccaccggggcggcgccctaagaactggccgtgggggccggggctgtgcggagcgccgggagcagggagaggggagaggggcgcggggagggggcgacgggcgcgccgcctcctgcggggggcggcgcggggaggcgcaggcgggggcgagcgaagaggttgaggggtgcgggcgccgtggagggggcgcggctctggggggcggcccccgcctgcgcccaccctctccccctccgcaggccgcgcacacccacctcgcagcagtcggcggccgcgggcctcgcagctttagaaccgcggcttctggcggccgcgcgggaggctgaacgggagttggggggtgtggggggggtggggaggtggggagttgggggggaggtcgctccttcggccgccgcccccgccccctgccccgcgctcgcccccagcgcggcgcctggcccggcccggggccacctccgtgcgtggccggcaggggtcgcgctccccccgctcagcctcccgggcgggtccgatgcgaagccctcgcttcccgcgggtcccggggccaggtcatttgcatacactttgcattcatttgcatatcgtgcgtttcatgtccacctgcagaaacgccccgagccgctgctctgccctctccgcactttctctgccggcaggccccctcccccgcccgctttgcctttccc

SEQ ID NO: 225173 - DNA, 180 bp, Homo sapiens
  chr16:89189695-89189875
  hyper
atgatgggcgctgtgaactctgaaaagccccagcatcagagacctgctgctctctcatgtgaagggactccccaccccacgctcacactcgcagacgcacttggtactttcatctgagtctcacgcagtagcccttctctccacagcatcccagaacccgagggtgcccctcactaccac

SEQ ID NO: 225174 - DNA, 728 bp, Homo sapiens
  chr16:89267386-89268114
  hyper
cccaccggcgccttcggctccaatcctccagcgccccaggccgccccgcgcctggcagctcccaggcccagattcagcccccgcccggcccctctccgcgggtccggcccgtgcgcgcccgtctgcggcaccgtcgggccggcggccgccccggagcaggaagcccaggaggacggccggggggcccgggtcagaggcgccaggtaggatggagaaaggacacccagggcctcggcgggctgggggcggggagggctgcggggcagcagggacgggggcgcacctgggtgaccgggctttgcaggaggccggcgccgggcagcgcgtagagccagccgcgtgtgcagggccgggtgccgttgcgtgcgggcgcggggcgcgggcccggggcgggtgcagggcgcgggatcggggtagcgcaggagcaggcaggggctcgcggctcgcgtgggccccaggcgcgggatggcggcgtccagcagcgcgggtccgcgcagggcgcgcagcgctgggggcaacagcgtggggtccggtcggcagtggggcgcgggctgcgcggtaagcagctcctcggagctcagcaccagccccagcactatgcagggtacccacgaggcggaggccagcaggcgccgggcccggccaaagccgcccgcagctctcagcacccgcgcctcctgctccatcggtcgcaggctgcgctcgggacggggcggggcctggaccag

SEQ ID NO: 225175 - DNA, 102 bp, Homo sapiens
  chr16:89268346-89268448
  hyper
gggcgtggcaggggcgtggccgggagcgctcaggtgccctcgcggcgcaggtgcactcaggttgcccgggggcgcgcgggctccggccggcgtcccggggtg

SEQ ID NO: 225176 - DNA, 180 bp, Homo sapiens
  chr16:89614942-89615122
  hyper
tgctttcagcgcagcaggggctctgcggagaggtgtggatctgcagcaccacctctggtgaaactcatggtcccgaccgtcagtaggaacgggagatgagttttggtgacgggtgaccggtgggctgaccgcctctgactgccgttccgtggctgctcagtgtggggtctgcgacgtctg

SEQ ID NO: 225177 - DNA, 139 bp, Homo sapiens
  chr16:89627717-89627856
  hyper
cggttcggtaccacacgaaggtgcgcgccggccgcggcttcagcctggaggagctcagggtgagtactggcagcgctgcggtgtcaggaaggccccgaagtcccctctgttggcctcagtcgcgtgatgacattctccg

SEQ ID NO: 225178 - DNA, 152 bp, Homo sapiens
  chr16:89894420-89894572
  hyper
cccggctccctcccgcgttcccagcggcaaacctcccaggccccccgcggtcaccgcagtgtcccgggctggatgccggcccgggcttttgtgggcatcggccgtctgggtctgcgggggagcgccgggggtgtcaccgcgtgtccgagcgc

SEQ ID NO: 225179 - DNA, 45 bp, Homo sapiens
  chr16:90087050-90087095
  hyper
gcagtgggccctgtcgggatcccagggagccgcaattcagggctc

SEQ ID NO: 225180 - DNA, 240 bp, Homo sapiens
  chr17:523675-523915
  hyper
aagtgagtgggactccaggtacaagtcccagcctgcccccggcttcaaccacagtagctcagtttcacggtcttacacattagctccgtggcctggagtaagtttcaaatgagcacagcgcctacttcctatggctgatgaagcacagtgactgactgcaggtaaacgcacctaatatagcgtgggtcaccaagtggatgttcaaagcatgacagctatgggtgtttcagattctacatt

SEQ ID NO: 225181 - DNA, 393 bp, Homo sapiens
  chr17:576379-576772
  hyper
aaaaacaacggcagcatcatttcgaaagccaggaggtcctccagagagcagaaacatggatgagtgctaccacatctgataagccctacacggaagccctcaccacatccactgagggtggacaccaagggtcaagtcgcctctctttagagaaagtctcttcttttgttactgctgaccaccccggcatcactgagagctgttgctatggaaacgaggtatccccagctgaaacagaggtgcttcagccagcctcagcaatgctaacaatgcagcccgctctccacgacggtgctcaacagcagcagaggctgcgggactctcacacacccagcctcagcaatgccaacaacgcagcccactccccatgatggtgctcaacagcagcagagg

SEQ ID NO: 225182 - DNA, 78 bp, Homo sapiens
  chr17:635476-635554
  hyper
aggtcggggaggggcgcgtccgctgacggaacagaagccgggagccgcggcccttcccgcctccgcctgggccccgcg

SEQ ID NO: 225183 - DNA, 460 bp, Homo sapiens
  chr17:635798-636258
  hyper
ggagggttgaaatcgcgcggccgggccggggcgcgccgagccgaacccagccacgcggcgccagcgaggcggccggacccgcagccccgatgctgctgacgctggccgggggcgcgctcttcttcccggggctcttcgcgctctgcacctgggcgctgcgccgctcccagcccggatggagccgcaccgactgcgtgatgatcagcaccaggtaccggcgccgccgagacgccccccgaggcccggggcgctgcccaccgcaccccacccggccgcggggcccagggcggaaaaggggggcggcaggaagcccgggggctgctccctccgcgtcccggcggcccgagtttccgaagcccctccgcgtcctcccctggcgggagcggggccggggcgggcgggaatggccgatgagcctccggagcccgctccccacatctgcctgcggctggggagagtc

SEQ ID NO: 225184 - DNA, 105 bp, Homo sapiens
  chr17:850231-850336
  hyper
gccagtcggccccacggtgcgtcctccaggggccgcatgaggagagacgatacacgccagcactcagggcccagcacgggccccccactcagtgaaaagcatcct

SEQ ID NO: 225185 - DNA, 84 bp, Homo sapiens
  chr17:883202-883286
  hyper
gtggccagagctctccgcccaggcggggtccgcagctgccggccgcggtgcgcggggtgactgcttgggcgagaagccggaccc

SEQ ID NO: 225186 - DNA, 73 bp, Homo sapiens
  chr17:1132222-1132295
  hyper
cccgggggtctcctccgcggcgaggggcgagcccgggcggcccttggcctcggcctcccgctgctccaggtcg

SEQ ID NO: 225187 - DNA, 105 bp, Homo sapiens
  chr17:1588082-1588187
  hyper
cctcacacaagaggccgctttccccgcagcgcaatggcggccagactgcgtccgctccgcgttcccagcgccgggaagtgcgcaacccgagttcagcagttgatc

SEQ ID NO: 225188 - DNA, 360 bp, Homo sapiens
  chr17:1613330-1613690
  hyper
cccgtgcgcctcgagcccccaagcccgcacccgagcagcgccccggtccccgagagcaggctgtgcgccagggagacgcagaggttccaccactgccagcggtcccgagcggccgattccggcgtgggcagccgccgcaacccccagtgcagcccccggaacgcgaggaaggaggcgccggccaccaggagccccgtgggcgccatggcctggcggttggggggttgcggggagtccgggtcggtcccctcggcgcccgcgctctcggccgggactgggaacccgtttcccggcagggctggggccccggctcccctccccgccgcgcctttgggatcagcaggaacttttccccgttcg

SEQ ID NO: 225189 - DNA, 328 bp, Homo sapiens
  chr17:1954662-1954990
  hyper
ggggtagggggagccgcgcccctgcccagccgacaaggggttaactttccggaaccgcgggcctggggccggggaggcggcgcggaggggcgcggcgggcccttcgagcttattcacgctctccttccggagccccgcggctcctgggggtcttcacgtggcagccccttccccctcctcagttcctggacctgacgtttctgccgtcacaccccgcaaggccactgcggtgtcgccaccctctcgtcctgcagggtgggcaggagaggaagctggactcccgtgggggcctggggcgcagcgagggctgtggcgtcgggggccggga

SEQ ID NO: 225190 - DNA, 159 bp, Homo sapiens
  chr17:1958916-1959075
  hyper
gcaggtaacgggccgcggggccccgcgggccaggaggggaacggggtcgggcgggcgagcagcgggcaggggagctcagggctcggctccgggctctgccgccggatttgggggccgcgaggaagagctgcgagccgagggcctggggccggcgcactc

SEQ ID NO: 225191 - DNA, 779 bp, Homo sapiens
  chr17:1961434-1962213
  hyper
tgctgcggccctaccgctgcgcgtcgtgcgacaagagctacaaggacccggccacgctgcggcagcacgagaagacgcactggctgacccggccctacccatgcaccatctgcgggaagaagttcacgcagcgtgggaccatgacgcgccacatgcgcagccacctgggcctcaagcccttcgcgtgcgacgcgtgcggcatgcggttcacgcgccagtaccgcctcacggagcacatgcgcatccactcgggcgagaagccctacgagtgccaggtgtgcggcggcaagttcgcacagcaacgcaacctcatcagccacatgaagatgcacgccgtggggggcgcggccggcgcggccggggcgctggcgggcttgggggggctccccggcgtccccggccccgacggcaagggcaagctcgacttccccgagggcgtctttgctgtggctcgcctcacggccgagcagctgagcctgaagcagcaggacaaggcggccgcggccgagctgctggcgcagaccacgcacttcctgcacgaccccaaggtggcgctggagagcctctacccgctggccaagttcacggccgagctgggcctcagccccgacaaggcggccgaggtgctgagccagggcgctcacctggcggccgggcccgacggccggaccatcgaccgtttctctcccacctagagcgcccctcgccagcccgctctgtcgctgctgcgcggccctggcccgcaccccagggagcggcgggggcggcgcgcagggccc

SEQ ID NO: 225192 - DNA, 146 bp, Homo sapiens
  chr17:2156718-2156864
  hyper
atccagatcgttacagaaaaaaaatgtctgctgatacctgggctaaataatctacaacgctggtgtctcaaaagatgtttcttcctgcaccgcacttcagagctaccacacacgtgtactggaaacagtcacgattctcatgagct

SEQ ID NO: 225193 - DNA, 50 bp, Homo sapiens; identical to SEQ ID NO: 204369
  chr17:2302239-2302289
  hyper

SEQ ID NO: 225194 - DNA, 902 bp, Homo sapiens
  chr17:2627434-2628336
  hyper
atcgggacggcgagtcctctcggtagagaaggtgcccccgctcggccccgcggaggaactctcgcgcgaggagagggctcgaagctttggaaacgtcgggaagtacaaaaggctggcggttcggggatttggggggagccggggccgcctcgccccgcttcctggaggaggggcggctgccctccgacccgggacctgcctgcggggaccgagctgcgtccctggccggccctccccgtccgtcccgcgtcaccccggccagcctggcgcctactccgggtccccgggcgcgctgggctggctgggcgcgggctgcgggccggctcggtccgggggctcctggggaggcggctggcgcgggctgcgggcgctgggccgcagcggcctgcgtgcatagaggaagagcgcggggtcgggcatggggtcggcgtcgtcgagggcgccggccccgcggtcccaggcggcccagtcccggccggggcccttggcggcggcctcgtgggcagcaggcgggcggcgggctcgcagtgcgcggcggcgtggcctgggctcggcggtggcgccggggcccgggcgcggggcctgcagtctctggcgcgccgcgtgcagctggcaggagaggtaggcggccgcctcggtgtgcttctgcagctcggtgcccagcacggtggcgcggtggctgcggcggcgcagctcctccaggaagcggcgctcctcggtgcgcaggctgcagcgcagcgcggacaccagcgcctcgcgctgcgccacctcccgccgcagctccgcgttggccgcagcacgcgcctccagctgcgactccagcgcgcggcacttgctctccagctcccgggacgccgcctctggaacggggcagaggccagaggtgacggtctccccctggc

SEQ ID NO: 225195 - DNA, 240 bp, Homo sapiens
  chr17:2756729-2756969
  hyper
gggcggcagccgcctctgcctggggagggagctcggggccgccggcgggagtgcgggcggggaccagaaggagcgggcgaggggaggcagggccggggccggggagggcgcctgggagccgggcaggggggtcccgggagcgctgtccgcctcctcctgcgcttcgcccgctccctgtgccccgcgtcctccaccatccgggcggccgaggccggggcgcgggaggcggggccggggcgg

SEQ ID NO: 225196 - DNA, 515 bp, Homo sapiens
  chr17:3599158-3599673
  hyper
ttacacgaccaggtacgccaggatggaggcctgcagcagccggtacagcaggcccaccttcttgttcttggcgatgacatacttctcggtcttgtagtcgaacagcgacaggcagagccccttgcagcccgcctgccccatggcgcgctctcagccgggcttgcggaccgcccggcccacgtgcgctcatggggagcactcggtccctcggtccctgcgcgcccggcgcccgcctcggcccgtctgcgcccgctcagctgcagcccggggtgtccggcagggctgcggggcgcgggggcgggtcggggcggccttttattgacgcggttgagaaagcctcggctgggagctgggcggcggcgagcaccggaacctcagaccgcgaccttgccgctacctcttcttcctcctcctcctcctcctcccctgacacagtgacacccctgcaacctactccccagccaccggtctgggagcgcagccccccggatgcgcaggaccgccctgtgctgttg

SEQ ID NO: 225197 - DNA, 155 bp, Homo sapiens
  chr17:3778891-3779046
  hyper
tggatactcacacgtgtccaaatgcctctcacccacagcctccctggcagtggggtggctggcactccataggtgaaacagccatgtgcccagggaactgcgccagaccgtgtaacctcttgttcagacaactttgcctacgctcctgtcactta

SEQ ID NO: 225198 - DNA, 667 bp, Homo sapiens
  chr17:3867000-3867667
  hyper
gcaccttcctgggcgttttctggagccctcaggggagaccctggggccagctgggaggccgagcctgagtctccggccgtccctcgcccgccggtgtctgcgctgcacctgcaggatgccagcgggagcggcgcggcgttggggtggaatacggtccaggatggggtggaataacgcttccagggtggacggggccggagtggaggtgggaagtccgggaggaccgcgcagagggtgccaggcgtccggtctccccagctggaacccgctcccagcccccagcccccagccccggcgccggcgaaggtggccgcgcagccccgccgggtgccccaggagcatccgaagaggtttccggagccctcgcttcctgcccgcccagagccgggtggggaggcaggaggggaaactgagactgcggcgcgcgcggcccccgctccccggcccggcccggcccgcgcgctcaccgttggggccgtagcgctcccgcgcgccggtcacctgcgccgggctcaggccgccctcggctgtcaccgagaagtggcgcagcacgtcggcggccgggagcagatgcgccgcctccatgccgcccgcccggccgtctgcgccgtccgcaccgtcgaggccgcctctccgccggggggctacaaagcggggcgcgggggac

SEQ ID NO: 225199 - DNA, 105 bp, Homo sapiens
  chr17:3867879-3867984
  hyper
ggggaaactgagaccgcccgcggggcgcgtgctgggcctgtcgggagccgggggcgcgtggcccgggggtcctcggtcccggtccgcggagctgctaggggtggg

SEQ ID NO: 225200 - DNA, 42 bp, Homo sapiens
  chr17:4647512-4647554
  hyper
gtcactgaagatccacgtggtggaggccgggaaggagtttga

SEQ ID NO: 225201 - DNA, 163 bp, Homo sapiens
  chr17:4853393-4853556
  hyper
gcgggggtgagtcaccgggcgcgcgctgccccggcgccgacgggaagggcctccgagtcgggccgaggcgccgtgtgtcccccgccggtcggctggtatggctgcagaggagctcggggcagaccccgcactggccccagagccggcaaagtggagatctcta

SEQ ID NO: 225202 - DNA, 240 bp, Homo sapiens
  chr17:4890443-4890683
  hyper
ggctaggcagcctgccagggtgcggagcgggagcgggtccttgggctgcacttgggcggcgccggatcggacgcttggcactctgggcggccccccggcggagtggtggtcccaggagaacctccgaggtgggagggtcccgcccgcatagagggatgttctggagaagccgggagcagagtccgcgggcacgcggtgggcgagggacagtgcaggtgccgggtgcgggggtctccggga

SEQ ID NO: 225203 - DNA, 118 bp, Homo sapiens; identical to SEQ ID NO: 204382
  chr17:4901561-4901679
  hyper

SEQ ID NO: 225204 - DNA, 239 bp, Homo sapiens
  chr17:4938733-4938972
  hyper
ttgctgaggcaggtcgagttggagaggggagtggctggggcgggctctgcccggaggggcgtctccgtgctgccctcccgcctgcctcaggggggcatcccgggagccgccaggtgcgcaggggtccccgcacctccggatccggcagtccccggacccagcggctggcggtctgcctgagagggagccccctccgccggggaggcggcccagcccagagcccacacagctggggtttt

SEQ ID NO: 225205 - DNA, 669 bp, Homo sapiens
  chr17:4981371-4982040
  hyper
agagttaaaagggtcgcgcaaacggtccccgcgggaatgcgaagcggattctcgagttcttgagcctagagcaatgcttggggagcgacacgagggcgcagagcggcagatcgcggagcggaagttcatccccggagccgttctaggaaacccggaggactcaggtcgtcaatgattccggggctgaagtgggcatcgacgggtgcactttgctgttccagggagccggctcggcaggcggcggcgacgtggaacttgggctagggctagaaccggcgaaaagcaagccggaaaaggcaagggggcgtcggtgcgctgaccacctgttcctccagcggagtgcgacgcgcgccgattggctggagtgccgcccgggtaccggaagtggccgatgcccgtcgccagtgacaccgggacaacagctgcgggctctgtgcgagcggcccagcagcgcggagcctcagcggagtgagcgagcgcggggcagtagcggcctgcggtgagacctcattccgtcgcggctgtgggggtaggcgggggctgggctcccagctccctagagagccgagcggaaaccctacgtttaggcccgttctgaccggggttcgctgtgtgaccttgaagtttatgcctccctccattccccccgcccccaggccttcatttcca

SEQ ID NO: 225206 - DNA, 368 bp, Homo sapiens
  chr17:5000402-5000770
  hyper
agcagcctcagcagcgcaggtggacacagtcgtcaaccactcgctggccgcctgcgacgtgaagcacctgcgctgggcgcggcgggtaagcgccgacactagcgggcgcctgaacagtccagcggcgtcagcgctgcggagcaggaaagggtcccaaacgcagggcggccatgcagcgtggcgcccacctgtccctctcctcgaagcgctgagccagcacgatgcacataagggaaggaggaaggtggcttgagggcagtgaccgagcggacagcggaagcccatttcaggagccccggtacccgagctcgggcccctttccaatcccccaggcgtccttcccatgtccttgtctcctagtcctggga

SEQ ID NO: 225207 - DNA, 180 bp, Homo sapiens
  chr17:5000895-5001075
  hyper
gctagaggccagccagcccggtatccgagaggtaagagccccggcggcgcaggcggaagcgtgtctgtcgcgaggcctctctaggactccgggaggacccctcgttagcgcaggacctcggcagccgggggttgggctcgagggctgagggcggcgcgccatgcgcggattagctgccat

SEQ ID NO: 225208 - DNA, 240 bp, Homo sapiens
  chr17:6459489-6459729
  hyper
gtgtcccccgaggtgaccgggggcgcaggaaggacggggggcgcgcggagccccctctccacgcgcgggaggtccagccccgctaccgccccctacgccctcccgggacctccgcccacctgcgcgaggggttcacctgggccggcggcccctcctctagacgcgcgagtccctcccccgggccccggccctgccctccccgcgcccgccctcacctgcacggcccgccttggccatgtc

SEQ ID NO: 225209 - DNA, 720 bp, Homo sapiens
  chr17:6616343-6617063
  hyper
ggtggtgcgccctggggtcgccatgcccctcagattctttacagggcacctcccatccggcacctggagctcctgagtgcgcgcgccccgggagagctgtgctccccgcgaaatccgtgcgctccagctcagggctcccgggatcggtgcccgttagtgggcacaggacgccgggtgtccgaagggctgcctggagatgcaactgaccttggcgggcatcagaatgacgagtggcagcagcaggagcggggtgacgaacaagatcacgaaggacttgaacttggagacatagctcagcgccgaggccatcgcgcgggagggagactggcgggcgagacgagtgaggggcagctagaggcgccgcgggcttaagaaggggccacagtccccggggattggggagggggcggtgacaactccgccccgcacgggggcgcctccccgcggccctggggcggggccacccctcggggtctgtgggacgcgcctgcccccaattctgccacccggcggcggtgggaggcgtctttggactccaacgcttcgggccagccctctaggggcagcctgggccctagcatctcgcgctgtccaagcctctcctgcgctgccgaggcagaggtgcgtcccggggctgccaagcggggcgtgttttggtcactggtgctgcccgctttggcgtaaggcgccctcccgcgtccgcatctgctctttcctggg

SEQ ID NO: 225210 - DNA, 72 bp, Homo sapiens
  chr17:7146492-7146564
  hyper
gggcgccagccacctgggggcagcgcccgcttaacctgtccacgtcagtgccccggacgaagcccggtttct

SEQ ID NO: 225211 - DNA, 67 bp, Homo sapiens; identical to SEQ ID NO: 204392
  chr17:7146588-7146655
  hyper

SEQ ID NO: 225212 - DNA, 238 bp, Homo sapiens
  chr17:7199730-7199968
  hyper
ttagccagggcagcgcgccccggggcagcacacgtgcccccaggcgctgctgggcaagccccacgtgcgcttcccaagggctggcgtcctccgcgtctccttcgccgccagctgcccgcagcagccgcagtcgcctctcccggtcccggcgcgccctctgccggccgctcccggaggccgccggattccgcttcctcgctgaccctccacttgctatctatcgcccgccgcacccctc

SEQ ID NO: 225213 - DNA, 841 bp, Homo sapiens
  chr17:7254485-7255326
  hyper
cagtgcccgcggcgcgcacgttcccacccaggctcggagcgcgaggtccccaggtgggccccaaccgccggatcctgcccttctgcactggggcccagccgcctcccggcctttcctccctcccccaggagatgagacgtatcttgacatcttccgcgacttctccctcatggcgtcagacgacccggagaagctgagccgtcgcagtcatgacctccacacgctgtgacccgaggcccacggggcccgcgcctgcctcccttccccgccaccgggccctctgccattaaagcctccgtgcttcgctcttcccttctggttcacttcttgggcgccaccttcgggcccgtagggtgttgggcgctgcggctcccgaggtgcggggagcagctgggggtttgcgagctccagtccagcaaggtgcgactccggggagcgaggcggcagcttcggccgcggcctgagcgcagggcgctgcggggcgggggctctcgggctggggcgacgtggccagcccagtcctgccgaggggtggggctggccctggggctcgctggccccgcgccgccgcggagagagcgcgcccgggccaccccggctggaaggcatccccggaatgcggcggctcagcacccgccccctcgggaattccccgggggagccgctgggagggactcggctcccgggctgggccggccgggcctcgggctctgagcggtgggattagaggctccagccccgccgacttgcagacgtgagatcgggcacacctgagcggcggcggggcggtcgtggccacatccggggcgacgtgcctgagtcaccccgtcccgccagcgtc

SEQ ID NO: 225214 - DNA, 488 bp, Homo sapiens
  chr17:7255354-7255842
  hyper
tcgcgtccgagactcgcctccagcctcccacctccgcccgggccgcgcgagcctcgcgggggcgggggcggggcgccaaggggcggggctgtctcttaaagggccccgggccgctgcccttaggccacttcctgggggcggagaggacctcagcggctgcggcgacacccagggaaggcggcgcggccgggtcccgaaactcctggctgtttccatcagagccctcggacactcccagcccgggctgagcacgcatcgtcgctccccggcggatacaagggggctccgccatccgctcccgtcagttcggcctccatctcctgggacccgcgccggcagccaggccaggcctctgagtggccccagagccctggctggactcgtccacggcggcagcgatctgcccggggtctcggaggccatcccttcagagtcggccctgtgctcgccaccgtcacctgctggttggattccggaaacccactgtc

SEQ ID NO: 225215 - DNA, 274 bp, Homo sapiens
  chr17:7340607-7340881
  hyper
tgctagacgagctcggccgagtgctcgaggccgggacgttgcctcactattttctgaacggccgacagctccgtacgggggacgactccgctgcgctgctcggagaattggcccggctccgcggggacccggcccgggccctccgtgccgcggtggaggaggccaaagtggcccgcaaggggggcggtttggcgggcgtggggggcggggcccattaaagacgctgttcctaccagtggaaagtgcctctgtgggcgagcgggacgtggggggc

SEQ ID NO: 225216 - DNA, 300 bp, Homo sapiens
  chr17:7486279-7486579
  hyper
ccacagcggaatgacgcacgggtgggcaccgtgggttggcgtcccggcggtcggtaacgaagcacaacgcccccaccaggtagtccaaggtgccctttcccaagcagcgctgcagggtccactcggcctcgccgaagtctctgcccagcacgtggtgcgccctcgggccagcggggagggggcgaatcccgggactgcctcgccaggcctcggctccccggagactcttgggggtctgggccccaagggtgattcaggtgctgcccttccccgacctgggctcgcctcccccacctcctc

SEQ ID NO: 225217 - DNA, 287 bp, Homo sapiens
  chr17:7486947-7487234
  hyper
aggcgtgcagcttcggcaagctttacaattccaacagcgcgtccaaaacgtggtccctgactgagacttattttacgccactagagtgagggtgggtagcgtcagaaagagcggggcacggggcgggccagcttcgccgcgggaaaagaacgggaggcggagtgtccgcagcgcgcacgcgcaacgaaagtcaatggcggtctggagagactggcggaagctagctttgcaatatggcggccgaggcggacggaccgcttaaacggctgctcgtgccgattctttta

SEQ ID NO: 225218 - DNA, 165 bp, Homo sapiens; identical to SEQ ID NO: 204402
  chr17:7571719-7571884
  hyper

SEQ ID NO: 225219 - DNA, 824 bp, Homo sapiens
  chr17:7572184-7573008
  hyper
tgaccctgagcataaaacaagtcttggtggatccagatcatcatatacaagagatgaaatcctccagggtgtgggatggggtgagatttccttttaggtactaaggttcaccaagaggttgtcagacagggtttggctgggccagcagagacttgacaactccctctacctaaccagctgcccaactgtagaaactaccaacccaccgaccaacagggagagggaacaagcaccctcaagggggtcaagttctagaccccatgtaataaaaggtggtttcaaggccagatgtacattatttcattaaccctcacaatgcactctgtgaggtaggtgcaaatgccagcatttcacagatatgggccttgaagttagagaaaattcaacagtgagggacagcttccctggttagtacggtgaagtgggcccctacctagaatgtggctgattgtaaactaacccttaactgcaagaacatttcttacatctcccaaacatccctcacagtaaaaaccttaaaatctaagctggtatgtcctactccccatcctcctccccacaacaaaacaccagtgcaggccaacttgttcagtggagccccgggacaaagcaaatggaagtcctgggtgcttctgacgcacacctattgcaagcaagggttcaaagacccaaaacccaaaatggcaggggagggagagatgggggtgggaggctgtcagtggggaacaagaagtggagaatgtcagtctgagtcaggcccttctgtcttgaacatgagttttttatggcgggaggtagactgaccctttttggacttcaggtgg

SEQ ID NO: 225220 - DNA, 111 bp, Homo sapiens
  chr17:7573922-7574033
  hyper
tcacctggagtgagccctgctcccccctggctccttcccagcctgggcatccttgagttccaaggcctcattcagctctcggaacatctcgaagcgctcacgcccacggat

SEQ ID NO: 225221 - DNA, 621 bp, Homo sapiens
  chr17:7576546-7577167
  hyper
tttatcaggaagtaacaccatcgtaagtcaagtagcatctgtatcaggcaaagtcatagaaccattttcatgctctctttaacaattttctttttgaaagctggtctggtcctttaaaatatatattatggtataagttggtgttctgaagttagttagctacaaccaggagccattgtctttgaggcatcactgccccctgatggcaaatgccccaattgcaggtaaaacagtcaagaagaaaacggcattttgagtgttagactggaaactttccacttgataagaggtcccaagacttagtacctgaagggtgaaatattctccatccagtggtttcttctttggctggggagaggagctggtgttgttgggcagtgctaggaaagaggcaaggaaaggtgataaaagtgaatctgaggcataactgcacccttggtctcctccaccgcttcttgtcctgcttgcttacctcgcttagtgctccctgggggcagctcgtggtgaggctcccctttcttgcggagattctcttcctctgtgcgccggtctctcccaggacaggcacaaacacgcacctcaaagctgttccgtcccagtagattaccactactcaggata

SEQ ID NO: 225222 - DNA, 121 bp, Homo sapiens
  chr17:7577496-7577617
  hyper
acctggagtcttccagtgtgatgatggtgaggatgggcctccggttcatgccgcccatgcaggaactgttacacatgtagttgtagtggatggtggtacagtcagagccaacctaggagat

SEQ ID NO: 225223 - DNA, 558 bp, Homo sapiens
  chr17:7578175-7578733
  hyper
cctcaggcggctcatagggcaccaccacactatgtcgaaaagtgtttctgtcatccaaatactccacacgcaaatttccttccactcggataagatgctgaggaggggccagacctaagagcaatcagtgaggaatcagaggcctggggaccctgggcaaccagccctgtcgtctctccagccccagctgctcaccatcgctatctgagcagcgctcatggtgggggcagcgcctcacaacctccgtcatgtgctgtgactgcttgtagatggccatggcgcggacgcgggtgccgggcgggggtgtggaatcaacccacagctgcacagggcaggtcttggccagttggcaaaacatcttgttgagggcaggggagtactgtaggaagaggaaggagacagagttgaaagtcagggcacaagtgaacagataaagcaactggaagacggcagcaaagaaacaaacatgcgtaagcacctcctgcaacccactagcgagctagagagagttggcgtctacacctcaggagcttttcttttttttttttttttttgaga

SEQ ID NO: 225224 - DNA, 691 bp, Homo sapiens
  chr17:7579249-7579940
  hyper
atgcagggggatacggccaggcattgaagtctcatggaagccagcccctcagggcaactgaccgtgcaagtcacagacttggctgtcccagaatgcaagaagcccagacggaaaccgtagctgccctggtaggttttctgggaagggacagaagatgacaggggccaggagggggctggtgcaggggccgccggtgtaggagctgctggtgcaggggccacggggggagcagcctctggcattctgggagcttcatctggacctgggtcttcagtgaaccattgttcaatatcgtccggggacagcatcaaatcatccattgcttgggacggcaagggggactgtagatgggtgaaaagagcagtcagaggaccaggtcctcagccccccagccccccagccctccaggtccccagccctccaggtccccagcccaacccttgtccttaccagaacgttgttttcaggaagtctgaaagacaagagcagaaagtcagtcccatggaattttcgcttcccacaggtctctgctagggggctggggttggggtgggggtggtgggcctgcccttccaatggatccactcacagtttccataggtctgaaaatgtttcctgactcagagggggctcgacgctaggatctgactgcggctcctccatggcagtgacccggaaggcagtctggctg

SEQ ID NO: 225225 - DNA, 329 bp, Homo sapiens; identical to SEQ ID NO: 204409
  chr17:7590625-7590954
  hyper

SEQ ID NO: 225226 - DNA, 33 bp, Homo sapiens
  chr17:8759640-8759673
  hyper
aggcgtggtggctcacgcctataatcccaacac

SEQ ID NO: 225227 - DNA, 420 bp, Homo sapiens
  chr17:8868645-8869065
  hyper
cccagcagaggttacccggataacgataagtggtccccgcgacgccccttaagtctctggggttatctggagcgcaggtttgcagacccgctgcccccgcggtgggccaggtccacggggccggaagatagcaggatctgtccagccctcgggctgcggcggctgctcgcggagcccactctccccgacggtccccagcttgctccagctctgcctggagctcccatgcgtgccctccgcatccgccctggccgcccagtcacacacctgcagtccccgccgggcgccgagcccctctccagcggcgactccctgcgattcgggtgaccgtcgggaccaccgcgccccagctggagccgcgcggcgagccgcagcatctgcccagcctgggctcctccggcgggcggggcggagcctgtc

SEQ ID NO: 225228 - DNA, 420 bp, Homo sapiens
  chr17:8906202-8906622
  hyper
acgcatcctatcttggcccagctccactggagcccgagcggcggggcgcagggtgcgagcgggaggctggtgttctgcccgcgatgggcaggggagccgggtggccgcggggcgaggagccgcgagggccgggccggcgtgacaccacctggcggagtctcggggaagagtcttaaaggcgcgcgctcctccgtgccccgcgcactcgaacgggagccgcggagagctcgcctcccgctgccgccggcgcctcggggaggtaagtgccacccgcggatcccgagtcgcggccgggtgggggcggcccgcggctgccccgcgctcgggaagctctggctggggctgcggtcggagggcggcgcccaagttttcttgaaggcctcggagggcagctggagcggcgtagagcctgcgcgggga

SEQ ID NO: 225229 - DNA, 180 bp, Homo sapiens
  chr17:8906673-8906853
  hyper
gtgcgtggaaaagtaggcactggtgcgcggcgaggggcgcacgccagagccccagccccgcgtcctgcgcacttggcgcgctctggccgcggtcccggcgagccccagcctgctccgggccgcgaccccggctccgcgccttcctgcccgcccgggtcctttgtagcccgctggccccgc

SEQ ID NO: 225230 - DNA, 300 bp, Homo sapiens
  chr17:8907116-8907416
  hyper
cagaggtgggaagaaaggctttcacagacagaaaatgccattcgccgagcgctcaaaggggctgtcactcccagaataaatcgccgccgcgcccgccggctcctctggccatttccatacagctccggcccgcgccgcggacccgccggcctcggcctcggctcccgggaatcactcactcgagtgccttcgacgggaaagtcgggcgagagctggacccaggcgggggccgagggaaacggggaaactggagactcgggtgaaggccgcaggggacaaagagattgattagaaaatcaa

SEQ ID NO: 225231 - DNA, 360 bp, Homo sapiens
  chr17:9548902-9549262
  hyper
gcctcgcgcccgggggctccgcgcctggagctgcgccggcggcagccatggacctgggccccggggacgcggcaggagggggaccgctcgcgccccggccccgccgccgccgctccctgcgccgcctgttcagccgcttcctgctggcgctgggcagccgctcacgccccggggactcaccgccccggccccagccgggacactgtgatggcgacggtgaggggggcttcgcctgcgccccgggcccagttccagcggcccccgggagccccggggaggaacgcccgcccggaccccagccccagctccagctccccgccggcgatggggcgcggccgccgggcgctcagggcttgaaga

SEQ ID NO: 225232 - DNA, 1500 bp, Homo sapiens
  chr17:10101106-10102606
  hyper
gagacgcggggctgcgggaccgagtcggtgccactttctcgcacccctgatcctccgtgcctcttcccaagaccgccagacccttcaccggcccctgccactgccgggaacgctcccgcctgctccttaactcacacaggcaacaagttctcgcttcctcagagcagccacggtgtgctccggaggcccggcgcaaggtggaagctccccgcgagtccgcgttgcccacgccccgaggggcgcccgctgccgtcgctgccccccaggagcgtggagctacaggtagcgccggcaagggctgccccccggggcgcccctccgaccgggacgctgcggcatccccggaacgggcaacaggtacgcgagcgcaccgaggaccgcagccccggctcctacagccccggccctcgccccttacctccagcaactgcacgtagctcgccgggaaccagccacggagcccgtcctccttctcgccttcccaccagccgccgtccgggacctgcagcagcgtgatcagctcgcccgcggcgaagcgcagcccctggccgtgccgctccccggagaaggggtacagggtccggcagcgagcgccggacatggccttggcgcccgggttcacagcgcagcctgcattcccgccgagccccacgggctgggcagcggctccgcggggtcccaggcgcccggcgctccgggctcccgcgctctgggcgcgcgccgtctctggggtgcgcgggggtcctcaggcaggcgggggacgcgcgctccgcgccgggaagcagagactcgttggcttcgcagagcgagcggcgacgcccccgggccgggcagctcgcggatcctagctctgggctggggggcggggctcagggggaggagacccaggcgccgcgggctccggagacaacttcccgggaacgcggaacgcgggctgccgccgcgagggctggccggggccggggccgggaccggggccggggccgccctggcgcgcggaaatgcgcagctcccccgggaggtgggacccggagcatcccccgcggcaggactccgcggcgggcggccgtggagaggagctggcggccgggtggccgggcgggggttagctcactggcgagggggcgggccggggcggggccagggcggccacgcccgcggagggctgcgcgctccctcgcagaggggcctgtcactggggagaggggctcccactcgcgcccccaccgccggggaccgcgggaatggaaacgcccctctgttctgtgcctgctttgtaggcctggcggcccgtggcgtgcgggcggcttcttcgaggtgtctgcgagggatcgtttgtggttgtcattgtagtggttgaacctggggttgaacttgtctcaccggaaactgaacaatgggtgaaagacaggtttgaagcctggcgcctgagcccagcagcctggtggcagcgtggcacgctggagggacggaatggagagaagacggggtcggagttga

SEQ ID NO: 225233 - DNA, 812 bp, Homo sapiens
  chr17:10632700-10633512
  hyper
gggggtccccaagccgactaaaaagtttaatgatgctataaagggttttggtcggcttcgtctcctaggccctgagatatgttcagtgtcgtccgcgggccggacgttaacgcaggagccagggccgcttcttctgaggtcccctgggaagttccacgcgcggaaccagccccttccagggtgtgagccctggtatgggactcgcttccatgaacacatccgcgtctcttagacgggggagaaagtgggggctccccaagcagaaagcccaagtcccgtcctccccactaactgtgcgcccctgcgactctgcccgctagtcagttacacggcccgctaggccagggggcggagctgggagccgggcgggtccccctcccaccgcggccgcctgacctgcaccaaggccgccagcgcgaagaaggcggccatgagtccgttgcaggcccgccacagcgctggcgccatggctcggagaacacggcgcggggcggtgagtcctgccacgtgcggggcggtgagtcctgccacgtacggtccgccttcctccttgcgcggagggaccgagacccccgcctcggtttcggtgccttggggacactgccgtggccgtcgctccgcccgggggcggggagcgaagggcgtgggtgtagcccccactcagcgacccattcagcccgccccgaacgccgcggggtgtaggcggcgccgtcctggtttcgcggatgggaaagcgagtccctcagggagcgcaggtctcggtggtggacggaagtcgaatttgaacccgtataggttcaactccaaaccct

SEQ ID NO: 225234 - DNA, 833 bp, Homo sapiens
  chr17:11143897-11144730
  hyper
agccggcggctctccgctcgctcgctccggcagctgcgttcccgcctcgccccgccgccgccgccgccgccgccgccgccgcctctgcagtcgcagccgggcatggtgagtgagtgaggtccagccgccgcgcgctctcccggctcgccgccggaccccagcctcaaccggctccgtcccagggagccagcctgcggcgggagcgcgctgcggggccgggcggctgggggacccgggcggccgagctgcgcctggaggggcggcccgtgcgctctcggttccaggcgcgcagggccgcgggaccccgtcttgggagcgggctctacgcccctcccggctccgagtctctctcctcgagggctgcgcgcaccctccccgcccgcctgcccgcggttctcctcctgctcccggagcgccagtcgccccaccccgtgaccggctccccgtcttgtcccgcaggacccgcccggacgggaccacgccgccgccgccgccgccgccgcccggagccgcgcttcgggtcctgcctgagccgagccgcgcgcggggccgcagtcaccgccggcgggggatggggctgcccaggaggcgcgccgagcccgcagggggagcgcggagccggcgcgcagcctgagagcccgagcagcccgcgccgggccggtccgtgcgcaccgcgcgccgccgccgccactgccgcccgcgcctcgatggcgccatcgccccggagccgctgaccgctcagcgcctccagcccggcccgcgcggcgggtcctccgagcccggcccgccgggggagcggcctgccgcggaagcctccccgcgccctcccgccc

SEQ ID NO: 225235 - DNA, 480 bp, Homo sapiens
  chr17:12877195-12877675
  hyper
aggactgggctgcccagggctgtgtcttggccgccgggagcagccagggtgctgggagcacagcccccaatgcatcgcttcccgggcccccggggtgctaaagctgcgctgctcttctcccaacgcggacctgcttgaatgtgggggagggagcctgtctcctgtcatctgttacgcgtgggtaagcggtgtctttgtgtccctcgccagcatgggtgtgagggtcatggacacaaactgggtggctcgaagaggctcctcggccggtcggaaagtgtcctgcgccccgccctccatgcagcctcccgccccgcccgccgagctggctgcgcccctgccttcgccgctgccggagcagcccctggacagccccgcggcccccgcgctctctccatccggcctgggcctccagcctgggcccgagcgcaccaggtaagcgcgggccactgccgtccgggcgggctggtgtgcggtgcaggg

SEQ ID NO: 225236 - DNA, 180 bp, Homo sapiens
  chr17:13505060-13505240
  hyper
gcgggagacaggaggcccgtgcagagccgtccacccctctccgtagcgccgggttgctccaaactgctcttggaccccacctgtgagccgcgtggctgggctgggctgggctgcgcgggacctgtcagcggcccccgccactctgctcgcaggcgctcaccggctgcctcctgggccgcc

SEQ ID NO: 225237 - DNA, 616 bp, Homo sapiens
  chr17:14200599-14201215
  hyper
cgcctctggccaggggttcccgcgcctcgagcagcgccctgggcccttctacgggaagaggggatcgcggcgcccgcgacacccaggagctcggacgaccgcagcctcaccactaacccccaacaaaggtacagcgggagtccaggccgagataaagttcccttcccagtccgctggggagacaactggccgcggctgccctctgctccgctcccggctgtcccgcagctgcgaggccggggccagagcgctcccttccgggcgggcatcggagccgctgcggcgccgaccgcccttcgcgcccgggccgctggagaaggcggagcgagctcgcagctgctaacccccgaggggccgcctcgctggcgaggggagcgggaggaaggtccggattccggtggcaggaactggggctctgggccaccggttcaggctgccccaggaaatgcctgctttgcggtgccgcagagggtatagaggagctcggccccagagggtggctgttggggaggcggagctggccgcaggctggagcagctgcggagcctcccatcccgagcctagaatcggagaaatttcaggcggaaaatactgcggggatggtttggctcaagtc

SEQ ID NO: 225238 - DNA, 1980 bp, Homo sapiens
  chr17:14204383-14206363
  hyper
agctctcttcctgcgcagttcgcctctgcagcctctgcggggaagtgccggggctgctcgaggctcagttcttaggactgcaaggaggcagccccggcgtgcggcggtgcgcacagtctagagtggccagggcgcgagagtgcaacgtcctcctggccccgagcgcgtcgtcgcgccccgggagcagaccctcgcccagcagttaccgccgtcccgactttccgttccagttgcagctcctgccgggcaacatgtcaagagccgccgccgctacagctgccgccgccacctggggaagagcagcagcagcagcggcggccgcgggcacacgggggcaataaaccgagccacccgggcgtccagcgtgccggggaaccctctctgcgctcactgcccggcgggacccacgccatgtgctgagccatgtccctggccgcgcccgcgggcagcgcatggggcagcgcctgagtggcggcagatcttgcctcgatgtccccggccggctcctaccgcagccgccgccgcccccgccgccggtgaggaggaagctcgcgctgctcttcgccatgctctgcgtctggctctatatgttcctgtactcgtgcgccggctcctgcgccgccgcgccggggctgctgctcctgggctctgggtcccgcgccgcacacgacccgccagccctggccacagctccggacgggacgccccccaggctgccgttccgggcgccgccagccaccccactggcttcaggcaaggagatggccgagggcgctgcgagcccggaggagcagagtcccgaggtgccggactccccaagccccatctccagctttttcagtgggtctgggagcaagcagctgccgcaggccatcatcatcggcgtgaagaagggcggcacgcgggcgctgctggagtttctgcgcgtgcaccccgacgtgcgcgccgtgggcgccgagccccatttcttcgatcgcagctacgacaagggcctcgcttggtaccggtgagtttccctgccaggggcagggtctccatcgtcgattcagaccctgagctaagggagacatggcgtatgatagggaattggcagggttacagcttcggaccacccggggtagggcagggaaactacggcagattgcgcagcgcatcctgtccgggtgcggtgagggttgcgctccgcttggttctcgtcacaacccacagaaagttctcgcggagcactggtgcccttgaattcatcaggcgacctcgccgcaaagaagaagggcagcgactgagaccgccctcagcaaagcgagccaccctctaaccatgggggtatccgactcgaatcgtattttatgactcgttttaaattttttcctcccggagcccgagacgctgggaatgttctgagcccctttggtcggtctccgccctcaaggaacttctagagcagcttctgcttcccagatggggagagggggtgggggccgcggcgtcccggcgaggccgcagagtctgttaactttttgttacagtccgcctggttaccggaaccccaagggtgtcagacccgcctcgctcgcgagccgcctgggctcgggagggtgagccgggcgggtggcccggcgcctccgcctggcgggcgggcggcgcgcggagcgtggagctgtgctggtccctgtcgggcaaaggcgcgcactgcaaccggctggagcggcgcgaggctttgaaggcgtccgggcctccgggcaccgccgcccgtttccgcctccctgccctcggtgctgggatagggaaagcaaggacgcgtgtctccgcggggcttttacacgtccggagcaaagaatattcggggcccattgattgagaaatgagggttgcttcgaggtcgcggcttccggaaattctgttctcgagtcgggttgcgggtcaggttccaaagggacagtggccccggggtcacaatcactacctctgcccactgctttc

SEQ ID NO: 225239 - DNA, 331 bp, Homo sapiens
  chr17:14212387-14212718
  hyper
ccagctgcccccgacgttgccacgtgtccgctcctttcgggagctaggggggcgttggcttggacatcccgttctggaagggtggccgggggcgctaccacgggcggggaaaatggctccgagccacccggcctcgggcatcaatcgacgcggccctggtgtcgcgcgggatcgccgcctctggcccgggggccgctgagccggagacagatggcggagcttcccagtgcgggggcagggctggcagccgagactggggccgcctcccccgcccctaggctggccgggtagtcctccgtggccacgtgaccagcctcgccgtccggcctca

SEQ ID NO: 225240 - DNA, 243 bp, Homo sapiens
  chr17:16256906-16257149
  hyper
agggagacccggcccgcccggccgctgggacgcacctgcctgttcagtcccgcaggcagaggggctgcgcctgggcctacgctcgcgatacccagaatccactcgcacctgcgaaggcgcccctgccctgtgtgaatccagcgggctcttcgtaccttcccgacctggaggggcctgggttgggcctgaattcgcaggctcatccgagcgggcagcctggggtaacttcgtctccaaaaacga

SEQ ID NO: 225241 - DNA, 513 bp, Homo sapiens
  chr17:16284605-16285118
  hyper
gggggaggggagggcgaggtgacgcggcgctgggcctttccgggacagtgggccttgttgacctgaggggggcgagggcggttggcgcgcgcgcgcgttgacggaaactaacggacgcctaaccgatcggcgattctgtcgagtttacttcgcggggaaggcggaaaagaggtagtttgtgtggtttctggaagcctttactttggaatcccagtgtgagaaaggtgccccttcttgtgtttcaatgggatttttatttcgcgagtcttgtgggtttggttttgttttcagtttgcctaacaccgtgcttaggtttgaggcagattggagttcggtcgggggagtttgaatatccggaacagttagtggggaaagctgtggacgcttggtaagagagcgctctggattttccgctgttgacgttgaaaccttgaatgacgaatttcgtattaagtgacttagccttgtaaaattgaggggaggcttgcggaatattaacgtatttaaggcatt

SEQ ID NO: 225242 - DNA, 256 bp, Homo sapiens
  chr17:16310308-16310564
  hyper
tcccaaggcgcctggctcaccgctccagagcgcgctcccgggtcggcctccgccctccaagccggagggaaatgctgtggtcccgccgtccgcctgcatcctccagttcctttggagggcaggggagtggagcccacaggctctgacacccttacagtccagctctgtgacttggggaagggagtggcgcatgaggagggcgaagctggagtccaaaggaaggtccttccgttcccgcccccgacccgggatccgc

SEQ ID NO: 225243 - DNA, 57 bp, Homo sapiens
  chr17:16395229-16395286
  hyper
ttcgcgtcgggggcccggcgcggcgccggggctggctctctccgccaggctgccctt

SEQ ID NO: 225244 - DNA, 760 bp, Homo sapiens
  chr17:16472054-16472814
  hyper
gcctcttactcctcttcagccgcagggtcgaggtcgagggcagcgggggagtcggggaccgtgcgacgcgcaacgctgggactgggcccacagcagcctccaccccgtctttgccctcccgcaagccacgagcacgggagcccgcgcgtggacgggctcgggctgtcactgatcgcgcggacactcgcgcgctgcgcccggacatcaatacctgtcgctgggacccggccgacgggcagccggagcggccctaaggccacaggcaacaatggcgacgctggcacaggcgcctgcgtggcgggctcagtcccgagcggcagcggatcctcgggctccgccacttcccttccccgcaaagcacagagtgtcccggccaggagctgcacgttccagcccggtcctgagaagcccggcccagaaaccccggcgcctctgcttagccgcgacctcgcctcggcgtcactgcgcatgtgcgccagaggaacgctgcgcgcccgcagagccaatcggagcccaagctgccgcctccccctcccgcgcctctggccctggacctgtctccatggcaacctcctccacccatcgctctgacttgcttgtcagcctgcgaggttccgaagggaacttcaaagtttccccgggcagacgcaggtctggtagacgtcttggaggccagggaggtgccagtagctggaggagcgccgggagttgaagccccgcgccaactacgcagagaaaactgggcgccagatttcctaga

SEQ ID NO: 225245 - DNA, 180 bp, Homo sapiens
  chr17:16570369-16570549
  hyper
gggtccgctcccccggactggccctgcccacggagcgcgggtagcagccggcggccaggagccagtggcgggagccaccggtgggaaaaccggcaggaggctgcgctggaccccgctgggcagcgccaatccctaaggcagccgggcgggtgagctaacggcggcgggggcggctgagag

SEQ ID NO: 225246 - DNA, 109 bp, Homo sapiens
  chr17:17287173-17287282
  hyper
cgcggggcgcggggcgatgcggcgcgccttggcttgccgggccttacgtctgcggatcttccgggccggctggttgaaccacgtggccacgcgccgctgccagtccttg

SEQ ID NO: 225247 - DNA, 180 bp, Homo sapiens
  chr17:17398735-17398915
  hyper
gctgctgttcttcttggccgagatctcgaagtaggcgcagcgctgggggtcgtcgcccaccagctgctcgatctcgcgctggtccacctcgcggtagaagtcgcggtcacccttgttgccgcagatgaccaggggcacgtccacgttctccttggttttgttcttgaggcaagacttggt

SEQ ID NO: 225248 - DNA, 720 bp, Homo sapiens
  chr17:17398971-17399691
  hyper
gactgaacaccaggatgaaaacgtctcctagagggggcacagagagcagaaaaggagaaggtgagggtggccgcccaggggacaagtcgggctgactttgaggccgcgcggggcgcgctagcctctctaagcgcgaagcgcactactcggcgcgcggcagccggaccggcgctcgcggggcgccctggccgagggttccccgcccttccctcccgcacctgcccggcccccggctcacctgtgaggatggagaggcgccgcatggcggggaacgggtggttgccggacgtgtcgaggatgtcgagctggtagacctcgccgcggatggagtagaacttgcggtggaagtcctcgatggtaggcgtgtaggcgtcctcgaagcggccggtgaggaagcgcgacacgatggccgtcttgcccaccttggacgagccgaggatgaccatgcgatagcagttcttggccgggatactcagctccgagtcgctcgggcacatcttcttgatcatcgcggccagtttcattgggcagaggggccgcgagggcgggcgcggggccgagagaagggcagagagcggctgagggtcgctggggtggcacgcggggtgagcggctggagggctctgctcgggctgggcgcggctcgggcttggggctccggctccgctcgggctgggctcgggctaggctgggctcggctggggttctcccaggatctgg

SEQ ID NO: 225249 - DNA, 104 bp, Homo sapiens
  chr17:17399948-17400052
  hyper
cggcggccgcaggggcgtcggggttctggtcccggcggtgcccctgtccctctgcgacttcgggcaaggacccccattcctgcacctcccgcgcgcgtacactt

SEQ ID NO: 225250 - DNA, 283 bp, Homo sapiens
  chr17:19140730-19141013
  hyper
caaactgagccagacgcggcggtggcggcggctccgcgggctacggtcgctcccgcctctcgagcgctgccggtggccgcagcggcgcacccacgccggcccggaggagcagaggtgagccacagcccgtggggctccaaggccagagcgagtccccggggcgaggaccctccccctctccagggcgcggacgcccccagagcacaggctcccctacctcaccagccccgccagggcatgcgcccctgccgccccgctggtccctacgccaggctctggggga

SEQ ID NO: 225251 - DNA, 424 bp, Homo sapiens
  chr17:19282073-19282497
  hyper
ccacgaaccagccgcgcgcttctgcccttgtcggtttaggaaactgggaagttccctggtcctgctccccagcccgcagaggggacactgaggcccacggtaggtggtcctctcctcacccgagtctccacacagacaccatggccgagcctctgaaggaggaagacggcgaggacggctctgcggagccccccgggcccgtgaaggccgaacccgcccacaccgctgcctctgtagcggccaagaacctggccctgcttaaagcccgctccttcgatgtgacctttgacgtgggcgacgagtacgagatcatcgagaccataggcaacggggcctatggagtggtgtcctccgcccgccgccgcctcaccggtgagcttcctgagccgtcgcctcccagatgtggcagcgtcgcagggagtgg

SEQ ID NO: 225252 - DNA, 180 bp, Homo sapiens
  chr17:19436923-19437103
  hyper
ggagcgcgttccgttagtttacagagctttttcaaactttgccttccaagtgcaggagttccttggtctttgcaagacccgcaggcgtccgcagtggtgcagagagaggtgcaaggggcgcgcccaaggtcgcaggctgcctggctgcgcgctcagtcgggcccccgggcgccaggcgcg

SEQ ID NO: 225253 - DNA, 404 bp, Homo sapiens
  chr17:19437229-19437633
  hyper
cccggccgcagcgcgcgagtcacatggaagctcctgaggagcccgcgccagtgcgcggaggcccggaggccacccttgaggtccgtgggtcgcgctgcttgcggctgtccgccttccgagaagagctgcgggcgctcttggtcctggctggccccgcggtgagtaaggtggcctcagtggcaggccggtaccggcgggctggggacctggtgatttctgcctccgcgggtgactttggcgggctttggggaccgagcgagctgtccgccggcgggctccggggagcatcgtgccaggagccgggcgggcaccccagctcctctgcctgcgtcccggccgctttccgctccgcaccacccgactgggggccccgcggggcactgcgggaacggctggtacgcgcc

SEQ ID NO: 225254 - DNA, 180 bp, Homo sapiens
  chr17:20059204-20059384
  hyper
tgcagatgacgggggcgggccgcgcctggcgggcggtgtgcagttgaggtggtccggcaggatgcagatgaagggggcgggccgcgagggcgggcttgatgcagatgagggggcggggcccacgggcgcgggagagcagcggctccgccggcagctgctgggaactggaaggcgcccggt

SEQ ID NO: 225255 - DNA, 507 bp, Homo sapiens
  chr17:26120457-26120964
  hyper
agcgttctaaaagaggaaaacgcttttagtaaaccctcaggaatcccacagagcgcacatccccgccctccgatttctcccagagagagatggggccccgcccgggctcggagcccaccgcttccctcccagggcggacttcggcccgcggggtacctggctctgcgcgggcagcagtcaggcttcggccggaggatcctgcagagcagcctgcacagccggggcccggcggcctcgcacgccgcgcccagcccctcgcgcatggcccggctccttaggcgcagctccgctggctccacgcgcctcccagcgcccgcgctttatcgctcggagcctgcagcccccgccccgggggcggggcgagccgagcagcggcgggggctcttcacccacgcgatgtcccgggccgagctgcccctccttccctgccttccccggcgatcccgggacccaagcacccaggggcccgcagccggcgtctgccgcggagtttggatggcactggac

SEQ ID NO: 225256 - DNA, 397 bp, Homo sapiens
  chr17:26925694-26926091
  hyper
tgggttctgccagcccgcccctcctccctccctaagaagcccaaaatgcgattagaagagtacgctcgcaccctagtcgcgcaggagcagcaaggcgaacaaagactccacaagcccccaaccccgggctcgacccaactttccaggacagtagacacggccggtgcccccgcgacagcagcccggcccagttctctccgccagagatctcccgcttaccgtctggggcgaaggcgacaggctgaggctcagttttttcactcgccacatcttcaaccagaaggcaggcctatcacgtctcagaccaagtcgaggacgccatgttcacccgccgtctgtgtttgaacctgctctgcgcttcctggttggctgcttcaggcgcgcgcgtacgctcggg

SEQ ID NO: 225257 - DNA, 568 bp, Homo sapiens
  chr17:27332301-27332869
  hyper
ggtgagcgaggtcccaaccccgggtccggccgccatccggccccgtctcccctcagtaagaacactagaggccctggaaccggcggcaaagtcgagcgaagtttggcgggcggcaggggaagcgggaccacgggccgccagctggaccgtcccgactcactgccttgcgccccccggcacgcgccccagcaccctgagatgcctagagtgtggcgaggtagcgcgcgggtgagcgcgtgtgtgcggggagtgggtggcgtgatgaattgcatcagagaaatcccattagatctggggagatgattaaagacgaggtctcggccgggcgcgaatggcgggagccgcggcagcttcccgcccgcgaagcccgcgccccgcccggcttggccggcgccgggggcagcgcagccggcggggcgcggtgcttggactgggcagccagatgcccgaagctgggcaccgggtctcccttcccacccctggggccccgctcccgcccccgtcctgccgccggatgccggggtcccttaccgtgagccaggagcgccagcagcgagggcaggagcag

SEQ ID NO: 225258 - DNA, 180 bp, Homo sapiens
  chr17:27333095-27333275
  hyper
ggggcgggggcgcgggaggagcggcttaccgtaaagtctcatgcaaaggcgcagagacccaggggcaggagcccaggctcccgctccaccgcgactgccctactcatgtgggcacacggcccctgcccttctgcgctgcccacccccagccaagcatgccaccctctttcccgttaacgg

SEQ ID NO: 225259 - DNA, 567 bp, Homo sapiens
  chr17:27893179-27893746
  hyper
ggcagcgcagcacgggcgagatgcaggcggcgcctgtcacgtagctggaggagccgcactcgcccaggtaggacaggagcagcgccgagcccgagccttcgctcaccgcgaacagcggcgccgccgggtgtcggaagcggatgtatgtgaccgcctccttgaggtcggacgggtccccgaaaggctgcagccgggggctgaccagtgggcaaccgtggtggccgcggcgatggaagatgaccgggtagtagccgcgctccagggcgagcaagcaaaggccgagcacgttgcgggtgaggcgaccccacgcattggggatcaccagaagcaccgcaggaaggcccccggcgctggtgatccggcggccccgaacacaaggtcctaccacccagtccagggccactagcccatcgtccgccaactgcaggtactcccgggccagctcaggcccaggcgctacgggcaggacgaagtggcagagggtctgcaggtggggcccggagaaccaggagcgcgggccggcctccagcgcctctgagcgccgcagggcgcgcagcaggcactggg

SEQ ID NO: 225260 - DNA, 360 bp, Homo sapiens
  chr17:27942986-27943346
  hyper
ctggctgcggcgggggccggagggcgggcgcacgtccaggatgttgcgcttcgtgacccggagctcgcggtgcttggggggcacatagccgtccctcagcgaaatgagcacgggttcggcgtcctggccggatagccattcgtccgcttctagggccggctccgggcctggcgtatccgggtacagatcgtcctggaagaggtctgactgcgggggtgggtggacaggaggacttgcgtgagagggtgcggggcttgctccgctcccttccgcctcgtagccctgcccaacccttctcccggcccctcaccttgcggggcacagtcatgatgataggttcacactttctttcgtgtagct

SEQ ID NO: 225261 - DNA, 633 bp, Homo sapiens
  chr17:28562625-28563258
  hyper
cccacctgccaggctgcgcggggaggctggtcccgggctgggcaggcgggctggcctcgcgccctcgaggcacccggcggcgctggctgtgcggaggggcgccggcgcggccgtatttgtacccgcgggccctcacatggtctgatctctagatagccgccgccaaagagctcttgaagaatttttgcgtcactttgaggcgaataaacttaatgcttccccgcggccgcggctccgcgctcccgctggatggggttgcgctcgccagggaggggccgcgctacggggcggggtgcgcgcccgaccccagagccaggaggggagggacccccgacacacacacacgctcgcagggaggagcggagcgcggagcagccggcagggcagggccgagcgaggaatcctgactttcctgctctttaactttgcgggaggggggaggctgcacaaaggagcaggtgtgcgcctcccctgccgccccgcgcccacaggacggcacacaggggtctgctcgtgccgctttctcttgacctcggacacctccccatcgtccccatcccgaaagctgctctctctttcttcctgggacctagcagtactcgatacccatgcgtttatctgactgaccggctg

SEQ ID NO: 225262 - DNA, 864 bp, Homo sapiens
  chr17:29248999-29249863
  hyper
gggctgagccccgctgagcccgccgggccggccatgggcgatcgcgagcgcaacaagaagcggctgctggagctgctgcgggcgccggacacaggcaacgcgcactgcgccgactgcggggcggcaggtaagggcgcggcggcgcgggcagcgcgagacccccggccggaccccaggcccacccgactcctcccctcggccccaccgggtcccgccctcggccccctggacccagacgtggcacctgcgggccccgacccctcccacccacaccgtgaacctctcacccgagccccgagggccgtctccaccacaccctgccccggcccctacgagcccaggctctgctcccctcgcgggaccagatgcgcatcttcccacgtgcttggacccggacacgagagccggcagcctagagcccttccagtcccgctctcttccctggccaggcacccgaccgcccgagtccgggctctcgatgtctgcgcacccaggcgcgccccacgccctcggactcagacatcccagccagggctaaacgtcgggcccaggccgccgacagtcctgtgccccctgcccgctcccagacgccccccgaaggcctccccagcgccccacctcggggacgccgagggccccctaactcagcctccccacctgcagctccgcgccgagccccgcggtgcgccccccgcgccctcctctcggttccttctgagtcccttcacttccacgtcgcgcagcctcagactctctccccgggccctgaactgcctccaggatcttcaccccggtcgccgcgcagcggccggtgggctaaccagaaggtgccaggctggccgcttagttcgccttaggtgggag

SEQ ID NO: 225263 - DNA, 511 bp, Homo sapiens
  chr17:29421876-29422387
  hyper
gcgcgggcgcatgcgcggcaggccgccttccctctcgcttccccctcccctttcccagccgcgctctcaatctctagctcgctcgcgctccctctccccgggccgtggaaaggatcccacttccggtggggtgtcatggcggcgtctcggactgtgatggctgtggggagacggcgctagtggggagagcgaccaagaggccccctcccctccccgggtccccttcccctatccccctccccccagcctccttgccaacgccccctttccctctccccctcccgctcggcgctgaccccccatccccacccccgtgggaacactgggagcctgcactccacagaccctctccttgcctcttccctcacctcagcctccgctccccgccctcttcccggcccagggcgccggcccacccttccctccgccgccccccggccgcggggaggacatggccgcgcacaggccggtggaatgggtccaggccgtggtcagccgcttcgacgagcag

SEQ ID NO: 225264 - DNA, 144 bp, Homo sapiens; identical to SEQ ID NO: 204486
  chr17:29483000-29483144
  hyper

SEQ ID NO: 225265 - DNA, 91 bp, Homo sapiens; identical to SEQ ID NO: 204487
  chr17:29486027-29486118
  hyper

SEQ ID NO: 225266 - DNA, 191 bp, Homo sapiens; identical to SEQ ID NO: 204488
  chr17:29490203-29490394
  hyper

SEQ ID NO: 225267 - DNA, 109 bp, Homo sapiens; identical to SEQ ID NO: 204489
  chr17:29496908-29497017
  hyper

SEQ ID NO: 225268 - DNA, 68 bp, Homo sapiens; identical to SEQ ID NO: 204490
  chr17:29508439-29508507
  hyper

SEQ ID NO: 225269 - DNA, 88 bp, Homo sapiens
  chr17:29508715-29508803
  hyper
ctttatttataggcattttggaactgggtagaaaattatccagatgaatttacaaaactgtaccagatcccacagactgatatggctg

SEQ ID NO: 225270 - DNA, 163 bp, Homo sapiens; identical to SEQ ID NO: 204492
  chr17:29509520-29509683
  hyper

SEQ ID NO: 225271 - DNA, 174 bp, Homo sapiens; identical to SEQ ID NO: 204493
  chr17:29527439-29527613
  hyper

SEQ ID NO: 225272 - DNA, 123 bp, Homo sapiens; identical to SEQ ID NO: 204494
  chr17:29528054-29528177
  hyper

SEQ ID NO: 225273 - DNA, 75 bp, Homo sapiens; identical to SEQ ID NO: 204495
  chr17:29528428-29528503
  hyper

SEQ ID NO: 225274 - DNA, 140 bp, Homo sapiens; identical to SEQ ID NO: 204496
  chr17:29533249-29533389
  hyper

SEQ ID NO: 225275 - DNA, 135 bp, Homo sapiens
  chr17:29541468-29541603
  hyper
agtcttacatttaaagaaaaagtaacaagccttaaatttaaagaaaaacctacagacctggagacaagaagctataagtatcttctcttgtccatggtgaaactaattcatgcagatccaaagctcttgctttgt

SEQ ID NO: 225276 - DNA, 136 bp, Homo sapiens; identical to SEQ ID NO: 204499
  chr17:29546009-29546145
  hyper

SEQ ID NO: 225277 - DNA, 80 bp, Homo sapiens; identical to SEQ ID NO: 204500
  chr17:29548867-29548947
  hyper

SEQ ID NO: 225278 - DNA, 124 bp, Homo sapiens; identical to SEQ ID NO: 204501
  chr17:29550461-29550585
  hyper

SEQ ID NO: 225279 - DNA, 156 bp, Homo sapiens; identical to SEQ ID NO: 204502
  chr17:29552112-29552268
  hyper

SEQ ID NO: 225280 - DNA, 250 bp, Homo sapiens; identical to SEQ ID NO: 204503
  chr17:29553452-29553702
  hyper

SEQ ID NO: 225281 - DNA, 74 bp, Homo sapiens; identical to SEQ ID NO: 204504
  chr17:29554235-29554309
  hyper

SEQ ID NO: 225282 - DNA, 84 bp, Homo sapiens; identical to SEQ ID NO: 204505
  chr17:29554540-29554624
  hyper

SEQ ID NO: 225283 - DNA, 441 bp, Homo sapiens; identical to SEQ ID NO: 204506
  chr17:29556042-29556483
  hyper

SEQ ID NO: 225284 - DNA, 140 bp, Homo sapiens; identical to SEQ ID NO: 204507
  chr17:29556852-29556992
  hyper

SEQ ID NO: 225285 - DNA, 123 bp, Homo sapiens; identical to SEQ ID NO: 204508
  chr17:29557277-29557400
  hyper

SEQ ID NO: 225286 - DNA, 84 bp, Homo sapiens; identical to SEQ ID NO: 204509
  chr17:29557859-29557943
  hyper

SEQ ID NO: 225287 - DNA, 117 bp, Homo sapiens; identical to SEQ ID NO: 204510
  chr17:29559090-29559207
  hyper

SEQ ID NO: 225288 - DNA, 514 bp, Homo sapiens; identical to SEQ ID NO: 204511
  chr17:29559717-29560231
  hyper

SEQ ID NO: 225289 - DNA, 411 bp, Homo sapiens
  chr17:29562628-29563039
  hyper
gatgaactagctcgagttctggttactctgtttgattctcggcatttactctaccaactgctctggaacatgttttctaaagaagtagaattggcagactccatgcagactctcttccgaggcaacagcttggccagtaaaataatgacattctgtttcaaggtttgtatcattcattttgtgtgtatgtgtgtgctgaggtatgtcaagtaatgattatgtacagaatgtgcagggctgattgtcttcttttaaggtaaaatatatggagcaggtataataaactcctattcgtgcatttctgtaggtatatggtgctacctatctacaaaaactcctggatcctttattacgaattgtgatcacatcctctgattggcaacatgttagctttgaagtggatcctaccag

SEQ ID NO: 225290 - DNA, 136 bp, Homo sapiens; identical to SEQ ID NO: 204514
  chr17:29576001-29576137
  hyper

SEQ ID NO: 225291 - DNA, 63 bp, Homo sapiens; identical to SEQ ID NO: 204515
  chr17:29579955-29580018
  hyper

SEQ ID NO: 225292 - DNA, 159 bp, Homo sapiens; identical to SEQ ID NO: 204516
  chr17:29585361-29585520
  hyper

SEQ ID NO: 225293 - DNA, 98 bp, Homo sapiens; identical to SEQ ID NO: 204517
  chr17:29586049-29586147
  hyper

SEQ ID NO: 225294 - DNA, 147 bp, Homo sapiens; identical to SEQ ID NO: 204518
  chr17:29587386-29587533
  hyper

SEQ ID NO: 225295 - DNA, 147 bp, Homo sapiens; identical to SEQ ID NO: 204519
  chr17:29588728-29588875
  hyper

SEQ ID NO: 225296 - DNA, 111 bp, Homo sapiens; identical to SEQ ID NO: 204520
  chr17:29592246-29592357
  hyper

SEQ ID NO: 225297 - DNA, 433 bp, Homo sapiens; identical to SEQ ID NO: 204521
  chr17:29652837-29653270
  hyper

SEQ ID NO: 225298 - DNA, 341 bp, Homo sapiens; identical to SEQ ID NO: 204522
  chr17:29654516-29654857
  hyper

SEQ ID NO: 225299 - DNA, 203 bp, Homo sapiens; identical to SEQ ID NO: 204523
  chr17:29657313-29657516
  hyper

SEQ ID NO: 225300 - DNA, 194 bp, Homo sapiens; identical to SEQ ID NO: 204524
  chr17:29661855-29662049
  hyper

SEQ ID NO: 225301 - DNA, 582 bp, Homo sapiens; identical to SEQ ID NO: 204525
  chr17:29663350-29663932
  hyper

SEQ ID NO: 225302 - DNA, 215 bp, Homo sapiens; identical to SEQ ID NO: 204526
  chr17:29664385-29664600
  hyper

SEQ ID NO: 225303 - DNA, 321 bp, Homo sapiens; identical to SEQ ID NO: 204527
  chr17:29664836-29665157
  hyper

SEQ ID NO: 225304 - DNA, 102 bp, Homo sapiens; identical to SEQ ID NO: 204528
  chr17:29665721-29665823
  hyper

SEQ ID NO: 225305 - DNA, 141 bp, Homo sapiens; identical to SEQ ID NO: 204529
  chr17:29667522-29667663
  hyper

SEQ ID NO: 225306 - DNA, 127 bp, Homo sapiens; identical to SEQ ID NO: 204530
  chr17:29670026-29670153
  hyper

SEQ ID NO: 225307 - DNA, 141 bp, Homo sapiens; identical to SEQ ID NO: 204531
  chr17:29676130-29676271
  hyper

SEQ ID NO: 225308 - DNA, 142 bp, Homo sapiens; identical to SEQ ID NO: 204532
  chr17:29677200-29677342
  hyper

SEQ ID NO: 225309 - DNA, 158 bp, Homo sapiens; identical to SEQ ID NO: 204533
  chr17:29679274-29679432
  hyper

SEQ ID NO: 225310 - DNA, 123 bp, Homo sapiens; identical to SEQ ID NO: 204534
  chr17:29683477-29683600
  hyper

SEQ ID NO: 225311 - DNA, 410 bp, Homo sapiens; identical to SEQ ID NO: 204535
  chr17:29683977-29684387
  hyper

SEQ ID NO: 225312 - DNA, 143 bp, Homo sapiens; identical to SEQ ID NO: 204536
  chr17:29685497-29685640
  hyper

SEQ ID NO: 225313 - DNA, 47 bp, Homo sapiens; identical to SEQ ID NO: 204537
  chr17:29685986-29686033
  hyper

SEQ ID NO: 225314 - DNA, 217 bp, Homo sapiens; identical to SEQ ID NO: 204538
  chr17:29687504-29687721
  hyper

SEQ ID NO: 225315 - DNA, 3665 bp, Homo sapiens; identical to SEQ ID NO: 204539
  chr17:29701030-29704695
  hyper

SEQ ID NO: 225316 - DNA, 311 bp, Homo sapiens
  chr17:29718210-29718521
  hyper
ctctgggcctcagcttcctccgggatgaatgcagtcacggaacgcgccaatgcaggaggcccccaggacatcctgagcgctcgggagacgccaggcgcggcagcgggcacggatagcggaaaggggcgcgaccccgcggaatcctccggcagggcagggcctttgggtggctccgggtgtccagaggaaggggtgggctcggggacgcggagggaaactggggacgcggagggaaactgaggtcgcggaggacgcggccgttggcagctcgctgcgcctgccggccccgcgtgggccgccccactcgggag

SEQ ID NO: 225317 - DNA, 332 bp, Homo sapiens
  chr17:29718750-29719082
  hyper
cggaggctgcgcggcgcagacccagacgggcggccccggagggcgcgcggcgatggcggcggcgggcaggcggcgggcgcggcgggcgaggggtccgggctgagctgcgggccggcccggatggcgggcggcgcgggctggtcgggcgcccccgcggctctgctgcgctccgtgcgccgcctgcgcgaggtgttcgaggtgtgcggccgcgaccccgacggcttcctgcgcgtggagcgcgtcgcggcgctcggactgcgcttcggccagggcgaggaggtaagctggcccgaccccagtcccggcccggggaccccagcccagccccgccg

SEQ ID NO: 225318 - DNA, 149 bp, Homo sapiens
  chr17:29719115-29719264
  hyper
gtggcccgaggcggtggcctccctcccaatcccctccctccgccggagcccaggacctcggccccccccgggtatccctggcccagccgggccctcgctttccgccccccggcgcccgtgccccgagcgtcacgcgtcacgcctagggt

SEQ ID NO: 225319 - DNA, 399 bp, Homo sapiens
  chr17:30592474-30592873
  hyper
cgtccttacaacatcgcgcccccaattcactcctagttaaccctgacgtcgccaacatagtgtctccatcacatatctgccacctccaagtgatggttaagccgatggaagagccaagcccgggcccggagtgcaggccggtggtgaccgggccggggacggcgcagtccccatccccgccccgggcagcgccaccacttcctcgccagccccgccgcagccctcccgctcccgggccgcgccgctctgaccgactgggcccgggtggcggcgcccggggtggggtgcggggcgggggccggcgttccccgcgagcagccccgcccccgcccgcgcgccgcccccgaggactccgcggggaggaggagactcgggcgcagagcgggggccgcgagaagc

SEQ ID NO: 225320 - DNA, 300 bp, Homo sapiens
  chr17:30592941-30593241
  hyper
cgagggccggggcggaggcggaggccggcggggcagctagcgcagtgaagtttggcggcggaggggccgggcgtcccggggtcgcgaggaggcggcggcggcgcggggaccggggccatgggggcgggcgcgggctgcggagcgggcgcggaggcggcgcggcgcgcactgagcccctggagcggcgcggccgccgcggcgcaaagttagcccggcgccccgggacgagccccgcagccgccgccgcccccggaccccgtctcggccatgggcgagcaccccagcccgggccccgcggtg

SEQ ID NO: 225321 - DNA, 89 bp, Homo sapiens; identical to SEQ ID NO: 204542
  chr17:30813422-30813511
  hyper

SEQ ID NO: 225322 - DNA, 105 bp, Homo sapiens
  chr17:31203740-31203845
  hyper
cccctctcgggaaagcgcagcctcgcgcccctgcgcgcggccgctccgccctcacctgagcctgaggttggccatgaactcgggcatggagacggtgtccatcag

SEQ ID NO: 225323 - DNA, 1020 bp, Homo sapiens
  chr17:31618501-31619521
  hyper
aggcggtccatgaaggcggcgctgattccctcgaagtggcgcggaggcaggaagaggcggaagtccgccagcttgcggaaccactggcggcgcggctcgtcgccccgcagcagctcgctgacaagcgggcgcgcggtgcggttgggcagcagcagcccgagccagtggccggcatagtagaggtcccccttggagaggcgcgggaagcgcagcgggttgttgttgcacacagtgacggcggggaagggtaactggcggctccactcgcggtgcacccgcgtgtgtgacgggaagctgagccagtagagcaagcggttcgaggaccaggacagcagcaagccgaaggatgtacagaaggccagcacccacagcgcccgccgctggaaggagcccccagccgccgtgcgcccggcacacatgtgccgcagcccgtgcagtttagcgcggctcagcgatggccgccccctgcgggcgacccctggcccctgcagcgcccgctcgccgcctctgccgcccccgggctgcccggcagccgccaacgccgcgggcgccggctcctcgcgggccatgcggaagcgtcccgggccggtgagcgcggctgcgggcagcccggctccgccaatccggctcattcattcagcccgcggctggcggcagcggcggcggccccggccgggcggagccgccatgggagtccgcagcagcagtggaagcagcagcagcggcagccgcgcgcagcccgcgccagggaagcgtgcgcccgaaaggagctccggtggcgcggcatgcccgcccggcgccgccgctgccgcctccgcgggcgcccgcccggggctgagcgccgcctcagcccgcagcccctggcagtggcctctcccgagcgcctcccaggctttcccggcccctggtcttcctggaggatgcccggcgcccggcactacttctggaggggtcccactgggagccgcctctccagtccctgggtgctgcgcccgccttccctcgtcctggacctcgggg

SEQ ID NO: 225324 - DNA, 540 bp, Homo sapiens
  chr17:31619558-31620098
  hyper
agcttttacgctggtcctgggagaagggccactcggccaccatgcctgatctggacatccccagggaccccaccagcccggcccgtagcccagcggtgctgggacacgggagagaaggcgccaaggaacgagcgcccccagaggcgcaccgcggctcctggctgggcgggcggggtgggtgtgtacgggggtgagtggtcgccttgccggctgccgccttctttcccttcccctccaggacccttccttgttactgctccctgggctgcgctcggcagagacctgcttaggcttccccaagtcctgcgcctaagtcctgccaggcgcccgctctcgcctggggctgagagcttctcagggcgtcctgcgggaggctgttcgccgccggggtccttcaaggatgctagccgcagggaagtgtcgcttctcgcctcggctctcccaggtgcctcgcgtctccagaaaagcccagccttgctgtctctcgcgtcttctctctgcccccgcggcgacaagagctggggactgcggggacccgcc

SEQ ID NO: 225325 - DNA, 180 bp, Homo sapiens
  chr17:32907649-32907829
  hyper
tgcggttactaccgaaaccgaggaaactggggattgcgttggaagtcggcaccctcgagtgagttcggattcgagctgggccgtgaggccgggagattcagcactgggctctaggtagcccccgggacgcccgcggccaccgggctccggactgcacgtgcagctccccccgcgcctcgc

SEQ ID NO: 225326 - DNA, 1020 bp, Homo sapiens
  chr17:32908017-32909037
  hyper
gatgtgaccaagcccagcctggggccaagtcgtcgtcgactgttgctctctcggacccctcccgcccccgcctcggccatggccccggggatgtcgggccgcggcggcgccgccctgctctgcctctcagcgctactcgcccacggtaagtgtcgcggcgcggactgggggtgaggatgcggcaggcgccactggagggggtacggggaagactggggagaggagcacccacaccccctggactcgcagccgccactccgggtttggcgtctctggctgcagctcgagttaccgccagcccccgagccctccggcgagctcagctgaggggaccgagcccggcgccagaaaagggtggggggagggtgtcgctccagtcctctcctggttataaagaagggttcgaacccgaaggtctggggtcgtgtccgcccacggaaatctagagggatccgagggatcctccggatcgcgtccaggccgccccccgcccccgtctctccctgcagccggccgggctgggggctgttgggatccgccgggatcgcgtctttcctcgccccgggcgcgcaggccggtgcggggccgcgccgcccgtcgcctcgcttcctgcggcggtcctcgggaagggaagtggactgactccgggccggggagccgccgcggctcgcacgcccgcggtcctgtgagctgcatctaaatggccggcttaggcgagcccggagggcgggggtctgggcacccgcacaggccggggcggtgggccgcgggccgcgcgcggagggagcgggctccgcgctctcgcattctgcaatctgttgcgtctgctccccaggctcgccccgggctccgcggtaaagggggtgggagaaggagggattgaggttggcgcgctttggcggtgggacagcgggcatacgggtggggggcagcgggtttttgaacagcccccaagaatgggaaatcagaccagagggaaggaggctgcagcgggccttccgcaagctggagacgctccag

SEQ ID NO: 225327 - DNA, 506 bp, Homo sapiens
  chr17:33814244-33814750
  hyper
ccaccgcgcccggccgccctgcggctttttaaggcgctccccagcccacgcacgggcggaagttttgtcatctacagctttcaagtcctccattgctaagtctacaacagcctgcggttttgacagacattgctacagagacaggagccaactttcccagaagggagagaaagcagcctcgggtctccccgagatcggtggggttgctctggcagcgccccacctcgtcccggagcccacggaccaccccccccggacccccggaataagaaacggaggctggaaggtttggcagtggagcgggacgaatttatctgccagcaattccctggaaacaggattccttgcaggcgctgtgccagcgcgggcccttaagcaactgaaagttaaacgcccacgtgaatagctctgagggatcacggagaagttctcgtttcgtctgtacctatttgtattttctaaggcgaaaaaaaagttatttaaagaaaaagagaacgaacctggcg

SEQ ID NO: 225328 - DNA, 540 bp, Homo sapiens
  chr17:35165416-35165956
  hyper
gggcagggggtctgcgcggcggcgtcctcccctccccgcccggctctcccgctccatccccgcggcctggccaagggcagcgccaagggcgcccgcggagggcgcagctgccccggacggagcccccgccacccccacagccgcgcgggtgctccagagcatccaacttcatttccacttcaattttatcagcggccggggagccgggcgggagataggaggccggccctgacacgaattagcccggagattgtccgatacgccttggccagggcgccggcgccgcgcgctcgcctccctcgcctctcctttgtgtccgcctcgcctcgcctctcggcctcgccgcgctccattcccgcggcgctggcccgggccgagcgaactgctttgcctttggccacgttgagcgcgccgaggcagccgggggcgcggggctccaggacccgtctgctcctggtgcccccagctcctcagggtccggccgggtcacctgggccgatccaggcgggcaggggcctcgctgctcctcccccgcagccc

SEQ ID NO: 225329 - DNA, 180 bp, Homo sapiens
  chr17:35291819-35291999
  hyper
tgcatgagaaggagcccagctgggacgggggcggaggcaagccacccgggactggggccactatagattccagaaaggggcggttgggtcgagggcgctggcggcgagaaccgggacagctgcggggaggggaggagtgtgaggacagcagggctggactggccccctccccgcaggcct

SEQ ID NO: 225330 - DNA, 480 bp, Homo sapiens
  chr17:35292051-35292531
  hyper
ggaccccatgccacacggcttttggcgcttgcgggggtgccagaagcctaccgagtaccggtcgtcttccgccgggaagtgccgggtccgcaggaggagcgcgaagccgagtccgagcccgcggagcccgccccctagatcgcagaaccgccttctccatcctctgccctgccccgcgtcggggtctgggagcgaccggcggaggccggcggcgcgccggagctgactagtcccctacgctcctccggcccgcagcggggagcccacatgtgtatgtgcaagaaggtgtggagaaggcgttagggtcccggcacccacgggtcagggcagaacgccaacgagtcgcactgcgggtctccgcggcttcggtttccatgacatggtgacgccggcggcaaggcggggggctgcctgtgggccttgaggttgctgggcggtgcgggcggagtcagcaaaggggcgttggcaaagccctaaaac

SEQ ID NO: 225331 - DNA, 300 bp, Homo sapiens
  chr17:35716510-35716810
  hyper
cgcatcagggacagaggcgtcccaagtgaggggccaggactagccggcctgtagaggcggggaaagggaacccagaattaaggcgggctagaatggggcaggcggtgtgcgggcccgtttgtctgtttaatcctaacacattaacaaggggtgggcaatcgcgtccactacctgtcctcatcacgctggctggtttccaagtctgggcgagctaagtaaccccatgctggaactccataaccagccccccgtttcgctcctcagccccgagacagcccactccaaaggtgttatacatgc

SEQ ID NO: 225332 - DNA, 180 bp, Homo sapiens
  chr17:36102291-36102471
  hyper
cagctccggccgggagccggggaccgggaagcgcgcagtcccgaccttcctcccctgcctttctcttccaggaggtttactagaactccaggaactccaaaacgcgacttttctttctctttgcttttcgtcttaagggaacacggtgggcaaaagaagggagtgcgtgtgcccgaggct

SEQ ID NO: 225333 - DNA, 180 bp, Homo sapiens
  chr17:36103475-36103655
  hyper
gccctcggagcacaaattcaaatgcaaggtcatatcccaccccaaaccgccgctgcggacgtgcggccaaggctcagccccgaaatcgcggcgcttcagtgtccgaagccacgcgatgggctctgtcctaaagcggagtggcccgggagcgacgtgctgtctcagggaaccgctcggctc

SEQ ID NO: 225334 - DNA, 660 bp, Homo sapiens
  chr17:36104135-36104795
  hyper
cgcggcctggggcttgcagcggcgcgaggctctgctcccgggaagtcgcagcggtttcactgcacccactcgcaccttcagtcgcgtgggcaaacctcccggcaaagggctccacagctccagttctccccggcccagccccagccccgcggggaaaagcccttgggtctcggacgctggcctgggcctggggagaagaagcccggtgggccgcagggtcgtcccgctaagggattgggaagggtccgggtgttgggagagaagcagagcgccccccgggggacttctctggtgggaaacgggcttggcgagtgtggtcgggcgcagtgtcactcaggcccggggccggggctccaggggttcgggtgggtcccctccacctcgctctgcgcctacctgagcatccggtccacctccgcccgctgctccgccgcctcctcggtgttgagcgcctgcagctccttgaggatgggaggtgtgtcatagtcgtcgccgtcctcggagccctcgtcgccggacaagcggcccttggcgtggccgttggtgagagtatggaagaccggcttggtgtcgggctcggccccgctgccaggggacaggggcagcgtctccagcttcaccccgaagttcggggatggcagcaactcctccaaggcctga

SEQ ID NO: 225335 - DNA, 62 bp, Homo sapiens
  chr17:36762346-36762408
  hyper
ccctccagcttcaccgcgtgatcccgcagcgcgcggccggggccgggcgcggggcgcgctca

SEQ ID NO: 225336 - DNA, 137 bp, Homo sapiens
  chr17:36886754-36886891
  hyper
gctcccggcccgtcccgccggtgtctggcttgcctcagctcacaggcttttcccgagcgccagtccctgccaggacctccgcagccagcaccttctcttgcgacctttttcttaccctctcattcctccctcgcccc

SEQ ID NO: 225337 - DNA, 37 bp, Homo sapiens; identical to SEQ ID NO: 204569
  chr17:36904350-36904387
  hyper

SEQ ID NO: 225338 - DNA, 240 bp, Homo sapiens
  chr17:36905157-36905397
  hyper
ttgccccctcggcggcaggggcgctggccccgaaaagcggcgcaccaggatccagcctgggcgcctggcagggagcaatcgcgagaggggagtggaggtgcggggtgaggccgggtggggggcctcgccgcggggggatcgggtagctctggcggaggctgcgcccccggcgtgctcgggcagagaagaacggaggcccgctgaggatgggaactcaggctccgggtctgggacacaata

SEQ ID NO: 225339 - DNA, 960 bp, Homo sapiens
  chr17:37381233-37382193
  hyper
gacacagacacgcaggttgtagagacaaattcagagacacgagcgaggatagaggcgcggactgagcccgggactgggacccggcggccgctggagggtgcgcctcgcacgcacagccgggcgcgtaccccgcccgcaccgctccacgcgcgccctccggcctcgctgcgcccatctctccaacgaagaccagtggccgcctccccagaaggtcgcgatggcgcgcgcgggcgtgcggtgccggtgtgatcgggggctccttgtggcccctcgtcgccaacccactcctacccccgggagcggcgcggagcctcagtggtcacgcgggcctcgcgaccgcgaccctaggacgcccgggcccacaggaggaccccgccgggaagagggcgcccgggcccggggcgcggacaggccttgcgccccccaagttaccttggtttcctggagggcggagacggtccctggggggctgtgggtggccgcgtcatccggttcgttctccttctcgctcatctcggtcatggttcggggagaggggaggagagggtgccgagatccgacggcaggcccaccgcgggcaggctgcgggtggcgggcgtctccgggactctgaagccgttctccagaggctgcccccagttagcccccggcacggcagcccccaacccgcgggagcgggcagagaaagttgccggggtggcgggcgaggggaggccaccacgctgagccgcaggagcgggacgaccccgggcgcgaggaccgagggtctgcagaggatgctgctcgcagcgcggggaggagggaagtggggccgcggggatgagccgagggagggagccaaggagctgtccgtgtccagccggctccgccgtccgctgcgcccgccccccatcccctcccctcccccgccggccccagcccggcacccggcggcccctccgcccagtcctcgccgcccaa

SEQ ID NO: 225340 - DNA, 1440 bp, Homo sapiens
  chr17:37761493-37762933
  hyper
agagaaggcgagtcccctgggggaagcgaggcccctgggacaggccacccacaggtaacaggactgcgctgccccaggagagcggcaggaccggtggcccgctccccgcgcccggcgccggggtaggatgggggtgtccctgcgctctgggggctggggacaggggggcgggcaaaggcaaaagaaaaagaagggagccggcgcgaagtctcagttatgaaaaaacgcattgagctcctcgtacatggggccccggtcgtggtgaaggtgcatatcgtaagacaagagattctccgagtggacgcccccgcgcacagccgacgagccgaagactagcccgtggcccgtgggccgcgaaccgggcagcgccgagtagtgcatagagtagtggtagcttttctcgtggtcgggcgaggagtcctgcttgagtgagaagttgccattgagacagagcggggggctgagcgggccctcgtactcggagctgttgtagtccgggctcgcgccgccaccgcctgccgccgcatacagcgtctcgtaggcggcgcagtagccgtgggtccgcagggcgtgcgccgcgccgccgcccaggccgccggccgcctggcactgtgcgcccgccaggcgcgagcacgggtacgggtaggggtgcatggcgaacgggccgcccgagccgtggaagcggccggcaccgtcggcgccttgctccgtgaggaagttgcgagagttgagctgcagacagccggccaccagattggtggtgggctgcgacagacccttgcacagagtctgcacgtaggacactaggtctggccgcttgccggagcgcaggatctccgagagcgcccagatatagttcttggctaggcgcagcgtctcgatcttggacagcttctgcgtcttggagtagcagggcaccaccttgcgcaggttgtccagggctgcgttcaggtcgtgcatgcggttgcgctcccgcgcgttcgccttctgccgccgaagcttggagcgctccaagcgcgccttggtcatcttgcgcttcttgggcccgcgcttcttgggccgctcgccctccgcctcgtccagtccttcttcctcctcctcttcctcctcctcctctccccccagctcgccttcctccttgacctcggccaacgtggcctccgtcccctcttctccacggagagggactggcttggccgcccgggctggccccggagcccctggcccgggcgcaggcggtggcggtggcggcgcgtcgcccttgtcgctcctcggctcgtcgtcttcgccgtcgccccagctggcgaacttgggcacgtccgagagaaggccgggctcgctgaacaggcgggtcagcatggtgcctgagggcgccccgcgggcgggaaggggagacagacagcacaaagtgaggggcgcgctggggtaccgacgcccccc

SEQ ID NO: 225341 - DNA, 339 bp, Homo sapiens; identical to SEQ ID NO: 204583
  chr17:37774745-37775084
  hyper

SEQ ID NO: 225342 - DNA, 105 bp, Homo sapiens
  chr17:37782849-37782954
  hyper
tctccccacgacctcgcaggcctctctgaaactcccagtaccaggaccacgaaggggttaaagccagagtcctgcctccccgctgcccctctccccctccctccc

SEQ ID NO: 225343 - DNA, 764 bp, Homo sapiens
  chr17:37783129-37783893
  hyper
agcacccgggcgccagtcccaggcggaggggacgggctggggaccccaaagctgggaccggagggtgagcccggcagaggcagagacacacgcggagaggaggagaggctgagggagggaggtggagaaggacgggagaggcagagagaggagacacgcagagacactcaggaggggagagacaccgagacgcagagacactcaggaggggagagacaccgagacgcagagacacccaggccggggagcgcgagggagcgaggcacagacctggctcagcgagcgcggggggcgagccccgagtcccgagagcctgggggcgcgcccagcccgggcgccgaccctcctcccgctcccgcgccctcccctcggcgggcacggtatttttatccgtgcgcgaacagccctcctcctcctctcgccgcacagcccgccgcctgcgcgggggagcccagcacagaccgccgccgggaccccgagtcgcgcaccccagccccaccgcccaccccgcgcgccatggaccccaaggaccgcaagaagatccagttctcggtgcccgcgccccctagccagctcgacccccgccaggtggagatggtaaggggcccgtgccccaccccggcagcgtacccgacacaccccgcggggcttcttcgccctcccaaggcgctgccccggccggactggcctgggggtgggggcgcaaggagagccgggctctgcctcggtcaggacggggcgcggggccgcgtgtgaagttagct

SEQ ID NO: 225344 - DNA, 724 bp, Homo sapiens
  chr17:37823746-37824470
  hyper
ccccggcggccctccgcgaatgcgtcctgcccctcccctgcccaagccctctgccctcacccgggtccggcgccgcccccgaagtggcgggaacaacccgaacccgaaccttctgtcctcgggagcccccagataagcggctgggaacccgcggggcccgcaggggaggcccggctgttccgcccgctaagtgcattagcacagctcacctcccctatcgcgcctgccatcggacgggcagtgccgcgccctgctctggggcccccggagcgaccacagcggaggccggaacggactgtcctttctggggcggggtggggagggggtgtcgctggagggcccggtggcatagcaacggacgagagaggcctggaggaggggcggggagggggagttgtgtggcagttctaagggaagggtgggtgctgggacgggtgtccgggagggaggggagcctggcggggtctggggcctcgtcgcggagggcgctgcgagggggaaactggggaaagggcctaattccccagtctccacctcgaatcaggaaagagaaggggcgggctgctgggcaaaagaggtgaatggctgcggggggctggagaagagagatgggaggggccggccggcgggggtgagggggtctaaagattgtgggggtgaggaactgagggtggggggcgcccagaggcgggactcggggcggggcaggcgaggcggagggcga

SEQ ID NO: 225345 - DNA, 47 bp, Homo sapiens
  chr17:38024015-38024062
  hyper
acacccagtttcagcgttcatgagaagagaggcgtaggaaatcccca

SEQ ID NO: 225346 - DNA, 39 bp, Homo sapiens; identical to SEQ ID NO: 204593
  chr17:38228513-38228552
  hyper

SEQ ID NO: 225347 - DNA, 1096 bp, Homo sapiens
  chr17:38498084-38499180
  hyper
gtacaagggaggacgcccgcccctcttccgtccttgtcccctcgcagccccctcctctccctgtactcggcgtccctctgtactctgtgtactcctcatctggagcctttcccccttcctgcttctctcctctcctcccccttcccaggctgcccccacttgcctgtccacatgccgcctctccctctcggttccctgcgtttctcccgctgcagccggacgcgccgggaatgggttaagccaggggcggtgcctggacggggcggggcggtggaaagggggtggtgcccggaggggagggggcgcgcagagctggggtgggggggccgtggcgcgtaccaccagagaccgagcgagtcgccagctgcccctggcctggcgggggcggaaccgcgcgggatccccacccccacccggaatcctcgccacggagaatccctggagaagccccggatccccggctgggaggaggaagtgctcgttgacccccagccccgcgctgatcccgcccccggcctgcggacttggggagccgctgtactctgcctcggacgccacgagactctagacgggagtcccctcgaggtgaagccgctgagttcccgggccccgccaggcttccctgggagagccgacggaccccccctcccagcacacacaacttccctgcttttcaccgggactggcggagcggccggcggacttagacgcggggacttcagggcagggggcgccccctgcccgggtcaccagtcggggcgaggggacgtctcctctcccccagctgctctgctcggatggcgccgccggctgagtgacgggggcggcgcgcaggacttcccagctcggacctcttgccttcgaggggaaagatgtacgagagtgtagaagtggggggtcccacccctaatcccttcctagtggtggatttttataaccagaaccgggcctgtttgctcccagagaaggggctccccgccccgggtccgtactccaccccgctccggactccgctttggaatggctcaaaccactgtacgtaccggcctctcagtctgctgttgtagggggtgggagtgggcggtagggcttccac

SEQ ID NO: 225348 - DNA, 480 bp, Homo sapiens
  chr17:39683684-39684164
  hyper
caaactctcgcatcttcctgcggcagcgcggcccctggcctagacctctgggcactctacagccgggtcccatctcctcccactcttcaggcctcgctgacccgcgtcccttcttcgtcccggggctccaaccttgcccccgccacctccagaggccccacccacttatctgccctgcccagttctcctcccctttccaccaccccggcctctgcatccagccccgaggtcctgccccgcacgtctcctgtccccctttactcggccccacctgtggaccttcccacgtcctaacgggctcctgcccgccgccccgcctggaacctcgcccggcccgcggggctgggtttccgcggcaggtgcactgcacttcccgcggccgggcctccgcccaccttgtcccgcaggtcctggatggtcgtgtagtagtggctgtagtcgcgggagggcccaggcccctgcttctggtaccagtcgcgg

SEQ ID NO: 225349 - DNA, 465 bp, Homo sapiens
  chr17:39684189-39684654
  hyper
ccgcctccagggcgcgcaccttgtccaggtaggaggccaggcggtcgttgaggttctgcatggttagcttctcgttgcccgccagcagcccgtcggacgcggtcaggacgccgccgtagccgccgccgtaggcccccgaggaggacgaggacacaaagcgggcggaggacacggatacgccgcggccgccggagcccccgtgaatgctgggcgcgcgaaaggcgacccccggcccaaaacgcacggagccgccgcccaggcctccgaaggacgacgtggccgacgactggcgatagctgtaggaagtcatggcgaggcggagcacggacggagcaaccctggtctcagaagctgcgattcgcgggaggagcggcgaggccctcacctggcgccttttatgcccgcggccggtggaggggggaagggaggaatggtgtcaggggcggatatctgagccctgaggaa

SEQ ID NO: 225350 - DNA, 453 bp, Homo sapiens
  chr17:40332756-40333209
  hyper
ggagttcctagacccgcacctccattctctcccctcgcctcgggtctcaccatgtccaggagatccgagacggccccgaggatacttgccccccagctcgaacctcaagccccgacctccgtcccactcacgcgttccgtcaaaacgggtggcgatggtgtccaggaaggtgttttgcggggccagcaaccccttcatgaccggcatggccccggggcgtgggttcaaggcgcggcgctggggagctttcagcgcggccgggccggagggggcgcgctgtcggaggggccggggcgccccatgcgccctcctgcctcctcccctccctcttactgccgctgccgctgccgctgcctctgctccgaaccccgtagctctcggctcggctcagcgccgtttcggtcccccccacctccccacgggccaggttcttcccctcgggctcggcccgca

SEQ ID NO: 225351 - DNA, 53 bp, Homo sapiens
  chr17:40333432-40333485
  hyper
gtggctccacctcgcgggttttcccgcgcggcgtccacgctgggctggtgtct

SEQ ID NO: 225352 - DNA, 106 bp, Homo sapiens
  chr17:40427459-40427565
  hyper
caagtgtttgcaaccgcctcttgctccgtgtgagttctttcctctttgttcaccccgaccatcttgccagattcctttagcctcagaccagcttttgtgatacaac

SEQ ID NO: 225353 - DNA, 344 bp, Homo sapiens
  chr17:40428918-40429262
  hyper
gtctcagccagggctcctgccgcctgcatgggcacggcaggaattcacattcgcccaggccgaattcacctgtccgagttccagggtgaacctacgggggacggggcgcctggggccggttcccttcctgggaaaatctggctggctcccaccagtcagagctgcgggagggactgctctctctagagaagaaagaataaacagggtcatctgtaggatccaggggaagggggtcccccagatcctttccacgtgctgaggagggggttgcggttgtgggaagccaggctgagtcacccactctcctttcctctgctacgtctatctcccggagctggccagcg

SEQ ID NO: 225354 - DNA, 162 bp, Homo sapiens
  chr17:40575277-40575439
  hyper
gggcgggggatcggtgagctccccagctcccgggccaaactccggagtctgatcgctgattggctggccccaccccagaaagggagggaccggggcagaaggggagatcgacgaggcggggcggcggagggggacccaagagccgagcgccccacccttccc

SEQ ID NO: 225355 - DNA, 209 bp, Homo sapiens
  chr17:40950645-40950854
  hyper
cggggcctctccacgcttagaatccagagggtcaccagctcccgaagacgccatgttgccactcctcccttcgcggtgccgccgcgcgggcctcgctgggaacagtagcccttggccgctgcagtggactctgggagttgtagtccgcgtgccctttgcggggcagagccgcggttcccgggcacaggggatggacgcgggaggtgaga

SEQ ID NO: 225356 - DNA, 514 bp, Homo sapiens
  chr17:41196311-41196825
  hyper
tggaagtgtttgctaccaagtttatttgcagtgttaacagcacaacatttacaaaacgtattttgtacaatcaagtcttcactgcccttgcacactgggggggctagggaagacctagtccttccaacagctataaacagtcctggataatgggtttatgaaaaacactttttcttccttcagcaagcaaaattatttatgaagctgtatggtttcagcaacagggagcaaaggaaaaaaatcacctcaaagaaagcaacagcttccttcctggtgggatctgtcattttatagatatgaaatattcatgccagaggtcttatattttaagaggaatggattatataccagagctacaacaataaacattttacttattactaatgaggaattagaagactgtctttggaaaccggttcttgaaaatcttctgctgttttagaacacattctttagaaatctagcaaatatatctcagacttttagaaatctcttctagtttcattttcctttt

SEQ ID NO: 225357 - DNA, 694 bp, Homo sapiens
  chr17:41197125-41197819
  hyper
gtttccttttcatttctaatacctgcctcagaatttcctccccaatgttccactccaacatttgagaactgcccaaggactattctgactttaagtcacataatcgatcccaagcactctccttccattgaagggtctgactctctgcctttgtgaacacagggttttagagaagtaaacttagggaaaccagctattctcttgaggccaagccactctgtgcttccagccctaagccaacaacagcctgaatagaaagaatagggctgataaataatgaatcagcatcttgctcaattggtggcgtttaaatggttttaaaatcttctcaggtgaaaaattaccataattttgtgctcatggcagatttccaagggagacttcaagcagaaaatctttaagggacccttgcatagccagaagtccttttcaggctgatgtacataaaatatttagtagccaggacagtagaaggactgaagagtgagaggagctcccagggcctggaaaggccactttgtaagctcattcttggggtcctgtggctctgtacctgtggctggctgcagtcagtagtggctgtgggggatctggggtatcaggtaggtgtccagctcctggcactggtagagtgctacactgtccaacacccactctcgggtcaccacaggtgcctcacacatctgcccaattg

SEQ ID NO: 225358 - DNA, 61 bp, Homo sapiens
  chr17:41199659-41199720
  hyper
catggaagccattgtcctctgtccaggcatctggctgcacaaccacaattgggtggacacc

SEQ ID NO: 225359 - DNA, 74 bp, Homo sapiens
  chr17:41201137-41201211
  hyper
tgtgccaagggtgaatgatgaaagctccttcaccacagaagcaccacacagctgtaccatccattccagttgat

SEQ ID NO: 225360 - DNA, 55 bp, Homo sapiens
  chr17:41203079-41203134
  hyper
ctgtgggcatgttggtgaagggcccatagcaacagatttctagccccctgaagat

SEQ ID NO: 225361 - DNA, 84 bp, Homo sapiens
  chr17:41209068-41209152
  hyper
ctttctgtcctgggattctcttgctcgctttggaccttggtggtttcttccattgaccacatctcctctgacttcaaaatcatg

SEQ ID NO: 225362 - DNA, 41 bp, Homo sapiens
  chr17:41215349-41215390
  hyper
ctcattcagcatttttctttctttaatagactgggtcaccc

SEQ ID NO: 225363 - DNA, 78 bp, Homo sapiens
  chr17:41215890-41215968
  hyper
agaaatagctaactacccattttcctcccgcaattcctagaaaatatttcagtgtccgttcacacacaaactcagcat

SEQ ID NO: 225364 - DNA, 88 bp, Homo sapiens
  chr17:41219624-41219712
  hyper
ctgttttcataacaacatgagtagtctcttcagtaattagattagttaaagtgatgtggtgttttctggcaaacttgtacacgagcat

SEQ ID NO: 225365 - DNA, 311 bp, Homo sapiens
  chr17:41222944-41223255
  hyper
aaattcttctggggtcaggccagacaccaccatggacattcttttgttgaccctttctgttgaagctgtcaattctggcttctccctgctcacactttcttccattgcattatacccagcagtatcagtagtatgagcagcagctggactctgggcagattctgcaactttcaattggggaactttcaatgcagaggttgaagatggtatgttgccaacacgagctgactctggggctctgtcttcagaaggatcagattcagggtcatcagagaagaggctgattccagattccaggtaaggggttccct

SEQ ID NO: 225366 - DNA, 191 bp, Homo sapiens
  chr17:41226347-41226538
  hyper
ctagatcttgccttggcaagtaagatgtttccgtcaaatcgtgtggcccagactcttccagctgttgctcctccacatcaacaaccttaatgagctcctcttgagatgggtagtttctattctgaagactcccagagcaactgtgcatgtaccacctatcatctaatgatgggcatttagaaggggatgac

SEQ ID NO: 225367 - DNA, 127 bp, Homo sapiens
  chr17:41228504-41228631
  hyper
ctttccactcctggttctttatttttactggtagaactatctgcagacacctcaaacttgtcagcagaaaggccttctggattctggcttatagggtattcactacttttctgtgaagttaatactg

SEQ ID NO: 225368 - DNA, 172 bp, Homo sapiens
  chr17:41234420-41234592
  hyper
ctttttctgatgtgctttgttctggatttcgcaggtcctcaagggcagaagagtcacttatgatggaagggtagctgttagaaggctggctcccatgctgttctaacacagcttctagttcagccatttcctgctggagctttatcaggttatgttgcatggtatccctctg

SEQ ID NO: 225369 - DNA, 89 bp, Homo sapiens
  chr17:41242960-41243049
  hyper
ctgagtggttaaaatgtcactctgagaggatagccctgagcagtcttcagagacgcttgtttcactctcacacccagatgctgcttcac

SEQ ID NO: 225370 - DNA, 3426 bp, Homo sapiens
  chr17:41243451-41246877
  hyper
ctaagtttgaatccatgctttgctcttcttgattattttcttccaagcccgttcctctttcttcatcatctgaaaccaattccttgtcactcagaccaactccctggctttcagactgatgcctcatttgtttggaagaaccaatcaagaaaggatcctgggtgtttgtatttgcagtcaagtcttccaattcactgcactgtgaagaaaacaagctagcagaacattttgtttcctcactaaggtgatgttcctgagatgcctttgccaatattacctggttactgcagtcatttaagctattcttcaatgataataaattctcctctgtgttcttagacagacactcggtagcaacggtgctatgcctagtagactgagaaggtatattgtttactttaccaaataacaagtgttggaagcagggaagctcttcatcctcactagataagttctcttctgaggactctaatttcttggcccctcttcggtaaccctgagccaaatgtgtatgggtgaaagggctaggactcctgctaagctctcctttctggacgcttttgctaaaaacagcagaactttccttaatgtcattttcagcaaaactagtatcttcctttatttcaccatcatctaacaggtcatcaggtgtctcagaacaaacctgagatgcatgactacttcccataggctgttctaagttatctgaaatcagatatggagagaaatctgtattaacagtctgaactacttcttcatattcttgcttttttatttcaggatgcttacaattacttccaggaagactttgtttatagacctcaggttgcaaaacccctaatctaagcatagcattcaattttggccctctgtttctacctagttctgcttgaatgttttcatcactggaacctatttcattaatactggagcccacttcattagtactggaacctacttcattaatattgcttgagctggcttctttaaaaacattttctctaatgttattacggctaattgtgctcactgtacttggaatgttctcatttcccatttctctttcaggtgacattgaatgttcctcaaagttttcctctagcagatttttcttacatttagttttaacaaatgacttgatgggaaaaagtggtggtatacgatatgggttttgtaaaagtccatgtttatttggagtaatgagtccagtttcgttgcctctgaactgagatgatagacaaaacctagagcctcctttgatactacatttggcattatcaactggcttatctttctgaccaaccacaggaaagcctgcagtgatattaactgtctgtacaggcttgatattagactcattctttccttgattttcttccttttgttcacattcaaaagtgacttttggactttgtttctttaaggacccagagtgggcagagaatgttgcacattcctcttctgcatttcctggatttgaaaacggagcaaatgactggcgctttgaaaccttgaatgtattctgcaaatactgagcatcaagttcactttcttccatttctatgcttgtttcccgactgtggttaacttcatgtcccaatggatacttaaagccttctgtgtcatttctattatctttggaacaaccatgaattagtcccttggggttttcaaatgctgcacactgactcacacatttatttggttctgtttttgccttccctagagtgctaacttccagtaacgagatactttcctgagtgccataatcagtaccaggtaccaatgaaatactgctactctctacagatctttcagtttgcaaaaccctttctccacttaacatgagatctttggggtcttcagcattattagacactttaactgtttctagtttctcttctttttcttctcttggaaggctaggattgacaaattctttaagttcactggtatttgaacacttagtaaaagaaccaggtgcatttgttaacttcagctctgggaaagtatcgctgtcatgtcttttacttgtctgttcatttggcttgttactcttcttggctccagttgcaggttctttaccttccatgagttgtaggtttctgctgtgcctgactggcatttggttgtacttttttttctttatctcttcactgctagaacaactatcaatttgcaattcagtacaattaggtgggcttagatttctactgactactagttcaagcgcatgaatatgcctggtagaagacttcctcctcagcctattctttttaggtgcttttgaattgtggatatttaattcgagttccatattgcttatactgctgcttataggttcagctttcgttttgaaagcagattctttttcgagtgattctattgggttaggatttttctcattctgaatagaatcaccttttgttttattctcatgaccactattagtaatattcatcacttgaccattctgctccgtttggttagttccctgatttatcatttcaggagtcttttgaactgccaaatctgctttcttgataaaatcctcaggatgaaggcctgatgtaggtctccttttacgctttaatttatttgtgaggggacgctcttgtattatctgtggctcagtaacaaatgctcctataattagattttcagttacatggcttaagttggggaggcttgccttcttccgataggttttcccaaatattttgtcttcaatattactctctactgatttggagtgaactctttcacttttacatattaaagcctcatgaggatcactggccagtaagtctattttctctgaagaaccagaatattcatctacctcatttagaacgtccaatacatcagctactttggcatttgattcagactccccatcatgtgagtcatcagaacctaacagttcatcacttctggaaaaccactcattaactttctgaatgctgctatttagtgttatccaaggaacatcttcagtatctctaggattctctgagcatggcagtttctgcttattccattcttttctctcacacaggggatcagcattcagatctacctttttttctgtgctgggagtccgcctatcattacatgtttccttacttccagcccatctgttatgttggctccttgctaagccaggctgtttgcttttattacagaattcagccttttctacattcattctgtctttagtgagtaataaactgctgttctcatgctgtaatgagctggcatgagtatttgtgccacatggctccacatgcaagtttgaaacagaactaccctgatacttttctggatgcctctcagctgcacgcttctcagtggtgttcaaatcattattactgggttgatgatgttcagtatttgttacatccgtctcagaaaattcacaagcag

SEQ ID NO: 225371 - DNA, 77 bp, Homo sapiens
  chr17:41247862-41247939
  hyper
ccttttttgcagaatccaaactgatttcatccctggttccttgaggggtgatttgtaacaattcttgatctcccaca

SEQ ID NO: 225372 - DNA, 46 bp, Homo sapiens
  chr17:41249260-41249306
  hyper
ctgcaataagttgccttattaacggtatcttcagaagaatcagatc

SEQ ID NO: 225373 - DNA, 106 bp, Homo sapiens
  chr17:41251791-41251897
  hyper
ccaattcaatgtagacagacgtcttttgaggttgtatccgctgctttgtcctcagagttctcacagttccaaggttagagagttggacactgagactggtttcctg

SEQ ID NO: 225374 - DNA, 140 bp, Homo sapiens
  chr17:41256138-41256278
  hyper
caaggaaggattttcgggttcactctgtagaagtcttttggcacggtttctgtagcccatactttggatgatagaaacttcatcttttagatgttcaggagagttattttccttttttgcaaaattatagctgtttgcat

SEQ ID NO: 225375 - DNA, 89 bp, Homo sapiens
  chr17:41256884-41256973
  hyper
actccaaacctgtgtcaagctgaaaagcacaaatgattttcaatagctcttcaacaagttgactaaatctcgtactttcttgtaggctc

SEQ ID NO: 225376 - DNA, 78 bp, Homo sapiens
  chr17:41258472-41258550
  hyper
cttttggttatatcattcttacataaaggacactgtgaaggccctttcttctggttgagaagtttcagcatgcaaaat

SEQ ID NO: 225377 - DNA, 54 bp, Homo sapiens
  chr17:41267742-41267796
  hyper
ttgcaaaatatgtggtcacactttgtggagacaggttccttgatcaactccaga

SEQ ID NO: 225378 - DNA, 99 bp, Homo sapiens
  chr17:41276033-41276132
  hyper
cagatgggacactctaagattttctgcatagcattaatgacattttgtacttcttcaacgcgaagagcagataaatccatttctttctgttccaatgaa

SEQ ID NO: 225379 - DNA, 213 bp, Homo sapiens
  chr17:41277287-41277500
  hyper
ctttacccagagcagagggtgaaggcctcctgagcgcaggggcccagttatctgagaaaccccacagcctgtcccccgtccaggaagtctcagcgagctcacgccgcgcagtcgcagttttaatttatctgtaattcccgcgcttttccgttgccacggaaaccaaggggctaccgctaagcagcagcctctcagaatacgaaatcaaggtac

SEQ ID NO: 225380 - DNA, 521 bp, Homo sapiens
  chr17:41723353-41723874
  hyper
gggtgccaccgttccgggaactcgagaaggcgggggaggggcccgatagtcccggtgcccgggtcaggggtgtcgtggcaccctggcccgggggtccgcgtccgatccgggttggccgcccgcggggcgcgcccggggagcagggcagggggccgagttcctggcgcgggctgcctgcccggcggcctctggctccaggccggagaaggcaggtccagacccctccggaagcgggagcgtgggcagcagggaaggacgcgcagccccgggccggggtccccgaggagccctccggccttggccgccgccagcgccgcgccccctcctggcagcgggccggggagggtcggtcacgagcggatgacgggcttcccggagcacagcccggcccacgggcccggagagaggcaggaaacccgggcttagacgacgggcgcggtcggggactggtttcccaatcttctcccgtcccgaggcttagtgtttcccagcccttcctttccacggttgcggggagtgga

SEQ ID NO: 225381 - DNA, 321 bp, Homo sapiens
  chr17:42015411-42015732
  hyper
tcccttaaggcgtccgtgctctggtgtgtgtcccagaaatagacacgaccctcggtctgagcgcccctgcaccccagcctgcccaccgcgcggaacacctgcaagctccggtccgggtgccgcgctgaccacagccccggcatcacgtgacctcccgcggctctgtctgccccgccccctccagacgcctgctctgcgctgcgcattcgctctggccatagcgggcctcgtgtcgctgctgatgcagcccgagggcgccctcggcgaggagctgcaagtgccgcagcccagggccgccagttggctgaacttaggctccat

SEQ ID NO: 225382 - DNA, 104 bp, Homo sapiens
  chr17:42015758-42015862
  hyper
acagcaggtgggccggcggagggtgtgaggaagggagggagggagggaggaaagcggggggtggggggggcgcgggggggggacacggacgccaccaggcaccc

SEQ ID NO: 225383 - DNA, 523 bp, Homo sapiens
  chr17:42030245-42030768
  hyper
cgggtttctggggtcgggagtgcgtatgcaaatgacgtgggcgtggttggcagatctcccaggaggcctcaggggtcctcaccacaggtctgggccctccgacctgcggaagcgaaggggaaggaattggatctggggaggcgagcctgggagacgtcgttaagtgatgttgccagggtagggccaggccgcgctctcggatgcaggatgtgtggtaacgggcgcttttaccgcgacctgacggggcggtcctcgccgtcggggaagaacgttttggaaagaagcgtgtccgggccgtctcttttcccatacctgggggcggggaagggaagagcgtggtcagatctggccacgcccccaggtggagcggggccgcagggtgagagccccaggggtcccgctccgcgcctgcgctcaccgctgccgggtgaccaggttgaggtagtggcgcagggaggcgtagtagcggttcagctcctccggcgaggcgtcttcgcggggagcctcgggtttgatggggtag

SEQ ID NO: 225384 - DNA, 300 bp, Homo sapiens
  chr17:42092220-42092520
  hyper
ggctgaagcagccccaaaaggggcagcgtgtgagcagcaccgaacccaactgcatgatcagctgcaacatccaccgtctcgaacctatcttcgacgccatcttgggaaagggcagtccgctgcggcctcaccccagtcagagaagcaggcgcggggatgggacacgcagcttccgggtcaagcgctttttctttttcctcccggaaacaacggtgtcattctctagttccggatctaaggtgacccagttgcgaagtccagccttctcgtctgctcatggagccttcagggccatatttg

SEQ ID NO: 225385 - DNA, 343 bp, Homo sapiens
  chr17:42287964-42288307
  hyper
ggggctcgcccccgcctggtctgcggcgctcagctgacagcttcccgccttccggctgctgggcgccggccccacgtcccagcccaggcaccgcgtggctcaggcggccaggggcgaggtggcacggcccgccaaggggaagagggggccctggcagcccccctgggggcacagcgctccgccaggcagcctgaccttcttcttctcagacaggtcgttccacattcgggccagcaggcgggtcagctcgctctcggagagctcaggccgctcctcctgcagctgccgccgtttctcctccgagaagatgaacatggccgacacgggccgcttgggcttctcg

SEQ ID NO: 225386 - DNA, 35 bp, Homo sapiens
  chr17:42299435-42299470
  hyper
cgcatctctccctcggtctctacctcctgtcctat

SEQ ID NO: 225387 - DNA, 384 bp, Homo sapiens
  chr17:42402728-42403112
  hyper
ccttaacagcgcattttcaccagccccgccccggccgcgcgcggcactggaaaccccagcgccttctggacggcgagggtgacgcactggccctcttcctcggtgtcctcaggtgcgtggcggcggcagtgagaatgagttcttcgagatcgccgggagaccacacaataacgacgaagttacttgccgggctacccgccgagacttgaaaacttcgcggcgacttctctcgccggccttagcatcgcccccatttttcaggttacaggacaggcctgcaactgcaaaacgctttgtaaaccacagggccccgcgcgggtgtgcgccactgggttagctgagctgcagcccgggccgggcgggctgggacgtgagcaagccggg

SEQ ID NO: 225388 - DNA, 139 bp, Homo sapiens
  chr17:42441055-42441194
  hyper
gacgctggggccactcgccggcggcatcgcggggctaggccgggccctagcggtccatggctcccgcctggtcccgctcgcccggccccgcgcagccccagctctgcgccgcgcctcgcagctccggctcccgctcccg

SEQ ID NO: 225389 - DNA, 600 bp, Homo sapiens
  chr17:42635137-42635737
  hyper
gagaagggcatctccatcccggaccacggcttctgccagcccatctccatcccgctgtgcacggacatcgcctacaaccagaccatcatgcccaaccttctgggccacacgaaccaggaggacgcaggcctagaggtgcaccagttctatccgctggtgaaggtgcagtgctcgcccgaactgcgcttcttcctgtgctccatgtacgcacccgtgtgcaccgtgctggaacaggccatcccgccgtgccgctctatctgtgagcgcgcgcgccagggctgcgaagccctcatgaacaagttcggttttcagtggcccgagcgcctgcgctgcgagcacttcccgcgccacggcgccgagcagatctgcgtcggccagaaccactccgaggacggagctcccgcgctactcaccaccgcgccgccgccgggactgcagccgggtgccgggggcaccccgggtggcccgggcggcggcggcgctcccccgcgctacgccacgctggagcaccccttccactgcccgcgcgtcctcaaggtgccatcctatctcagctacaagtttctgggcgagcgtgattgtgctgcgccctgcgaacct

SEQ ID NO: 225390 - DNA, 1660 bp, Homo sapiens
  chr17:42906492-42908152
  hyper
taagcatgagcataatgaaatcggtatcactgccagttctcaatgaacaaaaagaaaaccaaattcgcccatttcgcaaaggaaaagtactcccaatcagacaatcgcaaaaaaaagaacaaaatctaaaccatacattcacgtacatcttttcaactcagagctccaaacgcagccgccaaccacacaactgcccacaatcacagcggtagcgcctactcttaattttgaagctagagacttaaggaaacacacacacacacaaaacagttctcaagtttgacaaagtgggggaaaagtcattttaagtaaagacaacgagttaatcaggaggcgatgagcccagtccttccgccccgctttcccgcttccagccctcgaacgaaccctcctctaacccccgggaggcaggagttccagcggggagatgcgggaagcctcagacgagcccgcacgccgccggagacgcagggatcgaggtcggggagacaaagagcagcccgcgaagagcccgggcggcgaggggcggcccggctccgccctgcgcccctaaccgcccgggtagttgtcggcaccgccggggcgccgccgagtgcgcgccgcttctgtccgggctccccgaccgtcgcccgacacctccgcggcccaggacacccccgagccgtttccctcccgatttgggagccgcgcgcctggggacaaagagggagggtgcgccggggacagtggcaggacgcgggccggcgacgcccctccggactcggcgggaacccctcggcggcgcccccctccttctcccgctctggccgcgctcctccccggacctccggaggttctcctcggcccctccccgggctccccaagagttctcccgcctccccctgggaccccgcccctggcccgcttctcctcagccggccctgcggccgcccctcacccggcggcgggttcccccggagccgcctcctccgccgggcctcggcccgtcccgccggtcgcggcctcatgtgccccgcgtcgccatcgccttcaccctcgcctctcctccacctcctccgccgctgccgccttcgcctcagtctccagccgaggcagaagccgctcccgccgctgccgccgccgccgccgcctcccgctcccgccgccgcgacccgcgggaaggcgcctgcgcactgcgcgctgcggtgggggcgggggcgtcccgccgcggcccgggagcggggggcgcgcggcacgtggcgctcgagtgggaggggggcgccccagaacgcgcgggaagcgacgcgagcgccaactttccgcggtcgagtcctcgccgctctctcggatagtccgggacgcggcggaggcgcggcgcgcgtgggagtcacccgcgtggagtctggaccccgggtgggcgcagacttcgctccggacagttcattcttccaagctgattttcgggcgagagtcccccgccagccgcgcctcagtttgagcgggccgctaacggcgccgtgggttctcgccttacctgggtatcctgggttggtttagcgggcccagagttgtcttctgcgcgctccgccgaggccttggtccattgtagcacgggatgctaatgtctcctcccaggttctgctctacaattcctcgaggatctggcgggccctgcgtggat

SEQ ID NO: 225391 - DNA, 180 bp, Homo sapiens
  chr17:43044597-43044777
  hyper
ccagcagcgtctgtcttggagcgggaacccaggaactgaggatcggcgatgtccgctggctccgaccatccccacacgtgatgaccaagcggggccgctgtggggtgggatctccacctgcgtccgcctggcgcccccgccaactccgatcaggtacccatttgccccgggctccctggg

SEQ ID NO: 225392 - DNA, 720 bp, Homo sapiens
  chr17:43044835-43045555
  hyper
aggtctgcccacatactggtgccgtcgccgccgcgcatgaggacatggtaggtgaaaaagtaggtgccgggaatgttgcacgtaaacttgccgctggccgcgtcgtagttgttgcctaggttggtgaccacgtcgtcaaacttgagtacctcgtaaccctcgtgggggttcttgaggccggcgtagaaggccacgcgcggcaccgtggtgtaggtggcagtgctgatggcgccgctgccccccgcgcccggcagccccggagggcccggcttgcctggctcacccttctcccccggcggccccacagggccgggaggacctgggtccccgggaggccccggagggccgggcttgccggtgcggcccggcttcccctgggggccctgcaccagcgtggaaggcgggggcgcgccgctctgctcgctcagggcgtcgccgccgtcggtccgcgcgccggcgccggggccccgcgcggggtaggggtcgcacaccatgcggcaggtgcccagcatctcatagtggccttccgggccgcccgagctcaccagcacggggatgagcaccaccagcaccagcagcatcaccacacccgcggcggccgctagcagcgtctttcggcccgcgcggagcctggggagcgccgggccgcccggccgcgccgtcggggcaatggtgccggcgggcagggggcgcgggctaggcgcccgcgctcaaggacgg

SEQ ID NO: 225393 - DNA, 324 bp, Homo sapiens
  chr17:43298577-43298901
  hyper
cactggcctgcgtccgcgccccccaccctgtttaggagttcctgtttggagatggctccccctcgtcctcagctcgtctctgggctaagcaggggaggagagaaataaaaggtggggggcctggaagggggttcccaccttctcagtccgggacgcgagacgggaacgcagccctggcgccccaacgctgcaccaccgtgggtctccgagccgtgctcgcagtcgctgagatcctcggtgcggagaagatgtgcccctccaatccccaggccgtgatccccttcacccagacccggccaatccctcgcccgaggcgagcgggag

SEQ ID NO: 225394 - DNA, 240 bp, Homo sapiens
  chr17:43325108-43325348
  hyper
catttcttccgggcctgcccccgctcctcgcctgcccctcccctccaccagccagtgtcgccccatctgtctgtcctccgggcacttgtcccgcccctcactgcgtgtccctcccccgcccgccggctctcacctaggccgagacacgccccgggctgggcgggatcttggggcggccgggctagtagggctggatcaggcggaagccggggcccggggctgggcttcgtgtcctgcgtt

SEQ ID NO: 225395 - DNA, 938 bp, Homo sapiens
  chr17:45810488-45811426
  hyper
gcctagtattagccacgagagggcggggtggggcgaggcggagcagggccgaggtggcggagtgggggggagccggagagcttcataaagccacagcaaagcgctgcgactctagtgacagcggcccgctggagaggaagcccgagagctgccgcgcgcctgccggacgagggcgtagaagccaggcgtcagagcccgggctccggtggggtcccccacccggccctcgggtcccccgccccctgctccctgcccatcccagcccacgcgaccctctcgcgcgcggaggggcgggtcctcgacggctacgggaaggtgccagcccgccccggatgggcatcgtggagccgggttgcggagacatgctgacgggcaccgagccgatgccggggagcgacgagggccgggcgcctggcgccgacccgcagcaccgctacttctacccggagccgggcgcgcaggacgcggacgagcgtcgcgggggcggcagcctggggtctccctacccggggggcgccttggtgcccgccccgccgagccgcttccttggagcctacgcctacccgccgcgaccccaggcggccggcttccccggcgcgggcgagtccttcccgccgcccgcggacgccgagggctaccagccgggcgagggctacgccgccccggacccgcgcgccgggctctacccggggccgcgtgaggactacgcgctacccgcgggactggaggtgtcggggaaactgagggtcgcgctcaacaaccacctgttgtggtccaagtttaatcagcaccagacagagatgatcatcaccaagcagggacggtgagtgcggcgcgccggcccttggggcctctgtgcccgcgccggaacaagaacgtctcgtctgtttttctggctcgacaatgcttctgactccgtgtccctcactgctttggct

SEQ ID NO: 225396 - DNA, 617 bp, Homo sapiens
  chr17:45928210-45928827
  hyper
gcgcgttcggagtgcgttttttcgagacaatctccgtagcgctcacccctggccaccccgacccgcgctcctacctcgaggctgcggcgggctccgggcacggctggctggtgcgctactgacggtcgctcataggccctgtgcgccggcgagctctccagcggtaaggggcaggagcccagggcgagccagacccggcggctggcggcaggcggcaggcggcggaggtgagcgctggcgagagggcggaggacggagggcgggcaggagccagcgagcgaacaaggccagctccgcccgtgactcacccgcgctctctgccttcatcctctccccagcgctgctttttcccccggactcgcggccccgcccacctcacctgcggccgcctttaacccttgagggctcggctggaccggagcccagccagggccgcgaggagggggtgggcgggagtgggggaggaaagataactagggcgtgcgccgcccgctccctcgctcctccctggtcccctccactcccagggagaggggcccgggtggggtgattcccaggttctaagacccgccccgccgggtggaaaactgccctggagctagctcggtctagcagag

SEQ ID NO: 225397 - DNA, 522 bp, Homo sapiens
  chr17:46089485-46090007
  hyper
tcccttttccccttttgcaggagacaaaaccagactgacaagctgaagactcaaacattaatcaaactgcgctccggaacaacctttccctcgcattaataaatacatttgcggcccctcattggacagttggcctaatttgtttctttttcgcggggtggggggagcagccgcgcccgcgccccctggctcccagcagccctgtgcaaagcagatgttccgccgcagacgcggagctgcgcctagccgcgcgccccggaggccgcggttgccatggcgacggcggggccgcctgctgtcgccgagcacgctgtctcgcccgctcagtgattacctccatctccgcagtgttcgccatacggcccggattctaatcagatcccctcccccctcccccctccctcctccgcccggcccactaccccttcagctcccacagccttgggactcattgagaactgcccgcgcatccctgacggtgcccaggaaggcagagtgggggagagacgacccgcactcagc

SEQ ID NO: 225398 - DNA, 454 bp, Homo sapiens
  chr17:46124859-46125313
  hyper
atgggactggagaaattaaaaaatgagaaacatccctaaaaaagcaagactaagctgcgtgggaggccaaacgaggggggtcctttgggctgtttctaccatgacaaaaatcgccattaccccacacctctcacaccgccaacgttccgccaacgttccgccaacgtcccaccaccctcatgatatccgtccgcggtactgctccagcgaaggtacccttgcctgggccatgaggcgcaaccgtccctcacagctggggtggcttctccaggttcgcaccgaggggaagttggggtaccggtttccgccgccagcacccaagatggcggcacgagcgtcgcaaccacaagaaccacatgcttcgtgtcccgcctcagcattctcgggtctcactagacttttgcaagtcactgtgggaaccctcaaggcgagggtgttccgcactctggcggcg

SEQ ID NO: 225399 - DNA, 417 bp, Homo sapiens
  chr17:46570076-46570493
  hyper
cctggggtggagccgcgccggagccgggccggcagcgctggcgaggaggttcgggtgttgtgtttccactgtaactataattaggcggattcagtgtttatttaggctgagagctgtaagataaatgacagcttcgaagatgcttttcagcacttcgtaaatcacccatccgcccgggcagtttgctgctgccacgtctcggttctccctccgcgcgctccctgtccccccactcacctcggaagagggcacacccggggacgactccggagctgtcaccacaaagggcaggagggcaaaggggaaatggtgtctgtgcttcccagagccctcagcgccccggaagggtacggggcagcctccaggaaagctgtcaggagacgcttcctcccgaggtggtcccggcggccaagtggg

SEQ ID NO: 225400 - DNA, 600 bp, Homo sapiens
  chr17:46659261-46659861
  hyper
ggacgggtttcaccggagcgggaggctgcctctccccttcaccgcccagaaggatacgaacagcaacacgcataatagtaaaataagagcaggggctgcgcgcgagctgagccacctcccctgcgctcccgggtctttccgtggcttcccagccgccttctcctggcagccacaggttgctagcgtgacctcgcccctcccagccaccctccgccgtccaggcgtgcccagtccgctaggaatcatcaccttttgttggcggggagaagggactcagcgagggagcgaaaccgaaggcccgagcggaggcgagtccccagccggcctgcgcaccggcggcggcggcgcggaggagagaaaggcccagagggggcgcgggcgagggtactcaccgggaggctccccagccccgccggccgccgagccgcccgcggacgcgccgggcaacagctgagctctctcctgtccactattgtgtgtccggaaaaccggaccgcggcggcggacacagccacgggctccctcagaagccggaacgtgacttttttttttggtgtgtttttgttttggaagcgcaagttttcgtgttaatctcatact

SEQ ID NO: 225401 - DNA, 297 bp, Homo sapiens
  chr17:46683517-46683814
  hyper
ggcggcgcagagagcgggaagagaggctcggaggaagccccgggcgtggcgtggtcaggctccgagagcggccgggatgcggccacaccggcctggtaaactcgcacctcttaggatcttgctcccggactcattcccttccccaccccctattttaaagttttatttgggtcgtctgtatcaatttagaacgagataaattaagacaaagaaagtaaaataaatcgaaataaaatataggaatagctcttggcgaaaatgtttgccgtgcgagcaggaagccgtgagcgccctagt

SEQ ID NO: 225402 - DNA, 960 bp, Homo sapiens
  chr17:46687570-46688530
  hyper
ccggcgctgctgataaatatttaaagctaaaaggccgagaggaagggtgggggcgggctgggggctcgcagcgccgtggtgccggcgaagagagatccgccgggaagcagagcgagcctgagagcaccgagcaaatatgggggcggggatggcctgctgggtcgcggcccagtgggtgcagccttccagggccgacctccggctgggagcactctggacgcggaaaggggcgcccagccgggaaggaggcgccttcagggtaatgtgccccggcccctggggctcaggacagctcggtgcgcggcgttacctgagcttcgcatccaggggtagatccggaagttactctcggccgccaagtccgagtccctctgctccttggcgcccgccgccttggcggagtcgccgggacacaccccggagaggttctgctcaaagggcgcgcagtgcatgttgaaggaactcggctcgagcccatagccggccgcgtagacgccggccgcgctctggcccgccatgccccccccgccggggtacaagccctgcatcgaggcggcgaaggaagcgcccgaacccgctccatagcccgggcgctgggggttggaagcaaacgcacaagaagtttgttctgggaaggctccggtagcgaaaaccgaacttgaggctggatatttagaaaataaagtattcgcataatacaatgaactcataatttggccggatgatttgtaggcagggacgttttagtgtcggttttacgagattccttgatatattacagaattagagtccagatttacaccaaaaaggaccccctttttcctctccggaccacgtgaccccgcccacgtgacgtcccctccgccaatggccgggccgtctccccacggctcccggtaatgtggaaaaaattgtgtggcgttggatttataaaatatgatcaataatgaatgggaaagc

SEQ ID NO: 225403 - DNA, 832 bp, Homo sapiens
  chr17:46690031-46690863
  hyper
attgggaggggaaatgaggacgcagcgagagagagcgagagcgagagcgagcgagcgagagagagagagagaagggagacagaaagaattacggcgtgaataggcagtttcatgttgttgggagaacttagcagaaatcggtaccttggtcattacaaagaagcacgttcaaaggaaaaaaaagacaattgcacaaggaggctttttacacggggaggggaggggcatggggggctcagccgggcctttgccgctcgccctcacagggcgagggagcctttgcttaaatccttttctttccccccggcccccaagagaagggaaggagatccacggtagctcacacacagaagctattacgagatactaccactagcggggactggcgcggcgggggacgctgcggtgggaggcccggctcctggccccgctagcggggccagagctctctcgggcaggggcgcgcggcggcggcgcggccgggacccgcggacgtgcgggcggccgcggccctggcagtcccagctgaagcctacttcttgtcgcccttctgcgcgtcgccctcgtccgccgcctctggggcccgctccagcttctgtttctccagctcctcctgctcgcatttgctgctggggaacttgtctttgttgttctcttttttccacttcatcctccggttctggaaccagattttgacctgtctctctgtcagtcccagggcgtgcgatacctcgattcgccgcttacgagtcagatagggattaaataggaactccttctccagctccagggtctggtagcggctgtaggtctgtcggcctcgcctgcgtcc

SEQ ID NO: 225404 - DNA, 600 bp, Homo sapiens
  chr17:46691505-46692105
  hyper
aagaaaggggaaaagcggcaggcgatcggaacggagccggcaagtcttccagaagctggaggaaatgcgccccggcctgccaggccttgggcccttccggccccctcctgcccttgtcggccccgaggcgagctcaccttgcgggcgcatccaggggaagagctgtgtgggcgacgggctctgctcggagccctcggcctcctcgcccaggccgctggcggcggcaagcttgcagtctgcgtactgcaccaggtctggatcctgcgcaccgaataggctctggcgttgcagcgggtcgtagccgtagaaattgccggggtccccgtggcacgccacggcgcacgggttctgctggtagggagccgtggacagcgacgacggcccgtggtagaactcctggatttgcgacgggtgctggaagctgccgccgctgctgggaccgtacaccacggtgggtcggccgcccaggtcctgggcgaagccgcagtcataataattggggcgcagggactccccggttttgtatttggagaacagtgagttgacgaaataagagctcattttattgaattttgaggcggcggcggcggcggaggctat

SEQ ID NO: 225405 - DNA, 111 bp, Homo sapiens
  chr17:46696472-46696583
  hyper
ggagaaacagttgggctttttgtcgggggagaggaggcctgagaggataggatgagactgtaaaagaatcaagaggctgcccgcgcccagacgtctggccccgccggacct

SEQ ID NO: 225406 - DNA, 257 bp, Homo sapiens
  chr17:46696652-46696909
  hyper
ctcgtttccgacgcctgattctggagggggtgtgaagaacaaagacaagagccccagttgcaatttctgaagcatttgcgacaacaaagtgttctttcccggcttctctcttctccctctctgccccctgccaccccccgccccggaagcccggagccccgtgttctgtgcgggtgagggtgaaggctgccggagcggggcccacccattcccccgccaggccgggagccccggcccagctgcggctctctcagctc

SEQ ID NO: 225407 - DNA, 532 bp, Homo sapiens
  chr17:46723839-46724371
  hyper
gcccacgcctgccacgggcggttggtcctgaaagctcgggccacggggctgcccagcttggagaggggcctttcacgccgcagtccccagctgcgagaggaagggctgcgcccgcctcctcacctacctctcggaaccacgccgtcccccgcgcgtcttcgtagactgcaggagtccagggcgtctggggactgtgacggcgcccaaggcgggggatgtggcggctctgggtcgccgccttctgcccccgcctctgtgaggcctctcgaggcagtgtctgtgtctggggcagcgacgccgacggcgctgggggcgcgaaggggctcacgctcctgcgttcccctggcgccggtgagtggcgggcgaggacagggtccgggagggggataggcgagagcgcttcctgcctccgcccgggcggggctcggccgtctcacctgcccccacccacggcgccgtcggatcccagagcggctggtgaggagatgggcctggcgcgccgcggggaggccagaggcgcggaggagcagcg

SEQ ID NO: 225408 - DNA, 105 bp, Homo sapiens
  chr17:46724660-46724765
  hyper
atgggcgtctgaagcgagcgacaagttatccttgggagttggaaatgtgagagggaggggcgaggccgaaggaggctgagaaggggagggggcgctcacaccctg

SEQ ID NO: 225409 - DNA, 180 bp, Homo sapiens
  chr17:46805544-46805724
  hyper
gtaggttcccggatatcccggatagaaggcaaactcagtggggcggctggggtactcttccccggccgtgggagtctccgcggggtacgcggccagggtggctgcctgggcacagggtttcagcgagctccgggacactcggcaggagtagtacccgcctccaaagtaaccataaggcac

SEQ ID NO: 225410 - DNA, 180 bp, Homo sapiens
  chr17:46805977-46806157
  hyper
ggtgcgggggcggggaatctagggggcacccagctcgctctccccacccaggccgggggaatccaaagcgttttaaatcgctcccagctcgcaagtcgcctgcattcgctcagcacggccgtcttgacgcaagagacgcaggggcccgggcacgcgcgctgattggctgcggcctggggg

SEQ ID NO: 225411 - DNA, 420 bp, Homo sapiens
  chr17:47073207-47073627
  hyper
cctttttccccgttccctgggcgagggggttccagggtctccgggccgcgctctcggccacccctggcgccatcccagcctccgccgctagaaactcgttggcctcgctcgccgctccgccgtggagccggggcttgcccgtggaccgcgcgtcccgctctccgccgcgtatccgggactccgaaacgcgcggcgagcagccccctcccccaccgcccagacggggtgcgaccgcccacgtgtcgccccttgcccagtcgggtccttccctcgggctccgggagccggaggatccggaatgagttggtcaaagccgagggaagggacccaggcggatccgcttccccctccccaggaacggcgggaggaggaggggagtggccgccgccccctcccctaagctcccgcccctcgcttccc

SEQ ID NO: 225412 - DNA, 360 bp, Homo sapiens
  chr17:47074109-47074469
  hyper
tcctcgttctccactgggataccccgttcccagctttccagtcccgcgctcgcagggtcccccggtcctgcatccccggaggcgggggagtttcgtggggctggcgtggggaaggcggagaccccccccatttaaacatctagggaaaaggttcctttctttttaaatcaccagctcgtgcgaccctctcctgaagaccccagagtcttcggcttctctttgtctgtctcggccgtcccccgcctgtcagtcgctagcagttaaccggggaggggtgagcaaccccgccccccaaaacgaatgaaaaataaccgtacattttaccctttaagacatgtgagatctgggctggaccatcct

SEQ ID NO: 225413 - DNA, 900 bp, Homo sapiens
  chr17:47074539-47075439
  hyper
agggggaaggggcctgtagagcttcagggacgctgccgcaccgccccagtttaccccgggggtgagttgagttccccaccctcaggcgggagattatcgggtttggccggagggccgaggggccctgtggcgtcgggggtctttccctgcagggtgggtgggggctgtcaccacgtggcttctcctttttttttttttttttttttccgctccattttttttcaagtcgattttatttagaggcggcgccagggcggccgcggagaaacgtgacacaccagccctctcggaggggtttcggaccgaagggaagaagctgcgccgtgtcgtccgtctccctgcgcgccgcgggcacttctcctgggctctccccgaactctcccgcgacctctgcgcgccctcaggccgccttccccgccctgggctcgggacaacttctggggtggggtgcaaagaaagtttgcggctcctgccgccggcctctccgcctcttggcctaggaggctcgccgcccgcgcccgctcgttcggccttgcccgggaccgcgtcctgccccgagaccgccaccatgaacaagctttacatcggcaacctcaacgagagcgtgacccccgcggacttggagaaagtgtttgcggagcacaagatctcctacagcggccagttcttggtcaaatccggctacgccttcgtggactgcccggacgagcactgggcgatgaaggccatcgaaactttctccggtaagaacacagccacctcccggaaaagccacaacgagagccccgaacaacggagacccgcaccttccggttcctctcccgccaactcctctcttcccgggcctgcggggtttggcctccgtacccaccctcgacctacccccttcgatgccccctc

SEQ ID NO: 225414 - DNA, 594 bp, Homo sapiens
  chr17:47301641-47302235
  hyper
cgcacatctgcagccgtttcccagggcaccacgctggcgcggaacgagctgggctcggccttctgggcctcctgaatgaggcggtgcatggggtagccgcggcgcgggaaggccacgtcgccgcccgccagcagccccatggggcagaagtcgttggcgccgtcgcccacgtagaagaggcgctcgaagtgcacgccgtcgtgggcccgctcgcgcaggtagtcgctgagcaccttgtgcttgcacatgttggcggggcagcgcgcgcagctgtgtgtgtggaacggccgcagagccagcagtccccgcgcatccggccccgacgggttgctgaggatgcggcggaacaggctgtggtggccggcggcgcgcagcgagctctccacgccaaaggtgttggcatcggagatgagaatcacctcgaagcaggcgccctgttttgccacaaactgcagcaggtcgctcatgcctggcgacaaagggatggcttcgtagatggcgctcaggtcccgcggccgcacgccctgctcgcccaggtacttgaagacgcgctgcatgtactcgttgtagaagccctcgcggtaggtggctcgc

SEQ ID NO: 225415 - DNA, 902 bp, Homo sapiens
  chr17:47307530-47308432
  hyper
tctggcgcacccccggctggcgggcgctgggctccaatgcgggcggggggtgcgcggctcggggaggggtattgtgggtggcagggagcaaggggacaccaattccttggctttgtcagagtcggggacggagggataccccagcactatgttcctgggtaggagagagaaggggactcactcctgagctccagaactcccccagtgccacgcgcgtgaaggagcgccttcaaactccacagcccccaccccgcgccgggaccccagccctcccctatctcccggagcccaggactcacgtgggggcggcggcagcagaggtctgtcccggctgagtttggagtgtaagaagtggggaagggggctagctgaggtattggggcgcaggatggagcaaggggtgcttacgggaattggaggggacgcggtgtcttatccacccccggatttctgggctccggctcacgagtccctccagtcccgagggactgaggatgatgtgcgtctgagccgtcccctccacttgcccctcatcccccccgggcagccgccgcgtcccctttaaatgcccgggagccggagccggagccggagccgcggccggcgctgcggctgctgcagcagcggagcccaccgcagtccccaacgtcacaagcgactgtccaatcgcagcggtgccggcgcacatcaaaggggcgggccgcccgaggccacgcctccctcctgccccggaggctccgggagcgccagctaaggtgggattaggctctcggggaaagggtagcagggtggggatggagcgctgcccttccgaggaacgtgggtgggggcaccctcactagagcggctgtggacatacgctaaatccctgcctacacacccaaaattgctagggctgtgga

SEQ ID NO: 225416 - DNA, 154 bp, Homo sapiens
  chr17:47547683-47547837
  hyper
ccgtgtccctcccccgcgcctcccgcccaggaaaggctgcgtgaggcttttagacccaggatccgttccaagggaccgctgcccggcatccatcacggctgacagactggggatcggggtgggggaggggacgccgacacggagctgccatcgg

SEQ ID NO: 225417 - DNA, 1680 bp, Homo sapiens
  chr17:47573481-47575161
  hyper
ggcgacggcgagggcggcagagagatggaagcagaaggaaaggagacagagcggggcgcggaccctgaagtggtcggggtcccgcctgcccgctgagggacagtgagacgagaagagagagcagaggcttggacatttccagcgcctgtccccgcgctcctgctcgcggcctctcccagtcccggaattggggctgcggatctaaggctgggaggggagtgcccacttcgccggggcgaacccgctcccggggttcccccacggccggcgggctcctccgacgcgcgtgttctcacggcttgaagcagcgcagcggatcgcgagggacggagcgggtgtgcccctacccgggctggcggtggctacgtctcggggtgcagagcgccggggcgcactaggcggggacccttcctggccgcgcgcagctctggctacgcaggcgggaggcggcaggcagggggcgctgcggggcgaggcaagtgcagtccgccgctgcctgcctgcgagtctggggctgcgcgccgctccccacctagctgcgcgacccgagcgccgcgcccaccgcgctccgtgggctcccgcgcctcgaagggtcgggatccggtctgagcctctcctggctctcggtgcaagccgctgggcacctaacgagacgggggcgcccggacgcctcggattctgtagcgcggtatcccgggccaccgactcggcaaaggtcggcgggtcctccgggtggtccgacgagattgtcagatgtggcctgctttatggccatgaaccgaatgccctggaaggtctggcaacggaggaggcgtcttcactctccccgccagcatctttcatcagagcactgcgccccaaattccggctttacagatacggagactgaggctctgagagtttaaacgacttggccaagatctcacagcaagttgggccagagtcgtggctagactccccgacctgattcccagctcggtactcccccaccttttcagggggcagccgctgtcccagctcggggtcacggctgcgtttcccagcagggcggggggggttgacactgtccccagagtccgtcggcggtagagcctgcgggtgaggtgggcagagattctgtccgggtgcgggccccagcccgaaagctcagccccagttccctggagctgtcaggacctgtggctgcgtccggggatttgggagcgaccgcgggcacgtctgctgactaacgccgctggttagagacgctgctcagacgcgggtgggcgagcgtagaccaggagagcggggaggagggaccggatcccagaggggcaacgacttgggctccgggtctgggcaagagcgagggtccccgcgcgaagacccaaggaaggaggggagctgggcgtggaggacctgggcgcttgggaaggtgtaccccgacaggaacctgccgtctgcagcccctgcggctcccgcctccgcctcggcgcgcggctgctcggtctgggatggctgtgcgcggtccgagtttcttcctgggccgcggtgagagagagagggctgaaaccagagcgcgtcccggcgggtcggctggcgggccgcgccggtaatggaggcactttgtcattcagacgtctgtaaccagagccgccgggctggctaatgcgcctaatagggatggaacgagggcagcaa

SEQ ID NO: 225418 - DNA, 851 bp, Homo sapiens
  chr17:47653242-47654093
  hyper
ggcgagagcggcgccgctggagccgaggggggcgccgagcgcagatctggagcagcagagccacggcgcagctggggcccttcgaggcgctcggggcgcacatctgggacctcgagcgggggccgtgccgcgcgcagctggaccaggggaggggggcggcggctgcacagctggaccgaagggggcggggtcggccctgggcgacccgctgaggggagggccgcgggccgccggggactggagcatgggacggcgcgcctgaaggagcaggaaggggaaggaggcctgggaccccgaaaagagaaggggagagcgaggggacgagagcggaggaggaagatgcaactgactcgctgctgcttcgtgttcctggtgcagggtagcctctatctggtgagtggtccgaggggagctgcgcagaggggcgggggcccggaggatcgggggagagcgcgggaagcttgcgagccctgaaactttctcccttcccccgacatcccggggatggcggggaagactggaggctgggggagagggcgggtccgaggccggagactggacagatagggttaataggggcggggagagggtgcttggctggcccacccactccgcagcgggtggctggaggtgcgaccagcgctcggaaaaaggcctggagccgggtcgccagggttaccctaccccttcccagagcctcaggaccgctgaagccgggggcgagtggggcgcgggtcgtggagctggtgacctgcaggcttttcccctgacctctgggactcagagagcctcgggttctgggtcccccagagcacagagccggtccaggcggggggcggcccccgcgtccc

SEQ ID NO: 225419 - DNA, 324 bp, Homo sapiens
  chr17:47928288-47928612
  hyper
atcctgcatggtcccgacctcgtcagcgccagagccgtcctgcatgaggcaggatgtggtgggcgcacagcagggacgaggcggggggcacggggcagaaaggagagggcgacgggaagaaggcagagaaaacccaaaaggtccggaaggctgggagggaggcagggcacaggctggaaaccgcggctatttgcagcgtcgccctcgggctgcggtcaggctggcgctggcagtcctggcggccgagcccgccgcccctcccggtgccctcggccacccgggcacggccctggccggtgcgtccagctccgcccggtccccgcg

SEQ ID NO: 225420 - DNA, 104 bp, Homo sapiens
  chr17:47928704-47928808
  hyper
tgcgacccccggcggggtatgtcgcggcggtggcgcccccgcgggagccgggccgggggcgggtcgcggccgcggcgaggctcccagggcgccgggtgggcgca

SEQ ID NO: 225421 - DNA, 173 bp, Homo sapiens
  chr17:47929093-47929266
  hyper
tcttgactgaggagcgcgaacccgagggagtggggcgtggggctgggaggcgaggcgaaagggagagggctcggtggggggtcatgactgcctggtggggaccctggggacaggggcagccgcaggttgacgatctgggttccttcaccgaccacgcacgaagggtgggggga

SEQ ID NO: 225422 - DNA, 388 bp, Homo sapiens
  chr17:48041212-48041600
  hyper
gtcttcgatgttgccgctagaggaaccttccaactcccactactcccacctccggctttcaccctgcacccggcgatgaagacgtcggcgaaacgcctactttccatgcctaggtctgggaaggtctgaagatcccggcggagctgccttcgttcggggccgggcaaattcgttgcagccgggttggcctcagggcctctcgccggctcgctatgtttccccggggcgccctggcaggccagccggcggtctgtcagtccagctcctggtgcgggcgcctcgttttggtccaccgggtccggggctgggacaccgagggaaaacttcagagctccgggccaccgagcctggaagttacgcgtcccccagcccacgcgtccccaatccc

SEQ ID NO: 225423 - DNA, 180 bp, Homo sapiens
  chr17:48048955-48049135
  hyper
cggagggctatgcgaattcagcaaccgggtcggcctcagagactctgcgtccccgctcgaattgcgcagtccacgcagccagagaggcgcgggtgggctctgggctgccagcccagagctgccagcagtggggtcgaggcaggggaggcaggacaggcgcgggcgggagcggaaacccaa

SEQ ID NO: 225424 - DNA, 300 bp, Homo sapiens
  chr17:48049178-48049478
  hyper
atctcagaagcccgcagcgcccgaggccacgggtgagggatgcgggggaggtgacggcagctggtgaccgcggctggccgagggcgggtacactgacgtgtggagggtgagcccgactaggggaagaaggtggggggacgcgggcggacagaagccgctctctctcggctcaggtcggctggacagacccgcagggaatgcggcgaacgctgccctaagcgcccgggcattgcggctgctccatccgccctactcctcccattgcctgggacctctgcagcgtccccgtagagccgcgca

SEQ ID NO: 225425 - DNA, 180 bp, Homo sapiens
  chr17:48049575-48049755
  hyper
ctggagagctaggcgggccagagctgaccagatcccccgcggcggcaccgcagcgcgatccaggagtggccccgccgggctacgctgcgcgctcttggaacccgggtcaccttccctgccgccggaaccgctctgtgcgcgctgcccaacgaaggaaggggctgccccacgcagacccgg

SEQ ID NO: 225426 - DNA, 598 bp, Homo sapiens
  chr17:48070684-48071282
  hyper
tggccagccaggctcggcagcgcgcggggaactacggggtcccgcgcgcccccgcggccctggacagccaaacaccaacctgtgtctgcgtgaggcccagctgcgcggccagctcggcgcgctcgggcagcgccaggtactgggccttctggaagcggcgctgcagggcggccagctggtagctggagtagatcgtacgcggctttcggaccttcttgggcttcccattcaccatgcgcacctctgcttccggctcctccttcaccgacactgcggggaacgcaccgggcggaagagggggcggttcagcctcggcctgcgactcctgcgaccctccagggccccgccggacgcccctcgcttccgcccaccgactcgccgcgggattcccggccgcgcgctccgctgcccgcggcccaggggggagccgcggccccagagccagaactggccgcggcccacaacgcggcgctcccagctccgcgcccggccgccgcagcactgtccccggcgccagccgccgcctgcgccaggaccgcctcggcttcgctcacgacgccttcccggctcgcctcccagcctcggggctcctcgccgc

SEQ ID NO: 225427 - DNA, 282 bp, Homo sapiens
  chr17:48072333-48072615
  hyper
ctgagcttgcgatcgaaggagccactcatcctggcgggcgctgcacctccccagggctggcctccgcagaggacaggaacggaccggagtgcgagagaggcggaagagacgaggcaggggtgtgtgtccagaaggcgaagggaggacccggccgcgtctggggggagggggaggccgagaggcgcttacaccattgcctgccgtcaggcggtcgctgcgcgcctctcctcgcgtcccaagccacaatcaaatgctgccagctccgcccggccagccggttat

SEQ ID NO: 225428 - DNA, 540 bp, Homo sapiens
  chr17:48619187-48619727
  hyper
ccactctcgttctgcaggtctcagcgctccgtcccccaccaacccgttcggcgcgggcgagccgggcaggccgacgctaaaccagatgcgcaccggctcgccggcgctgggcctggcaggcgggcctgtgggggcgcccctgggctccatgacctacagcgcctctctgcccctcccgctcagcagcgtgccagctggcttgaccctccccgcctcggttagcgtcttcccgcaggccggagccttcgcaccgcagccgctgctgcccacgccgagctcagccgggccgcggcccccgcccccgcagaccggcaccaaccccttcctctgagccccgccccgtcccataccggcctgcgcctgcgccggacgctccgcggccccgcctccggacccggggctgggcggggcgccggtgctagtggaacgccgagccagtggcggctggtatcccgcggcggctctggaagctggacgcggaccacggcccgggagctagaaactgaacgcccgcataataaagactggaaccctcgttct

SEQ ID NO: 225429 - DNA, 382 bp, Homo sapiens
  chr17:49008769-49009151
  hyper
cctctctggtcccccgcgctgccgagcgctcgcatctaaaggtcttgaacgcgttccaggtttctaatttcgtttgcttatgcaaccaaaaatattatggccgcgtttcctgggggtgatgaagtctatattctgggctacaggcacactaaaaacggcagcgccagggcccagcgccgctcgcgcgtgcaccacgcgccggctttttttggttcctccgaggcgcgggcagctctgcagccgcgggggccgcaggaggtgggggctggacccgcccggagctcgggagggcccgggatggccccggggagcgcaggtcccggcaggggccgagcgaacaagggccggcctggggcgcccagagacgcgggggaccgttctg

SEQ ID NO: 225430 - DNA, 105 bp, Homo sapiens
  chr17:49028010-49028115
  hyper
gctggcgtttagaggtacttcgtaggtgctgatttttcctaattgaactgtggctggatcttggcctaaaggtcccactgtcagcaaatccgtgtccacatgcct

SEQ ID NO: 225431 - DNA, 180 bp, Homo sapiens
  chr17:50235170-50235350
  hyper
tcactcgacgggaaaacggggggaaggggggagcccgacacggcacacacacatacacactcgcacacacttccgagcgagtgcacactcgcactcccacccgacagccggccagggacagtcacccccaagatcaatatcgcagtttgaattgttccggcaaatctcccctcgggctcg

SEQ ID NO: 225432 - DNA, 180 bp, Homo sapiens
  chr17:50235489-50235669
  hyper
ccacctgaagccaccaacactgggctcttccagcaaaaacgagaccccgattcgtctggcgccccaagaagacatagacgatagccccccgccgggctgcgccgtgcaattccgggctcccgggagcgcgtagctcgctggctaagcccaggcagtccgcggcaagttgccctcgaagtc

SEQ ID NO: 225433 - DNA, 180 bp, Homo sapiens
  chr17:50235736-50235916
  hyper
cggggggcggggaaggagcagacacagcagacacacagagaaagagaggcagggattattgcccgaaaccgccagccgccggcagcctccgccgaccctccctgctccccaggtccgcgcgcagcctgcagcctctcagccgggttccggcagtgcgtccagggcgccgaggggaagggc

SEQ ID NO: 225434 - DNA, 755 bp, Homo sapiens
  chr17:53342191-53342946
  hyper
aggtccccgaaaatcggcgcgagcggcgacgctaaacacgcggcggcggggcgagcgggccaggcgggcggtgccgcgcgtggccccgcccccgcacgcctatgggcgcgaggtgcgggccctgacgtcactcttgtcagggccgcggcacatgggcggccggatgcgctgagcccggcgctgcggggccgcggagcgctggggagcagcggccgccggcgcggggaggggggtggggtgggacggcgcaccgcctccggtgctggcactaggggctggggtcggcgcggtgtcttctgcccttctgcagccgtcgacatttttttttctttctttttttcaattttgaacattttgcaaaacgaggggttcgaggcaggtgagagcatcctgcacgtcgccggggagcccgcgggcacttggcgcgctctcctgggaccgtctgcactggaaacccgaaagtttttttttaatatatatttttatgcagatgtatttataaagatataagtaatttttttcttcccttttctccaccgccttgagagcgagtacttttggcaaaggacggaggaaaagctcagcaacattttagggggcggttgtttctttcttatttctttttttaaggggaaaaaatttgagtgcatcgcgatggagaaaatgtcccgaccgctccccctgaatcccacctttatcccgcctccctacggcgtgctcaggtccctgctggagaacccgctgaagctccccct

SEQ ID NO: 225435 - DNA, 105 bp, Homo sapiens
  chr17:54671710-54671815
  hyper
ctggtggacctcatcgaacacccagaccctatctttgaccccaaggaaaaggatctgaacgagacgctgctgcgctcgctgctcgggggccactacgacccaggc

SEQ ID NO: 225436 - DNA, 475 bp, Homo sapiens
  chr17:54671921-54672396
  hyper
cgggggccatgccgagcgagatcaaagggctagagttctccgagggcttggcccagggcaagaagcagcgcctaagcaagaagctgcggaggaagttacagatgtggctgtggtcgcagacattctgccccgtgctgtacgcgtggaacgacctgggcagccgcttttggccgcgctacgtgaaggtgggcagctgcttcagtaagcgctcgtgctccgtgcccgagggcatggtgtgcaagccgtccaagtccgtgcacctcacggtgctgcggtggcgctgtcagcggcgcgggggccagcgctgcggctggattcccatccagtaccccatcatttccgagtgcaagtgctcgtgctagaactcgggggccccctgcccgcacccggacacttgatcgatccccaccgacgccccctgcaccgcctccaaccagttccaccaccctctagcgagggttttcaatgaactttt

SEQ ID NO: 225437 - DNA, 353 bp, Homo sapiens; identical to SEQ ID NO: 204717
  chr17:54910847-54911200
  hyper

SEQ ID NO: 225438 - DNA, 822 bp, Homo sapiens
  chr17:54911484-54912306
  hyper
gatcggcgtgcgtgcggctggagccttaagcgtttcccccgcccggcttcatccctgctggcggcccagcgtcgttctcctcctgcgcgaggcggccaaggcctgctggcccggagccgcgcctccacccgcgcgaggtagggcttcgaggaccggcgcggcgcaggtctccggaggcctcccgagaggggctagggtcgccgggccgcgcgtgggagcgggtggggcccgggaggagacggcgccccggaggggagtgcgaggcctgggccgacggttacgggcgccgaccggcgttgcctggcctgaacgcccggcctttcggtggagggcagcttgcccctgtatgttgcgcccttccgtgggtcagaccggcggcaaggtgaggcggcggcggcagcagcagccgccttgggctcctggacgcgctcccgaggtggggcgggttggggagtggggattggagcgtgatggctggacgtcgccttctcggcgcggcaggtcccgggagacggggggacgaggcgcagtcccgccctcgggagagcggagccaccttcactgagggcgcccggtttggccccggaaaggcaggaagggggcggggaagggatggcgagctcggggtgcaccgcctgtttcttttctggttaggtatcgtccttggagaagatggaagcggagaggcggccggcgccgggctcgccctccgagggcctgtttgcggacgggcacctgatcttgtggacgctgtgctcggtcctgctgccggtgttcatcaccttctggtgtagcctccagcggtcgcgccggcagctgcac

SEQ ID NO: 225439 - DNA, 462 bp, Homo sapiens
  chr17:56032083-56032545
  hyper
tccccctgaaaggcgctcggctcccagcaggcgcccccgcctgccgtcgccgcccagcctgcgcccccaggcccgggcactgcggggaggggcgcccacacaaaagggggagcggcgggagaggggactcgggcgaagccggctccgggaggcctcgtctcccttccctgcggcgctggcccgcgccccccggtctaatcgcgcgccccgctcccggccccccagatgcccgcacgccccccgcgcccggggcccgggatgaggtgggggctcgggaaggaagggcgggcggggacctgccgcacgcggagctcccggggagccgcgccgacagccccgggaatcaaactcgcgacggcccggccctcccggcggcgcctgggcaacgggtcccgagaaggtggggccgctgggccggggccgcggccgggattgcgcgcggggcgccggcgaggaccgcgc

SEQ ID NO: 225440 - DNA, 240 bp, Homo sapiens
  chr17:56296509-56296749
  hyper
accggaggcgcaagttgcgcacggggtcccgggagcgatacactgcctccccggtgtcagtgctccagacggtctccgccatgacagctgcgacgcgccgcgactgcgccggaaagcgcgccgctctgttttcctggcaacggagacgctggatcgggaggcgacggaggtgctgcgcgcgcaacccgccgttcccgtcacggcgccacggtcgcagttggccacacagtgcaagtgcag

SEQ ID NO: 225441 - DNA, 180 bp, Homo sapiens
  chr17:56326897-56327077
  hyper
aagctcagcgaggatcgtgctggtttcaggaggaagcctgcgctgggcgccgccaacagggctctggcgcgctggctgcccgcggagtacgaggacgggctctccctgcccttcggctggacgccggggaagacgcgcaacggcttccctctcccgctggtgagggcaggccgggccggg

SEQ ID NO: 225442 - DNA, 153 bp, Homo sapiens
  chr17:56327148-56327301
  hyper
tgggggcagcaggggtgcgcgatggagatctgcacagacccccaccttccgctagagggcagcagagctcggagcccggagcccggccacgtggcggtcacgttctggccgccgcaggccagataccctggggtctcccgggcagatggcctc

SEQ ID NO: 225443 - DNA, 610 bp, Homo sapiens; identical to SEQ ID NO: 204722
  chr17:56401719-56402329
  hyper

SEQ ID NO: 225444 - DNA, 300 bp, Homo sapiens
  chr17:56429365-56429665
  hyper
tccgccctctttccccgaccttggtcccccatgggccctacaaccaggtccccgactgacaccttgaccagcgaacacagcaaacaggcccgcagatgccgcaggtccttcggcaccgtctccagggccatcttcgccgatgggaagaacaacagggagatagacgaccacagcctgtgcacccgcaggaagtaaatagctcgttacccagaatgcccaccacttccggcgcttagacttcctcttccggtgtgggcggacgccagctccgcccctacccccgccagaggagatggtttc

SEQ ID NO: 225445 - DNA, 240 bp, Homo sapiens
  chr17:56429759-56429999
  hyper
gtgtggggtagtcagcgggcccccggggcgggggggcggctgcgcttgcgcgggagtgtgtcgggctgagccgcagcgccgagacgcgggctgtttgatctgggctggtggccctgggcgtcggtcctgttccccgatggtaacccgaagtttgtttttttttgttttgtctccccgttttagaagcattgggggcagtgaatccactgtctccctctggattgtctctgcagagaccga

SEQ ID NO: 225446 - DNA, 1080 bp, Homo sapiens
  chr17:56833075-56834155
  hyper
cgtaggaataaagggtgggccgccgctggaccctgcgcgcgcccgccaccaactttccctccagatccgagaggggcggcgcgctccgcccccgggccgcgcacgtcggtgctcggcggcgcgcacgcctgcgggagccctctccaggcaacctagtgctgatcgctcgtgccggtgcggccgttaaccgcccttgccggagccctaggctcaaaagcagccccttacccttcctgggcttcccccaacccctttcccggtctgccctggggcatgagcagcgatggccggctgcatccctgaggagaaaacttaccggcgcttcctggagctattcctgggcgagtttcgcggaccgtgcggcggcggcgagccggagccggaacccgaacccgaacccgaacccgaacccgagtccgagcccgagcccgaacctgaactggtagaagctgaggcggccgaggcttcggtagaggaacccggggaggaggcggccacggtagccgcgacggaggagggggaccaggagcaagacccggagcccgaggaggaggcggcggttgagggtgaggaggaggaggagggcgcggcgacggcggcggcagccccggggcactcggccgtgccgccgccgccgccccagctgccgcctttgcccccgctcccgcgaccgctgtcagagcgcatcacccgcgaggaggtggagggcgaaagcctggacctgtgcctgcagcagctctacaaatagttaagtagctgggcttggctggtggtgggcccgcggtccccaccgcgccggcctcggacgcggctccctcggcccctcaaactgctctcttttctgctcctctcccccgcacccgcgcctgccgccgctgaaagcgcccccgctgctcggacccgggcggtcggctgagagctgcccacgcccgcctcggcccccacgcccgcctcggcccccacgcctcctacccggccttgaagccgctctcctgagccccggcgccctcccgccgggcccgggcccctcatcccctttcacctcggcccccagcttctagctccacttcacgcaacctt

SEQ ID NO: 225447 - DNA, 104 bp, Homo sapiens
  chr17:56834206-56834310
  hyper
ttcccagatcccttctttctccgggaggtttcctcccaccccagtctgtcttttcccgggctgagtgccttgttgtttggcggcagagacgcgactcctttcta

SEQ ID NO: 225448 - DNA, 659 bp, Homo sapiens
  chr17:58216876-58217535
  hyper
cattgcccctccaggtgccgttattttgccttttaacctggggcgggaggttttagacgaggctgcaagtctgggccagcggggacctgagggtcccttgcaaccagcacccgcgacggtgtctacactggaattccaaggaaaagagggctccaggggcgcgaccaaggtttggtcttctgctgagcgctgctggatgaatcgccagccttcgcccgcggccccctcctcctcatccctgaccccaactcgacaagatcccccgagcgcaggcccaaactccgcacagcttgtgggccgtgaggtccgggtctcgaagctcggtcccgctggggctgtccctccgcctctacttccagggtaaagaccgcggaaccaggcgggggtctggggagcctggctgcgacctcggctgcaggcttccgcagctgcttccagggtgctgtccaccccgtggtgctgaagtgccccacgcccctccgccacctaccggaagccgcgtccgcgctacagcctccactcaggattcgacccgaactccaagacgcgtccgcactggtccaacaaccctcatggatcgtcgcctgcctcaactgtttagaccaccgcgggtttcacccggaagcaccggggaggtcggagcttgcctgagaggctca

SEQ ID NO: 225449 - DNA, 801 bp, Homo sapiens; identical to SEQ ID NO: 204729
  chr17:58677543-58678344
  hyper

SEQ ID NO: 225450 - DNA, 242 bp, Homo sapiens; identical to SEQ ID NO: 204730
  chr17:58700868-58701110
  hyper

SEQ ID NO: 225451 - DNA, 125 bp, Homo sapiens; identical to SEQ ID NO: 204731
  chr17:58711213-58711338
  hyper

SEQ ID NO: 225452 - DNA, 191 bp, Homo sapiens; identical to SEQ ID NO: 204732
  chr17:58725252-58725443
  hyper

SEQ ID NO: 225453 - DNA, 250 bp, Homo sapiens; identical to SEQ ID NO: 204733
  chr17:58733952-58734202
  hyper

SEQ ID NO: 225454 - DNA, 1530 bp, Homo sapiens; identical to SEQ ID NO: 204734
  chr17:58740342-58741872
  hyper

SEQ ID NO: 225455 - DNA, 749 bp, Homo sapiens; identical to SEQ ID NO: 204735
  chr17:58742892-58743641
  hyper

SEQ ID NO: 225456 - DNA, 1080 bp, Homo sapiens
  chr17:59475677-59476757
  hyper
ctgcttccgccggtcccgaatccgcactgccaggagagatccggccttcaaacgctgctcccaacgttcaacaacgaagtgccctgcgaccggtgtgcgcagtgggcgggcgcctgcatgggtcaatgttggatgtacgcgcccaccacgcggttgtacgggtgggaatgtcacccgtggctagtgcatgctctgtcttttccttcagaaaacgaccttcaggaatcagcctgagtgttcgcgcccgagcccgattggaagcaggtgcgtggtcgcttcactctccccgtgcacaccttgagttatagctctcgctgcgcacagagggcaccacacggggcccgacacacacacacacacacacacacacacacacacacacacacacaccatcacttcatgggggggaaactgaggctgccggaagacagaaaacgaagactgatcacagaagagggggcttcaatcacaggtgctcgcagacaccccaactccctcacgcgttactcagcactccttaacttaggagacgtgcgcttccgagagatgagaagaaactaaaaaagtggttggcagggcgaagagaggaagccggtatttcggaagaaggagactttcgtctccggtaccggatagggcgaaaattcgttgggtcgcgggtggagaatccggggtccgcccgcgcggtgccgccctgtgctcagcgaaaggtgcgctcaccttcctggccccgaggatccgctcctcccggccgctggaaagctcagggcggggcccgggcctgcggagaactccaggttccttccgagtcttccggtgaaggcgggcgcgggtagggggtccccgcgtttccccagcgcaaggccgcgtcccgctcccgcccgcgccggccccagcagggctcggccatggctccactcaccagctcccgccacctgggatccgctcccggacctcggccgcccgagcctcccgactcgcccgcccaccggcctcgctttccagtgcctgctgtctctttccggggcgcagggacccccaggcggcgccacgacccggagctgggtcggaggccaggct

SEQ ID NO: 225457 - DNA, 180 bp, Homo sapiens
  chr17:59476849-59477029
  hyper
gccggcgtgcggctgcgggtccttccccaaggccccgggacccgggctcccctcgcctcaggccctttcggcgggtcaggtcggccctccgcgctctccagtccggcgcaggcagccgcaggcgcgggcgggcggtgggggccggggcaggaggaggggtctcggggcccggcggcccgt

SEQ ID NO: 225458 - DNA, 600 bp, Homo sapiens
  chr17:59477173-59477773
  hyper
taaaatcagcaatcaaggggggcctggctcgttagcgcaggggatccgagctgggcaggacatgtgagatagtcacagttttccagagatcacgacaagatctaaccagtcgcgcgtggtccccggcgccggagcgggccagctcagcccggcccagcccggccccgcgcagagcccccgccgcccccgcgcacagagccgggtgccccttgcggtgcgccggacgggaagccccgaggagcagctgctgcgcccgccacccgggtcgtccgtccaccgcgcgcgccgccgcccgggccgggggtccgagccgcgcgcccccggccccggccccggcccccgggcgcctgggccggatgtcccgatgagagagccggcgctggcggccagcgccatggcttaccacccgttccacgcgccacggcccgccgacttccccatgtccgcctttctggcggcggcgcagccctccttcttcccggcactcgcgctgccgcccggcgcgctggccaagccgctgcccgacccgggcctggcgggggcggcggccgcggcggcggcggcggcagcagcggccgaggcggggctgcacgtctcggc

SEQ ID NO: 225459 - DNA, 480 bp, Homo sapiens
  chr17:59478017-59478497
  hyper
ctcccggctcccggctcccggctccaggttctggccctgacgccacgcttcgctcccacggacaaccaagttgacttttctcgtttggcaccggagcgatttttttttaaaacaaaaacgctaaaatcctccgaatgaaataaaacgaaaacatactgctaaagaatagccccaaccgttctgagtcccagcgcagaggaggccccgcggcttggccctggcggtctcctccgccccgcgctctcgctcttctgcgtccgggtccgtctccgagctcgggggaaattcagcctctctcagactctgctccgaccccgaagcccctagtgggacctgggcccagctaaccccacgctggttgctcggttcctggcagcgagccccgggtcagccgagccctccgcctcaccgggctgggagccctttctccaccgcgggcatccgagccctggacgcatccgccgccccaggccttaaagc

SEQ ID NO: 225460 - DNA, 51 bp, Homo sapiens
  chr17:60771357-60771408
  hyper
ctgcaagcgctaggcgttactgccgtttctgggctgcggctccaggggagc

SEQ ID NO: 225461 - DNA, 142 bp, Homo sapiens
  chr17:60781450-60781592
  hyper
ccggccgcggctggacggagcgcggggccgcagcaaccaggccgggctccccgtcgcgccccttccggagcgggaggccctcgccgaggcggaggctgggacgcgcggggcgggcggcggcggggagccgcggggccgaggc

SEQ ID NO: 225462 - DNA, 468 bp, Homo sapiens
  chr17:60885402-60885870
  hyper
ctggagcggagcggcgggggcgagggggccgttacctgtgggtctgcccttcctcccctgccggggctacaggggtcgaggggctgggcgggcgggccggtccagggcgcaggagccgcccattaattgcgcggggacggccctgagctcctcttcctcctcctctttttgcttcttcactccctacacctgcccctcttcctcctccttccccgaggctgctttccgcggcgccggccggccttgcctggggcggaggcggtgggggcggctaccgggcgtcctccggtttccctagcaaccgcgcctccccgcccccgcgcgaccaggtgcagccgccgagagcacggggcggggcggggcggggctgtggccccggggtcccaagccagtcgtgggcgcccgccggttgccgtgggaacgaggcgggctgcagtcggggagtcagagccacgctggtgggcagag

SEQ ID NO: 225463 - DNA, 436 bp, Homo sapiens
  chr17:61553820-61554256
  hyper
agccccaggtgtgccggccgccctgagcccctccagcacctcccggaggcgcctgcaagacacctaaggtccccgcctccctcctctcccccccgccacacccctacccccggcaggcgacgtccccgcccctcgaccatggcctggtgaagaagccggccaggcccgatcagccccatccccgccgcacgagcggcgcctgcggacagctcctggggccccggccttgtcactccggaggcgggaggctccggggggtcgggctgggaagatcgagccggaggccgctaggctcccaggccccggccgaggctgcgcggccgcacggtgggcaggctcgggtgttccggcaaactgccgggtccccatcttctaaagagaggaggccctttctccagcttcctctgcgggagcccgacccagccccatcccgcca

SEQ ID NO: 225464 - DNA, 699 bp, Homo sapiens
  chr17:61777763-61778462
  hyper
gcgtggggaagcaacggtggcagggacaggatggaagggccgcgctccgcatcctactgggaggggacgagttcaggctgcggcggctgcggtcgcgggacactgggcgctcccggcctggctccgggataaccgggcggggcctgggccattcactgcctcggtttcccccggttggcctcgcgcgtaggcgccggcgcccccatccccgcccagagctgtggggccgcagagacccagccggggcgaccccggagcctggcccggggtccctcgggcggccgagtcctcccgccgccaggggccgcccccgcccctttgcggcccacgaggctggcggcggcgtccgggcacgcggtctccaggcccggccgcgaggctgcggggaggagcctgcacgagggcccggcagccccggcagcccccccagccctcggcgcctctgcaaccctgcgacgggctggggaggccggtatgcgtggttcccggagcacccgtcccccgaggctccacgtactcaagcgtttctggggcggaattctgtgggcagcaacgggggccccctctccaacaagcgcacctcatttctcacgtgggagccgcggcccagagagctgaggtgacagagcttgggccgcagagctgctccctccctgcagccgcacagcaggccggaggcacagccggcgagagacggcc

SEQ ID NO: 225465 - DNA, 105 bp, Homo sapiens
  chr17:61921178-61921283
  hyper
gtggctccgcctcactttaaggaagcctggtactttactccccagaaaatgcttctagtcaaaagaaatttggcttatgagaaacctccccgcagtttaaaaaaa

SEQ ID NO: 225466 - DNA, 62 bp, Homo sapiens; identical to SEQ ID NO: 204753
  chr17:62915906-62915968
  hyper

SEQ ID NO: 225467 - DNA, 822 bp, Homo sapiens
  chr17:63555673-63556495
  hyper
agaagcctcggaaccgtcgcccccgtgcccccaacccacctcccggatccgcgaaacctacaaaactggatcaccagccgtctcacgccactactgcctgtgccaagaatcccaaactctactgatttcaagcctgtcttttttccaaagaaaaaagtcttatctaaccaataaacaagctgctttccctagcacggaaaagatcaaactaagaagggtaggggctgaacggggtgcaaccccgggcgagaagccagggaccccggatctgggatgggtgcacgctgaacccgaccagagcctcgagccgcggggctgggcggcgcggcccacggagaagtggggctgccgttggcaccgcgctacccgggcggtgggaggtggagcggccccgttacctggaagacgaaggccgccgaagccaggctctcatgtcctccgagcccctccggcccggtcccccggcccaaatgcaactgaacgcctccagagccctggcgggcacacctcgaggccggaaccccgggacacgccagcagcgccccgagcccgggcggggggtcggtccccggcgccgccgtttgcagaggcgcccgcagaaaaagcacagaaagcagcagcctagtccagaaatggcgacgcgcggagtctctgcctctccgcaaaaggggccggggcggccacgggcgaggggcccgggccgggaggagggacgcgagggacacgggcgccccggacttgggccggtcctgcgcgcagactgagcctccgccagcgctgtgggccccttagcgcggacccgcggcagggaggggaaaaggg

SEQ ID NO: 225468 - DNA, 240 bp, Homo sapiens
  chr17:63556895-63557135
  hyper
acatcaaagcgcgcggtccgcccggccgcctcggcctcggcactcaccattgatccccgcgcgcgctcggcggcgagacctcgcaggcgcccctggcaggggcccggccccggcccccggctcggctcgcggcggcagccccgggcccccccgggccggccgcggcgtcggggaacatggggagtcgtgcggcgggggagggggtgcgggaaacaacaatcccgggttcagagcgaaagc

SEQ ID NO: 225469 - DNA, 145 bp, Homo sapiens
  chr17:63557249-63557394
  hyper
cactcggcgcaccaaatgtcctccgggcgcttccaacaaaaactgcgctgtggatttaactgtgcacttcaaaggcgcgagccgagcgcacggtcctgaaagggaggtacgcgccggccgcgccccgggccgccccccgcagccc

SEQ ID NO: 225470 - DNA, 687 bp, Homo sapiens
  chr17:64187875-64188562
  hyper
gaactttcccaagtcgtcccggcctggatcgcgctctgcctgccggggacaccacagcgggcagcgccgggaccccaggggcgcgcgccccccaggcccggagaacgggcccagggcctgagggcgacgccccttcccgaacgggcccgcaagggcggggcggcagccaccggcgcaaaattccactcaagaacctggtgggaggggcgggggaaggaaattcagaaaaaaacgagaacctggcaccaccacacgcaagctttccgctcggccgctgccgccaacgccgccgccaccgccgcccctgccaaacggtttcaaatccttgcgggccgctgggtcgccgccgcccagcagcccgggggcggggactttcgcgctcgcatttccccgccccctactccacccctctagcctgcggtgcggttgccatggcgacgttcccggcggcggcgaccaccggcgccccaggctgggggcggagacttccgcgcgggcatttctccacccacaggtggcggcgtgcgcgcggccccgttgccatggcgacgctcctgctggcccagcaaccgccagactcgcaccccagcttgtgggccccttggcgggtccccagtcgaagcttccgggataacccgaccacagtttgaatgctgctgccctcccgcatcccgcgcagagtcgctt

SEQ ID NO: 225471 - DNA, 105 bp, Homo sapiens
  chr17:64257870-64257975
  hyper
ttagactcaggtattcggattccagaatcccctcacccttgccattaaaggtgtggtctctggaacagggacatcagcagcagaagcaagtatcatccatcacct

SEQ ID NO: 225472 - DNA, 173 bp, Homo sapiens
  chr17:64298539-64298712
  hyper
cctccgcactcggtccggtccgctcagcgccgccgccgccgcaccctcgccgcacccccgcgcgcgcccggcccgcgcgcccccgccgctcgtcctcgcggcctcgcgctcggggcatgcgcggtgggcggtgccgctccgggccgcctctgccgccgcgagtaggaagcgcg

SEQ ID NO: 225473 - DNA, 685 bp, Homo sapiens
  chr17:64298989-64299674
  hyper
caacgactccacggcgtctcaggacgtggccaaccgcttcgcccgcaaaggggcgctgaggcagaagaacgtgcacgaggtgaaggaccacaaattcatcgcgcgcttcttcaagcagcccaccttctgcagccactgcaccgacttcatctggtaggtgccgggccgggcactcctgccccgctcctccccgcctccgggtcccggcacccggcgctccggcgcgtccgccccggggctggctcactccgataacttggaaccggcgggagtccgaactcttcgcccggagtgacacgcgcgcccggccctgacaccggcgggcaggactcccgggacgtcgccgtcccgccacacacaccccctggcgcgagagggaggctggccccgtacggtggcgaaggggatccctctccgggccgggcccctcacctccccgggcgcgcccacccgcacgcacccagcggagcggccgcttgccggggtgtgagcccaggggacaggggaggaggagaggccctaagggggcaaaggttcccggagaaacgcgccccggagtaacgggggagcggcggcgattgcactgcgcgcggtccaagttgctggcgagccaggctgggcgcgttcggggtgggggggttgtgtttgtgcttcccatcgggctggactgcgctggcatcttggg

SEQ ID NO: 225474 - DNA, 56 bp, Homo sapiens
  chr17:65242142-65242198
  hyper
ctcgggggagggtcccgggcggaaagcagggtgcgccagtccgggtccacctggcg

SEQ ID NO: 225475 - DNA, 139 bp, Homo sapiens
  chr17:66434324-66434463
  hyper
tgccatgcatagctacgggaggaagtggctgagccccggaacctttaactgcacgttctggcagccctgccacccctttggcgatacaaggtcattcctggccccagccttagaagaggccactcgtccatttccagtt

SEQ ID NO: 225476 - DNA, 1399 bp, Homo sapiens
  chr17:66596140-66597539
  hyper
gaaggggctgagagcgtttcttcgctgtgcggctgcaatagaaactttttcctcgtactatctgactccgggactggactgtgaggtctgcaacagctggtggggttcgggtggggaacacactctaagcccagcgccagggctggagccgtgggtggagccgctgcagccctgggccgggggcgtcaggaaactcgagactggggcgcggggaggccccggccagagcgcccgctctcccgcgtcccgggcggggtcctcacctgttccagcgggccaccttcctccggtaataccgcagcgcctcctggctggccaggagcgagtcctcggctcccaggagaggcggctcctccgggacgttgtacagcgggtgggcgaagagggcctgcaacttggagctcgacccgctgtggctgccgccagccggttcagtccggggctcggttcgggaaaagttgtgcacgatcgtgccggggtccgaggcagctgcggccgagtcccgcgccagggaggaggcgcggccggtgcacgggcacccccgcgggcgctcccgaggccgcagctggcgctgtacttggggccagaggtggaagtagaggtcggcggagagcagcgcgcccagcagcagcagagtcagtaggcggtcccggcgcagccccggcatggcgtgctggccaagggggacgccgggggcaggccggctgtctccggggtcccgggaggggtcgcggggtgcgggcagaagaggtgcctggagtcccgcgggtgggccggggtcagtgagaccggaatgctccccgcgcgggctagtcccctgtggaggggtgtcgctcctcaacttggggaccaggtgcacggagcaccggggctctcggagtcagcgggcgtcgcttctccgcgccgagtgagccgagggaatggggttcccggggtgcccgcttcttgcgccttttctcccgtgcgcccgcccgcccggacgctcgcggcaggtgaagggccccggggcgccggcgccggctgccaccgcgggcggacgggcgacggggcggggggcgaccgcggagggcggacggaggccgccggctgcaaagcccggggcgtctctcctgaggatgctgtcgctcggcggcggctgctagtgctcccgcgactcctcctgcgggcggcggagacgccagtgccggcggctggcacgggcggcgcgagtggggagttggcgaagcaggagcggctccggggagcttgtctgtgcgcctggactcctagaggcagaggtagcgcggggcctccccgagcctggcctggcgccggcacccccacccactctccgctggcacctgcctctggcgcagctgacggccaactcccgatccgaagccggcgctgcccttgcacc

SEQ ID NO: 225477 - DNA, 1200 bp, Homo sapiens
  chr17:68164817-68166017
  hyper
aggcgctgaagcgagggcagatctgagtgtctgtaggagttgctattccaaaaaaaatcattactctctaattgttctgattttagatcagcaaagcgtgccgggcggtggtggagagactgagggcggacaaggcgagagggaacgagccgtccacccttcggagaagcctaggcgccttgtaagtaattcgcgaacagtcgggagaacaaacagccaagcggcgctgcagtggccgcacttgcgcgcgtctcaatcctgggggctctgcgcgcccgccccagtccctcgccccattgactcagtggcttctccgggcgctgcagcctccgcggggggcttcgaagggccgaggggctccggcagagagggagtggagagggagacgcgccgggaccgacgaacaatcctgcccctgcggcaaaggtctctacccggcgctggcacctcgcaggcccctcgaggagcacgcagggcaagcggcccaagagcgggggaaccgggaagtgtgtggggctccagacggagtaggaagctttgcccaaggccaggctgcaatcaggcagccgcaacagccgggcgcggagcttcccacctgctgctgtcccagctgggccgcaacttcctcctccccggcccgggcccgactccccggccgggctccgagggtggagggggacgaggcggcggcaggttccctccgctggcaacgcctcgcagcatcctcccctccccgccgcggttcccggggccggccgcgcggccaggcgcgctgcgattggccggcagcggccgggggcggggccaggagagccggtgtcgcacggaccgcctcaaaagagcccaggatattgcagagcgcactggagccctggccagcgcgcagccttcccggcgccggcgggctgggtcttgggaattctggtttgctttggctcactcgctttttacaaaccactggatcttacatgcctctgtaccccccacttccactccatgtccccatgctcctgcgccagcaacaggtaagggctgctgtgttttcttccttttcgctcgctgccggtgtgtcctggggaatggactctggccgccgtcccctaccctaccctgccccgctgctccagaggtgcccagctgtcacactgctgtagcgctcacccacactccggagtcccagatcatgcctatatagtttgt

SEQ ID NO: 225478 - DNA, 51 bp, Homo sapiens; identical to SEQ ID NO: 204765
  chr17:70270193-70270244
  hyper

SEQ ID NO: 225479 - DNA, 180 bp, Homo sapiens
  chr17:71161088-71161268
  hyper
tgtgacgtagcgggaggggggcgtggggaaatgtgccgaggggcccgggctggctgggccagtcccagcggcgcagccacccatgcgcgcgcgctcgcaagaccaccagcgcccagagccccagtctgaggcttggcgccgggggtctgcgggcgaggggagctctctacgtgcgagggg

SEQ ID NO: 225480 - DNA, 120 bp, Homo sapiens
  chr17:71161302-71161422
  hyper
aggaaccccaaacgtccggcgccaggcgctagccaagctgctgcgcgccccggcgcccagctggctcggggacagccgctgggtgtcggagaccggagctagcggattgcagcggaaaag

SEQ ID NO: 225481 - DNA, 889 bp, Homo sapiens
  chr17:71161493-71162382
  hyper
gcgagaagcgcacttgggcacctgtgtgcatctgcgctgatggtggtgtgcccatccgagtgcctgagcttaggtcccggtgcgtgattctccgctcttgtgccttttggggtgattgtagtaggaatgaacgacaacgggtacccttgcctgagtaagggggctgtgggtagagtgtgctggaacggacgtgtcctcgcagcctcatgcccgtgtgcgtggcgtgtgccctttagcccgagatttcaggtagctgcgacgggtgacaacttctctcccagccccctacaaaagagacctggcgcgaggggagcgaggccgtgagatgccagctggggctcctgcgggagcgcacccggagatccgagcctgccagaggcaggcggcgggcgcagagcggagaaagaggggcttctctccctagacgctgaacgatctaggatccgtccccgtcccccacctcgggacagaaaggacagtttgtctaggtttggagagaaaaaaccactgcataggccgtgcccaaaagccgctggccaagtcccccaagcgactgtcttctgcgccccgatgtctctgtcctcagcgccccccccccacacccggcacccctgctgtgcgtttcgatactgggcgtgctggcgccacaatctccgctcttgcctcgtcttcctggaaatggcacagagttctttgggaaacccttgctctgaggatcagcgagttggatggccaggaggaggactttctgtgccagccgggagcaaccggctccgcggtcctgacactcgcccctccatttctcaaccccgtaggccagcaccgccccggcttttcccaggcgctcacgcgccgcggtggccctcaggggcttttgtcaccctgccag

SEQ ID NO: 225482 - DNA, 610 bp, Homo sapiens
  chr17:71306967-71307577
  hyper
ctcagccccggctcccgcccagctctccagccctcccggccggggcactcaccggctgacgggatccccgcgggcaggatggctcctgggggacgcgccgggggcagggggcagttttgtaaccccggctgggggcgctccggagagggggcggggccagggacggccgatccgcgcgcacccgccccaagcgggcgattaaatcattaaccgaccgctcccgcctgcgatcccgctgagcgcgctgagctcggggcgcactagcccaggagcggccgtctccccggctccaagggggcgggtggctcgactgccctccccccgcaccccgccaggaggcgcctcggcctcccgggcttccgagggagcgggcggggcgggagcctggcgggggagggaagggttcgcggggcgggagtaggggaaaggaggaccatttgttccttcggccattcccttccagacagctccttccctctggcttcccggccgggtgacattgggtggcgtgtgctgcagtgtgtgtacgagagcgagatgtgtacacgcctctgcccgtacaggcggagaattcggttcttattcatggagaactccgggcgcacacacg

SEQ ID NO: 225483 - DNA, 180 bp, Homo sapiens
  chr17:71307865-71308045
  hyper
gagcgccgagaagtgggggctccgcgcccttctccccgcgccgcggcctcgcatccccagcttcgatcctctctgccccacagggggactcgagacccccaagcccacccagggcacccagcgcgaaggcggctaccacagacagaggcggttgcccgtcgcctacctcggtccccggag

SEQ ID NO: 225484 - DNA, 443 bp, Homo sapiens
  chr17:71639094-71639537
  hyper
ccctcctgagcctgcgagagtgaaggcctagccctgcgagtcctggagctcggtccaggcttcgtctccctccgcccccagcaggcgccgctcggacaccgctgacaccactgtctggatcggcgaaccccaaagtcgaggaaccgccggtgcagccgcccttcacctcggggacctgcccggggaccagggggacgtctgggcatccaccctcaggaagcgggcagcgcagatcacacctcggatccttcgtagcactcccaaacccaaagccaccagcccttctccaccgcgaggctgctcccggcagccacaggtcacagcagcgagcggctgcacagactatcgagcgaacagcggaggctggaggcaggggcggggatgctgggtgtgggtggatgggtaggaggggaggcctcagaccctccctgtgcaccaccccc

SEQ ID NO: 225485 - DNA, 300 bp, Homo sapiens
  chr17:71639613-71639913
  hyper
cgagcagccaggggcgggctcccgtacgtggccaagccgggcaattgctctccccgggcgagcaacccggcatccagcgctcgcccaccccactccctcgccccggggaggccatcgcctgcccggcaggggccctgcccttccccgcagacaccgagcagggaaccaggagctcggtctgggaagctcagcgtagccgagcgtggagcccggcacggaatgtcgctcccctcccaagccggcgcagggcagccacagcagacggggggaggggagcgcccctcccacttcaccttgggc

SEQ ID NO: 225486 - DNA, 141 bp, Homo sapiens
  chr17:71641543-71641684
  hyper
ggccgcgggcgcccagcggctctgggacccgcaggggggcagcagtgccaaccttctgccgcgccgggagagatgcgcgcgagcccctccgctctctgcccagcctttccttccagcctcgctcgcgcccctgtctcaaag

SEQ ID NO: 225487 - DNA, 887 bp, Homo sapiens
  chr17:71948434-71949321
  hyper
ccacccacaaaatgctgaatcggtgggtgagatccccatagcaacggctccgatgccagaacccaggattacgacaccggatcagccagagacgcgctggaggggcccaggaggggctgcagcgcgccgcaaatcccccggggcttacgggagccgctctttaggagacagcgctggacgaaccgggcggggtggggatggataatcttcaggcgccaacgcaaaacggccgcaagacgtggccaggccaggaggctcctgggtcccgggcccgcgatgtggcccttgcgcggggacaaagacgaggccatcgccctcacgtgttcccaaagacgcccaacctcatcaggaggccgccccatccgccacctgggagcgtcccacacgcccgggcccttgaggatgtcccctcggcgatgtgcctgaccgggcgctccccgcccgccaacctccaacctccaacctccgccctccaccctccaccctccttgctctgtccgcgtggacgcagcccccggttcagacactagcgggtgcgcggggccgcccaggacggcgggagaggacggggccctccctcccctctggtcccccaaagctccccggacgccgcggccgcgccccctgccggctccctccggccggctcccgcgtcccactggggctcctctcccgctgcaaggtcagcgcttccccgccccacgccctccacaactccccgcccttccgttcctgctgccgccgccctctccacccaggctcctgtcacccaccacgggagttcacacgctccagtccatcggcctcccccggcccgaccgccctggctcaggcaaatcccagcctgcacttcccgaaggaagtcccctccacgcacacaccctaca

SEQ ID NO: 225488 - DNA, 643 bp, Homo sapiens
  chr17:72208474-72209117
  hyper
cgagcgttttcagtcggtccgcatccacccggtcccttcagccagaaccctaggagccccgccccgtcctcccggggctcctttctcacccgcgtccctgccgcggtggatacgcacccctcaggctggctgcccagcgcggtttccacgcccaatctgccgcgaccccatcactccaccgcacctacccctgactcctgcttgtcctgcagcctgggctcctccctccgctggccaagtcacgccaagcagtttgcggttacaggacgggtgggggcctctgcatatgtgcagagtacggagggcccagggacgcgaggctccccgatgggcaacctcccctgcctttgcttttccccagagccccctcctggcctgcgttcggcatcttctcgggtcgtcatcgccctctgcggtgcctgcgctcggggtgagggtttttgtcggcttttgttacatcaccgatgtaacagtgcctggacgtagtaggtgctcaataaatatgttgttgaatgcgcttcagtctccccgaatgcttgtcccttccgggcgctctcatcgctctcctaccttccccgctacacagctcgaaggtcccctcctccgggaagctcaccctgtcccacttgccaggaagaatcaa

SEQ ID NO: 225489 - DNA, 215 bp, Homo sapiens
  chr17:72270296-72270511
  hyper
gcctgcgcttccgacgtggcaggaaaggagtcacgtgctccggggtccttccgcgtcgccccgcgcgtccggagccaggccggggttgccaagcaaccggtaaacgccgccgtttgaggagcaccggagccgcgaccgtggattgaacgcttccccagagacccagaagcagaaggagcggacccagggtaaggggcgggcgccaggaggacgtc

SEQ ID NO: 225490 - DNA, 488 bp, Homo sapiens
  chr17:72322041-72322529
  hyper
cgtggctgctggggcgctccctaaagggcagtggcacggggtcgcgccgcgagcagaggggcgcgggtgggcgcgcaggagttagcgaactgacacggaggcgccaggcggacgcacggacgcaccgagggccgcagggccgcacagccgggcacacatcgtcgcgcagcggttcaggctcgggggcctcctcggcggaggcggccaactctcaccctcagcgcggggaggggcgggcgccgggggcggggcggcgccgtccgggccctccccctgccccgcctcgggtcggcgtccttagccgctggcgcgttgttggtttcgggttgtcaggcagcgcgcgaggcggcgggcagctagcagctggcggacgcgacccggaggcggtgggggtgcggctgagccatgcccggtggcgcggcctgagcccctccacctgctgcaatcatgaaggacagcggggactccaaggaccagcaactcatggt

SEQ ID NO: 225491 - DNA, 300 bp, Homo sapiens
  chr17:72450107-72450407
  hyper
agcccactcccccgcacgcacctgggttgggggaggtggggggcggtggggggcagtgaaggtggggggaggtgggggtgggcccgagcagccggcgcgcccacgtgcctctcccgcgagggcccggccaccccagctccagccaacccgaggccgcctctcgtgccccaccccaagccccgccccggcccctgcaacccgatcctcgccgcggggcggcggccgaagccagctgtcccagctcctgctgtagcctgggggccgggccgccgcgctccgcccatccccgccctcagagct

SEQ ID NO: 225492 - DNA, 180 bp, Homo sapiens
  chr17:72920320-72920500
  hyper
tcaccctgtcctcctgggtataaagcgcctgtccatctcggcgtgggagagaggagacgctcgccgtcccctgacccccagctcagcgccggctccaagcccagccaggtgggtgccccgggccggagggcagtcggacttggggagtggggaccttggaggggtccaaccgggtgctgc

SEQ ID NO: 225493 - DNA, 351 bp, Homo sapiens
  chr17:72920681-72921032
  hyper
tcctcccctacagtgatccctctagccttctccagtcgcctccgccatgtccgaggagctggcccagggccccaaggagagccccccggcgccgcgtgcgggccccagggaggtgtggaagaagggtggccgcctgctgtcggtgctgctggcggtgaacgtgctgctcctcgcctgcacgctcatcagcggcggagccttcaacaaggtggccgtgtacgacaccgacgtgttcgcgctgctcactgcgatgatgctgctggcaacgctctggatcctcttctacctcctccgaaccgtgcgctgcccctgcgcggtaccctaccgggacgcgcacgctggccccatctg

SEQ ID NO: 225494 - DNA, 518 bp, Homo sapiens
  chr17:72983606-72984124
  hyper
acaccaggagggtcccgccctcggccccgcctccagctttgcatacatctcctgattggtcggcggcggcaggccccaccccgcggagccgagctccgcaagctgcaggcgggctccgccaagatgcagcggcggctccggttgtcgccgggcgggccaggagcagcgcggacccgagccgggcagggggcgcccgccacggcacccgcgcgctcctagcgccccagacccgcctgcgggcccggatcctccttgccactgtcccacccgccgtccctgccactccaccctttgtgtcgccgcagcccggtgcccccggctctgcgggaccccggccgggccggaccctggcaaagcgccaggccccgcgtgggctcccggcgagcggttgatggcgagggggcgcggcgcgggctctgtagcccgagttcccgacgctggaggcccggcccgcctcagccgcattgtcccgggccgcgcgcaccggccctgagctgcgccgccgcagcacccgcccg

SEQ ID NO: 225495 - DNA, 180 bp, Homo sapiens
  chr17:73008579-73008759
  hyper
agcagctcgctctctggccaccgtcttccccagccaaccaggcctcccggaggcggccggccagaaagcatcggcgggaccccagtttgccgcctcccctcggcgggacctagaaactgcgcggaaccaaagctcgagggcggctcgagtttgcggaccgcggggaggaagcgcccgccg

SEQ ID NO: 225496 - DNA, 469 bp, Homo sapiens
  chr17:73073584-73074053
  hyper
accccttctcgtggtgcctggagtgggacgacaacgcgcagaccgtgctgcacggcgcctaccaccgcacgctgggcgtggcgctcgactgcgacgccggcggcttgtccttctacggcctggcgggtggcgccagcctcttctaccgcttcctggcagccttcctcgagccgctctaccccgcggtcatggtcagcagcggcgcctcggccacgctcaagcggcgcccggagcccgcgccgcccgtgacagcaccccataaataaacctggacttatctaagcgctggctggcgcgccaggacggttcccggccctgcgccatcccacctcccaaaacgcaggcgaccctttctcgccacagccacaggagggctctaatccggctagagttcccccaggcactggggacagtcccgtggccttgtgggtgggggattcctgactgcggtgcacagcccactcccaaa

SEQ ID NO: 225497 - DNA, 363 bp, Homo sapiens
  chr17:73084122-73084485
  hyper
caggcccgtgcgagcgggtgagcgggccccccgggccccactgcctcggacgcgtcccctcctcgcccagtcccctctagcgctgtcgcagacctcctgccagggccccaggtctcctcccgcctgggcgggctcagtggcggtgaggatctagaaaagtcttcctgtcctggttctgggctgccccggggcctggggtgatgacccgcaagcccaagggcgctcggactcctggcccgaaattccagggcggacacagcccgggatcccagcagccccaactcggaggagctctgccccggggagggagggacagcggagtggaaaccagattccggggcagcactgcggggatgggcaggg

SEQ ID NO: 225498 - DNA, 83 bp, Homo sapiens; identical to SEQ ID NO: 204789
  chr17:73422368-73422451
  hyper

SEQ ID NO: 225499 - DNA, 483 bp, Homo sapiens
  chr17:73511002-73511485
  hyper
accctggactccaccgcagagaagcttacgtcagtttctcggtggcagcgaatttactgccagagtcttgtggcatgagatccgcgcaggcctggggccctggccgggaacccctcactccccaaacgtcccaagcccaacccaggggcactcccacgcggagcccgcggccgacacgggcggagggcgcccttggcagtgcctggggtcgggctggctcccccgccccccggaatgtccctccagcgcctcgcaaccccccagcccagcccagcccagcccaggcccaccggggaacaaagcggcgggagaagccgggcgggccaagcgcccgaggtataaacgcggaggatggaaaaaggggcgcgaggaggacggaaggagcggggagatggaggtgcccgccgaccccgcaagaaaagttagtttgcgcccgcccccaggggcgctgacccccagcgcgggccccgcagcctcacctct

SEQ ID NO: 225500 - DNA, 981 bp, Homo sapiens
  chr17:73584148-73585129
  hyper
accagcgcaaagcgccccagcgcctggagaggcccgggaggccggcctcaggggagcaggagtcggggtcggccagcgcggatggcgcgcccagccgggaacgccgttccgaccgcgggcaggcggacagggcgaaaccggcggccgagcctgccaccgccgggggccagggaacccctggtggccgcaggaagcccactgcagaggggaacggcggctgcagacgcccaggggctgggctgtccccgaaagcccaggagaggcaaagcaacgcgcagcgtcagggacgcgggcccaggggcggccgcggggggcgcctggaggagggaagcctctccggaggagaagagctgggcggccgccgtaggaggaagcggaaagataaggggccctcggctcggcggggccgccggacgcccaggagcctcaatggggacacgtcgggtggggacggaggcagctcctgtccggacagcgaaacccgcgaggcccaggagagcggcagccagcgcggcacagcccgggagctgcggcccacgccggagcctacggacatgggctcggaagggacaaaaaccgggccggagtcagcgctggagccaagcagcgacggcctggacagcgactggccccacgcagatacccggggccgggaagggtcgtcggggacggggcccctgggagccagcgagcattccggcggggactccgactcgagtccgctggggaccggacctggacggggctctcgggcagctatggcctccaggaccttcgaggacagctcgcgggctcctcgggacactgggccggccaaggacgcgagcgacaaccgggcgcagcggggcgccgagccagaaacaatgcaggcctcgacggcccgggctccgcgccaccaggtcggaaaggcggtggggcaggtgccagcggcggcaggcgagggcgaagcgggagccgcagcaggagcggggccggaggacc

SEQ ID NO: 225501 - DNA, 214 bp, Homo sapiens
  chr17:73585691-73585905
  hyper
ctccccgcaggtcccgacaagcccagtccccggcgacccttttgatcaggaggacgagactccagatcccaagttcgcggtcgtgttccccaggatccacagggcagggcgggcgtcgagcagccgcagctctgaagaagcgtccgcagatgcccccacgggggaaggccgaggttggcctcgtgcaggggtgggggggcacagtgaggggtgc

SEQ ID NO: 225502 - DNA, 180 bp, Homo sapiens
  chr17:73585949-73586129
  hyper
ccttgccccgactgcacccgacgggccttccctcgacgagagcggctccagcagtgaggcggagttggagaccctcaatgacgagcccccggtgcgctgggcgcagggctcaggcccccacgagggtcctaggcttggcgccgccgtgctgctaccccgactctccttggagacccgcct

SEQ ID NO: 225503 - DNA, 45 bp, Homo sapiens
  chr17:73874667-73874712
  hyper
ggcctgggagggacccgggccgttcgcgccgcggcacctccccct

SEQ ID NO: 225504 - DNA, 104 bp, Homo sapiens
  chr17:74072119-74072223
  hyper
ctccatcctctggaaaaacagagaggcgaggccagactgcccccacacctcctgtagccactgagcgcgaagtgcgttggttccgagcgcgctggtgggatcca

SEQ ID NO: 225505 - DNA, 900 bp, Homo sapiens
  chr17:74072525-74073425
  hyper
tctgggacacgctgggaggcccccacctccgccctcacgccgagcctcacccccacctcctctgtgtgcggtgtaaccatgcgctaaggaccttcctcgagagcagccttgggaccgaggtgcaggggtcgcggccctccagcatgaatgtgcccgctcagccgacgtctcccttcccggtctgaccgcaggtatctggccatccgctacccgctgcactcccgcgagctgcgcacgcctcgaaacgcgctggcagccatcgggctcatctgggggctgtcgctgctcttctccgggccctacctgagctactaccgccagtcgcagctggccaacctgaccgtgtgccatcccgcgtggagcgcccctcgccgccgcgccatggacatctgcaccttcgtcttcagctacctgcttcctgtgctggttctcggcctgacctacgcgcgcaccttgcgctacctctggcgcgccgtcgacccggtggccgcgggctcgggtgcccggcgcgccaagcgcaaggtgacacgcatgatcctcatcgtggccgcgctcttctgcctctgctggatgccccaccacgcgctcatcctctgcgtgtggttcggccagttcccgctcacgcgcgccacttatgcgcttcgcatcctctcgcacctggtctcctacgccaactcctgcgtcaaccccatcgtttacgcgctggtctccaagcacttccgcaaaggcttccgcacgatctgcgcgggcctgctgggccgtgccccaggccgagcctcgggccgtgtgtgcgctgccgcgcggggcacccacagtggcagcgtgttggagcgcgagtccagcgacctgttgcacatgagcgaggcggcgggggcccttcgtccctgccccggcgcttcc

SEQ ID NO: 225506 - DNA, 365 bp, Homo sapiens
  chr17:74235822-74236187
  hyper
gccctcggaccccgcgaggcaggtaggctttgggccgggccggccgggtccgtgcggggcgccgacctcgcctacgacgccgcagccccgctccccaggagcctcggtccctgcgggcacgcgtccccgtcacggggccgattacaatggaggccgctcccgtcctcccgtggaggggctcggtgccctcggtgaccctgctagacccggcaggacgccccttgggctaattcgcccggggcgggggagacctcggccttctcgaagacctcccgcgctcgaagaccgtttcggagcgtccgcaaccactgagtccccgaagacccgcggggccccctcaggccgtcccgacccagacccctgcc

SEQ ID NO: 225507 - DNA, 790 bp, Homo sapiens
  chr17:74533662-74534452
  hyper
gcggtggcggggcgcggggcgcggggcgcggggcgccgggagccggggccggctgcgtgcgcggcgggcgggcgaggggtagagcgcggagggagggagcgtgtgtctgtgcgcgccgggtgtgtgtgtgtgtgtgcgtgcgtgtgtgcagggtatatgtgcggggggcgggggacagccagcggtggggcggggatgtggtctgctggaaaatgtttaaaaaaacaaatccgctccaaacccccagccccgtgtgggtaagagccaatgccggcaaggtgaaggctgcgcggggtgggggcgacgcgactgccgcccgcccacccgcaggccacggcggagttgcaccgcggggcggggctcgggtaggtgtggccggggcgctgggggtcccgggaggaatgggcggtcacgcggcgctgggcggcgcgggccgcacaggagtgcgctggggcgggcgcgggccgggagcgctgggttccgggtcccagtgcttgcggcgtcgcgagtgtgcgcgtgcggacccttcccgcggcggggaactgactcaaagtccaacactcccgagctttcgcggcgaggccgaccgccagcccgcccgtgggggcgaacaggagcccctccggcggccgccgtggacctagctgggctcccctcgcccgggcctctccccgcgcccccgagccagccgctgggggccgcggcgccactcccacggctctggacgcccaggctctggggggttagcacgggggtcgtccccctgcccgcccaccgccccggctgtcgg

SEQ ID NO: 225508 - DNA, 324 bp, Homo sapiens
  chr17:74581101-74581425
  hyper
gggaggaggagggagtggagcgcaggacgcggcgcggggaggagaacgcggatggagccaggagtcacccctctttccctcgggcgcccgcctcttcgcggatcgcgcccgcactgggcttatccagacacggcgagcggaagccggggagaagggagcgggcgcggggcggacagagaccgcagcgggcgggaaaggcgactggccgcggcccgacggagggtccccgcgaagttggaaaccggagacttgggcccctgcccaaaaagcagaatctgacgttaccgagggagagttcccgacaaaaaaggaagtttttatctg

SEQ ID NO: 225509 - DNA, 224 bp, Homo sapiens; identical to SEQ ID NO: 204804
  chr17:74732259-74732483
  hyper

SEQ ID NO: 225510 - DNA, 261 bp, Homo sapiens
  chr17:74732944-74733205
  hyper
ggtgtgagtccggggggcggccgtagcgcgccatttgcacccgcagctcgcggccgtccagcacggccccgtccatggcatccatagcgtcctcagcgtcgcgcttgtcgtgaaagcgaacgaaggcgaagccgcgggactccttggtgtagcggtcccgcgggatgtacacgtcgccgacgcgcccgtacttctcgaagacgcgcctcagcgtgtcgggcgaggtgcggtaggtcaggttgtccaccttgagggaggtca

SEQ ID NO: 225511 - DNA, 88 bp, Homo sapiens; identical to SEQ ID NO: 204806
  chr17:74864229-74864317
  hyper

SEQ ID NO: 225512 - DNA, 577 bp, Homo sapiens
  chr17:74864603-74865180
  hyper
gcgcgggttgccctcgtcgagagccatgggcgcggcgcggcgcggggctgaggatcggcgcggcccggaggcgctggggaccggggcgcgggcccggggccgcctttagccggcaccgagggcgcggggccggggatgagggcgcccgccgcggggagcccgtctgcgcgccgcggcaccttcccgcccagcgagcgagcccgagcaggcagacgcgcggccggcggtctgggggcgcgccgcctcccggtccccaaaatgtgaagcggggagggcggagacgcagagacggcccggccgggcgccctcgccgccctccggcagccgcgccgctccctccgctgcacgcccaggcctgagcagcgaggccaccgggccgcgcgctcccagcttcgctcggacgcggcttcggcccgcagagggttcgtggcccggacgcggcgagagctgggcccaggacggtgcgtccggcctcgcccgcggctgctcgcaccaacaagtttgaacaatgatcaccgtcaaccccgatgggaagataatggtcagaagatgcctggtcaccctgagaccctttcgg

SEQ ID NO: 225513 - DNA, 540 bp, Homo sapiens
  chr17:75368837-75369377
  hyper
tgccctcggtgggtgggagttggtggcctctcgctggtgccatgggactcgcatgttcgccctgcgcccctcggctcttgagcccacaggccgggatcctgcctgccagccgcgtgcgctgccgtttaacccttgcaggcgcagagcgcgcggcggcggtgacagagaactttgtttggctgcccaaatacagcctcctgcagaaggaccctgcgcccggggaaggggaggaatctcttcccctctgggcgcccgccctcctcgccatggcccggcctccacatccgcccacatctggccgcagcggggcgcccggggggaggggctgaggccgcgtctctcgccgtcccctgggcgcgggccaggcggggaggaggggggcgctccggtcgtgtgcccaggactgtcccccagcggccactcgggccccagccccccaggcctggccttgacaggcgggcggagcagccagtgcgagacagggaggccggtgcgggtgcgggaacctgatccgcccgggaggcgggggcggggcggggg

SEQ ID NO: 225514 - DNA, 780 bp, Homo sapiens
  chr17:75369397-75370177
  hyper
cggcgcccgccttcctcccccattcattcagctgagccagggggcctaggggctcctccggcggctagctctgcactgcaggagcgcgggcgcggcgccccagccagcgcgcagggcccgggccccgccgggggcgcttcctcgccgctgccctccgcgcgacccgctgcccaccagccatcatgtcggaccccgcggtcaacgcgcagctggatgggatcatttcggacttcgaaggtgggtgctgggctggctgctgcggccgcggacgtgctggagaggaccctgcgggtgggcctggcgcgggacgggggtgcgctgaggggagacgggagtgcgctgaggggagacgggacccctaatccaggcgccctcccgctgagagcgccgcgcgcccccggccccgtgcccgcgccgcctacgtgggggaccctgttaggggcacccgcgtagaccctgcgcgccctcacaggaccctgtgctcgttctgcgcactgccgcctgggtttccttccttttattgttgtttgtgtttgccaagcgacagcgacctcctcgagggctcgcgaggctgcctcggaactctccaggacgcacagtttcactctgggaaatccatcggtcccctccctttggctctccccggcggctctcgggccccgcttggacccggcaacgggatagggaggtcgttcctcacctccgactgagtggacagccgcgtcctgctcgggtggacagccctcccctcccccacgccagtttcggggccgccaagtt

SEQ ID NO: 225515 - DNA, 180 bp, Homo sapiens
  chr17:75370207-75370387
  hyper
gacacagcccaggtcgtggcagggtctagagtgggatgtcccatggcccccatccaggcctggggatatcctcatccgcctcccagaatcgggccgtgggggacagaaggggcctgcgtgcgggcagggagagtattttggctctctcctgtcttcggggtttacaaagtgtgttgggac

SEQ ID NO: 225516 - DNA, 264 bp, Homo sapiens
  chr17:76227788-76228052
  hyper
cgtgcccagggacccggggccagcccgtggggacgctgggattggagcccaagccccaggttcgccgcgcggctctcgacttcctctcctttcccccaggggcgagctcagcgaccgcagagaggtggggtcgatctccctgcgaccccagggggcccgcgaggccagtgcgcgggcaggagcggggacgtgctcagaagagccgggcgccgccgcgcccgcccgccccccgtcccccggctcccggctccgcgcgccccccgc

SEQ ID NO: 225517 - DNA, 178 bp, Homo sapiens
  chr17:76228143-76228321
  hyper
ggtgcactgctcagcttcgcgctcctggccgccgcggtcgccagcgactactggtacatcctggaggtggcggacgccggcaatggcagcgcctggcccgggcgcgcagagctgctctcctcgcactcggggctctggcgcatctgcgaaggtaaccggccaccgcgccggccctcct

SEQ ID NO: 225518 - DNA, 164 bp, Homo sapiens
  chr17:76337744-76337908
  hyper
ctgggaggaaggtgcggcgctggggagggaggggagccctgccctggtgtgccctcggtcccgcgccgcacaccctgccgggaagcccggggccgcagctgctcgggcggcccggcccagaatagcctcccttccgggcagggctgccccggcccgcagcgcca

SEQ ID NO: 225519 - DNA, 384 bp, Homo sapiens
  chr17:76338191-76338575
  hyper
ggcctgaggaattcgcagccggcggcgcggccgggcgcgttcccttcccctctctccgttgcccggcgagggagccacagcgcagcggttgccatggccacgggccgggcgtggggctgggggaccaggggccgctgagcctcgatcaccttgtcctgctcgagccaggttggcatggactggaagaaccccgcggcggcgggcgggaggtgctggggccaggggaggccccgagggaccccgccgcccggtctgcgccctgatcccgcagggtcctgtggaaatgcggtgtctgcctccccgcctcctgcgctcacacatgcaggcctggggcctgcgggtcccggggctctgagcctgcacagcccacgggccgcagccgca

SEQ ID NO: 225520 - DNA, 157 bp, Homo sapiens
  chr17:76349231-76349388
  hyper
cttcctggcagagggcggcctcgaggcgacgcgcctgcccgcccgccagcccggcggccgccagatctggaggggagtgggggcggggcgcaagaaggtgctcccagccctggggctcctgtcaccctcggcctcgatcatcccgccccgcgctcct

SEQ ID NO: 225521 - DNA, 105 bp, Homo sapiens
  chr17:76921447-76921552
  hyper
gccttctacggatgtgtttgctgcgggcttgggccgggccgcagttttattgcgctcggaggattttctgctcctcctcccggtggctggcggccaatgcaggct

SEQ ID NO: 225522 - DNA, 80 bp, Homo sapiens
  chr17:77070949-77071029
  hyper
gcacttcccattggccgagcgcggcgcgggggcgggcccgggcctgcgattgcctctcggcgtgcgcggacagtgtcatg

SEQ ID NO: 225523 - DNA, 151 bp, Homo sapiens
  chr17:77071240-77071391
  hyper
tttcccggcacgggcgcgccgaggggcggggggccggcgcctgtgtccgctccgtgcacagtaagggacagagggtggcagcgcccctccgccccggtccgccccgccgtcctcgcgccactgccgggcagcggcctccggcccccgtgcg

SEQ ID NO: 225524 - DNA, 1587 bp, Homo sapiens
  chr17:77178616-77180203
  hyper
cccaacgccccggccggccggcgggcaggcggctgctgatgctctgtgcgcacctccccacggggcatcctggggatctggtggctcagagtcgccgactttcctgcccccacccaaccccaactcgccagccggagcttcctgcgcagcccccaagattgcaaaagtctggccccagccccctccccggccagagctcctggggcctccctcgccaggcgggtggcccacctcccccgcctccccggaggcccggcgcgcggtctgcgctgcagcagagctcggcgcccccgccgccacctctgcgcgccccccggctttcccgacgctgccagggaggatgccccgctccccgccccgagtccccagcggcccggcgcgaagttccccaaagtgacccgggcgccgagaacccccgccccctcccctcgggcttccccggagactccgcccgccgccccctcccgcgccttcggaaaagttgcgagcgacgccccaaactccggcccccccgcctcgcgccgcgcgcgccctgggcgcccccgcgctcggccgccgcgcaggggcgcagttccccctaccccagccccggcgccatgacgcggggagcgcagcgggggccaccggtggcggcggcggcgcagaggcggccaagtgcggggcgtgggcggcagcgcggggcgcacgtgcgccgggccgggggccggggccgggcggggggccgcttacctgttggaggtagaggaaggcgggcgggcagggcacggagtgcgggagcatgctgccggagttggacagcaggaggcagcccgagttcgccatggagcacagcatggggcggcaggggggcgcccggcggcggctctgcgctcgctgcgtccctcggagtgtgcgcgcgccctgcctcccgggcgccctcccggtctctctcctcctcctcctctgggcctcccctccccctcgtggcgctctttaagagggaggcatcgaaaggagagcggcgcgcctctgcccggtgttccccctgcccgggcggggaggctggagagagcgcgcgcgagaatacggccagagagtctgtgcgcgagagatcgggcgagcgggcgagagcaggagtcagtcactttggagcctccggagccctgtctgcaaagagtggtgcgtgtgcgtgtgtgagtgcgcgcgtgtgcgcgcgtgtgtagcggtgggagggggagtccctggcgtactccaacatcaaacggagccccgcgcggagggaagagaatccggagcgacggcacaacagctgatcccacacttaacccctcgcccgccggcaccggggcagccctccctcgcgccctcccacgctcgggcccctgcgcgcccctcctcccccccgttgccagcacttgctcctggcctggggggtctggaatctccctttgcccccgctccgttctccggccgctgcggagaggaggagccgctccgccggctctgcggccgaccgaccggaaggcgcctcgtcctgtttcgcgttcagagaagcgcctttcctaagggaggccggctcagtggcggggatgtcggtgatgtaatccg

SEQ ID NO: 225525 - DNA, 174 bp, Homo sapiens; identical to SEQ ID NO: 204822
  chr17:77771456-77771630
  hyper

SEQ ID NO: 225526 - DNA, 105 bp, Homo sapiens
  chr17:77774710-77774815
  hyper
ctgggcgcacggcccgcgactgcccttcccgacaaagggtctgcgacctgctcccgggagcccgccctacccttggccccagcctctaaaaggtgccaggactct

SEQ ID NO: 225527 - DNA, 386 bp, Homo sapiens
  chr17:77774854-77775240
  hyper
gggccctcttaggcctccctgggcccgcggaccacggactcgtcctccgggagggagggtggaggctggagcactccaaggagaggggcggacgggccccagcggggcgctgggctcctgggtcttgggccaggccggcaagccctagcgcgtcctctagcttgaggatgaggccggcccggttctttgggagcgtttcaacttcgcggcttggcgggcgtcggacctgcccggtcttggccgcggacgcgggcagatttggaagccaaccgtttgcctcgggcgggccggcagtgaaatgagcgcgggcggctccgaggcgtggccttgtggccagtggcttacctcccgcggtcccggagccgggcgggcgtcccgcagcgctg

SEQ ID NO: 225528 - DNA, 202 bp, Homo sapiens
  chr17:77776572-77776774
  hyper
tcgctgggaaaacgcgccggcgtcccctcggagcgccgaggccgggcgagctgagggtgcggtgccgctggagcacgcgcacagcgcccgaaccagcacgcatgcgcgccgcgggccggccccatttccgccccccccccacgcgcccccccatcacacgcacacccaatccccggactgctcgctggtgctgcttgtgaga

SEQ ID NO: 225529 - DNA, 104 bp, Homo sapiens
  chr17:77777390-77777494
  hyper
cccttgagccggagctccgccagggtgggcacttctgcctccagcgatgctgggtgccacagtcctcccgcctcctcctggaccacacgcggctctccagagtc

SEQ ID NO: 225530 - DNA, 753 bp, Homo sapiens
  chr17:77777713-77778466
  hyper
atcctaagtgcagggcctgccgggtcattcgagaaggcacaagctgcggaggccagtctggggcctctcgcagaacctcggggaacagaggcgtctgccgggccgcctaccctccgcaagagtgggccacgcgggcggcaaacccgagggcagacgtttgggagctgaccgagaaaacgcgacggtgccggcgaggttctgggcgaagcctcggcgtcctccactgtggtcgacgcctttcctcgcagccccggtacagggcttcctcggtgcacccctagccgttgccccgggaggaggcgccgtctgggacacgaaggggctcggctggcgtcgaggctccgcggccagagcgcggcggctccgcgcacgcccagaagccgtgttgccggttccggggctgccggaaagcgtggggccaagctgctgctctgtgcccgcgcaagcgcctcgctacccgggcgggaccttgctctctccggccgccctgggccgaggggtggctcagcatcgtgggggcggacgcagacggccactcggccgggacaccgtcggcccgggagccgtgatgccttttctctctgcagctgaagcctccgatcggtttccccgcccttctgtaggaaatcaaattcagggaacatggtaccgtatttacccgcacaacttcctcccttgacattttgcactctcgaagttggggcagaagtaattatgcaaacatctggggctgtcccgcgccgctaccggcac

SEQ ID NO: 225531 - DNA, 180 bp, Homo sapiens
  chr17:77788295-77788475
  hyper
ccacaacaaccgatcgtatttcctggggacagctcgacccccaggggagcacgtggccaccagctctgccgccttcctcctcctgagaccgaccctaggagtcctcgtgccccagtctacctagactcccaggagcgtccggccggaagagacagtgggagatgaggaaactgagattgg

SEQ ID NO: 225532 - DNA, 660 bp, Homo sapiens
  chr17:77788681-77789341
  hyper
cggccagtctgctggtccacacctgaaaacggggtttccccgaccggatgcctgccgtccccccgcctccactctgcggggtcgcctgctagggtcgggaaaggaccctccaccgccaccctcggggttcggtcctcccccaccaacgtctgccagtccgcgtggattccgagcccggctccggaaaccagtctgaccacttcgcccatttcccaagcctccccgggcggcggccggccagcttccatggtgcggtgagccaggctcggccgccgcctcggccgccctgcgatgaatggctctgcccagaaggccggcgtccaagcgacgctcccgcccgcgcgcccggggcctccaggccgctccccgccccgtgtccccacattgcgaaacggacggtcggatgctccgctccagggccggggtcgcctgtcccctgccgacctggcgcagagccgccttctgcacccggccccgtgccgccctggggttgcttacagccgggctgtgccaccgagctgagcccggaatcgaatggcgggccgcggaaaaggcggccaggcccgcaggggcgactgctcgaggtcccagaacagcgcccggggagccccaggccggcctcgaggggaccgcgggcgggacaggaggggaacagctggc

SEQ ID NO: 225533 - DNA, 257 bp, Homo sapiens
  chr17:77813600-77813857
  hyper
ctccccctcgcggcacgttctcagtgttcacggccccgggacccctgctgggggccacggaagcatccgccgccgctcccagttgcaccgaattgcgtcaccagcgccccgggacgcgcgggccccgccggcagggggcggaatggggcaggggcagctcgcgccccactgcgggccccgcctcgcctccaggctccgggcattttggagcgcgaggagggaaagggacagggcggagagaaggccgaggactgggt

SEQ ID NO: 225534 - DNA, 100 bp, Homo sapiens; identical to SEQ ID NO: 204832
  chr17:78009418-78009518
  hyper

SEQ ID NO: 225535 - DNA, 105 bp, Homo sapiens
  chr17:78009924-78010029
  hyper
ctggccctccgctgccgccctctgcagggagatttctcctatttcggactaggaagggaagatacgctccggaagaccccccgggcgtccatgcaaggagtctcc

SEQ ID NO: 225536 - DNA, 443 bp, Homo sapiens
  chr17:78010060-78010503
  hyper
cctagggcaggagatggaaaagcgctcgccatgcgcggggtccccggcccccggtgcccccagcccgcctgccattcccgggcgcttagcagtccggggtccccaggtgcccggcaggtcccttcgggacctcgagccgcccgctgggcacacgctgacgccgctgtcgctttacagaaattgagcgcagccgaggcgggacccgggcgcagagagcgataaaggaaaagcatggtcgtgctctaatcattacagtctaagggacgacacgtcgagacggcgcgcgcctctgcgtgcgtggagatggcacaaaggccgcgccgcccccggcggcccccgccctcgcagcgcgcgtggtcccggcccggccggatgttgacagcgtcgcctagcaacgggaaatggcggaaccgggcggcgcggcgggccggtaagccgggccg

SEQ ID NO: 225537 - DNA, 136 bp, Homo sapiens
  chr17:78388546-78388682
  hyper
cgggccaaggagtgggacctgcagtgctggaccacccttttccaagcgcagaagtgccgtgcccgccggctctcaacagggcaagaggcccctctcgccgtgcagagcgcagcgcttgcggcggggacagcagagg

SEQ ID NO: 225538 - DNA, 90 bp, Homo sapiens
  chr17:78389461-78389551
  hyper
gctgaaggcccacgtcgtagaccgggacaccgaggcgtggcagcgagaccccgccttctcgggtctgcagagggtcgggggcgttgacgt

SEQ ID NO: 225539 - DNA, 395 bp, Homo sapiens
  chr17:78428377-78428772
  hyper
tactgcctccagagccgcttcggggccgaccccggggactcttcccgcctgcggcctcgcgccagcccggccggctcgcctagtgcccggcgcccagaaacgcgtggagctgggagaggccacacaacccacgccggaagcctaaccccgtcggcccccgcggccggcaccggccggaagcccgcgaagcctaactctcgcgagacgcctcctgagtcccgcctctccgcggttccgccagtcgccgcgctcctgtctgcgttgctgtggcagccccgccgtgcgtccgcgttcccggagccagcgcggcggcgcgcctgtgctcggggcttggccgtagcttttcctcaggtcccgcgcggcgcgcccctgtgtcgcaggcgccctgccgctgc

SEQ ID NO: 225540 - DNA, 180 bp, Homo sapiens
  chr17:78450833-78451013
  hyper
tgggtgcccaaggacccaggtcgtcaacacccgagtgcccggtggtcaacggctcggagtggggcctcgcggcgccactaagtccagagcgggggtcaccgggccgccccgcgtttcttagatgtccgtgtgctattgagaagccgccgggcagcctgggtacagggacttcccacgggt

SEQ ID NO: 225541 - DNA, 1260 bp, Homo sapiens
  chr17:78451102-78452362
  hyper
ggcggggcgctggggacttctcggaggcagacctagctgatcgagcctttcctgtccgcggcgccggcccgatcgcgggcaggcggcgtcgccggggctggacgttcgcagcggcgcttcggaagggggccccgcgggagcagccgcccgcgtctccagcagcttccccttgccaggcgccgcgcgcgcccggtatccccgggtgtccacctgtgcgtggggggctgtttcccgtctgtccagccgcgcccacttctcaggcccaaaggccagcaggaagggtcccggaggtggctgggggcgtccacctgagaagctccgctctcgctcagacaccccacccggcacccgcgcactcgcgccttcatctggaccgcggggctcggctcccgagatcgcggtccgggttccggcgccgggctgggggctcaggaccagggctggcgcagccgccccgccccgccccgccccggggctatcagagcggtcaaagcctcggaaatccctccgtccacgctcccgtggtacagagaaggaaactgaggctccgagactgcggggccgggctacagccgtggccccccgacccctccccgccgcccccggcttctctggtctctgcgttctgcagcctttccctgcgcgcagccgggggctgggggtccccagccagcagggacccacgggcagtcccgggtgccgggatcgggcgtccgcccctcgggcgggagcagaggccggctcgatggagacctttttgagaaatggcggcctctacccgccccccagcccccgagcgcccgccgtctgcgttcagcatctcagcttttaagcctccctgagccggggctgcgttctcgttgtctccttcggccgccgcttcctggcgccagagggaccccgcggcccgcacgggcctgtcctcggctccgctcggagggtgtgcgggttcccgctccgctggccccgcttgcccaccacggcgcgcccaaacccacgcggcccgcggccccttgcgtgctctgccgaccccgggccgcaggaggggttagcctcgccggtccccacgcggggtctgcgccggcagcgccacgggctggaacgcgcctcgggagaaattacccgcgcggggtcgcggcgtcttctgccccaactcccgtagggagccgctaggcgggtgccctcctggccccagcgctttggcctcgccgccctcccgcacgcgtccagtggggaggccgcgcccgtcaggcctggagc

SEQ ID NO: 225542 - DNA, 188 bp, Homo sapiens
  chr17:78720009-78720197
  hyper
agcggtgctttctgcgggtgatccccaccgcccccacagcggtgctttctgcgggtgatccccaccgcccccacagcggtgctttctgcgggtgatccccaccgcccccacagcggtgctttctgcgggtgatccccaccgcccccacagcggtgctttctgcagggagcggacggcaggcctggggc

SEQ ID NO: 225543 - DNA, 319 bp, Homo sapiens
  chr17:79008242-79008561
  hyper
gtcgtcccccactccagggccgagctctctccagggtcctcctgcagcaccccctcccccagggttctcctctctgccccgaggggccggccggggggtcgccgcccgcccggcgggcttacctgcgaagcggcggggtcggggcctctcccacctgtaagcccggcccgcggcgtcctgcgtccgagccgctccccgccccgcagcgccaggccgcgacccggcgggccgcccgccccgaagtgccacttcgcgaagtgccgcctccacgcgcgctgccgccggcgccccccgctctcctccccgcaccttctgctcc

SEQ ID NO: 225544 - DNA, 224 bp, Homo sapiens
  chr17:79008841-79009065
  hyper
tcgggggcggtgatgcgggcgcaacgggggcgggacgcaggggcggggactgccgcggggcggggcctgaggcggctataaaggtggccgccgccggacgccgggctctgtggttcgggtccgctttcgtctccgtcctgctgccgttaccgccgctgctgccgccgcttgcgtcccccgctccggtctgtggtgcagccgggacccaggaccatgtctctgtc

SEQ ID NO: 225545 - DNA, 240 bp, Homo sapiens
  chr17:79009197-79009437
  hyper
cggggccgcgcgccgggccaggaggctgggactttgggggtcttcccggcgcggccacccgggacccgggctgctggggtggtgagcccggcgccggccgctcacaggtggccacccccgcccgggcccccccatcccatgcgcgccgcggcccggtcagtccccagccccaggcccggggagcactccccgctccgacggccctgctcggcccccgcgcgctcgccttggcgtcggcgg

SEQ ID NO: 225546 - DNA, 258 bp, Homo sapiens
  chr17:79205174-79205432
  hyper
tcccgcccgcgtgtgcagctcaccagctgcgtgcattcactggtcccacgcaggtggcaggtcagcagctgcagcacggcctcacagttgagcagtccacacctgcacagaggggacacctgggtggcgggtgcggcccgttccctcctccctcgcccacggttggggctgaggcagagcagggcgggtccgggcgcactcacgctttgatgaagtgctgtgcctcctcgcggctcaggaaggcgcgtggtccccgag

SEQ ID NO: 225547 - DNA, 105 bp, Homo sapiens
  chr17:79319199-79319304
  hyper
gcacccgctccgagcccaaggtgagggtggagaagggtccctggtggaagctgcaggaacactttgggccggggtctaccccgcgttcggcggctccccgaatcc

SEQ ID NO: 225548 - DNA, 1057 bp, Homo sapiens
  chr17:79761562-79762619
  hyper
cgagaacccggggacgcgagaggaagggggcgagggggcgcccagggaggcggagggagcgagaggaaggggggctgagccacggcccccacgcccgcgcgcccctccgcgtcccagggcgtcccctcccggagctgggacccaccgcgaccaccacctgctgggccagggtccgcgggctcaggggtctgcaggattagggtctgcggaaccaggacccgtgggacaaaggtctgtggggcgcgggtccgcggggtggaattcagcgcgccgagtctgcgtatggccggggtacgaggcgctccctgcgcagggtgggcaggaccgaagctcgccgggaggctgcgcggagggcgggcggggaccctcggctgccgctcccacccccgcggggccgcccccgagcccgccctccgccgccgccctcgccctgcgtcgccgccggaaagtttgcaccgaccccgatctggcagcgccgcgaagacgagcggtcaccggcgcccgacccgagcgcgcccagaggacggcggggagccaagccgacccccgagcagcgccgcgcggtgagcacctgggccgcggccccgaggggacgttggggagtcgacccggtggggacagagaccgcggggcgggcgcggcggggccgggggcgcggggagcggggagccggccgggcggtctccggggtccgggctggtgcgctcctcagtcccgtcagacacccccgttcccaaccccggctcggacaccacccggtcctgcaccgtcgggcaggtccaggggtctcagcccctcccccgttctctggtcctggggggcgcggctgggggcgggggtgtcgctggccgcctggcgccctgcggcggccacactgcagcggccacactccccactcagggccccgggccccgccgccctggggagcgcacaaagcgccgcggacgcgtccccgaggcgcggggtctcaccagcgctgtctcccctcggtgggctcctgccccgaggactgcccggtggcaccggcgcggcccaggatggggtgaggggtgtctgc

SEQ ID NO: 225549 - DNA, 138 bp, Homo sapiens
  chr17:79885939-79886077
  hyper
ctgcgtgcgccccctcgagtgccggcctgggccctgccaggcagaggcgctcttgcgtcaggacggcgccgccggggccccgcgattccaactcgggggtcccggagcggcgcggggcggggacggcctggcagctcc

SEQ ID NO: 225550 - DNA, 191 bp, Homo sapiens
  chr17:79917289-79917480
  hyper
gcgcggcttcctcccgggcctcacgtcgagacgccttccccagggcccgccgctgacctgtgcgagtgcgcggccagtcccgggagctcatgaggcgccgcatggtgtcgtatctggagtcgcagttctcgcggttgaagcagtaccagccgcctgcggacacgaccgccgctcaggcccgcgcgcacaga

SEQ ID NO: 225551 - DNA, 687 bp, Homo sapiens
  chr17:79988931-79989618
  hyper
gcgtctccccctcgccttttgcgatgtcaccgtgaacgctgcggccgcctgcgcgcggcggggtttggaaatacagcgcgtttgcactttgtgatacattctggccccgcctctccctccaaacgcgcgaccgtccgtgcctctccaaacgcgcggccctctgcccccagccctgcagggagggcctgccggggtgcggctgttcgcccctcctcgccgctgccttgaagggacgggagggccgcgggggctgtccgtctgggggttcgggcggctgcagaccccggagttcccagctggctcccggcggcagggggcgggtccccgagaaagcgcagcgcgcggagccctccccgccgggtccaggtcgctgggctctctccggcctgcgctgcgccccgagggacccgtaggagacccccgggccggggtcgcgctggaggcgggggcgccgcagctcgcgcagctctgcccgggttcgggcggccccgccccgccagccgcgcggccgggcgccccccgcccgcccccgcccccgccccccgccccccgccggccgcgctcggctgtctccgcgcccggcgctcggcggcgctcggctgtctccggccgatcgctcggcgctcgggtccgcggccgctgcggcgccgggcatttctccgcagctcggctcgcggccgcgcccgc

SEQ ID NO: 225552 - DNA, 40 bp, Homo sapiens; identical to SEQ ID NO: 204847
  chr17:79989900-79989940
  hyper

SEQ ID NO: 225553 - DNA, 180 bp, Homo sapiens
  chr17:80009037-80009217
  hyper
cgtcggggcctccccgggcctcgggagcctgggcagagaaaggcacccacagcagcgaaggggccgtggcttcggagcgagaaaggctcggggggcagatcccgcgggcgccggggagtgggggacactcaccgccctggagctcgagctcagggtcgtccccgtcggtgaagataaacg

SEQ ID NO: 225554 - DNA, 406 bp, Homo sapiens
  chr17:80186330-80186736
  hyper
ggcagcgcaggccgcgggccgctcccctagccaggaagagccgccgtccgcaccgggaccggagaggaagcggaggtctgaagggggacaggtcggacgtggcctcagagagggaggatgtgggccccggagctgagccaggcggccggaaccccacgggacccgcgcgcacctccccaccaaaggggccccggcgttggggggcgaggggtcgctgccctggaggacgttgggacctgccgcgctgcgctccgaggcggggaaacggagggacggcggggcggaggggcgaagcgagcctggactccgggggaggcgaggccgggaagacccagtcccgaggagcagagggggcgggccagctccgggccgggggcgccgacggggccggttccggttggggggg

SEQ ID NO: 225555 - DNA, 687 bp, Homo sapiens
  chr17:80186749-80187436
  hyper
cggggttgcgggacgcgccgtcggggagctgcggcccgggagcccgtccggaggcggcgcggggtccgggcggggcgcgcaggggcggcgccaggcggtgacgtgcgcgggggacgtgccgcgccagcgacccgagcacttaaagtcgcccccggcgcggagcggaccggcagaggcgggcagaggcggcgagaggcggcgagaggcgggctgaggcggcccagcggcggcaggtaggcgcggccgcgatgctcgcgcgcgggccggggcccaggagctcccccgtgccgggcaagggggcgacctcggggtccgcgctctcacccccaccccgcccactttgtccatcaggtccgggggcgcccggggcatggactagccttctcgaccccgagcgggccccaccgagggctcccgagagccagccgcgcccctccgcgccctcgcatacctggctgcccagtctcgtctcccccggtccggcccggcgcccacccgtcgggctgccctcaggggctgggctcgggccaggagatggctgcgccggcggccaagcccggtccgggtataaatagctcggtccgcggtggcggggggcgcgggctatatttggtggggctgctgcagccctccctgtatgggtggcctccccgagggagtggggagcacttgcgctcgggccgtggc

SEQ ID NO: 225556 - DNA, 619 bp, Homo sapiens
  chr17:80189391-80190010
  hyper
ggtccaggaggcctcggaggtgggggacggcggctctggaccagctccggcccccaccacctcccggccccagggcggtgacagccttgcggagaaggggtcttcaaagctctgagaccccgcagtgccagctcaggattgaagcctgcggcggcacatgcagccttcctttcccaaaggggacttgcgcccagccccacttggggcaccagtgggggctcctggccctggccctgggtgggagtggccaatccgcaaatgaggcctgtgtgtctgccccgccggcccctgccgtcgtgatgtaagcggacacagagcggcagggcacgggctgcgcgaggggtctgcgggggtcagaggtggggcgcagggcccaggcctggggcagccccttgcgcagcgtccaccccctgcaagctcggccccgacacctttgcaggcgcctggggcggggctgccgggagttgctcactgctccttccttgtttgcacaacaggggctgcgggggaagaagggaactgagggaggcccctcccccggtgcagcgccctcccgccctcggcacccctcggcagccaggcgctggccacagaggccgcttccttggtcctcaggcag

SEQ ID NO: 225557 - DNA, 104 bp, Homo sapiens
  chr17:80190046-80190150
  hyper
cctgccccgcctcctgcctgggccacaaaggcagggccaaagcccatccttcaagggctggagtcagttaggtaacaggccacgggccccgggctcaggccact

SEQ ID NO: 225558 - DNA, 113 bp, Homo sapiens
  chr17:80277698-80277811
  hyper
gcgtgtgtgcagagacgggtgcgcgactccatgcgtgtgtgcagaaacgggtgcatgtggacacgtgtgtgtgcagagaagggtgcacgtgactcacgcgtgtgtgcagagat

SEQ ID NO: 225559 - DNA, 713 bp, Homo sapiens
  chr17:80329367-80330080
  hyper
gaggggcgcaggggtgaacgctggaggcggagaacccaagaggggctgcggggtcagccttggggcagccgggctggaggcagcttcgctccgcagacgcagacgcgagacccgcctgggaccctccgccgaccccgctgcggccccgcgacccccgcgtcttcccggcgccgcgcggtcagcgccgccccctagacacccggcgccgtcccctccgcgcgcctgctgcccgctggggttattttaataccgggccctggcgcggggcgcggcgcattcccagctggcggcgggcaggtggcggcggcgcagagacccggcgcggggcggggggcgcggctttggtggcgggactggcgggcgcccctgccgtgtgctctggaagccgaggccaccgcggagcccctcgcgccccctctgcgctgggacaggggagcgcgcctcggaaagttccccgcggccccgctgcgcgaggagtttggagccgcgagcggctgcccccacgcgcgaccccaggctcggcgggcaggtctggccgctcagtgaccggaggcaggtgggtcctcggtgggtgaccgggagcgcgcggggactgccgggtctgtgcccttcggggccctccgcagggctgggccggggtttcgcggtgggaacccaccctgggcgaggggagcggggtccagcgaggcggcttctcccgtgccgtggaactt

SEQ ID NO: 225560 - DNA, 424 bp, Homo sapiens
  chr17:80332278-80332702
  hyper
ggccccaacgcaaccctcaacagctcctgggccagcccgaccgagcccagctccctggaggacctggtggccacgggcaccattgggactctgctgtcggccatgggcgtggtgggcgtggtgggcaacgcctacacgctggtggtcacctgccgctccctgcgtgcggtggcctccatgtacgtctacgtggtcaacctggcgctggccgacctgctgtacctgctcagcatccccttcatcgtggccacctacgtcaccaaggagtggcacttcggggacgtgggctgccgcgtgctcttcggcctggacttcctgaccatgcacgccagcatcttcacgctgaccgtcatgagcagcgagcgctacgctgcggtgctgcggccgctggacaccgtgcagcgccccaagggctaccgcaagc

SEQ ID NO: 225561 - DNA, 154 bp, Homo sapiens
  chr17:80503192-80503346
  hyper
tttgaacttcatatccatgaaattgtacagagtcctttgtaggagacggtgtttgttttttattgaatactgtgtttctgaggttagtccatatttttgcacgtagctattggccattctcattactggaaagtagtaacgtggatatacaacg

SEQ ID NO: 225562 - DNA, 420 bp, Homo sapiens
  chr17:80655876-80656296
  hyper
cccggagctcgcgtcccctcccgcccctcctgccccgcggccgaacgcgcacttgcggactcgagcccccgccccgggtccccacagcagcggccccaggtcgggaggagcccagcgcccggcccagccgcgggctcccgctgcgcgcagactgcggagaaggatggagactgcgccgcggggcctcgagtggaactgggggtgcaacagggacgccgcagcacgagggccagggccgggcggagaaaggcccgcccgcgaaccgcgctcctcctcagccccgcgcccccggaccgggactcctaccctccccggccacgcgccccggcctcttcccgacccctgcccggtctcgcgtccccggacccggacccccacccgcaccccctccccagccccgcgcccctccccggccccgcg

SEQ ID NO: 225563 - DNA, 600 bp, Homo sapiens
  chr17:80656473-80657073
  hyper
gtgacggcccggcgcccccacccatgcccggcctgcggggctgagcgcagaggcggcggcccggccccgagaggcgccgcgcgggccccgagtccttgctcgcctccggccccgccccgccgcccagcgctgacagcgcgcatccccgcccggccccgccattggtggaccgcagttgctagggcagctgcgcgctttcactggcttggttgtccgtccatcttactctcgtcaccgcctccgggctgtcgcccacccgcccctcctgaaaggtcgctgtcaccacagccaatggaggcccggagacggggcaggggcggagccagaacaagcaggaggcggggactctgctcccgcagccaatggcggggcggggtgggggcgatcagggggtggggccgggtgtttacactctcgcgtgcgcccgtgagcgccacgaactcgctcccacggtcgtcgggtctgcacgccccgagtcgggaggggcgaggggcggtgcagggtcccagcgtggggcctccccacctgcccaccagggagacctcgggtgcctggccgggtggggctcggggtcggtccagttggcggacgcggccggaa

SEQ ID NO: 225564 - DNA, 673 bp, Homo sapiens
  chr17:80692982-80693655
  hyper
tatgcatgcatgggcgcgcgtgggcattcctgtgtctcaagtccctttcccaggacatcctggaatcagcagccccaccctgggccgggtcagcgcgtgccatcggagcccccacgtcagcctctctctccgatcggcacctggcgtcccagtgcgcaagccccacgtcatcacgggggccgctgggcccggcctggtctgcagtgtgggaagccggccaggcctgtgaccagcgcccgggccgagggccggacctgcgtccgctgcggggcagggataccgggtccctgcagggagctcaagccccagcgcgcccgcgaagagctgcgcggactcccggctgcttcccccgaatcccgggcgcaggaagcgcgaagccggacgaacgcggggagcgcgcggcgagcccgcctgaggccgcccctcccgccgcccggggtcacgcgccgcgcgctcccgccccgccccgccccgcagcgcctcagccgacaggggcttccgagcgagcagagtcccgcgccccgcactccatggagcagctgctgcgcgccgagctgcgcaccgcgaccctgcgggccttcggcggccccggcgccggctgcatcagcgagggccgagcctacgacacggacgcaggcccagtgttcgtcaaagtcaaccgcaggacgcaggt

SEQ ID NO: 225565 - DNA, 104 bp, Homo sapiens
  chr17:80693749-80693853
  hyper
ggggaggggtcagctttggcccttgggaggtggcacctgctgggtgagcccggctcaagcgttctgtgaaggtttgtgtctgcacgatccgtgaccttcctttg

SEQ ID NO: 225566 - DNA, 36 bp, Homo sapiens
  chr17:81009162-81009198
  hyper
tgcgcaggagcgaggcgggagcgaggcaggtgtgcg

SEQ ID NO: 225567 - DNA, 105 bp, Homo sapiens
  chr17:81037053-81037158
  hyper
ccgctccgcgccggggctgcccgcaggatggggcgcaggatggggcgcaggatgcggccccggcaccgcctcgcgggggtctgcggggggcgaccgcggctcgcg

SEQ ID NO: 225568 - DNA, 1098 bp, Homo sapiens
  chr17:81038242-81039340
  hyper
cagagcgggaagggacggccgcgggagggagcggcggtttcggggatcgggcgcggaccgcagcgggggccacttccgtctcggggagccgcgggcgggcacctgtgagccgggccgagtgtggctccggccgggccccccgcccctgccccgtgaaggtcaggccgcccttggccgcggcgcgcgctgcgctgggcgaccccccccccccccacccgcggtggcggccgaggactttttttttttttttttttttttgactcaagcgtggccgccgagagcggcgccgaccgcgactgcccctcgggagccgccgccgctcccacgcgaagcccagggcgccgagggcaccgcggccgaacccgccctgcgcgagcctcgcagtcgccagttccggggttcgcagatgcgcggggacccgagtgacgcgcgcctcccggagagccgtggccgggctggcccgggcctgggtcccgcttcccctcggcgcggcccccgcccccgcccccgcccccgccgcgggccgagtcacgcggtgatgtcgagcgaagctgttttccgagaaggtcggggcagagccggtgcggggcgggtggtgtccgcggggcgggcgcaggtctccccgcagccgcagcctccgttccgggtccccgcgaagccacagtcgccccccagcgcccccggcggagcctccccgggggaaggggcgtggcgctggggggcagagtcgccccgagggccgtgggcggtgcccggctgtcccgggagcggccgcctcccttctcggccgagcggggccgcgggcggatggaggtctggggggggtcggccgggaacgccggcgccgggagcctccgaggccgacggctcttctggggccgcccctgcccccgcggagtgattcagccccggctcgctgcctctgcccggcgggtcggtgcatccccgaaccgaggcccggggcgttccgctccagcagaccgaagccagaaacgccgcccccgccacccaggccgagtgtgtcgagaaggggccggcgcccttttcagggtgtcaggggactgtgtgcccggtaggagggggcgcctcccggagccc

SEQ ID NO: 225569 - DNA, 869 bp, Homo sapiens
  chr18:500255-501124
  hyper
cttgcaaagacgcgatggggaggggaatacttgcgcgcttcaaaaccccaacctcgaggtctccagccgcgcctgacccgggagccgggtgcgcccccagtgtccgcgcacgaacccggcgccctggcagccccgactccccgggcccgcagcccaagggaaggttcgcgcgggaggcacctccgtggcctcccgcgcgccccgaagcccgttccccccgcccagagccccgcggagctgccgccgccctacctttcatggtgaccgtggggacgcaccgccggccggggagctccgcgcgagcgccgcgcagccgaggaagtcgtcccgagcggctgctcaccgcacgcccatggtagccgcgccgcgcgccggccgtctgcgcccccgtcctccctcgccgccgccggcccgcgctccccgcgctcccggctccgcgctctgctgcctcggggctgccgcgcgcgccgctctcgctctcccagcgcccctccccctggcccgacccggccgagcgagcggccgcgcccacgcccctctcgcgccctcccgcgcccgccccgccctcggcccgcgcctgccctcgccgggcactttctcgcccgccctctcctgcgcgccctggccccactcgcgcgggctctctctttttcccgttgcaccagcgtcgggatgaagtcgggagcaaagcccttcccggggcggtccagcgttcaccttcggcgagcacctaaggtgccgctgctgctggggtcgcttctacaccccaaactacctagcaagtgttgggcgagaggatggggagctgctgtgccccgggggtggcggggggtaaggtgggcccttccccaaacggctctggggcatgg

SEQ ID NO: 225570 - DNA, 215 bp, Homo sapiens; identical to SEQ ID NO: 204856
  chr18:712223-712438
  hyper

SEQ ID NO: 225571 - DNA, 1477 bp, Homo sapiens
  chr18:811503-812980
  hyper
aacgcaacgggaggcggagtggcatgattccgtaaaagtggacgctgaatggtaaatttcccaacccccaacccaaaacaaaggaaaactttaaacatgttgcggttttcaatcaaaccaagtaaagccagaaaggctcatccactcgccccacacacccgctcctctccccgcacagctgctaccggcgtcggccgatacacagacccccagcctttaggacccaaaggggccgcttccctcgcccctacttcggccgtaggggcaaaaataaacctctcctccccgtcgccgggcggtccacacgaccccaaagacaaggggtggggagtgtccccacgcccctggaacctcaggtcggacttgggcgggacccggcaggtctggacagggcagagaccgagtcaggggcgagcaggtagcgcggggaacgagacaagcccgccgggcgatccgggggaggggagaagtttcttcccaacttcccgactcgggcccgcgggggcggggaaccgcggcggcggcggcggcggcggctccgggcgctggggcctagccctgtccgggcagaggtggaaccctccgcccgcggggccccaccgggtccttacctgtcctccggccgcgctctcatgagtcgctgctaccgcagctcgaggtggcggagggcggaggcgaggcccgcgggccctctccctcctccacctcctcgtcccggggcgcccggcggcagcaacgacggcagagccggcccgggacgcgttacttcaggaggagggagttcccgggctccccacgcctcggcctcactctccacctcctccgccccccccccccggccccgccccctgacttctagcgggggcgggggctgcgggtacctgcgcgcgccgccgtccgctcaccggaactcgggccacgccggcccggctccggggcccccagccttccggcgcctacgcccccgtcaggtcccctccgcgggctccgggccgctttgctgtggtcaggataggcgaccggtccgtgtcacttctcccgacccaacatggcggcggggtccggggcggattcccgggggcggtgcaggccgagggggcgtgaggaggaggtgcttccctgcccggagagcaggcccgcggcgtcccttcccacccgcgaacccaccgacgctcggctgccgcggagattgaatggagcgctccgattctgcccctctgcctttctctgttccttggcccagctctcagtagtggccagggctttggggcttgcttttgtgggggaggacggggttgagtttttttggttggctgtttgcttctcagcgctacgcttccgcaccctttgtcgttggtagtaaaatctcaagcccaaccgcgtgagccgggggcgttactcacaccctcatcaccatcctgatcgccgtccaaaaaacgttcacgtcttgcctccttccgaggcagggatcctgtcc

SEQ ID NO: 225572 - DNA, 145 bp, Homo sapiens; identical to SEQ ID NO: 204859
  chr18:2571378-2571523
  hyper

SEQ ID NO: 225573 - DNA, 1849 bp, Homo sapiens
  chr18:2846576-2848425
  hyper
tgcccgaggaggaaattcgagtcgagcccccactcctctccccgcgggactgataaacatgtccctcattcgccccgggaggctggcacccaggcacgacgcgaggacggccagactcgccgacggcggccgcgtcccggggggccgggagcgagcctgtcggaaggtgggaggcggagtcgctcggcatctgggaagagaccaaaggaatgagtcattggaaatgctgtaacgtagacccttatcccaaaccctttcgcccctccaccccgagccccctgccgagaagcgaagggactggagacggggagacttggtggggggagagtcacgtttcggagagggaagtgaaataaagagggcggcacccggggggacctgtgcgtcattgagggaccggggagaagcgcagggcgcacggggctgcagaaggagaagtaggaacgagaagccggagggggcggccgcggagcactggttggagcgccgcgaagcgcccgagcctcttgccttcgcgggcggcgccctggccgccggcagccttgtggccggtgccccgatccgccgcgctccggacccgggcaggcggggcgcgcccgctgcgcgcgggatgtggcagcccagacggccctggccccgcgtgccctggcgctgggcgctggcgctgctggccctggttggcgcggggctgtgccacgccggcccgcagcccgggtatcccgcgcggcccagcgccaggaacaagtaagtgcgcgccccttggctggccccaaaccgcctacccctccccggcccccagttgagccccagagctgccctgccaaagacgacgagcggcagccgggggcctcccttggacttccccgggcggctccctctgcgggggaccgcgcgctccgcagccggcgcctcaggcagagctgactccgggggcgtgggcgcagagagcgtcccgcagacccgggcgatccgaaaacgactcccaggaattccatgagcccctgggaccatgggtgcttttctttcccgtcttggtcgggtccaggcgcgcgctctccagaggcgcacccgggcaccctccggcgtctgctcggtgaagctcccgcctccgcagagggcgacgggcccccccgaccctcgctcggtctggtgccgcagtcccctctcccctggcctcattgttctccgggtttaccccgtgcccctctccctctctctcctgcaccccaggaactggtgcgcctacatcgtgaacaagaatgtgagctgctccgtgctggagggaagtgagagttttattcaggctcagtacaactgtgcctggaaccagatgccctgtccgtcggcgctggtgtaagtcctggagccggggagcgggcggggcgcgcccgggccggggcggtgggggtggggtggggttgctgcgctgggctccagtccctccggtaaatcccttccagatccggtgaaaagcccgcagcggaaaagcgctccgagcgctcgcggggcaccggccacgctgggctatttagggagtgggtgctgcccgagtgagtggggaggatgcgcgcgcctcgggagtgtggggtcgcgggggcgtaggagaggatgaacaaagctcccactcccacttctgttttctccctttcaatgtttgtttgtaacataaggcagctgaatctaattggatccatattgtgtgttctggggcacacagaagattccaaaatgtatactgctaaagactattccgtataggattcgctgagaggtttggctaagtagtgttctaaaacgagtgagttctgtccgtatgtccccataaaacggaatcttccagttttgtaga

SEQ ID NO: 225574 - DNA, 768 bp, Homo sapiens
  chr18:2906028-2906796
  hyper
catcgtgggcaccaggctgacgggggcggcggggatggcgtttcttggcgagcgggtccctcagccaggcccgggtattgtcaggcgtcccgtggacggtcgggaggggcttcctggagggctcgttccgggaacgagttcaaaggaggaaagggcggcagcttccggcgccttccccagagggccgggagacgcacgccaggagcttcctccgttggaagtcccttccgctggcgacgtgggcgctgtggccgcggccctcgtggagcctgagccctcctcacggcctccgcgcagccctggggccccccggcagggtccctcggcagcccgcgggagaggccgtggggccccggcaggagtgtggttcagagacggtgcgggggtcggtggcctcaggtccctttcagtcacttgcgacgcacccgcggtttccgcgtgctgtgaaatcgggaattgttgatgccggagccaagagtgaggccggtttggaaagtgcagccgtctgcgccggagaggctggaaacgccccggccccgggcaggggtccccggcggcgtccgggtggcccgcggcgtcctcggaagatgcgggcggacgcccgtgtgtcccgctggcctgacgtcgcaggggtggccgcagagtcctcacggggaccccgctcgccgggactcatggaggggaccctgacggggcagtcagggctgaggtttcctaatcccgtgtgtttctttctccccgacgcccggcagaggcgccctcgccccc

SEQ ID NO: 225575 - DNA, 166 bp, Homo sapiens
  chr18:2907034-2907200
  hyper
accgggagcggcaccgtccccggcgcagaaggcttcgcgggcgcaccaggtgaggcccggggctgcgcggggaggagcgcggggctctcccggaacttccgcctgagcctcggggtctgctgaggggcgtggcggttcggggtccagccttcgggggggcaagttc

SEQ ID NO: 225576 - DNA, 631 bp, Homo sapiens; identical to SEQ ID NO: 204865
  chr18:3447898-3448529
  hyper

SEQ ID NO: 225577 - DNA, 35 bp, Homo sapiens
  chr18:3448760-3448795
  hyper
agttcctgaaacagacgctccgaagtcgagttagt

SEQ ID NO: 225578 - DNA, 1920 bp, Homo sapiens
  chr18:3449184-3451104
  hyper
tgtttacttaatggctagtttctgtttgaaatgggaggagggatcccctagcagggttccaatccgaagagtagacactgttgaccgaaacagacgagcaggcacggcgtggtcaccccttagctataaaagtggccgctgccggggttcggcgactcggggtgtcaggcggagtcttggtgaggcaggcgcgcgcccggccgtccccgggcagagacgtttaaagagcatgtgagcgtgacaagtgtctgtccgcaacgtgtcagatttcgaaactgccttgcaatccagtccggaactcgcagctttagcccgggggaacagacgttcgtttaggctgtgtctcatcattcccccccgccccacccccgccgacctcccactgtcgctgctggaggaagagccccgggaggagaagggtgcgccgcgccgcgcccgcgtgtcaatggcagccgcgcattctggaagaagttggttcttgtctcgaatacttttcctcccgtgccccgccccttgaatcagaggcggctgtctcgtgcggctagagcagggccagtagagttcggggcagctgtcaaaaacgagacggggaggcttttcttcccgggggtggaggagggaaggagggaggtgtccttttttccatctgttgcagtttccgaaccaaacgcaccctcgccagccccgggaagaaaggcccaagggagaaacctggggcgctcggctggtgcccccaccgccgggcgagggatgcgggcggtccgtgcgcggcaggcggaaaggatcgtgtttctggacccggccaccccccgcgtccgcaccgccgcccccgagggacgagtgacagcggccgccgcgctcggtccagtcttcccggctggaaggtgcgggggaggggcggaggagcggcggggcgggagggggacggggcgggcggctgggggcggaggcaggacctcctgtaccttccctcctcgcctctctcactctgacagcgccgaggtgcgccgagcaggagcagggaacaaaggagcggagaggggaggggagagagttgggcgagggagagcccccggccggctgccagaagatcccggcgggaggaagcccaagtgtcacttgaattccacccaaggagcgggcgcctgggatcagagcgtcctgtttagcaataacggctggagcacgtcctacaagttacgggagagtcggctgtgaaggagacgttcgcttatcccctgtgtccccgctcctggcccctccagacccccgccttgcctcgcgctgggaggggagatccagaatgaaaggcaagaaaggtaaggcggccgcgggctgcgcgcaccagaagacgcgagtccggggaaacgtgctggccgggccgcgccgcgcggagtcacttggtggacttttccgcccaggggctctcatgctggagtggcggccgtgctctttgttgaggctgcgtctgaaacggcagcggctgttttcctgctagacacaacacgaggggctgttgtggggcgagcctctccacgctgctggcacgttgtcaagaaacacgctcagcgccttgtttgtgcgcctgcaagtttcattgtctccgccgacaccccacgctcggcccagccgccgcgtggcttctcgctctttctcgcgtgctggggatatggggtccgagtagggaggacccagcccctcgtttttcccgatccggacccaggcggccggggccgcgggaccgccgcggctttgtctgaaagttccactcctaggctccccccgcccccgcccccgccgcccccctactcccagccgggccctagcactgttctttagggatgtggtgtttttacgatcgaaggaatgcgattctggaccccctcatcgccctcgggtgtaaacagctttggaaagcta

SEQ ID NO: 225579 - DNA, 857 bp, Homo sapiens
  chr18:3451407-3452264
  hyper
gaagttaacaaaaattgagtccctggctgggaggtcccccgagtgttccgctgtgggctggaggtggcgtttctgtcgtgatttatgtggagtggttcaaaacagaagttaatcactcgggaagcggacgggaggggcggcgctactgcgcatgcccgggagccgcctggagtttggaactccacattctttcagacccggcccgctgcggggcgttcctggggggtagcctcaaggccagcggggttccttcggctgcgtttctgtgggaggccctgaaacgcgcggagcttccctctgcctccaggctttcccagcgagagtgaaattaaacttgaaactcggatcaactggcagtcgttgttggtagaacgccctaaggacccctccccgcgggacggagggaggactcgggacagggaattggccctgggagaaaacgcgcggggggcgtccgagacgccccgtgaaagccgtgccgacccttgggaggactgacaggtctagagacacgcgctgtctgttgtggtgggcctcccgggaataagtgaggggctctgtgtttcgaggatggttctagcgcagagccgggtgtctgccggggtgggctccccgcattgttcgggctccggcgggggcggctctgattcctttccatggcccgcctcccaccccgggaatccccagtgctccttttccacggcttttctggcgtccccccgactctcccgcggcactttggcctaccttcccccagcgccgtggtcctccctggcgaccccctctgcgctcctggggtcctcctgcgccccccctcctccaccggcgcgctgcccacagccgcgtgccctctcccc

SEQ ID NO: 225580 - DNA, 960 bp, Homo sapiens
  chr18:3879186-3880146
  hyper
cttctggtaaacctcccgggcccggctcacggtgagcgtggaggaccaggcgctcttcttcagcagcggggtgtccaggctgaccggcaggttggcgcaggtggagcacttgacgtcgttgttgctccgggaggccttcaccgcctgctcgctgatggtgttgtaggcctccaggaagtactgtgaggccgagcggtcggggcacctgcccatggtcatcacgcccgagggggcgtggtagatgcacatgtcaccatccaggttgtcgtccgagctccaccagcccggggaggtgctgggccgggccttgggctccgcgcgccgctccttgctcttgctgcgtttgccatagcgcgccgcctgcgcctcgtcagggctggccttgcccccgttgacgctgcccttggacggcccctccagggagtgcgacttggtgaagagcttctggaccgagtgcaccaggtggcggatgcggccggggctgtcgctgcggtgctccacggccgtgcgcttgtactgcagggtgtgatagccatcgcggctgagtggcagctgccgctcgaactggtccagcaggttggcggggatgcggttcgccttggtggccagggtgcggggcaccagggcacactcgtccttcagctcttgctgcgaggtgtagtgcctgcgggggaaggtgctgctggccagcgggtcgctgaaggggcccacgcactcagcctggaaggagttccgctgggtgtagtatgggtggtctgcggggtggtgctccactgggctcagcaggtagggcttgcggtcggagtggtgcgacagcgagtcacaggccgagtcgcaggtgaccccgtggtgatggctgcggctgcctgatagccctttcatggcggaccggaagcagccgccagggtcatggacacccggaagtcaggctccagacccgtcttgggcagggatctgggg

SEQ ID NO: 225581 - DNA, 720 bp, Homo sapiens
  chr18:4454915-4455635
  hyper
cgcgcggcaggcagcagccaggagccacccagcgcgccgcgaccgccgccgccgcgcacgccccagccccgcggcgcagcccggcgttacctggccgcgtcccgcagtccggccctcgctggctgcgtccgtccgttggtcccacgagcctcggaggaaggagagagatgtccccgcgaccaggaccggctctcagcgaggtgacgggaaggactcgagagaggagccgaggcggcggcggccgttcgcgccgcctatgctgccgattccccgaggcggaaggtgtccgcgaggccgtgtcctggagattgcggcgcccgaagcgcagcgctcgcctctggagcggaggctgagcgccgggacgcggcgggctggggctgcaaggctgggctggtgacccgcccctgggtgcatgttaatacggtggggaggaggagtcccgcgcttcctccgcccaaccaccggagccggcgggcgggcggcggccgcggcccggagccagccgctcccacccgccccagctactacggcgcggcgcgaccgcgggctccggccccagcccaggcacgtgcgcccaggccgcggggaggcgccggcgcctcccggaacgcgctcctggcctgcgagtgctgcccgctcagtctccgggtgggaagtgcgctcgccccggaccgaggggaaagcccaacatccccgggatggaacagagaggcggccacc

SEQ ID NO: 225582 - DNA, 540 bp, Homo sapiens
  chr18:5542733-5543273
  hyper
cttcagatccgtaatataaaaagaaaattgaaaagaatactctcattgcaagggaccacagttacaatttactaggtaaccacacccaccgcattgcagaagccatgaacttggcgggcgtgggggggaaggggaagaagtccggcgagattagaggggaaatccgaaaaagcaagcccctgcggcagcagccaggaaacactcgccaggaactggctgcgaccccaactccagcggtccgaagccctagcctccccacccccaccgcggcagagccgccttcgcagacacctcccgaggagaatcgcggccccgagggcgccaggtgagtcgcgccgccccgagcccccgggccacggcaggccgacccaggcgcccccggcccgcccgtgctcccgcgcccgggtgccagaggcgaggggccccggcaggtgcccaggcccagggcaaccccgcttggacgctccctcctcctcccccaccggccgggggccgctgccccagtttggggaacgaggcaagttatataaaagcggccgg

SEQ ID NO: 225583 - DNA, 720 bp, Homo sapiens
  chr18:5628266-5628986
  hyper
tagatttgggatttaccatcgtttctactttcattcatttagtggcttccagccctctcgcggcccagtcttaatccatcgcacttcagagggaattacgagggagttgcggactggcgggggcgggggtctgtaactaacaccaggtgcctgtgagagagccccaagggcgggggcagcacctcctggctgggttgggtccgcctggcctcgcctcgcctccgggatccttggcgctcagcgccgccctcccgctactgcgctacccgccagagcccggcgtcttccctttccttgtcttgtggacgccgcccttcgctcccgggaggatttcgcctccagcacctcaggcttttctggcgcaaaggtcgccagcccgagcgagcccaggcggcggcttcacttctgcagagggaaagcgaaagacgcggccggcgggccgagggggcggccgaacgcgccgcgtggttgctgctcccgaatccgcagcggcggcgccagggcggtcaccgagccctgcggaccccggctcaacttccagcgccactcgggtgccccgagcccgccgcagctcccggcgcgccctccagccgcggcacgcagcccctgacgcgcccggggcgccctcccgcagcaccagccaggccaccccacctcccgcgccgcgcttccccgccagccgccggccaggagctccccggcttctgagcaggacgcgcc

SEQ ID NO: 225584 - DNA, 180 bp, Homo sapiens
  chr18:5629032-5629212
  hyper
tgacgtgacgctctctctggagcgcgggcccgcctccgccaagcctccaccgcaggtccttacagccgagccacgggaagatgcaacgccgggcgaggggcgcctcccggattttgaaaaacagcctcattcgcctcgggaacgcctcgatcccccacccgcaccctttggccagatgat

SEQ ID NO: 225585 - DNA, 840 bp, Homo sapiens
  chr18:5629625-5630465
  hyper
caaggtctagcttctgagactccgctctctgggctagcggttcgagctgcaggggggcggggacggattcggagggagcactagagagagagcccgcgctcactcctgccctcctcgcaaagaactggccagccccactcgcgtccagcccacaactaggctgccgggaccggggagccagaccccaggtcgctccaactccggcgagggcggggaggggagtgacagcagcaactagcgcgcgctggcaaaagcacagagtctcggaataggctaaacggccggcgcggaggggtggaggcaagagggggcggaggaggagttgcccgagcggagagggatgacgtcctccagggccttgggctccgaggaaccgaagactggtgcgctcgccgggccccgcgcactagctctggggttcgcagaggcgccgcgcccggcttccgcggcagctccaacacagcgcgcaggcggtcgatcccggtcagcttaaaccgggcgcaagccctctgtccccctcaaagcacctctctgctcgtccctagtctccaggtgcccgtctgagagtccctgtcgcctccgggcggacccggccaggcagcccccggtcgggccagcctcgccccttcctcgctttctcccccatcgacctcgagccaagggcaggcggcccgcacccgcgcccctgcccacggggctaggcggcgctcccggcctacgcccggctgccaagaagagaaaggcgctcacctgagtcaccgaagccttcctttggggcccctcccggagcttgttcgcagcccgcaggcacaaccttccttggagaaaaaaagtagcgca

SEQ ID NO: 225586 - DNA, 720 bp, Homo sapiens
  chr18:5894841-5895561
  hyper
tcctgaactagctttttctgggcagcgcatcccgtgtagccagcccgggaaaaagcctctcaccgaacaccagcccggggcgcggggactcggggacccgaggggcggggaggggcccccaagggctggggactggcagaattgctcaaaatggcagcactctccgcacgcaagatcgctcacttacccagggagaccgagggaggtcggggccggcgaacgggcgctcgggcgacacaaaggaaccatggagaaactttttcagcccgagccgacggcggagcgcagggacagcgccccggggccccgcatccgagcgcgactcagcagccccgcgggggcgagcgcccgccccaggctcgcagtccccgccggcgctgtggcgggagccatttccaagagtttccaagaagtgtcaggtcctccgcatcccgcatcccgcatcccgcctcggagccctcctctccgccgctcatcctccagctcccggcgtcccctagcgcggcgctcccgggcgggcccctgcggccgcgccgccggccctcgcgcctcttttgtgtggctgcggcgcgccgggctccgccgggtggagttgagcccgcggcggcggctcggggcggccggactggcggctgttgctaagagaccggagccatgacacagggaaattgcggcagggtggcggtcggggcccgcccggctcggcggagtcggggggcg

SEQ ID NO: 225587 - DNA, 360 bp, Homo sapiens
  chr18:5895624-5895984
  hyper
cccgctcccccgcgtcctccgccgcccgccgcccgtcccttcggaagcgccgattcctcggggaggaggaggcgtgaggggaggcggcggaggcagccggcacggggcgctcgggccgcggggcagggggcgcggggtgcctcctcggcctcggctctccccgccccggggcgccccgagaccgccgcctgcctccgcgggcagctttgttcttctttcctccaactacctgtctgagccgcgggccccagaggccccaaagagaggcccggagggtctccccagcagcatccgaggggcgctctcggggagctaggggccagagtccgcggtccctccgtgcctgcctccctcccctcg

SEQ ID NO: 225588 - DNA, 180 bp, Homo sapiens; identical to SEQ ID NO: 204874
  chr18:6414233-6414413
  hyper

SEQ ID NO: 225589 - DNA, 116 bp, Homo sapiens
  chr18:7116831-7116947
  hyper
tcttctctctctctctctttccgcccgcccgcaaaaacagaaaatgaaaattcgctctgagtttctcttctcaatccttgcaacgcgcatgcaaggtgctcccttctccgctggtc

SEQ ID NO: 225590 - DNA, 291 bp, Homo sapiens
  chr18:7117884-7118175
  hyper
ccccgtcccgccccggcttggccccgccacccagacccctcccccgggggcgcccagcttggcctctgggtcccggcgcacgcggaccccaagtcggggaggccgggctgaccgcggccgcctccccggctccgggtaggaggtgggcagagaaggtgggctgaggggaggagaaactgggctgcgggggtccgggagggtggattccgagaaactatgtgcccagctgaccctgcccgccccgccgcggccctgcagtccccgggccaggacccacgcgcccctgccagg

SEQ ID NO: 225591 - DNA, 546 bp, Homo sapiens
  chr18:7566544-7567090
  hyper
ttggtgtgaccaccgccttccgtgtactgcctgcggctcgcttcgggcccacacgggacaccgaggcatgatgaggacgcagaacagcagaagcgcgccctgcttcccgggcgccagtgctcggggccagcggcgtgtacccggcgggcccggccgggagcgggctggcgatcgcggggctcggcgctcccggctcccgcgccatctcccggcgcccgccaacttcgctccgcccgcggcgtagagaagctcgcagccctccggagcctcagcgatctcctggctcgcttttcccgcagccgccgagcagcgcaggcccggcgactccgggtgcagctggccctgtgcggtgacatcgccgtccggcgccaggctcgaagccgcctggccgcgcccgcggggtcgcaggccgctggtcccgcccggccgcgctcacaaactactcgcggctcgtgacccgggacaaacttctggcggcggcgcagcctcttccacagtcaccctccccagagccagctaccaaaatagaagacgcggccggggcga

SEQ ID NO: 225592 - DNA, 1320 bp, Homo sapiens
  chr18:7567260-7568580
  hyper
gccgggcggccgtgacgtgagcgctcccttcagccggcctgcggggcaccgccagtcagtcggggagcaagagccccgcgcgcagccggcgcgggctcggtcatcggcgcgccgccgcccggggctgggcttggggctgcctgtggagaggcggcgggcggaacgcgcgcggccacggccacggccaccgccacggccacggccggcagctcgggtcccgggtcccgggcaggggaaggggagaggcggcgagctcagcaaccggaaccgagggaagattttggctccgcgggctcgccctccgctccctctgccagcggcgccagacgccgagtggggccagggacaggggaggaggacccaggaccctgtgcccgcgcccctggagccgctggagttcggacttctgcaactgttggcactttgggggcttggcttagcgctctgctgtttacccgtctctcctcgctgcctcggaaccaaagctcccggccccctccgccctcgcgcgcccacccaccgccgccggggagcggcccggcccgcactcagcaccatgaggggacttgggacttgcctggcgactttggccggacttttgctaactgcggcgggcgagacgttctcaggtaagcgggaccgcctctgccgcccccgaggcgcgcgggccggcgcgggacgcccgggacgccgacagctccctggtggtagagccctaaggctggcgtcggggccgggcggggggcgcggcgggccggacaccgcttctgcctgtgagccgggcgctgggcgaggggccgtggggctggcaggcacccagtcctcgggcgggcggagcggacggaccccgagggcgagctccccagccgggactgccagctcggccgccgtccttccgcggcctgggctagtgctcaaggttgggcggcttgcactcttgagtccctggccggctgcaaaaggaacagcagaaaactttgcttgaagttcccagttgcagccgccgggccgcctggcgtaggcgctgcgcggtccccgccgaccccgagcagcggccgggcccaggccgctggtgttcggctgcgcccgcagcgatcgccgggaactggcggccgctccggcggcggcgatctcccggtgccctgccctccctgtcgccccctgcccggcgcggctggcgaccccgggaggtccccgcggtcgtgcagcgtctgcggagaggctggggggagttcctcgccggtcccagcggtagggcttggcggccgcggagggaagcgggcaggtccccaggccctggccacggccctgcgccccgct

SEQ ID NO: 225593 - DNA, 50 bp, Homo sapiens
  chr18:8016761-8016811
  hyper
ggtcactagaaatgcggcattcatttttaaaagaacgtctatctatccat

SEQ ID NO: 225594 - DNA, 270 bp, Homo sapiens
  chr18:8367259-8367529
  hyper
gagatggggaggaccggattcgaaatgcctgggccgcctgttctgggcccgccccgccaggtgcctgtgctcgggaggggccttgcccagcacgcattctagaaggaagcggccccgcgcctcctccctcgcaattaccgccgggtcggaggcatccgggcggtgcgaagtcagcaccgtgccgagcagttgagagcagacggtgttttcttttcattgttccctcgcttcgctgggagagcggcggcacctgttccgcggaagcgcggc

SEQ ID NO: 225595 - DNA, 43 bp, Homo sapiens; identical to SEQ ID NO: 204885
  chr18:8748272-8748315
  hyper

SEQ ID NO: 225596 - DNA, 463 bp, Homo sapiens
  chr18:9708048-9708511
  hyper
cggggccgggaggggcggatgccggagggcgctgggggaggccgacccgcgcggggctggtccgagggcggaggcaatccgccggcgacgccgcaggtcccgggtggctgacgccgtccgggggcgttcctgggagctgggggccggcgaggctggacccgacgcgcccgggaggagccggccggcggccacgtgacccaccgcggcggggccggcggcccagaaatagcagcggcggcggttccgcccgcgggcggcgcgagcgaggggcagaggcgagagacgccggcggggcgcgggcgcggcggccccggaggatgctgctgagccccggcactgcctggctgcgagcacatgatggcgatacgggagctcaaagtgtgccttctcggggtgagtcctggccgccacccgccggcggaccccggcccgcgctctcgcgccccttcgctcccctattccc

SEQ ID NO: 225597 - DNA, 386 bp, Homo sapiens
  chr18:9708784-9709170
  hyper
ccccggatccgcggcgacctcgcggggacccccagcggggacggggcagtggcggcgagtctggggccccgagggctttctcctccgcttttgatagtttccttccggcagaaagtttaagttgctcagccaagtcgctgagtgctcttttgcctcctgggggcaattgatttactcacgtaaaacagaaaaataaaaccaaaagcgaacccagccaagggggtgaaagccgagggcgcggccggggtggaaggtgaggcagtgacctgtgcggagcgcgccctgcaaacttccctgctgcgggtgaaagaagctgcctgggaaagtcctccccaccatcactcccctaaagtggggttttctccgcccgaagaagccttaaagca

SEQ ID NO: 225598 - DNA, 780 bp, Homo sapiens
  chr18:12253760-12254540
  hyper
ccttctcactgtccccaaatgctcatgacatggccttgagagcagcgcagcgggcaggaagcccaggcgcctcggagaacctgaagggctgcaggtcccggtgtctgcggcagcttccgcatccctgcagggaaccagcggctcgctgagcctggggctgggctctgggggactccagagctggaggcaagtggcgctcacatccgtctcctcacctgccccacccgtggcctgggtttaaaatccacatacccgtctttccgcggccaaagtgatgctgccaggattggttatgaccccaactgccccgacccccagaagtgcaaaacgaacaggctggcaagtgaccaaaagagacccggggagcatctgggcttccaaggtcctcggtacggcccaaggcagcgaaggacgcgcggctccaggctgcgggagccaggacgaccgggggctcccagagcgcgaagtcgcgatcctcggcggtggagagctcgtgccaaaacgtcctcccctgcgccagtcaggccttcgcggggctggcaggcgggcgggggcggggccgccgcactttaagaggctgtgcaggcagacagacctccaggcccgctaggggatccgcgccatggaggccgcccgggactatgcaggagccctcatcaggcgagtgccccgcgtccccctgattgccgtgcgcttccaatcgccttgcgttcggtggcctcatattcccctgtgcgcctctagtaccgtaccccgctcccttcagccccctgctccccg

SEQ ID NO: 225599 - DNA, 360 bp, Homo sapiens
  chr18:12307802-12308162
  hyper
gggggcagagaccctgaaaagctccaccgccgaaccccagggcagtgtcccggcttggctggactgggcgcgggcggctgcaatgctcccgggcgcggcgctgggaccccgcgggccacgtcggctccgctgccccgacgccagggcccgactcgcgtctccctctggcggggcaccacaaggggcagcgaaacggtggtgggggcgggcgccgcgctccttcccgtctcctccccgccagctccgggcccgtccttttccgcccggctcccggcaagggtcccccgactggcgcccgcgcgtcctccctcggctgctgcaggccgggccgcggcgtcgagcgggggcggcggggcgggg

SEQ ID NO: 225600 - DNA, 836 bp, Homo sapiens
  chr18:12308216-12309052
  hyper
cgggacgcgcgcagccggcccgcagttgccgctgtcgtccgcagagccagttcctagcgcagagccgcgcccgccatgagggagatcgtgcacatccaggcgggccagtgcgggaaccagatcggcaccaaggtgggcctggcgcggtgcagggcctctccgcgggtcggctgctggcgggccccgggtctcccggcgcgacccccgccggggcgcgcacccgctgtgcgcccctgggtcctcggagcccggtgcggacccgcgagggccgcagggagggagcgcccggggcgtggccggccggggaccttctactcttcgctccccacccccatcccaactgggagcggctgccggcggctcaggcgcgcctggaattcggccgccggggcgcctggggtgggcgcgggtggcggcgtcccgggctctgggttctgagcgtctgtccccccgccttgccctgcccaagttttgggaagtgatcagcgatgagcacggcatcgacccggccggaggctacgtgggagactcggcgctgcagctggagagaatcaacgtctactacaatgagtcatcgtgtgagtagcaaggccgccgcgccctgcccggccgggacccgcgtggacgctccggcgccgcctcttagcgcggcgagtttgcttcgggaaaagttctctcggggtgtagcaggatgcccggccactcccttcgctcctccggggcgggaaatccgccgtcagtttattcaaacagctcgattcagcctatcctgagggtctgagcgcttgaacgggaccacccgttagcgttgtgaaatcaacgtagcggttcctgcc

SEQ ID NO: 225601 - DNA, 673 bp, Homo sapiens
  chr18:12407708-12408381
  hyper
gtaaggacgagcgtcgcctcctacgcccgcggcatctgcagcaagcgcgcatcgcgcaccccagggtagcagcgcaggtctggggctgcgccacagccgcgcccgcagagctatttttagccgctgcagccagcctagccaccagacggggtgggcggcatccaagggcgccccgcccatcgaggccccgcccacgccgcgcccggagccgcgcggcccgaagcacccggcccggatcgcagagcccgcgccctgcgccggcggcaatgaagatctggagctcggagcacgtgtttgggtgaggccgggctgagggccgcggtggggccgtccagacgccggctcctgctcccgagcccggctggagcggtccaggaaaggccggacctcacagcgggcctcgcggagatccccgccccgcgccggccgttcccagaccgcaacttcggcgtcccggagagggcacgcgcgcttccccgggaccgcggtctgggcgaggctctgcgccgggtacggcctctcccccggcgtgcgcaggggcctggctgcaggcacagaggccccgctggtggtcgacagccagggcgggggcagccggagcgggggcggccggggcgggggcggccggagccgggggggcggccgggggcctggcgctcgctgctctccttgg

SEQ ID NO: 225602 - DNA, 330 bp, Homo sapiens
  chr18:13217136-13217466
  hyper
actaagtgtcctgccgcccgactgcacgtctctaggcggctgcccgaggtcccgcggcccgtggtgcacacgcagcccgcgaggtactctgtgctggaacgcgcccccagcctcccgaaaccgcccccggcctgcgggcagcgagccggctcctccgggcgcccctgcagcgtactctgcgctcggcttggagttccccgtgcggccggcggtgggcgcgcgccacgcgggcccgagccctgggcgggagtgcggccccgggtcccgcggcctcggcgcccgcgcgcctcccccactgcccacccccggcctccgggcccgccccccgca

SEQ ID NO: 225603 - DNA, 300 bp, Homo sapiens
  chr18:13217553-13217853
  hyper
caccgcggagtgggaaggaggaggagagactggaggagttggagacagacacagccgcggcgcgcagtcacggctggagacagacggcggcgacggcggcgggaggcgggacactcccccctccggcgactggaggcgggacacctccccggcggccgcagcgccgcgtcccctctctccccgcgctgaggctgcggaccgggcccggcgggattagcaggcgagtgcgttggccctgcccgctccgcgcgccgccgcggccggccggggatcccctgcaagccactgagccgctgccgc

SEQ ID NO: 225604 - DNA, 120 bp, Homo sapiens
  chr18:13218083-13218203
  hyper
ggcggcccaggtgagtgcggacccgaggtggccgcagtggtcggggcttctggcccaagttcaccgctgcgctccggagggaggggtggcgggggactcgggaaccggacgctttgggaa

SEQ ID NO: 225605 - DNA, 282 bp, Homo sapiens
  chr18:13823998-13824280
  hyper
gttcggggggattttcgctcggggctgacgcggttctctggccgctgtgccgtgctgggccactaggtggcagcggaggccgcccggagcgacagccggcggtgcggaggcgggcccggcgcgggcaggcaggaggcttaaagccccgcagagccgcagccgcctagctgggggagaggcccgtccggggctggctctgagcgccgcacggccgtcggatcccggggacgccgggggcccgggctgagcgccgcggcccgcgaggaggagcaccggtaaata

SEQ ID NO: 225606 - DNA, 117 bp, Homo sapiens
  chr18:15197987-15198104
  hyper
aaaaaggagcggcggcgggggaagaagccgcggcggccgtggaaaaagtcgcggcggcaaaaagccgcagagtagggggcgaaaagacgcaaaaagccgcggcggcaaaaagccgtg

SEQ ID NO: 225607 - DNA, 104 bp, Homo sapiens
  chr18:19751236-19751340
  hyper
ctcctgctcccggggcggagagcggggccccggcggcgccagcaactgcgggacgcctcagctcgacacggaggcggcggccggacccccggcccgctcgctgc

SEQ ID NO: 225608 - DNA, 458 bp, Homo sapiens
  chr18:19751579-19752037
  hyper
ccggccgcctacgacggcgcgcccggcggcttcgtgcactctgcggccgcggcggcagcagccgcggcggcggccagctccccggtctacgtgcccaccacccgcgtgggttccatgctgcccggcctaccgtaccacctgcaggggtcgggcagtgggccagccaaccacgcgggcggcgcgggcgcgcaccccggctggcctcaggcctcggccgacagccctccatacggcagcggaggcggcgcggctggcggcggggccgcggggcctggcggcgctggctcagccgcggcgcacgtctcggcgcgcttcccctactctcccagcccgcccatggccaacggcgccgcgcgggagccgggaggctacgcggcggcgggcagtgggggcgcgggaggcgtgagcggcggcggcagtagcctggcggccatgggcggccgcgagccccagtacag

SEQ ID NO: 225609 - DNA, 300 bp, Homo sapiens
  chr18:20512674-20512974
  hyper
tacctactatcggtttgaatctcaaacgaacagccacaagaaaaatggactttttaaaaaaaattatctaacagcatgttgtcccaataaataatgctgaaggagattccttctcgtttcaaatttgccagaaacttcccgtttaacctcagcaaaatacagatcgttttgatctatggcgttaccgcacaaccctgtcaggtcacatcactaaactgcagataacagcgacaaggccgaaaactatgttagacggatccgcgtccataccccccatcagttaattttaactcttcattc

SEQ ID NO: 225610 - DNA, 157 bp, Homo sapiens
  chr18:20715480-20715637
  hyper
cagccagcgagccgaactagccgagctaggtagcgaggcgtgcgcgtgggccggggcggcggcgcccccatccccagcaccgaggggcgagcatggcccgcccgcgggggggctggaccgccgcgcacgccgcccgatccccgcgccctacccagcc

SEQ ID NO: 225611 - DNA, 540 bp, Homo sapiens
  chr18:20716332-20716872
  hyper
gccgggcaggaggagttggaggaggacgatgcctttatcagcgtgcaggtgccggcggccgcctttttgggctccgggacccccgggagtgggagcggcagtcggggacgcctcaactcgttcactcagggaatcctgcccatcgccttctccaggccgacttcgcagaactactgctccctggagcagccaggccagggcggcagcaccagcgccttcgagcagctgcagaggtcccggtgagtatccgggatgcgacgcgcacccaaccctgcgtcccgcccggcgctcccagcctccccgcggtctctgggctacgggacacgggttgctcccattttcccgcgccctgccggatcctgtgctccgggcccgaatcccaaaccacgagggcacccaaaagagggggcgtccccagggagtgcggggttacacgtgtttgcacgagcccagcattcgcagaggagcaccgcgcttgtgcagtgggtcgggaattgggagttgcaggagcccagtagaaagcggcgtccgagcctcccc

SEQ ID NO: 225612 - DNA, 240 bp, Homo sapiens
  chr18:21242427-21242667
  hyper
cgatccacagccatgagtgcgaagcctctcaggcagggcaggcaggcaaaccgcaaacccacagggcgcacccagccccgccgcttcctcccgggcctcgcccgcagctggaggagagaggaaggaggaggcggcgggcagcgggcagcgcccaccccatcccaccccatcccaccccacccgaccccgcgggcccggccgcccgagcccggccccagccctgaccccggagtcccggtc

SEQ ID NO: 225613 - DNA, 247 bp, Homo sapiens
  chr18:21594467-21594714
  hyper
tgcaggaagtggaggcggccgccgctcggggaccggcttggcggggtgagagacacccggaaacggattccgcttcggggcccgcgcgagttgggtgcttcggagggcgcgagaggagcgggcgggtgctgctgagtaatccccgcggcggcggccggacgcccacctcccacgccgcgccgcagccgggccgcggctcctccctccgcggtccttccctcctcttccctcccgtcttctcccctcc

SEQ ID NO: 225614 - DNA, 105 bp, Homo sapiens
  chr18:22653839-22653944
  hyper
aacatctttccccaccgtaagccaaaaaaaaaaaaagcttgtctactatggcatatgctttggtaaagatatataaaaataaaactgtgaaaggacaatgtatta

SEQ ID NO: 225615 - DNA, 1080 bp, Homo sapiens
  chr18:22929559-22930639
  hyper
ccgggggccgggaggcgtggggcgccgggccctgcccaccccttttccccgggccggcggcgagtcgggaagctggtgcgggaaccggggccacggggcgccgcggcccggcagccaggaggaagaggatgctgcgccgccggggaccagagggcggggccgggccgcgcggacctcggcgggacccagcgggcccgggcgggcgcaccagccgccctttgtcctccgcctccgggtcgcgggggccgcggccgcctccagcgctggccccctggccctcgccccggttccccgtcctgcccgcgcgcccctcctccggccctcgcgctccgccgcccgccctccccgctctccgcctcggagcgccggacctcgcggctcccctcggccgcccgcccccgatttcctcggaaggaggctcgcgaaggtggaggaggcggccgaggaggaggaggaggccgccacgtgactctcctcgccacattccaacacagccatcagatcgataacttcagggacccccgcccccgccgcagccagctagtgcgcccccaaaatcccgcacgcacgccccgcaacttccctctccaacagggacgacggagagctggaccccaccgcgaaacgcaaaggactccaggggcggcggggagaagtaggggcgaggggcggtcaacttctgggaatggccaagaggggtgctctgaggcccgagccggggtccggtgcccgcggccggcggccggggtctgtttactccggcgacgtgcggagaggacccaagcaggacgcgggcgggcgggaggcggcggccgggaccccgggccacgtttgtcacgagcgggggctgctccccacctccgagatgacttttttcttcttccaaagaaaaggaaaaaagaagcaccgcacggttttgcatatttattctttgcgaaaacacacaacagaaactttttcctccagcccagatgtagatctcagacgggatatttttttttcctccctctccggataatttcgtttctttctctctctctctctttttttttttcggttgttgttgtcttttctcgccca

SEQ ID NO: 225616 - DNA, 960 bp, Homo sapiens
  chr18:23806207-23807167
  hyper
agtgcagcttgcccctcccacgtgataggtttctggcatcgcccctccttgctggcgattctggggaagattttaacgctccctggagccgtccccagtgacgtcacgggcgcggctccgctccttggccaatcacgcggccggatcccggggaaacccggggcggtggcggcggcctgggcgcgtgcgcgaggtctccgcgtggctatataaacatggctggcgtggccgcgcggcggggccgtgccaatcgcgcgtagggggctgtgggcactcggggttcgtagttttgaaatttctggcgggggagcagctgcgcagttaggctcgaggtgtgagcgacgaccttccgggagccgcaagtccaggctcccccgcagcgggacccgagcctgaggcgcagggctgaggcagcgcacgtgtgagcgccgctgaggaagctgcgagaggtcgggcgggtgtcgctccgggggcagcccaggctcgcgcggacgagaggaaggtccgggacgcgcgtgtcctgccgtgcagcgggcgcccgtcactgacttcgctgctgcggcccccgcgcctctccccagcgatgctgtggaacccgaaccgcaccggagtcggctgccgcgcgccaagcctcccctcacctctgctcccggaaccgcagcgccaaagctgccgctgagcccctgggggatgcccgccggcctcaccgaacccgccggcgccgctcccccggctgctgtgagcgcctcggggaccgtgaccatggccccggccggggcgctgccggtgcgggtggagagcactccggtggccctgggcgccgtgactaaggctcctgtcagcgtctgcgtggagcccacggcgtcccagcccctgcggtcccccgtggggaccctggtgaccaaagtggctccggtcagcgcccctcctaaagtcagcagcggccctaggctgcctgct

SEQ ID NO: 225617 - DNA, 104 bp, Homo sapiens
  chr18:23807195-23807299
  hyper
acaccacgacaatccagtttcctgctaatttgcagcttcctccaggtatgttgataaccctttccagccttgtctgtcggtccagctggcggcgacgggaaaat

SEQ ID NO: 225618 - DNA, 478 bp, Homo sapiens
  chr18:24127737-24128215
  hyper
cggggtccttggtgaggtcgagcgtgcggcagtacgggggctcattgaggtagcggttgagggagctgcggatgctgatgagcgacgacttgctgtagagctggccgcttttggagcgggcctcggcatagaaggagcgcagcacgcggcacagcgcccccttgtccatggtctcgaagtccgggctctgcgccttctcgctcaggtactcccggaagatgcgcacggcgtagcgggtggccagccgggtgttctcgctcagccgggcccgctcggggcgctgcagcacgtcggggtccagctcggagccgtccccgggcggcccaccgcgggcccggggcgccagcagtcgcggcggcgcctcgggctccagcgcggcgctctggtccatattgatcatatggaccggctcgggctccagctcctccccggccgagtcctcgggctccaggggctcgtcccagtccagccccatctc

SEQ ID NO: 225619 - DNA, 1020 bp, Homo sapiens
  chr18:25756641-25757661
  hyper
gagcttgctcggccccgaagaaggagcagaggggacccgcaatccagcccctagagccccgccaggaaaggcgcgagagacctactggccccggcaaccctgccccggcgcccggacggagcccgatgcctgcgcagctaccggccgcgcggcgcggcgcggcgcggcgtggcacctcccttcccgggtgcgcagcccggccccgcagcggcgcggggaacaaagggacccggcgccgcccgccccaccccgcccgtggcccggcccgcggggaccgccgcgtacctgaagcagggccgccagcagcggcagcagggtccgcagcgctcccgctatccggcacatggaggcggagaggggccgagcgaagagccggaggaggcggcggcggcggcggcggcggcggaggaggaggaggcagcggcagcaccaacagcggcgcggagaaacggctccaggcagtttccacccccttcccttcccctcccctccccacccccttcttcgctgctctccgctccccgccaatggagagcgagctgatgacaaatagcgggccgcggagtccgcgggactcgcaccaggagtaataaaacagacccagagatcaaggagctggggagggggcgggggaacagggagggagagcgtgtgagcgtctgcgagtgtgtggaggcggctgctgtggcagcgcaggcggctcggctccggcccggagcgcagcggaagccgcgagggatgcagcggcggggaccttggccggtggaggatgtggaggtggaagtggagcggatggcgctccccaagagctccgccacgcgaggtttcgggctcgtggttttgcttcctccgggtccccgctccagggccgctcggcgcgacgaagacgccggggacagcgccgcggggagggcgctccgggtcgtgcgtgctgcacccacaaagagcagcagtcccgccactccgcgcctccgctgcgtgggggccgaggggcgcttctcggctcctctttccggtccc

SEQ ID NO: 225620 - DNA, 36 bp, Homo sapiens; identical to SEQ ID NO: 204939
  chr18:29265160-29265196
  hyper

SEQ ID NO: 225621 - DNA, 170 bp, Homo sapiens; identical to SEQ ID NO: 204940
  chr18:29598282-29598452
  hyper

SEQ ID NO: 225622 - DNA, 51 bp, Homo sapiens
  chr18:29598683-29598734
  hyper
ggcttctgggctgcgcgagctgggagagctgggaggcggcgatcgcagctg

SEQ ID NO: 225623 - DNA, 840 bp, Homo sapiens
  chr18:30050339-30051179
  hyper
agctccacttcacatccttgaggctgcagcccagcgagggcgccgggtccatcttccccgaagcctcctgtcccgcgctcccccgccgccgccaccggcaccacccgcgcctcggcggccgccgctgctcgcgctcgcggtctggggcgcgcgggaggcgccgggcagctccggccgcgggcagccgggggggcgcggcgactggggcggcccggagggagggggccggcgcccggctcagctgccgctgcggggcatggctggggcgccccgcgtgccctcacgcccggagaagactcagagcagccgcgcggctgcgggcggcggcggcggcccgggtggctgcggcggctcccgctccgcctcctcctctggccctgggtctgcagctgcggcggccgcccgctcgcctcctcctcctcttacccctccttccctccgcctcgagcgtgtgaggaggagccgcgggtctgagaaacgccatagcagcgctcccagcactgactaatcaacaaggtgcgagcaacgcctgcgcagctctgggagacaccgcctccgcctcccaggcgccgcccgctccgcccccagctcggcctccgcctcccgcagctcccgcggcccggcaggctcgcgtcagctccccggccggggccgccagcgcccgcggctcggcgcgctccgcaagctttagctctcgctcccccgtccgaccactcgggcgccctgcagtctcgccgggtgctgctgcgcgccccggctccttccccgcccaggcccgtccccggagcccgggaattgccgagcgagctcaggtatcgctccctgagtcgtggtgtcggg

SEQ ID NO: 225624 - DNA, 862 bp, Homo sapiens
  chr18:30349741-30350603
  hyper
ggccgggatgagggcgaagcggaggcgcttcatgaggtcaggcgcatactgcatgcgggtctcgcggtcgtgctccagccacagcacggacatctggaagagcgccagctccgactccacggggggcggcagcgagtccagcagggcgcgcatctcctcgaagttgagcagcagcacatcctccaccaggtacttgttggccagcttcttggtctcctccaggccgtgcagcgcggcgatcttgcacacctgcttgtagttctgcaccgagatctggtcgttgaggaactgcacgcagagcttggtgacctgggggatgtgcaggatcttgctgaccgacagcacctcctccaccgtgtccagggacagggtcacgttggccgtgtagaggtactcgagcaccaggcgcagcccgatggacgagcagccctgcagcaccaggttgttgatggcccgggggctggtcagcagcttgtcgtcgggggaggaagaaggagtcccgggctcctcctgcggcggcggctgctgctgctgtgacggctgctgctgcggcggctgctgctggtccttgggggcccccaggccgtcctggccgccgacccctcccccgagaggggggtggctggagaagagcgatcggaagtactgcgagcaggaggccagcacggccttgtggcaatggaactgctggccctgggccgtcagggtcacgtcgcaaaacagctgcttcctccacagcaggttgaggccgtgcagcaggttgtcgctgtggctggggtcgaaggtggaggtcctgtccccggatctggacatggcgagctgactcggtgcacctggctttaaaccctcctccaacctggca

SEQ ID NO: 225625 - DNA, 652 bp, Homo sapiens
  chr18:31803199-31803851
  hyper
gtcgcgctcgctctccatgttccccgcgctcggccgctggccggatgctcccagcgcacttcgcacctgttcaccctaggctcatgaaaaatgcagccccggccacgttgcagggatgcgaggtcccggccgcagcgggagcctgctttgggtgggggaagggatgggaagaggggaggagggtccggttgggcaccagcaatcaatgccccgtgctaccaagtctggtccattcgtaattgcaacggctgtctcggacgtttttcctgttcccttagcggtcggtctctttaatattttgtgaccaggaccatcccaacaccattctggcccagaggagctgggttttcaataattaaaatcccattccttggtttattaaaaatcccaatattgaattggggtggtccctagacgcctcgcccccgggctgcgtccggggctgggcaggtggagcgcagcgccgcctccccgcgcgcgccccagaagcttccccagccactggccccgtggtccaggagtgagggctgcgcctctcccgaaagcagccgcccgcccagcgcctttgagccccgaagggcacacgggtcccggatctctccttcctcctgggtcctgctttgaccttccccacgacgggtgttaagggact

SEQ ID NO: 225626 - DNA, 923 bp, Homo sapiens
  chr18:32556605-32557528
  hyper
ccagttggtgtgcaagcccccgtttgcaggtaattaattcacagtgtggcggcgccttttcaagccccctctgcaagccgcgccggcctcctccctctcgagcggggtcaaaccacttagtttatttcacccgctggcactttcttccctgtcacgaattcagcctggcttcctttggcctgagacagcgtcttcaggcgggtcggctcggacctgcccagtggggcgcccacctgcacccgcacccgcacccgcacccgcgggaaggggcggcgctggccggactctctcgggtggactcccggagcggcggcggcggcggcggtggcagactgcgagtcacgtgcgacagaggaggcggagcacggcggccgggtgggtggagaaaacaaagcccccagctgtcagcagaggaaggaggcgacagcgccggagcaggtgagtcaagtgcatttaaagcggtaccgccctggcgcaccccgacaccccctgcactgaagcagtccctcccaggccaggggctggctgcgcctcctcctgccgctgaggtctgcagcccgcggggctcggagcaaccggaaccgggggtccagagtctagcaagaagttgtgcaagggtcggctaggcggtctccgggtgtgcaccccgccgctctcccgcgggccacatctctggttcggtgccccagctctgtgcaccccaggaaagtggagggagggagttggggctgccacgctggcagaagcgaagtggactggttctgaggggtgaggctggggctgtccagggtaggaacacggcgttggtgaaggaggggggctcgcgactgcgcgaccgcggcgcacgaccctccaggctctagctggggcgccggcactgagagagctgggggctctggcaggggctgcgcgcttgggggcag

SEQ ID NO: 225627 - DNA, 180 bp, Homo sapiens
  chr18:32557767-32557947
  hyper
tagtgggaaattcttcggtctacccttagaagggctatgcggaagccagaaatcccacaaagagccaggagaggggtggacgcggaaagcggtcccctctgaacctggggcgctcgataaagctgattttcagaccccaaaagggctagtgggtttggtcactcctccagtgacttcgtc

SEQ ID NO: 225628 - DNA, 78 bp, Homo sapiens
  chr18:33077970-33078048
  hyper
gtgcaatctaaaaggcggagctcggagtagcctgtgccgtcgggacgggaagatgtcagcgggcgttgtcctgccact

SEQ ID NO: 225629 - DNA, 460 bp, Homo sapiens
  chr18:33530037-33530497
  hyper
ttgagtcctaagcccgacgaccctgccccagaccctggagacgctggacgctggctcacctggatcccactcagacccgggcgcgggctcacctggtcccccgcgggcttgggcgtacgctcatctggatcccactgggacccgggcgcagcctcacctggtcccccgagttcccgggcgcggccacactgggtccccctcctgctcgcgccgccctgggcgccccggaggaagctctgtgcggctgcaaccctgagtcccaggcggagcggtcagcggagagttccagccaacttattccgtgcgcctcgaaagggagggttgctgggcgtatagatattctatttcgcggggcctttgcgctccgagtggcccctctaggccagttcctccgaacgctaatcgggggctccgcgctctcccctcgcttccctttgcttggggaattggcagcggggcg

SEQ ID NO: 225630 - DNA, 240 bp, Homo sapiens
  chr18:33766971-33767211
  hyper
tattagcctcgtggatccctaatctttccccttttctaccctttggtcagccgcattctaacaaacggcaagcacacgccccgctgggtagcagcaacccgagaacgcccccacccccgcccccgccagacgccggttcccgcttgagagggtgagggtcccgagacccctgcgaggaggagggtcgcggggttccaggatgccgatgccaagcaggaaagatcacctcgttgcttcttc

SEQ ID NO: 225631 - DNA, 366 bp, Homo sapiens
  chr18:35145440-35145806
  hyper
ttgatggcatcgtggtccttcatgggaatggtcgacgggttccccgggctgtggcttaatccgttcatgtgcccggcactgcccgggctgctgccgagcccgttggtactgaggcttgcgttgtcagcctgtccgtttgctaacgtggccatctttatatacatagagaaaatcttctttccttttattctttctcgctcacactctctcgctcctctctctcgctcgctcgcgctcacacacgcacacgcatacacacactcgggttctctccccctcggtttctctacacctcgctctccgctcgctctctgctctctctctttctcctcttctctcgctcgctcgcgctcgcgctctctctct

SEQ ID NO: 225632 - DNA, 180 bp, Homo sapiens
  chr18:35146110-35146290
  hyper
cggcggccgggggcagggcggcgtggggcggcggccaccgcgcctcccccgtcggcggccccgcgccgtggcgatggtacagtccgagacggcccccggctataaatagcgccaggcgcatggctcttcgggaggcgctgagattccgggcccggcggccgcggggagcgggtgtccgtg

SEQ ID NO: 225633 - DNA, 180 bp, Homo sapiens
  chr18:35146388-35146568
  hyper
ttttcgtgtgggtatgtaggggggctttatccaccaagctatgctctattagggcgccaggcgggcgaagcaaaggcagggatggcgggcggggcggcggcggaggtggaatgggcgcttttttcttccatctggctttatttatttatttagactagaaaagcgagccggcttggaggg

SEQ ID NO: 225634 - DNA, 891 bp, Homo sapiens
  chr18:42258979-42259870
  hyper
aatgcgcccagtttcgagagcctatcacagctcacgtctgggcgcgcagtacccccccgacactgctcctgttgtgtcagatagtggcagtgttgagcccaggaatacgcgcggagcccgcggcgatccccgcggccgctcagtcttcgcggcggactccggcgcgcaggagccactgggccgcaagggcgccggggagcgggaggggcgctgggggcggcaaggggtcccagatcccaggccacgaactgttttccttttccccgggcaagagccccgctcccttcaactgacagaaattcactggggcaggggggcgagtggggagagaggtcgctcagggctcgctactggctgcgcctcccccggctctggtctgggaagcggctctgggccctccgggcgagcagcttgggcgccggcgccccctgcgaggaagatcgcggggtgacggtcggtacccgttcggctgggccgcgctgccgctccgatccacctcccttccgcgcccgcgccctcccccttcctttcactaggagtccgggattcggagagggcgcgggaggcaggcacacgggcccgaccccactccagcgctcaccggggacgcgggcgggcggcgacgggacgcggcgggggcgcggggcgggcgcggccatggagcagcagcggcggcggcggcggcggcggcggcaacactagcgaccgcgggcggacgagcgggcgggcagggccgccgggctcagcggaccgaactgcacagctcagcaaaagcgccctcgccctccgcgcgccgcctcctgcgagcccaaacccaccaacattttttaacgctccaacccatcctttgaagaaaagcaaaaaaaaaaaaaaaaaaaaaaaaaaaagcaa

SEQ ID NO: 225635 - DNA, 780 bp, Homo sapiens
  chr18:42259922-42260702
  hyper
atatatatatatataaaattttttttggctcctgctaaaattagcagggctcgccgcgcgcctgtgtgccagtgtgtgcgagtgtgtgtgcgtgcgggcgtgtgtgtgtgaatgtgattactccaggactcctcgggctccggagacgccattttcccccttgatatctctctccataaatcggtggcgcggcggaggcggcagagtcgggcgggaagcgcggggccggccggggcgcccgccgctcgccgccgcctccgcgcgcccgggggccccggcgccccccgagctagggcggccagctcgcggctcgccgtttgacagatgctcatcgccatggagttgccgcagcagcacctttgggggctcgggcgagcgacgggagccgggatctgagcgagcgccggggccagcggagccggagccgccgggacatgggtgagcacgcgcggcgaccttggcccgggagcccgggcgcccagcctccctccgcgccgcgggcccccgcactcccggaaccgggggcgacgtgtgtgccctgcatgcaaaagttcacgtcgccttgctgggtctttgactttgcacccggcgggaagggggagaccgggccgagggggcgggatgccggtccgggcgaggttgcaggagatgggcgcgattccggcgggccggcgggtgggcggcgatgctggctcaattggagtggctcgttggtggcggcgatggtggaagctttgggctggagggctgggagcttattgagtttcgcctaatctgatc

SEQ ID NO: 225636 - DNA, 67 bp, Homo sapiens; identical to SEQ ID NO: 204969
  chr18:42531892-42531959
  hyper

SEQ ID NO: 225637 - DNA, 360 bp, Homo sapiens
  chr18:43913506-43913866
  hyper
tgtttgcggctgcttgttcgcattccagcttcccttgtgcccgcagtcaggctctacacgtgcgccagcctccgagcgcacgtccccgagtgacccgtgcgcggtgtgcagggacctcagggtcgtgtgcactaagggcgctcgtgcccgtctctctgcactaaggaacgcacctccacatgtctgagtgcacgtccctctccatgtgtgcacgttccgtgttcacgccgcccatgtctgtgcaggggcgcttcacgcgcgccctctccggcccgcgggcggccagggacccgcgctgggctccacgcttcccgtggggctgacccctccctcgcgccccgcagcgggccgcagcgattg

SEQ ID NO: 225638 - DNA, 180 bp, Homo sapiens
  chr18:43913903-43914083
  hyper
tccgccacccgcgcgcccgcggtccccgctgtcccccgcggttccggcgaggccgcgccgcgctgcgctccgctcccattggctgcgcgcgcctttgtgtggcggcagctgcggccccagcgcctttgaatgtcgagaggggccgggaagggagcctttccatgggccatctgtctcccc

SEQ ID NO: 225639 - DNA, 540 bp, Homo sapiens
  chr18:43914128-43914668
  hyper
cgccccggcggctcccgcagccccgccgccgcccgcgcccgcgccccggagccgcgccacaaagggcccgcgcgcagccgccgccgccgccgccgcgcgaggagccaggatggtcctggtccacgtcggctatctcgtgcttccagtgtttggctctgtgcgaaacagaggtatcgctttttcctttcggggtctgcttcggagcgtggatcgccgcaggcaccggggcgggggcgggcgccgcgggcggccgggggctcagggcacacccgcgaggacgcagggcgagcggtggcttccccccaccccattttagggggacccccgagggtgggggcggccgccctcgtgggagcttttgtagtgaagttagggtttggcgaatttgggtcccttcctccccagccccattttttattttttgcggcggacgtggttcccccaaatcacagccccttcccctaatacctagccctgtatgatcgaaaggagaaagatacatgaccgtgtgtgtgtgtgtgtgtgtgtgtgtgtgtgtgt

SEQ ID NO: 225640 - DNA, 180 bp, Homo sapiens
  chr18:43914859-43915039
  hyper
cgtgggcacttgcacgattttccatcccatccttttttcgtctttaaccctttttgtgcatcgcccttgtgctattgccctgctcaccccgccccccgcaactgtctttgtatgacagttgcatacacgggttcaagatgcttgggcgcgtgtgtgtgtgtgtgtgtgtgtctgtatgtg

SEQ ID NO: 225641 - DNA, 33 bp, Homo sapiens
  chr18:43924114-43924147
  hyper
acctaggaaaggaagcggcggctgctgactcag

SEQ ID NO: 225642 - DNA, 960 bp, Homo sapiens
  chr18:44336181-44337141
  hyper
aacgcggtggcccaagcctaagcggccatgctcggggctaggagcggaccccacggccactcaccccggggcgctgcgaccgaagctgccgcggccactgccacccgggggctcgccggccggctccgcgcatcccgccctctcaatggactttcttacctcttaatgtagttcctgccatacaggatctgttgcagcaaggtcaccaaggcaaaggcgcagatgaagatgaagagcaaagttcggctccccaacaaatcccggttggccgaggggtccgcgtagcgcatcctggctaccgggcgccgcgggcgcggggtacggggcggccaggcaatgactcgcggggttccggggccccggggggcgcgcggccgacttggcgcctcacggtgcggtcaggcaggcgggggacttcgaggggcaaagtttctggttggcgcggccggagctgggggcatccaagcgtcgcaggcgctggggcggcaagcaggacagggccggtggcagggagctctgccgcggccaggggccttccccacccccgggtacctttacctccaggcgccggtgccgggtagccgccgatttccccgcggaggggagacgccaggtgccacgagccggaggcggcccctcccgccgaggtggcggccaatggggagcaagacccgggctccgtcccctgtgcgccccagcgcgccgcgcatcgacccctccagtccggcgccggatcgcggttgcccagcgcgctgtgccctgccgggggcgggccacgtttgatctccgggcccgcagcaagggatcgcgaaggttggcctccggttctgccgatagggacggggggagggggcgtacaaaacacccgcgcagtctggctaatgataggcgggccgtggggagggggaggggcggagcgcaaaacgccgggtttgaatcttggaattaaaaagagggcag

SEQ ID NO: 225643 - DNA, 1184 bp, Homo sapiens
  chr18:44773598-44774782
  hyper
cgtctgggccgagtggggcgcgcccgccgacgccccgtgcagcttggccaggctctccgcgtcgtccttgccgcccactggccggaaggcgctggaatggtggtagctgccaccgcccgctttgcgcccctccagaaggtgcggatggtggggcgccggaacccgggagcccgcggggccagacccggcggccgcggcccctgccccggcagctgccacagagtccgcgggcggcgtggagcccgcgctgcagtccccgccgctgccgcccgggggcgactcgaagagcgcgtcgcgagagccggcgcccccggcaggaggaggtgggccggagcccgggccgttggccactacctgcgggggctgccccggcgggggcgcggcctcggcgctcccagcagcaccgcctggctcagccaggtccaggaaggcctggcgcagcagggccgggctttcgcctagcgcgcagcctagcgccgagggcggctgaggcgggggctgcaggtaggtgggcaccgggagcccgccaggggtccgcggcggccagaacatgcagaagggcggatagaaggcgtccttgcggcccgcgggccagaagaggccggacaagccggccttgggcgccgcgcccgcgccgcctgcgcccgcgccccccagggcctcagcggcggcacccgcatcctctttcttatggcacaagctgaaggcggcggccgcggcagggaaggtgtaggggtgcgggaagagcccgccgcagcccgggaacttctgcaggacgcccccgaacgagcccttgctgggcaccgggatgactgggtagctgcgcgggcctttggcccctgccccggcacccgcccccgcgcccgcgcccacgcccacgccggccacacagccacccccagcgccgcccccaccagtccccgcgccgcccgaagcagcagccacagagaggctggcggctgcggccgagaggctggcggcggccactacggcggcctcctgcaaggagtcgtcgtcgtcgtcgaagcgcggccgcttgtgatgggcgtgcggggcaccagccagctctgccaagggcggcggtggcggcggcggcggcgggggcgcacccagcaggtgggggcccagcagacccccgcctccggccaccgcggccgcggcggccacggcggccgccttcacag

SEQ ID NO: 225644 - DNA, 360 bp, Homo sapiens
  chr18:45687972-45688332
  hyper
atgaagcaaccacagccgctccgcccggccacaagcgccccggactccgtgcctgcccgcagcccccttcctgcagcgttcactcggctgcccggcccggcccggcccgggcgccccgccccagccccgccccgctccggaggcccctcctctatccccgccccttcccgggcgccccgccctctccctccactctgcgcccccgcggcctctctctcctcctgcgggagccatcgccctcctcccgggcgcccctccccgcggccgcagcctgtttcccgggcctctcctccgcattctcacatcgctccagctcgacctccccacccgcccgcctccccgggaggccgcggcccggcg

SEQ ID NO: 225645 - DNA, 451 bp, Homo sapiens
  chr18:45934525-45934976
  hyper
ctcggccttgcgcccgcgccgcggaaggttgggtaccagcctccacagctttgcagattgcaaagataacgggagctgccgcttcgcttttctttggctcctcctggccttcatcctagtaaaaccagacaagcaaccggaaaaacaaagcagcacagcggccagagacaattcgctttcaacggagcaagagacgtacacaccttgagagaagacgcacgcagttcccgtgcgtgtcgctgggaacagacctcgcactaccccgcgcggcgacaggcaccgggccaggctcggcttcacttgtccgaggcttggaggaactgtgtgcgtgcgcccatttcccccagcttcccgacttgacagcagcaaggatctttgagtcctgcatgagcgacacctcgggcaaggactgtactctgctcagatctcatcgagaggtgctggatcccag

SEQ ID NO: 225646 - DNA, 180 bp, Homo sapiens
  chr18:45935034-45935214
  hyper
gtcccaggaaaacgtcactcaccaaaacgctcccgcgccttccaggcagaagtgcggtaaaacttttggcagaaaccacctgtggctgccgacgggcccgccccgctcgggcccgcaggcgccgccgagccccgggccgcacgcgcccgcagaagttcctttccagccccgcgcgccact

SEQ ID NO: 225647 - DNA, 1260 bp, Homo sapiens
  chr18:45935758-45937018
  hyper
ctgagcggcggcagcgggcgagcgggcagctcctccctccccgcgccgcgcctccgccctccccgcgccccgcctcccgcgccgcggctgtcagccccgcgccccgcgccccgcgcccgcgccgccggctcggggggcgcacagggctaaagggcccggatgtgtgcggtcgcctgtcgctcgcgcccgccccctccccgccgcgcggcacatgcacttgctgcgccgcagcccccgcccggctccgctaatttctattttgacagtaactgtggcgagtgggcggcgcggcggggggcgcccgggactggcggaggctgcgggcgggagtcaggacccgacgcggaggcggagtgggggggccgggcaccgccaccaaccgctcggggctccgcgtcttttctctttctttccttttttctctctgcctcctccaggatttaaagggacagccccggcagaggcgagggggccaggcggccgccgtttctccggtctcctgacgccctctgcggcccggccggacccgcccgcacccccagcgcaggcttgggaccgccgggtatttttaggtccacacccgacccggggcagcggtgcggcagagatgggctctgccgacccggggcagcggtgcggcagagatgggctctgccgccccggcgcacggctatttttacagagtccgatgggggaggaaataaaacaactcggcaactgcttttctacccgaaagtcgggagcaaggagtgggggcgagaagttaagtttcccaaatgctctcggcactccagcgagcgcaccaagacgcctagccagcacctgaaaccgcaagcttgccgcaccccggggcgccgaatctcagcgggcaatcgcgctcggcggcgctgcggcccggagtccccacccctctggagccttgggccccgcactccgcaccccacacgccggggagcagccgctggccgcccgtcactccccgggtcggcctggaaggcggccttccgaagcgtccaatcaccgcgcaacaatgccaacgggcgggcccggggagggcttgtccccgccccgtcccgccgggccccgccccctcggagtctgtcggggcaggagaatctcgctgggacgccgagtgctcagcggtgctggaagccacgaagggccagtgcgaggggaggaggaagggtcctggccctggagagggcgtgagcgttctcgggcgaggcgacacttgggcagatgttccctccagctacgggc

SEQ ID NO: 225648 - DNA, 660 bp, Homo sapiens
  chr18:46065843-46066503
  hyper
ccagcggggtgtccgcacccatctaccatcccctcctccccctcggtggggaactgcactccacagtgtcgccccctccctgggtttgtcccattccctgccgggttccccgccccgcggggtgtcgtggccctggagctccggcgccaaggggggctcttgggggacgcacggctggagcccggctcgctttggagctgcgcggtgtagccgctgtcatgtgccgggttccgacctgggaggaggaaaagagcgagcgcgattcctctcccttttgttttgaagcccgcatttgctgcatcgagcagttggtttagtatcagccaaacttgcagctgttcagaccgcgctccgccgaggtagggagcccgtctcggggtggcgtttgggggccgggggctgcggcactcggggctgcgggagggaccccgagagtgtgtcgccacgccgcccctcccttccccggtgactgattgtgtctgtggcagcgggcgtgtgtgagtgtgcgcgcccgtccccgcgggctcggggatgtctgtggatggctgtcgtctagacagggcgcagccccctccctgcgtccccggtgagcccgcgggccgcggggggagcgggggatgggagcagaggaagaaaccaaatcggtggacccgttgcggt

SEQ ID NO: 225649 - DNA, 743 bp, Homo sapiens
  chr18:46067174-46067917
  hyper
ccgccagccccctccttgtctaagtcggggtcgtgtgtccccgcgcgcgcgcgcccgagttacttggagaggggaccgtgcggctgtgggccggggaagaccgtagggtcgcgtgtgctggtcttcggtgcaggagtcccaggtccgctgtgcggccggagtcacacagcccctccctccgcgtccgcgacgccccgtgacccggcagactgggggtccacccggcggcgcggggggttggtttggctgcgccgcccccagtccacgctggggtgaccccgcaccgaggcgttctatgggtgtgcgtgcccgcgctcgccgccgctgccttcgcagaccggggagagagtcagcgactgccaaccgcagccccggctcttcagtctggggacagtgggagcccaagcccagcgcgccccagcccggcccaggccgccgcccgcccggcgctgtgtctctgcggcccgaggattatcccccagtccaggggcccgcgcgaccaaggaggaagccgctggagccgccggctcggccgcggctagagcctccgtagggcgaaagtgacacagcgcgagagagcgccgccgctgctggagccagggccgagaggaaggagccgcccagagcgcagggaggggccgccggctgtccgttcccagttcctcctgcccagggcccgatctgggctgaaaacctcaggaatccaggctcctagcaggctcgggctgcgcgaggagatggcc

SEQ ID NO: 225650 - DNA, 104 bp, Homo sapiens; identical to SEQ ID NO: 204986
  chr18:46501913-46502017
  hyper

SEQ ID NO: 225651 - DNA, 398 bp, Homo sapiens
  chr18:46502672-46503070
  hyper
ccgagcgagacccgggccgggcgcggctcgggccgcacagccgcggcggcggctgcagacctgtaaaccttaatgacagcaatcttgcccgtctgcgcctctgactcacgtggtgacccagcctccagtcacccggcggccgccctccggcctcagtttcccccgccgccgaacaatgaagccactgtgtcgccgttcatttctgagcgccgtttcacacgcggagcgccgccgcctccctggggaagggaccgaggcgtccggcttttaattatccccggtgggcgggcgtggggaggccgcgctctgctggataattgaaccctgggactattccctcgtcagcccaagctctttatcttaagccgtcctttcctcttcatcgtatttaaatttta

SEQ ID NO: 225652 - DNA, 420 bp, Homo sapiens
  chr18:47721200-47721620
  hyper
ctgccccgcggctctcagtccgcggctggcccgcctggcgccatgttcccgggctggcctggagtttctcgatcttctcgctcttctccgacctgccccgccggcttcccgcaggcgccgcggccggctcgctcccggcggcgcgacctttactcccgccgcggcggcgcagctacggccggacaggagttgcgagcgccgggggaggaggccgcgccgcaccactcccctcccaggtgtggggaggaggcgagggccggcgaggagggaggacccgctcgcgtcagagcggacggcccgtgcgccgccgcgcctctgagccctgccggtgcccggcccgacgcgccctcccgcgcccccgctgccacctgggcctccgggccgggggcggggcgctcagagaggagctccgggaccggc

SEQ ID NO: 225653 - DNA, 240 bp, Homo sapiens
  chr18:47792665-47792905
  hyper
gagaaagctgtagggtctggcagacatatcctgtgcttaccacgatcaccactttgggggtggggcccttaacctcccgctgtacggtgccaaaccgctggctgtacattttcgagtccccttcgggacgggggcggcgtccgccgcgtttcccccaaccgtggcgacctgcgggacccgcttccgcgacgcagaagtctggttgccatggtgcgcctcgcgggattaggggccggtaga

SEQ ID NO: 225654 - DNA, 221 bp, Homo sapiens
  chr18:47813482-47813703
  hyper
tggcgaccctccatcgtggcgcctcacagaccccgcgtaactcactgcggacttcccatcgcggttctccacgcacccctccctgtttatctcatagacccacctggcacccgcacccacccccagtcgcggctgtccacggatacccggacacggactcctcgtcacggctcactacagaccactcaatgtgactccttacaacccgcttatccctctgc

SEQ ID NO: 225655 - DNA, 159 bp, Homo sapiens
  chr18:48494273-48494432
  hyper
cctcgcggcccggggggagcccggaagcgcgcccagagccaggtcccgcgcgggcgccaccgagcgcggacctccctcgcatcctagagcggccgcgcgggacccggccggcggcgcacttccgcccgggcgcattgtagccccgcggacagctgggcc

SEQ ID NO: 225656 - DNA, 1080 bp, Homo sapiens
  chr18:53254870-53255950
  hyper
aaagtagctatcaagaaattaaagatgagcgtctctggagtgaaaacacgtccaaagggggaggggtggggtgacagggttggggggagcggagtggagggtcgggtcctctaattgtccagcaccctaatttgtgaaagaaaggggttataaaaattaaagtcaggcccctggcaaagtcctcggtccctccgagggggcatcaaggggaggggcgggggggctggcggcgagggggagggaagcggcgggaggggaaggggtgtctcttctgggagcgccgggcgccgggagcccgcggcgcgggaggcgcggagccgcgtgcggggccgccgagcccgaaccccgcgccgccgggcgcctccgccccgccgagccccgcaggcgccggtacctaccgcccgcgcgcgagaaggggctctccgtgcaccgccggcgccgaggcggcgttcatgtctaaccgccgccgccaccgccgccgcctgctcctgcgcccgctcccgcgcctgctgcctccccgccgccgccgccgccgccgccactacagatccgcagacacacagccaagatccctgactcttaacaccaactctcttctccggggaggggaggggacggagggaaggggggagggggaaacacgccgaggcgcacggaattgcaagttcagcaaagaaatgggtgggggggctccggcggggagacgcgacttgctccgggtcgggcaggctaggatgcatccccctcgcacccaccccgaggggaaaaaaaaaaaatctcaacacctcccccgcctcgccaaaaaatacaaacgaaaattcatcgagcacctcatttttcctcagatcgtcagttacaatctgaagcctgaacagttcagtttttgcccgttgcatccctcggaggcactttgaaatttattcgagtttacatcccctcacttctttctttctcttactctcgttccctctcactcacacatccacacacggcaaagcaagtttatactaggctgcaaatacacgtgatgcaaaaagactttgccaagaggaacaatatttttctttttcgtctataaat

SEQ ID NO: 225657 - DNA, 398 bp, Homo sapiens
  chr18:53256998-53257396
  hyper
cattgtaatccattcacatccgggaactgcgggcttataaagagaaggagctgcggccgcggctgctcctccagacaatgactgggaaggggcggggcgggagcaggcgaccatagagtggtaaacagagcgcctagagaggcggccaagatggcggtgctggtcgaccacgcctcctccgggagcggaggcgggtggctgttctcgggtaggcgtcgcgcgtggggcggcactgtgggagttcccgaggccgaggtcgttcgcaggccccatttccctgcgctcttattcgtgttgccgcttcttggccgtccttgctctttgacacaaaagtgtagtttcggcacaaatttacaaattaaactccacagacttccgcagggaagtgagataccccc

SEQ ID NO: 225658 - DNA, 40 bp, Homo sapiens; identical to SEQ ID NO: 205004
  chr18:53257761-53257801
  hyper

SEQ ID NO: 225659 - DNA, 447 bp, Homo sapiens
  chr18:56888290-56888737
  hyper
ctctttccagccagcaggctctgagcttggggaatctcgcctgctctccaagctcatcccgatctctctgcccctctgagctccgctctttctccgcccttcttgacccacgacttcgccctttcccctcgctcctttcccattccctctgcaacaggtcctgctctctaggcaccggcttggaggctccctcgccatggcccctagaacccaggcggagaggacggccgcgctgcgggtgcggagggcgcctgcgggtggggtcaggattccgccctgcgcgcactcgctgctttcgctcagctgggaggcaggaagcgcctggcagcctcggctcacccagcatcaccccagggctctcggcgtcgccgagcatagcttccagcaaacgcagagcgtccaacttcctcactcccccacctacccgccccacaaaagccaactaca

SEQ ID NO: 225660 - DNA, 880 bp, Homo sapiens
  chr18:56936005-56936885
  hyper
aggtccgcgaagtgcgttgaggcggccagagggcctctcctcaggcctgaaagtcgcccttctccccgtgcatcgggagcaggcgcgtggccctgaactatgcttggcgggtggctgcaggcgacagggaaagaggggccgagctggggaggggggttgtccctgggagagaggatgcgggtacggtgcggtcggcccggggtcggatcccaagacgttccccagtgcccctagagggcctgccacggcttcccgatggcctggatgtgctccttggctttcagacgcagcgccgcgatgctgctgttgcgcgggtccgcctcgtccagcgggaacttgtccccgaagccgggcccgcacgggtaggagggcggcggcggcgcgagaggttgcaggccggggcccaacggcggggagttcaggaagggcggaggcggcggcggtggcgtgtagctggcaggcaggctctgcgccggcggcccgaagcccggcaggctctgcagcgccgtggcgcccccgcccggcagcggcggcccgagccaggactccagcggcagcgcgcccccagccggcccgccaccgctgcccgggcccgccccgaggggcgacagcgtcgcggagggcggggagcggctgaaggagaggaggggcgagtcctgcagcttcatggaggacacttccagcttctcctgccgccgccacttagcccgtcggttctggaaccacacctgcaggagagagcacaggggccgtcgggcagcagcggaggctgcggccgcgtccccaaccctgagccggttcagctcggcgggctccactccgtccccctcaaataaaactaggggcgcaactgttatgcatgtgccgagagaggcccgga

SEQ ID NO: 225661 - DNA, 1140 bp, Homo sapiens
  chr18:57363792-57364932
  hyper
tacagcgccgcctccccagccagccccggtgcgcagtggcgaacagcccgcagagcccccaggcttacctgtagcatgtggtgagctcgcctgaagacttcagacacgggtatttagtcgtcgcgattttgctctctgagcagatttctctatgaaaaagtgcagaggaaatgttcgattctcagcgggagagcggaggcgggcagcgcgcgctggggaatccctggcgcgtggggatcgccaggctccccgtcccggcgctctgggcaggggctggtccccaaacgcgtacgcggggcagactccggccacagggacgagccacgcgagggtcacgacgaagcgaaccagctccaggagaaaggaagcggggttcacgagctgtgccagccagtgtggcacccggggggaggcaggaacgcggggcgaagggtatccctgacgcgacccacggatggcagggcgcaaaggctgatacccgggagcggagggaagtgtcgcccaggacagctgagcactctccttatccccggagaagtgagggcgtgcggatcgctgtgggagtgggcgccggggaggaccgcccgcaccccgcgagccgggcgcgcatcaagcaggagctcgccctccgctggggcttgcagcgcttacctgtcgccgtcctccggctcctctctgtaggtccacgtgtgtcccaacgccaggagcagcagcagcggacccaggctcctgcccagctggcccctggcagctcctccccggctcggaggcggcggcaccatcagggaagctcccggcttcttcccagcgccgagctccgtccggaccaagcgtcctgctcctccgcggccgccgccgccttccctcttcccggcagggggcgccggagagcaggggcgtttgcaccacctgcacggggagcaggggtccggaatattatggggctggggggaaaatgaggctaggagttggggtatcggatgcaaacccagcagagaagcaggtaaagggggtacctgcggtgtccggctggcgcgagggccctgaggttcaagttgtctcgtcgggacgttcacgtccgattgacagacttgctggactcggcttggggctgcgccctcgcctcttccctctccctcc

SEQ ID NO: 225662 - DNA, 240 bp, Homo sapiens
  chr18:59001251-59001491
  hyper
agaaggggttggaaatgggctgccgggactgggggagctgctctctggaagcagggaagctggggcgcaccggggcaggtggaggacgtggcgcgctgggagcggggactgcgcgcgcctggggatggtgactggggatccaggagcgcggcttgtgggggcgcttggcacggcttcaccctcgctggccccgcaggcggtggcgcctccctccgcctgcagaggggacagggtggccgc

SEQ ID NO: 225663 - DNA, 39 bp, Homo sapiens; identical to SEQ ID NO: 205026
  chr18:59992691-59992730
  hyper

SEQ ID NO: 225664 - DNA, 2149 bp, Homo sapiens
  chr18:60189547-60191696
  hyper
cggccggccgggtcccgctgcgcacctcccggccgcgcgtccccacctgcgcacggtgcctccagcctgggcgtgggcgcggcccgggatcgcggcgccggggccgcaaaccggggccgcaaaccagcgccgccacccgcgtccggacccagtcccctgtgagcgacacctggcaaagtttcacaaggtgggagacagcccaccgccggctttcaggaagtgcactgggcggtgaggactcgaacgagctcgtcccggggctggcgcactcacttcggagaaacccctgctcccgggacgcgttcactccggccgcgcaggcagcccgggcaccactggcggaggcggggcggcagctggcaagcagaggagaatcaggagtccaaagccgggccagggccctcaggaaaggtgagagcggccgcgtccctccgctcacgtgggcctcgcacgctcctcaccgctcccgggctaccctcacgccgccccacggccccagcccgcgtcctcctcctgccgagcaccagcctttaggaccgcacggaagccgccgagagggaggcggccggccagcagttgggcgtggcttcctggagaaaggcggccccccagggggcggggagagcgacgtcaccgtcgattcgcggtgctgattggcggaggtgaggtgcgcggagcccgcaagcttctccgcccggcccggctgctccacctcctcacccagccgctccgtcctcaccggctcgcgagggaacagctcaggcaccgccgccccggctcagcgcggacggcggagagagggaggcggaaggaggacaccctcgctcgcttgctcccacccgcacccgggctcccagaaccggcgaggagcccagggggaggagccgtcgcgggcacgccccgcccccagcccgggaagacgacgccagcgaccccgccggccggccaccgcccccctcgccggccgagacccgcccccggccccggccctcccccggcggcatggaggggccccgctcctgacggccgcgccgccgcctcggcccgtgctccacctcgcggcccctcccgcccgcccccgctcgcatgtctgcgccgccctagccgaggatgctgaggatgaagctgccgctgaagccaacgcaccccgcggagccgccgcccgaggcggaggagcccgaggcggacgcgcggccgggcgcgaaggcgccttcgcgccgccgccgcgactgccgccccccgccgccgccgccgccgcccgcgggcccgtcgcggggccctctgccgccgccgccgccgccccggggactcgggccgcctgttgctggtggagcggcggcgggggcgggtatgccgggcggcggcggggggccctcggcggcgctgcgcgagcaggagcgggtatacgagtggttcgggctggtgctgggctcggcgcagcgcctggagttcatgtgcgggctgctggacctgtgcaacccgctggagctgcgcttccttggctcgtgcctggaggacctggcgcgcaaggactaccactacctgcgcgactcggaggccaaggccaacggcctctcggacccggggccgctggccgacttccgagagcccgcggtgcgctcgcgcctcatcgtctacctggcgctgctgggctcggagaaccgggaggccgctggccgtctgcaccgcctgctaccccaggtggactcggtgctcaaaagcctgcgcgcggcccggggcgagggctcgcggggcggcgcggaggacgagcgcggcgaggacggcgacggcgagcaggacgccgagaaggacggctcaggcccggaaggcggcattgtggagccccgggtcggcggcgggcttggctccagggcccaggaggaactgctgctgctcttcaccatggcctcgctgcacccggctttctccttccaccagcgggtcaccctgagggaacacttggagaggctccgcgccgcgctccgcgggggccccgaggacgcggaggtggaggtagagccgtgcaagtttgccggccccagggcccaggtaaggcgcacggagcctccctggactcgcggtgcgatcgctgccccggcggcctccccggcctcgctctcggacgccccttgcccgagccccagcccgg

SEQ ID NO: 225665 - DNA, 95 bp, Homo sapiens
  chr18:60191979-60192074
  hyper
tgtgtgagagccagccgcagtgagccccaggcagcgccgtccttccccgcctgcctggccggggctccgcctcccgtctccgggctctgccgggc

SEQ ID NO: 225666 - DNA, 97 bp, Homo sapiens; identical to SEQ ID NO: 205029
  chr18:60194122-60194219
  hyper

SEQ ID NO: 225667 - DNA, 501 bp, Homo sapiens
  chr18:60263493-60263994
  hyper
gctctgggcgggttcgcgttcagatcctcgaagtggctccctccgggacctcgctggctttcctgttcccgacccctcggccaagccgtgcgaccgggtgggctctgcttccccgggaccccactctgaccccatcccctaagccgctcccgcgagcacctcagctccgctcccgcgcgggtcagcaattcgaagtccgccccagacccctgggccttcgggcgcccccggaagccgcagggactgtcggactgagcggcccccttgcttgggtgggagctggggtgcagagaggggctgttctcgcacccttccgctgcatcggtccccgggccagtgcggagactcctctttgcgtttccaaatcacttttacgaacaaaagaggcgcccagaggatatcaccccgggcgcaccgccctccaggggtgtttgaaacgtgagctgttgtcaggcccagggccaaggatgctaaatgtccgggaaaatgcgcgcggcagcc

SEQ ID NO: 225668 - DNA, 157 bp, Homo sapiens
  chr18:60264043-60264200
  hyper
agaggaagatccagccgccgagcgcagcgcgcacggagcgggacgcctgcggcgatgcctgcccgggtggccgctgtcctctgcccgggcgccgctggagccgcgcgtccccatcgccgcgccggctagtcccacaggtgcccggagagggaggcac

SEQ ID NO: 225669 - DNA, 1435 bp, Homo sapiens; identical to SEQ ID NO: 205030
  chr18:60382939-60384374
  hyper

SEQ ID NO: 225670 - DNA, 335 bp, Homo sapiens
  chr18:63417370-63417705
  hyper
agggtcctctgtcccgcactgcgagtaaatcatacactttggaagtttagcattagagagcccagcaggggagaaaattgtctgcaagttaaaaaaaaaaaaaaaaaaaaagtagaactagggcagtccgaggagattgaaagggcaaaactatcaagcaagaaaactgtaagttctgattagttttatgactttgccttcatgcctcaggagctcaactgatcacggctttcacgacaggctaaggtgggtgttggaggggcagcttgaaaataccctcaaaactctcctccagctccgtgctttcagatgcaaatgcctcacggagagatgga

SEQ ID NO: 225671 - DNA, 180 bp, Homo sapiens
  chr18:63417751-63417931
  hyper
cgaaggaatccatctgtacagatccgccaggcgggaggtggaggagggtgcgcgagggtgcgcgcgtgtgtgtgtgcgcgcgtggcggccgagcggctccgtcttcgcgttcttttccagtagcccccaccgggtctctgggaggcgccgaagtctcagtggctccctgggccggcctcc

SEQ ID NO: 225672 - DNA, 480 bp, Homo sapiens
  chr18:67067604-67068084
  hyper
tgtctctaggctgcgggaggattagacacatgcgcacgattggtctctttgtgtgcaccaggaagggtctggcgtcgatttacacttcctaacggggcagagacctggaacggccgcgagtgcttgggaataaaaatgtactgtaaacaaggccaatgaaataagtgtctcgctcccgctggccttccgcgttggaagtgtccccactgccctttccccgctgcacagcttgcgagtggagatttagagcccgggaatgaggcgccgtgtccttaggaatctcgcgcccggggagcgctgagggaccggggagccgggtggggagcgggcctcggggcgcccggcggcggaggcgctcccacccgcgcggagagggatggagcgcgtcttgcgagcgtctccgagcccagccaccccacgggccagggggagggagcggggccggcgcatcagcccgccccccccggcccgccccctccc

SEQ ID NO: 225673 - DNA, 540 bp, Homo sapiens
  chr18:67068138-67068678
  hyper
aggcgccagcccgtgggtgctgccgggggcggcggcgcggtgggggctcccgcagctggcggaggcgcgggccgcggcgctgggctcgcggcggggagcgaaggtgagcgccagaacgcggagggctggcgcggctcgcggcgccgggccccgttccccgtccgcggcggccctgcaggcgaccccgcgtccccaccggcgggagctcggggaagagcgggcggcggcgctgctgctggcggcggccggctggatgcgagacccgcgcagacccggcggcggacggcggctctcgactccggagagcggatcgcggggcgcaggagcccgatcgcgctggccatggcctccaactttaacgacatagtcaagcagggctacgtgaaaatccgcagcaggaagcttggggtgagtggctcgctcggcttgctccttccccggcgctcgttcggcccggctggctgcctggggggggggcagggagaggtgacccgtgcgggtacagggcagagagggacccggcccttaggcggatggccc

SEQ ID NO: 225674 - DNA, 180 bp, Homo sapiens
  chr18:67068988-67069168
  hyper
cgaaattcccgtctgatgccctcccagcgccgcgcgtccctgccggctgtagtttagggcgccttcgccgtggccgagggcggctcccgcgccccgcaagtgctcccctacccggggacccgcgcccgcgtgcaggcaggtgtgtgccccgcgcccgcccgcggtcactgctccgtgacg

SEQ ID NO: 225675 - DNA, 105 bp, Homo sapiens
  chr18:67955841-67955946
  hyper
acgaggagactttcctttccgcgttagccggggccacccccgccagagggaaagcaccaaaggaaaaaccaggacagggactctgggggccggaggagcggcctc

SEQ ID NO: 225676 - DNA, 353 bp, Homo sapiens; identical to SEQ ID NO: 205037
  chr18:67956670-67957023
  hyper

SEQ ID NO: 225677 - DNA, 307 bp, Homo sapiens
  chr18:70535426-70535733
  hyper
aggctgcgcgcggccggcgccccggggctggtgcgcggcagaatggggccgcggcggcggcagcaaggacatcccagccgcgcggatctgggggaggggcggggagggggtgaggacccggctgggatccgcggctcggcccgccagggcgcagagagaggatgcagccgcaaatcccgagccggatcctcgtgccggacggaaggcgtggaagcgggaggggccttcgtgtgaaaatcccttgtggggtttggtgtttcactttttaaaggttagaccttgcgggctctctgcctcccaccccttc

SEQ ID NO: 225678 - DNA, 540 bp, Homo sapiens
  chr18:70535760-70536300
  hyper
gccccctctccctccctccctggggcgcaggtttcgccgcggactccgcgctcagcttgggagacacggcaggggcgcgccccagggaaaggcggccgtaaaagtttcgcggttgagcactgggcctgatgtccagtccccccaccaaattactcctgcaaagacgcgggcttcttgcaattgagccccccacctcgaggtatttaaaaccaccccaaggcacacacggacccccgttcccccgcgccacttcctcctacaggctcgcgcggcgcgttaaagtctgggagacacgagttgcggggaaacagcaccggaagagcccgggcttgtaaaatgcgaatcaatgaatacgaaataagggcaaccgcgaggcagcgccgggaagggctggagcgcgcgggggtgcagggagtccctccctgggcgccgcaacggcacctcctccctttcccggctccgtcccgccctccctcggcctctgcggacgcgacccacgcagaccacagccgagcccgccggaccccgggactacggaag

SEQ ID NO: 225679 - DNA, 360 bp, Homo sapiens
  chr18:70536480-70536840
  hyper
aaagggccatgagaagagtctggcgagcgctcgaggccggggggctgcctcccggctctggcccggcctccgcttcccggcacctgctgctggggcgcccacgtgcgcgcggggctgcgcggggcgttgggtgctcgtcgcagtcctgcccacgcctagcgcagcggctgtgagtgggtggaggtctcctgccagtaagttgggatgagggacgatgaggtgacccccaagtctggaagggattcagagtctcacacgcgcccccaagcctcctaccaccacaccaaagtgctggttcctcgatttccagggtggggtaaagtgaccgagcaaaggggatggtgtgtttgtgtgtgcgcg

SEQ ID NO: 225680 - DNA, 105 bp, Homo sapiens
  chr18:71958562-71958667
  hyper
gccgccgcgcagggcgctcccaggtgtgcacgcgcaggtgtacggattcggggagcgctcccaggtgtacacgcgcaggtgtgcggactcagggagcgctcccca

SEQ ID NO: 225681 - DNA, 417 bp, Homo sapiens
  chr18:72123592-72124009
  hyper
ggagctgctgggtgcgagctttcgggccctcccaggttaggaggcgcctgtcgaggaccgggacccgggatcctcccggtcccagccgcctccgcagcgctctctgctcgcccgagcgcacactgcgtcggttcccacagaccgcgaccgcggagagcctgggctctggagcgcaggggggccggggtcagaccagccctccgcatgggctcggtgagatagggggtgacctggcagctcagggtggaatcacagaacgcgggctgggctggagcgctgcggacccgagagacagaggcgtggcaccccggatcccgaaccccgcactggcttgcgccccgagcccggcggcctgacaccggacgcggcacctccctggacactcggatcagacccgcaaactttcttccggagctc

SEQ ID NO: 225682 - DNA, 105 bp, Homo sapiens
  chr18:72921091-72921196
  hyper
tctgctcggctagggcgggcgggtccgcccctcctccggccggcgccctccccctggctccccccttccccgcgtcgcccgctcccgctccccccgcctccccgg

SEQ ID NO: 225683 - DNA, 828 bp, Homo sapiens
  chr18:74844288-74845116
  hyper
gtcagggaggccgccggctgctacctgctcggccacctgctccgctgcctaggttctccctgcgcgtccccagccaagaaagggacccggagtccgggcgtcgggatagctcctgtccccgatcttgcgcccccggctcccgcggggctccggtccggggtcccgcccaggtctccgcggtccccactcggaggggcacagagacaaaggcggcagagcagcccgcccgtccccgagggtcacccaccggcgctgcgctcgttgctccgaggccgaggggcgccgcggggtccaaggccctgctccgcctgcccaggcccgggcaggctggtctcggcttcaagcgcccacgcgcggggtccccgggcagcctgcttcgccttccggggtcgggagacaggggccgccggggccggaggctgcttctctctggcgcgcggcggcggtgactgacggcggcggctccgagggacgggcgcgcacccagctccccggccccgcctccccgggcttcctgcgagccaggtaaacacaggccgatcccgccgggcccgccccacctggacgcggccgccggcgccgccccgggagctcggaggaccccgggcccgctctgcccacgcggaacttggggggcgcacggggcccacgcgcagggtcagacctcggaggggcggcctggagcctcgcccgctgccgaactgggctccgaactgcggcccgtcgacccttcccgttcggaggcttggcctccgaacccaccccgaccccgacctcgacctcgcgggaggggtgccaggccgcatctccccgcgtcctcaggggctg

SEQ ID NO: 225684 - DNA, 240 bp, Homo sapiens
  chr18:74961590-74961830
  hyper
tggaacgccctggagcgcgcccggcttccctcgcccgcctggcccgcggcatccggcagccccgccttcagcccgccgggcaggtccgcactccgcagaggcgagcgcgctccggttccagccgggaggtgggcggcgacccatcccgctagaatccgtccagtctctgctcgcgcaccgtgacttctaaggggcgcggatttcagccgagctgttttcgcctctcagttgcagcagaga

SEQ ID NO: 225685 - DNA, 780 bp, Homo sapiens
  chr18:74961896-74962676
  hyper
actcggaatccctggaaaagccgggagggagtcggaggcgccagcccactggggaggtggcgctgggcgcgcgggatgcgcggggagccttctctgcaggagccgcacagtgcactgctgcgcgctgggcagtgcggggaagcgccgcgggaaggagcggctccgagcaacaggtgcagcacgcagcccctccgggagccagggaaaaccgccggcgaagatctggagcggtaaggcggagagaagggtctttccacctgcgcggctgcagccggcggatccctcttcccaggctccgtggtcgcgcagcgggcggaggcgcccgggaaggggaccccagtgctctcgagatcaccgtcccttcccgagaaggtccagctccgggctcccgaacccaccctctctcagaaggtcccggcgcaaagacggtgccaccaggcacggccaccggatccccgctcccgctggctcgcgcctcgggggaagctcagactcctaaactcgcactctccgtgctttgcgccgggacccctggccacccccggcgcctactatcccgccctccctccccgcgcgccccgccgctcgccgggacagccccgcgggccatggagctggcggtcgggaacctcagcgagggcaacgcgagctggccggagccccccgccccggagcccgggccgctgttcggcatcggcgtggagaacttcgtcacgctggtggtgttcggcctgatcttcgcgctgggtgtgctgggcaacagcctagtgatcaccgtgc

SEQ ID NO: 225686 - DNA, 450 bp, Homo sapiens
  chr18:75612005-75612455
  hyper
tcctggactctgagcaaagccgcgggccttagaccctccccagcctcaggcgagccccagtgccgacacctgctaagagacggtgcattgcgggctaaacccgcagacactgagcggggacgccacttccgacggcgtaaggcacctaaagtagccacagaggaaactgggggtgcaggagctgcaggagccccggcggcctgcaggggcggtggcgcggcgctgggcgcgcggccgctagatggcagcgcagccccggcccggcccgcgggaggcggccacgcgcgggggacgcggggcgcggcgcgctgagcgcgggtgccgaggctggagggcgcggccgggctcccgagtcctccctccgcggcatccttgtctccaccctcaaatgtcctgcaagccaggagcctccgtaggaaccgctgcatttttattttcctctaaatttca

SEQ ID NO: 225687 - DNA, 277 bp, Homo sapiens
  chr18:77159885-77160162
  hyper
ggggctccgcagggcgcgcacgtggcgctcgggggtcaccgttgcagccgctttcccgaggaggcccggattgaaaacttctttaaaaaaaaaacttaaaaaaaaaattccgtcgccctgggcgcagccttaggtacctggtgccgctcgtggggtcccgacgcccctacccccgggtccggaggagcctgcgccgggccgggacccccagggcacaagaggccgggggacccctgcggtcgcgcgcgcgcgagggggcgggggcgggggggacacg

SEQ ID NO: 225688 - DNA, 385 bp, Homo sapiens
  chr18:77193399-77193784
  hyper
gtggccacaggtcacgatgagtaagcactgcattgacacaggcttctccatctccatgtcaggacgtgcactcgccgatgaagtgtccacccaagatggcgacgggtgagcacgggcacgtgtggcccgggcgaggtctgtgtggtgctgaacgcctcctctgctctgttcccttccagcccgaccctgcccgccctggactggcagctgccgtcccactcaggcccgtatgagcttcggattgaggtgcagcccaagtcccaccaccgagcccactacgagacggagggcagccggggggccgtgaaggcgtcggccggaggacaccccatcgtgcaggtaggcactgcggccagactcgcacgtcacttggtgcttttgtggt

SEQ ID NO: 225689 - DNA, 587 bp, Homo sapiens
  chr18:77547934-77548521
  hyper
cggggtccgcgccgcggggcgggcgcttccccggacccgggggaggcgggacgcaggcgaaggccgccccgggagagcggggtcccgggagagcggggtcccggctgtgggggacgcgggccgaggctgtcgcgaagccgctgacggccgaggcgctcccggttttcgcggcgcacaagggttgcccgagcgctcagagcaggggccgccacgcgggcgcccggtccaacccgcggcctcccgggtccctcctagcggggccgcagacgcccgcgagccgcgtccccggagcgcagaagatccccgcgcacagcgcaggccccgccggcccggtggacccgcttgaggacgcggagggggcgcgtttcctctgcggcgcccgcacggcctctgcccgcctgtcccgcgctcccgcccggcaggcccagctcggacgaggctcagctgccgcccccgttgcctttgtgggtttttctgcggaagccccttttcctcgggtggatgggaccctgcgcgtggaaccccgcacagcccccgctccgccgcgggccgcaggacccattccttctccacggtggcgctgggga

SEQ ID NO: 225690 - DNA, 1440 bp, Homo sapiens
  chr18:77557781-77559221
  hyper
gtgctccctccgagtggacttggccccggctccaaacccagccgagggtcggctcgctcctggggacccgcggatgtcgcgagggggcgccgcgccactgaaggctgggacgggggcggtgcgcggggcggcgccggagtccgggatgccggctccagagacgccgcgctccgccccgaggaggccgccggccgggtaagcggagcccggagctcgcggagtctggaccgcaggtaaagttgagcgcgccgtggggccgggggtggggggtccgcggcgaaggagccggggccgcagtgggcggtggggcggggggcgcgggctcctgtctgatggttccgcgcgcagcttcttctccgggtgcgcggtgcgcgcgggcgcgggagggtcgaaggggaccttggaatccccctgttcgggccaagggggcgggggcggctcggggccgggcggggctggtgcctccccctcccgctcagcgcccagagtccgggagtcgaggggggcgtcgggccggaggcgctcgccggtctggccgcgccgcgcgcgtggatggaggtctcggccgcggatcgccccgtctattcgcgctggtcctgcgggagcccgggtgagccgaaggcgaggaaggggcgcgggtctcgggaaaacccgactctcccggcgcccgccccggttcggttgggggcgcacccggctcgcgcggagagcgggcggggtgtgggcgaatgctcggcgcgctgcgcctttcccggtcccccttctccccggagatgaacgccccactcccgctcggacacacggccgcacccctactctgcctcctccgaccagccggggcgcggcccgaattgggggagagaagacccagctcccgcagccgcgaattctgcaaacccggagcccatgcgccccgtcctccggcccggggagctcccagccttgcccgccgagcgcagcccgggtccggactgtggtcactggggacgagaagggtccctcctgcggggctcccgggttcggatggacggagggggcgtccggcaggtgaactgggcccgctccgcgtcccgaacgttcccctaaacccacaagtcccggagaccctggggcattctgcgatttcggagtgaccggtggagcccccgcccgcgcgcctggctcccggggtctccccacacagcaggggctgcggggaccccctctgtcacctcctccaaagggtctgggagcaattcgacctgcctggagaattccaggaagtcctttccctgcgggagcctcatgggtccccccttctctgcctgcagagacctctggcttccgcgtgcgctcaaagtgagcgccgggcagattgtaaataatggattttgacccagctgggagatctcagagtgattaagtggagaggctgttccaccctcagccctgcccaggcag

SEQ ID NO: 225691 - DNA, 158 bp, Homo sapiens; identical to SEQ ID NO: 205049
  chr18:77710773-77710931
  hyper

SEQ ID NO: 225692 - DNA, 35 bp, Homo sapiens
  chr18:77712073-77712108
  hyper
cggggtctcgggaaacggagcgccccccgcgggtc

SEQ ID NO: 225693 - DNA, 135 bp, Homo sapiens
  chr18:77794468-77794603
  hyper
gctcgctccgggtcccggcgccgcgccatgtgggctgcggcgggcgggctgtggcgctcccgcgcgggtctccgggccctgttccgtagccgcgatgctgcgctatttccaggctgcgagcggggacttcactgc

SEQ ID NO: 225694 - DNA, 31 bp, Homo sapiens; identical to SEQ ID NO: 205051
  chr18:77867028-77867059
  hyper

SEQ ID NO: 225695 - DNA, 41 bp, Homo sapiens; identical to SEQ ID NO: 205062
  chr19:507106-507147
  hyper

SEQ ID NO: 225696 - DNA, 464 bp, Homo sapiens
  chr19:603555-604019
  hyper
cttcaccatgctgctgttcatggtgggaaacctcatcatcatcccagtgggcatcaccttcttcaaggatgagaccactgccccgtggatcgtgttcaacgtggtctcggacaccttcttcctcatggacctggtgttgaacttccgcaccggcattgtgatcgaggacaacacggagatcatcctggaccccgagaagatcaagaagaagtatctgcgcacgtggttcgtggtggacttcgtgtcctccatccccgtggactacatcttccttatcgtggagaagggcattgactccgaggtctacaagacggcacgcgccctgcgcatcgtgcgcttcaccaagatcctcagcctcctgcggctgctgcgcctctcacgcctgatccgctacatccatcagtgggaggaggtgaggtggggcgggggcggggccaaggcagcaggggcggggctataatggt

SEQ ID NO: 225697 - DNA, 509 bp, Homo sapiens
  chr19:639660-640169
  hyper
aaacgcgcggaggccgagcgcggagtcccgcacggccgcgcccctgtgcacctggcccccgcccccgagacgtcccattggccggcgccctagcctggtcccgcccaagtggaccccgcccccgccccgaggcaccccattggccggcgtccccgccccagcgaacccggccccgcccccgaggcgccccattggccccgccgcgcgaaggcagagccgcggacgcccgggagcgacgagcgcgcagcgaaccgggtgccgggtcatgcgccgccgcctgtggctgggcctggcctggctgctgctggcgcgggcgccggacgccgcgggaaccccgagcgcgtcgcggggaccgcgcagctacccgcacctggagggcgacgtgcgctggcggcgcctcttctcctccactcacttcttcctgcgcgtggatcccggcggccgcgtgcagggcacccgctggcgccacggccaggacagtgagtgcggggcggcgggggcctggggtg

SEQ ID NO: 225698 - DNA, 179 bp, Homo sapiens
  chr19:680400-680579
  hyper
cgccacctaccgcgacgagtgcgagctgcgcgccgcgcgctgccgcggccacccggacctgagcgtcatgtaccggggccgctgccgcagtacgtgggggcgtggtctgtggaggggcggggcgggacctaccggacctgcgcgtcatgtatcgaggctgctgccgcagtaggcggggg

SEQ ID NO: 225699 - DNA, 720 bp, Homo sapiens
  chr19:813414-814134
  hyper
gttcggcgggcgcgcgcaggtgcccggggctggcgtcgtcgggcagccccaggccgcggccctccaggctcttctgcttccactcgctgatgagctgcttggagcgcgaggcgtccagcggcacgtggatggtcatgtggcggcgcgcggggtcgtccagcgagggcgcgctggccctgggcagcgtgtggctgaaggtcaccatgttctccttggccatggggctgcgcggggccagcaggtccacgtccacgctggcgcgcttcaggctgcccagcgaggtcttctcgcgggccacgggccggggcgcgccctccagccgccctgggggccccagctcgtcggtgctcaccgacttattctgctgataaaccgagtcgtggccccgctgcgtcagggcccgcagcgcgtccttggcgggggccggggccgcgggcttctctgcaggtggggcctggaagttgcccaccgcgtggcaggcctgtcggggagaggggtctgggggtgaggcctggggctcagagggctcctcccctgtgatcgttggacttgccgcggggggctctggaccgggggtgggggctggcaagctcttgtccagtgggaccggttcccaccccaaggttgctgacccagcacatcgggcaggtctgagcccacgggattctgactccagcattccaagggcgagacacttcagcacccatgccttccccctaa

SEQ ID NO: 225700 - DNA, 180 bp, Homo sapiens
  chr19:814413-814593
  hyper
catcagaacctgccactcaccaggtaggcagcgatgcccgccccgatgaggaagccggcatacacgtccacagggtggctgcggtactgcgtgatctgcgtgagcccgcatacgcccgcggcgatggcaaaggcgaagaccaggatgggcttcagcagcttggtggtgtccgagatgacc

SEQ ID NO: 225701 - DNA, 278 bp, Homo sapiens
  chr19:942303-942581
  hyper
tggggcggtggcgacatggcccccgcagctgcccggcggtggcacccaggggcgtcacccacgagggacgcttgactcaaggtcctctccactggccgccgggagccgggccgggagccgctgcggtgccgacctggtgggtggcacacggggggcgggtgcggaccgcctcttctccgctctgccggctgcacatggccagaggacaattgggggtcacagggttaaacgctgactaatctggccattgaaggcccaagcgccgggatatgcagcct

SEQ ID NO: 225702 - DNA, 105 bp, Homo sapiens
  chr19:942807-942912
  hyper
agcaagtaagaacccgccttccgggaggagccccgtctggattggatggcatcgcccaaaactcacgtccacccagaacctcaagatgggactgcatttggaaat

SEQ ID NO: 225703 - DNA, 663 bp, Homo sapiens
  chr19:1000337-1001000
  hyper
cggagcgcggagggcgcgtcggaacctggccggggccctccacccgcgccgtggtcccggtggttgcgccccgtggcgagcgacgccgacaactttgcgatggagtttgtgcgggcgctgtggctgggcctggcgctggcgctggggccggggtccgcggggggccaccctcagccgtgcggcgtcctggcgcgcctcgggggctccgtgcgcctgggcgccctcctgccccgcgcgcctctcgcccgcgcccgcgcccgcgccgccctggcccgggccgccctggcgccgcggctgccgcacaacctgagcttggagctggtggtcgccgcgccccccgcccgcgaccccgcctcgctgacccgcggcctgtgccaggcgctggtgcctccgggcgtggcggccctgctcgcctttcccgaggctcggcccgagctgctgcagctgcacttcctggcggcggccaccgagacccccgtgctcagcctgctgcggcgggaggcgcgcgcgcccctcggagccccggtacgcgggacgcccggagtcaggacgagggggacccggggcgggagcggggtcgggagccctggggacgtccggagtcaggatgggggtgccgggactacgcagggaagggggatcccgggacgctggacgggcccc

SEQ ID NO: 225704 - DNA, 162 bp, Homo sapiens
  chr19:1071620-1071782
  hyper
ccggggcctcccagcggcttcccggagctcctggagccccaatcccattcccggagtccgcctcgcatccagcagcgaagacatgttccggtccggggtctcaggcccggcggcggccagcggggtatctctggcgggtgactcggtcggtctcttcccgga

SEQ ID NO: 225705 - DNA, 365 bp, Homo sapiens
  chr19:1173036-1173401
  hyper
agggagacacccaccgtccctgccccagcaccatccgtgcccggcgtccctggaggcgctgggtgggctctccacaacgcctgccccccacgccccaggtcagtctggggattggtccctccaggccccacctgccttattcttcgggactctggggtggtgggaagagtgccctacgggggacaggacccaccaggaggcctgcgcttccccttcaccgacacacgctgctcccgggccccactcgggccatctcagcccgctaccctccctcccgcctgtccctggaagccgggtttgaatgcgacccgcactcccacccccaacacgctctgcagactccgcccagacggccccggggtcac

SEQ ID NO: 225706 - DNA, 33 bp, Homo sapiens
  chr19:1173617-1173650
  hyper
gtcaggaatcggggcggcgggagagaccggggg

SEQ ID NO: 225707 - DNA, 639 bp, Homo sapiens
  chr19:1206691-1207330
  hyper
cgcagaccctgcaccgggcttggactcgcagccgggactgacgtgtagaacaatcgtttctgttggaagaagggtttttcccttccttttggggtttttgttgccttttttttttcttttttctttgtaaaattttggagaagggaagtcggaacacaaggaaggaccgctcacccgcggactcagggctggcggcgggactccaggaccctgggtccagcatggaggtggtggacccgcagcagctgggcatgttcacggagggcgagctgatgtcggtgggtatggacacgttcatccaccgcatcgactccaccgaggtcatctaccagccgcgccgcaagcgggccaagctcatcggcaagtacctgatgggggacctgctgggggaaggctcttacggcaaggtgaaggaggtgctggactcggagacgctgtgcaggagggccgtcaagatcctcaagaagaagaagttgcgaaggatccccaacggggaggccaacgtgaagaagtaagtatggcttgctggggtcggggccgggccgggccagtcacggtgctgatggttctgtcttccttccttctctcctccctccctcccttacttcctcttaacaccctgagctggacccgtctggc

SEQ ID NO: 225708 - DNA, 105 bp, Homo sapiens
  chr19:1401653-1401758
  hyper
ggtcggggccccggccgccccctccccaaggagcctcggtgccccctctgcggagcgggcaccgcagccccgcgcccggggacgcgaacctgcaggctggggact

SEQ ID NO: 225709 - DNA, 785 bp, Homo sapiens
  chr19:1446334-1447119
  hyper
gaccaggtagggcgcgtgggtcgagccgttggggagggctccgggccgcgcaggaacggggcggggtccacaccgcgggaacagcgggcgcggcggcggggggcgcatggggcgagcgcgcggaggctgcagagtcgggggtctagtgccgtcgccgtagagaccgttgccgggaaaccgcctcggaaggctggcggggatggaagcccctctcgtgcgccgctgcgacccccagccccgggtctgcgcaagcgcagggctcgcccagcccagccctcggcctctgcaggagaccctcggacccctcctcactgcgccgacgcggaggctgcgccagctggggcggcgggggcggctgcgggggcatcctgcggaggctcggccctgcgcagggtgggggcctgggccacgccctgcgcttctttgggcctcagtttccccttctgggcgcgagcgtatggcctgctttgacgttcgccgccgctgctgttcgtatccgtccgctcccgaccccagcgcttctccagcctccggaatcgtctgaatttcgcggctgtgacatccctcattggaggggaaactgaggctggggggtgcagcggggagcccaaggtcacgcttcgaggccggagcctcgttgcggagctaaggcgcccgcaagagaacgcggggcgggggccggggagctgtccgcggtgctgacggaggcgcacgtctgccgactcgccgccggggaaactgaggcccatagcggcggtcaggcttcagggcgcggcctggaccgg

SEQ ID NO: 225710 - DNA, 475 bp, Homo sapiens
  chr19:1449908-1450383
  hyper
gaatcttggtcctcggggcacccccttccctcgggggggtttcgccccccgcactcacggcccctgagcccgcgcggaggcccgacgccccgcggccgacgccggtccccgccccgggccgccattggctgttgccatggcaccagcccgtcttcccgcgccctcattggctgtctcacccgcatccctcatcccgcatcctcccccgctcgcggtggtctcgcccagcgctaggagcggcagcgccgcctgcccaggcccggaccgggctttgtccgccccggagcccctgcccgcgccgcggagaccccggagcccgcgcgctccgaggccaccccgggccgggatttccggtggggcccgcggagccgcgcagagggaggaggccccagacccaggcgccccgccagcccagctgcacgtaagcgggtgtgtgtcctcggggaggagggcaggggcgcgacctccgcctcgc

SEQ ID NO: 225711 - DNA, 628 bp, Homo sapiens
  chr19:1467200-1467828
  hyper
tgccccgagcgcggcgggggcgccgggggcgccggcctccactttgcagggcaccggcggcgggaggaggggccggcgcccacgggttctcgccctcgcggcgccgcggaccaggagctggaactgctgcgggagtgcctgggagccgccgtgcctgcccggctgcgcaaggtggcctccgcgctggtgccaggtcgccgcgcactccccgtgcccgtctacatgttggtgcccgccccggccccggcccaggaggacgactcctgcactgactccgcggagggcacgccggtcaacttctctagcgccgcctcgctcagcgacgagacgctgcagggaccccccagggaccagcccgggggaccagcgggcaggcaaagacccaccggccgccccacctctgccagacaggccatggggcaccggcacaaggcgggaggcgccggccgcagcgcggagcagtctcggggcgcgggcaagaacagagcagggctggagctgcccctgggccggcccccgagcgcccccgcagacaaggacggctcaaagcccggccggacccgcggggacggggcgctccagtcgctgtgcctcacgacgcccactgaggaggccgtgtactgcttct

SEQ ID NO: 225712 - DNA, 219 bp, Homo sapiens
  chr19:1491116-1491335
  hyper
tcccattggtcctagcggggggccgggggcggacaccggcgcggggccggagcatcgcggctcaggctgcgggaaagcggtgcgcgtgcagcggggtgggtgccctggtccgcgggcgagctcgagcagccaaccccgggcgcgtcggggccatggacggcctgaggcagcgcgtggagcacttcctggagcaaaggaacctggtcaccgaagtgctgg

SEQ ID NO: 225713 - DNA, 183 bp, Homo sapiens; identical to SEQ ID NO: 205082
  chr19:1546217-1546400
  hyper

SEQ ID NO: 225714 - DNA, 104 bp, Homo sapiens
  chr19:1568463-1568567
  hyper
gggcacgtggtccaggccccgcctccgcccggcgctcgggcgggaacccgggcgcatccgcacgtgcgggcgctgctgcaggtgtgtgcggctcagcccctgcc

SEQ ID NO: 225715 - DNA, 906 bp, Homo sapiens
  chr19:1748599-1749505
  hyper
cgctgcagccttgctcgggtcccctagcccggcgcctccgcaaaccaacccaccgcgggccgccgagccccgctccgggatccgccggctgcctccatcccagaagagtgcgcagagaattaaatctagatatttacatgtttaatggctaaaggagcctgtcttctggcagggcagggagggcgctcaggtggtttaactcagcgccgggatcccgctcagctgcgggggccgcgaaccccgccgctgggccgacgattgggcccctccggagcgcggcgcccaacgcgggtttcgttgcgtcggggaagtccgtggcctgcagcgtccagtccccaggctgtcagccgagccctggagtggggcgttctccaggcccccaacccctgatccaggccgttcccctcccgcgcaccctccggcgggggctgcagcccgcgcccctcgccgccaagccccattttcccacagtgcaaactgcagcaaacgaactggttttctcctgagcgcacgctgcggggagacgattccaacggcgtccagtgaggaggggcccaggcctgcgagacggggcgcgttcctgtccccagacccctccggctgcgcctcaacccccagcccggctctctgacctgcatcggtcgggccgggcacagaggaggcaaagcaggcggaggccgcgagaggagagcagcctgacctcccgcctgagcccggacccttcccctcgggcaccctcggacgcccccgccccagcgtgttactttctagatggggaaactgaggcgcggccagggcgatgcggcggaagtcccgcgcccggccgtctcccgcgcctgccagacagagccccgagaagagggcatagaattccctcctctaattgtgtcccagaactctgggacg

SEQ ID NO: 225716 - DNA, 581 bp, Homo sapiens
  chr19:1749595-1750176
  hyper
tcggtgccccggcgcaaacaagcgcggtgtttgccgagcgcgaggcgggcggcgcggcccgagagcgatgaggattcgatggagccgctcgccgcggcgggggcaacggagcccgggcgggcgcggggatcgatcgggcacagctgtcgcctaagagcccgcgggagcatccacccgcgggccagagctgcccgggcgccccgcaactgcgggcaggaaatccgggacgtcgggcccgccaggggcgaaaccccaaagtcgcgacacccggggtggggaggtcaggacgtccccacggccaacgtggaaccttcgggagccgcgcgctcagcctcgccgggacccccgccaggccgtaaaagcccagagtctccccccaaatctaaataaaatccccagaccccgcccgaacgaaggcggctggagtccagagggagaactcctgccacacactaggcaccggcggccgggatttggggcgcccgcaggtttcgggggccgggagtgggagcagagcggatctagggctgcggctgggcttgggtggggcgcgcattcattgccatcgtttagtaaaacct

SEQ ID NO: 225717 - DNA, 1243 bp, Homo sapiens
  chr19:1754362-1755605
  hyper
ggctggggacaagctgctgccgcccgccgccttcgagccgcacgccgcgctgctgggacgcgcggaggacgcactggcccgcgggctgcccggaggcggcggcggcacaggcagcggcggagcgggcagcgggagcgccgcggggctgctggcgccgctgggcgggctggcggcggccggggcgcacgggccgcacgggggaggcggcggccccggcgggagcggcggcggccccagcgcgggcgcagcggccgaggagatcaacaccaaggaggtggcgcagcgcatcacggcggagctgaagcgctacagcatcccgcaggcaatcttcgcgcagcggatcctgtgtcgctctcagggcacgctctccgacctgctgcgcaaccccaagccgtggagcaagctcaaatccggccgcgagaccttccgcaggatgtggaagtggctgcaggagccagagttccagcgcatgtcggcgctgcgcttggcaggtaggagcgtggcgcgcagggccagaccctgggggcgccggctctggactcccgagcacctagcggggcggcggccgatgcccggggccagcgccccaagccccgcccgtgcgccccggcagcccgggaccccctatcaggaagctagaccgcgatccgcgccgctgcccgtttgtaccgttgccaaaagggagaaagggattgtgccgcctccccgccccccggtcgccgcttctgcccctttcgggagcgcgtaggggttctctagtccttgttagactgctgggaggctccgagcctctccccaagcagccctcagggaagctcattgtgtgtgtgcgtgtgtgtgtgtgagcgcgcgcctgttggggggagctgtgtccccgaacgagctgctgttgtcggctaaggtgccactcccctcctccagagtgggtggagaggggctgttgagcccccagccccgggccacagagctccgagacgttgcggcgggcgcctgcagctcagcagcagaggccgagcccgcgctcatccccccacctgccccagcgcgcgcttctttgtagttcggccccgcgatcgataccccctccctctcccctccggccgctggcaaaggtcacccgagaatggcgggggaggggcggccccggggaccctcggcccgcgccgcccggaggccttcacaccccgacccggcgcccgccccgcgcagtttggtcgtggctcgggtgcgcgcgcccctgccc

SEQ ID NO: 225718 - DNA, 379 bp, Homo sapiens
  chr19:1876315-1876694
  hyper
cgccaccgcctggtcgcgcgacacaggctgaaccctgcccaaccctaaggtggacaacaggccaccggttcccgagtcctcccggtcctaagccttctgccctagagatcgtaggaactcttctcgtgatcccagctccagtgtcggctccctcttccaggggagaccctcggggcccaagcacctgccaccgccctctgctggaccccagcttcgccatctacgaaggaagcggcctgtccgagctctgaggtccgtcaagcgcggcacctcaggacccagagtgcgctgtcctggcccctctgcagtaggactgacgggaagctgtcgagggggcagtcccgcgatggcagcagggcccccacgcctggcgtcctca

SEQ ID NO: 225719 - DNA, 507 bp, Homo sapiens
  chr19:1978630-1979137
  hyper
cgtgcgggaagtacaacgccatggtgctggagctgctggggcccagcctggaggacctgttcgacctgtgcgaccggaccttcacgctcaagacggtgctgatgatcgccatccagctggtgcgcggcgggcggggcggggcggggctcggagggaagagggtggccctggaggggagcgcgtgggacggggaggggcccggccgacaccgccgtgcccccctgcagatcacgcgcatggagtatgtgcacaccaagagcctaatctaccgggacgtgaagcccgagaacttcctggtgggccgcccggggaccaagcggcagcatgccatccacatcatcgacttcgggctggccaaggagtacatcgaccccgagaccaagaagcacatcccgtaccgcgagcacaagagcctgacgggcacggcgcgctacatgagcatcaacacgcacctgggcaagggtgagctgcgcgcgcgcggcggggggcgggcgcccggaccccgct

SEQ ID NO: 225720 - DNA, 540 bp, Homo sapiens
  chr19:2165005-2165545
  hyper
gaaaatgacaggccgggtggaatgttacagaggcaccccaccgggtggttccagaaacccgcgtgcggctcccggggtgcgagtcccggcgtggcccctgaggaggcggggcgcgtgcgtccgcgcttgggaccctctggccacgctccgggctgggcagggcgcgttttcggggaaaagtgaagcaggcgctgtcagcgagcgtgtccggggcgcgagttttggggggcgcgtctgcagggcccggccgggcatccccgcgcgccctgggactcccgcgcgcgctgggcttgtgtcagtttttggaaacgtgctcgctgggggcggggtcaggacgcggagagcgctggggagcccgggctggctcactgccccgggtcggtgcgagtggatgggagagggagcgcagcttccagcctggccgcacgtcccgcgcgcggggctggcggggtagggccctggggctctggcttctctggttgggcagctccgggtgtgcgcctgggcggcctgagccgggatcccgccaggagaggtcct

SEQ ID NO: 225721 - DNA, 180 bp, Homo sapiens
  chr19:2168929-2169109
  hyper
ggcaggatggccctgcccttcttctagtgggaagggcacaagtggcattattggttgtttgctcggaaagaaccttcaaaggccacagaacgggaccttccccctggtgactcacaggctgtgggcgggcaggggcggcctccactggccaagggtccggactctctgactctcattaat

SEQ ID NO: 225722 - DNA, 272 bp, Homo sapiens
  chr19:2273764-2274036
  hyper
gccgtgttactggccgcccctagggacctgcagcgccgttcggggcagcagcacttccggcggggtcgtggcctggagcgcttccgggtctgcaaccccgccgtctgcccggccgcagcgccacctgccggccgcatccgggagcgccacccggaaaatcagggccaggcctggccgggaaaccggctggaaagaggaggaaaggaggaactcgaaaagattgtagacttggcgagcgggccggggggatattcagccgtctgagcggtggt

SEQ ID NO: 225723 - DNA, 1053 bp, Homo sapiens
  chr19:2289937-2290990
  hyper
ggacacgcgagcggccggcccgcgggggaggggaggggagggtccgccctggggacccctcagatcatcttcatgttgaacttgcgcgcgcctccctggcccgccgcggcggccggcccatccaccttgcggaaggagtactccaccgagaagttgtttttgtgctgcccgcggccgcggctccacacgaacagcagcacgaagcagaagaggaccacgcccaggaaggtgatgcagcccatggcggtggacaccaggatggtggtgaggtcgagcggcgcgcgcagggccgccagcgtctcgttgtgggcctcgcccggggtccggttggcggccggctcggggcgcacggtcagcgtggcgaagtaggtgtcgttgccgcccgcgttgctggccacgcacgtgtaggtgccgctgtcctgcggccgcgcgtcctggatctccagcgtccccccggggagcacgcgcgcccggcccgcgctggtggccgtcaccggccggtgctggggggtcacccaggccacggtgggcgccggctcgccctcggcgcggcagaggaagcggacgtcttcgcccgcggtggccgtgacgcgctgcagccgccgctcccggatcttgggtttgcggcacacgaagtactcgaacagcacggagtccggcaggtttcgcagcgcgtcgccgcgcacctcggccggggtggcgcaggccggcagccgcccgtcgaagttgagggtcttgcgacgctgcacgatccacagcaggcgacagtcgcaggccagcgggttcccgtccacgcgcagcgtctctagcgtgttcaccgagtggaaggtgctctcctccaacgtggagagcaggttgttggagaggttgagcaggcggatctggcgcaggcccaggaaggcctgcggctccaccacagccagcagggccccggccaggtgcagctcgcgcaggcggaccaggtcccggaacgacccccgcggcaccgtgctgatggggttgtgcgacagattgaggcaggtgaggtgcgcctggtgccgcagcgcggcggcc

SEQ ID NO: 225724 - DNA, 156 bp, Homo sapiens
  chr19:2329086-2329242
  hyper
ccggggacgcctctctccggctctgtggccttgagcaggcggctgcccacccctctccgagcctcagtttccccttaggcggaacgggcacggtgctaagctaacctcaccctagggggtgcggtgggggaacccagaggcgtcccgcgcgtcccc

SEQ ID NO: 225725 - DNA, 506 bp, Homo sapiens
  chr19:2488615-2489121
  hyper
caggccctacagggaggaaaagggaggggcggaggcctggctttaggtttgaatctccgcggcttactagctccagcagctcagcaaaagcgtgactcagtttccctcgtccataaaagggaaagccgaatcgccctcccacgtgtcgaggtgaaactagacagtgcactaaggcacttagcaaaacgcgctgccttgagaacccttattacgccttccttccttccacctcaccccctggccagacactctgggggtggagaggggcgctgacccaggccccagacgcccctcccgtccgccctccctagcaggcaggagtcccggctttcccgttccttaaattggataattggagacagaggcgggtgctcgagacggagaaatccccaagtgggcgaaaggcaaggggcctgtcctagtttccctgcactgggggcccccaccctcgccagcgctccctccggtgcgccctgggcgcgcagtctgtgcgctcgggagccccc

SEQ ID NO: 225726 - DNA, 577 bp, Homo sapiens
  chr19:2702443-2703020
  hyper
ttcgaccccctaagcgcagccccgtccccaattccaaccccagcctccagttgcagcccgggtccccagacccagcccccctcctcagccgactccgacccccaactcggtccgcagccgaatccgagctgtcccagtcccctctccgggacgccggccgcgccctcacttcccctggcccggttcgcgggcgcccttacctgcgctcgggccccgcggccgcctcagccccgccgcgcagccgaaccctccgccccggcccgcgagcgctcgctcccctctgcgggggcggggccgacactcggggggcgggccctggcgtcccggcaaggccaatcgcgagccccggctgcgggaggccggagcgggggcggggcgcggggcaggcagcggggtaggctgcgcccaggagagtggggcggggctccgggcgcgggcggggccgggggcggggcgaagagcggctttccagggtgacttcgtgacgtcaggaaggcgcgagtagtttcgcgagttcgaatcccgcgctaggtgagctggttcgaatcctgcatgccagctccgggggctcatttgc

SEQ ID NO: 225727 - DNA, 300 bp, Homo sapiens
  chr19:2944752-2945052
  hyper
tccggctgcgaactcgggcggaagccggttcctgccgccccacctcgccctgggcccgggctcggctcccgcccggcactcaccatgtcccgcccgctcctgggctctccagggttagcgccccgcggtccagcgaccggcgcaggtgagcacgacaggacacctgagccgctcggggtaggcggggaagcgcgcaaggcagaggggaactcggcttaccgtcctcggggtctgattggacagatctcgggaagtggagactctgattggacagtgctgtcgactccgcacccctgattg

SEQ ID NO: 225728 - DNA, 540 bp, Homo sapiens
  chr19:2950439-2950979
  hyper
ccaggacttcgccattaaacgagcccgccccctgcactttgaactctgcccccatcctttgacccaaacccccctacgccccggcatcggagtccccttgcttggcctctgccacgaagatacggggccaggtccagcagtacaaggaggagaaaccgctctcacgggaggcgctgcggccactgagggagacggccgccgcgggtcacagacggatgcttccgtttccggttccggggcggctgggagctgaaaagtgggctagtaatgagcttgggattggtggagcctcaaagataggcgggacgacctacgtcgtccaatcgctgagcaggaaaagctagtttccgccgtctgggagataattggcattgttggcagatccgcccctcgagggcaagtctcgggacagaatcgcgctgtgggcgtggcttgtactggatcctccccggggcgtggctaaaacaagaccgaggtcccgggacgaggttgggggcgtggtctttcgcgcaatcctccaacgcccaattaccctgataa

SEQ ID NO: 225729 - DNA, 141 bp, Homo sapiens; identical to SEQ ID NO: 205110
  chr19:2977372-2977513
  hyper

SEQ ID NO: 225730 - DNA, 87 bp, Homo sapiens; identical to SEQ ID NO: 205112
  chr19:3094304-3094391
  hyper

SEQ ID NO: 225731 - DNA, 143 bp, Homo sapiens
  chr19:3094777-3094920
  hyper
gctgctcggtgagtgcggcccccgggcctgccggctgcgggccctgccctgcctgtgcctgccctgcctgtccgggtcgggccgggaccctccggggtcagccctgcctgtgccgtccgggtcgcgagaccctccggggtcag

SEQ ID NO: 225732 - DNA, 300 bp, Homo sapiens
  chr19:3361073-3361373
  hyper
ccctacgtcccctccacttcccccagccttcggggtcccccatccgcttggcccgagggggtcctggctggaggttcgggcgcgaggtggcgccgggacgcgatcactcggcacgcagacgtcgctcgccaggggttgcgcttgcgcggggacctgccccgagaggggcggggcggcaggggttccccctccctgagaggccgtggaagtcccgaggggtgggtggttacagcagcacaggggttaggacgggcccgggaggtggctaaggagacccctattatcctatgctggggagag

SEQ ID NO: 225733 - DNA, 481 bp, Homo sapiens
  chr19:3367271-3367752
  hyper
gtgctccggcggcccggctgggtcccccctcctttgcaagccccccagcaccgtcccggtattttcgctgcatcgattctggattctggattctggattctggagccgccgccgggaggagcgggaggcccggcgctccgggtctggcccgggcactgcggcgctgcggacgccctcgccagcccggcacctgccccgtcccctccccctccccctccccctcccgtagcctctcacccctggccgcactcccagactgccccggggccgagccttgtgcaatggccgagggggtgtgtggggagggggcggctccccccggggactccttccagcccaggctcccggggaccccgaggtctgcaagttccgttttctagaccgctgctttcctccttacgcagtgtgtctttaggctggagaggttctggcctcagtttcccctgaagtgaggtgcggctaaggccggttctggagaggg

SEQ ID NO: 225734 - DNA, 57 bp, Homo sapiens
  chr19:3573237-3573294
  hyper
tgccatcgggcagcccgggcgctactcacctccgcccgcgtccgtgttccaggtccg

SEQ ID NO: 225735 - DNA, 337 bp, Homo sapiens
  chr19:3585428-3585765
  hyper
ccctgcgcaccccgcggtgtcgccttcccgggaggctcgggttcccagatccccttacccgggcgtctcggctgtcgcgccctgggccgggggaggggaggctgcaggaagcggcggatccggcggcggcggcgagggcccgggtgggtggccgaacttctcccgccatggagggagcagcggcccgggaggcccgggggaccgagaccccgcgcgcgtctgcgcccccgcccgcgccctcggagcccccggccgcgccccgcgcccgcccgcgcctcgtcttccgcacgcagctggcgcacgggagccccacgggcaagatcgagggcttcaccaa

SEQ ID NO: 225736 - DNA, 105 bp, Homo sapiens
  chr19:3606360-3606465
  hyper
accatgccacccgccgggccacacaggggacacctggcacctggccgctgtcaccgcgggctttgcgacacacccacagcagggcagggccagcgccggatgcgc

SEQ ID NO: 225737 - DNA, 489 bp, Homo sapiens
  chr19:3606743-3607232
  hyper
cacagatggagggcgtggcggcacaggacgccctggggtcgcggcctggaggggtccgcgggggctaagccgagctgggacgggtgggggccgctggcagcccgcggctcgctctctccgtccagtctctgtctcccgctgtctctcatcagccccgcccaccctgcgctggccacgcccctcgggcccgggcctggctgacttggagtcagtgggtgccccccgcacgccgggacaccctacagccttctggggaaggcggcgcccttgggacccccaggccaccggtggcagggatgcaatggcccgcgtaggggtggcaggggcgcttcctcgggagcctcagcccctccagccgcccagcgccctgccaggcctcttcccggcgctcccgccgccaggcccgcattattcaccatctgggcagcacccaaggcctggagggggcggggcaggtccaggcggatcggctcccgggggtcgcccaga

SEQ ID NO: 225738 - DNA, 181 bp, Homo sapiens
  chr19:3670951-3671132
  hyper
gctctgggccgcggcggggcggaaggtgctggacgctgacgtgatgtttgggttggcggcccgggagcagaacaattcacggttttacgtccagggtgtgggggaaggaaaagaagagagggcaggaagccagcggtgggccggggcgggacgttccagacctcatcgggggcccgggcgt

SEQ ID NO: 225739 - DNA, 228 bp, Homo sapiens
  chr19:3671894-3672122
  hyper
agccaccccgttttcgaggaaattaggttttaaaaatagtcgggggaggaaaggcgagccgcgctgcggagccgggaggtggcccctctgagcagtttccgctggccaggcccgaggcgggggctctgccgctggggcccctctctcctggccccatcacaggacgtggtggcgacccgggcctgcggtgcacggctctgatcgctggctgcacggtgacctcatcgg

SEQ ID NO: 225740 - DNA, 1107 bp, Homo sapiens
  chr19:3785504-3786611
  hyper
atctccccgaccgctagtggctgggaagtgggcggtgctggggggtgagtctcggcccctccaagatgcgcctcccatgaaatcctccagtcccacgtgtactcacacgcatacggatgcatgcacacgcacagaaacacacagggctcggacacagctgcgcgcagacaagcaaaggaccacgtccacgtggaaacaggtgtgcgcacacgtccccgcgcatccgcgcgcacaagcgctccacacctgggaacgtgcgcacctgtcccccgcccccggcacacacacagccgccccacactggaacacctgggcgccagcgccgggccactcgggcacgcagggcgctacgcagggccgcgcacacgcttttcggccacacgcgcacagccctccacgtggacgcgcgggtacacacgcccggggctcgtagccgcgcacacccgcacccaggaaaccccagccaccaccacgcggggtccgatcgcctctgagcaccctccgccccagccgcgcacccgctgcgcgcccgggacgcgcacactcgcgcacacaccggcccttcctgcgcacgtcccgggcccacccccgcctagagccctcggggtttccccccaccccggcctcggggtctctccacgtctccccgccgacgtgctcacctgctcagggggcgcccccgagccgcgccccgcgcccgcccccaggagggcctccgcgagccggctgcacaccccgaggcggtcccggctgcacaacttggagcgagttgctccgtttcctcattttgggggcgaagaagggtcggggagtgggggaaagcgggaggcgccgcggcctgggaggcccccgcgggtcctagcgccggccgcactgcggtctcctccgcgcgccgccgccgccgccggcccctccccgccccgcctccgcggcccccggcgcctcccgcgcgccccgggcggggtcccggggcgcacgcgggctccacgcctggccctgacctggccctgtcgggcgtgcaccccccacccaccctgggaagcggggttcttggagcgtggaacgggcgccgccagtgcgcgcggcggggaccgggggtgagggaga

SEQ ID NO: 225741 - DNA, 229 bp, Homo sapiens
  chr19:3821974-3822203
  hyper
cgtcggatcacacgcgcggaagaggcccgaccacaggcctcccagcgcccgccgggccctagcacagcccggacgggtgtcggagctccccctgctggacgcacccggtactgcagccggtgccgccgccccctcacgtgcaggtccttcgcgttaaggtcgttgaaactgcactcgcacagcttgcagtggaagcgaagcactcgcccttcgtcgctgaacacctgag

SEQ ID NO: 225742 - DNA, 777 bp, Homo sapiens
  chr19:4053797-4054574
  hyper
gtaggtgacgtgcatgtgtctgtgcgtgtacgtgtctgtgtgcacgtgcgtgtatgtgtgcgtctgcgtgcatgtgtgcgtgcggtgcagggagagaggcgggaggggtcgtgagcggcggatgctggggcagagagcaggacggcgcctcccccgcggcgggcagctcacctggtgaagcggaccttgcagatgttgcactcgtagggcttctcgcccgtgtgggtgcggatgtgtcgcggcagcttgccggcgccctggatgaccttctcgcagatggggcacttctggaaggccttggctcggatcttcttctccaccttctgcgaccaggccgggtagacgtcgccgtcgtgggcgccgctgaagtacttcaggtagtagtccatgacgcccttgtcgtcggcccgcgactcctcgtcgctgtcccccgccgcggcccccgcccggcccaccgatgacatcatctgctgcagcagcgtgctggccgccagcccgtccacgtcgggcccgtccccgtcctcgccctcggccgctcccgacaggaagcccggagagtcgcccggctcgggggccgcctccgacagcgaggcggcctcctcctctccgccgcggccgtagtggccgttctgcgtggcggccggcggggccaccggcggcggaaagagacccccggtgggggcgtcctcatcccgctctggccacagacccgggttgctgtcgccctcgtccccgtcccccgtcgggggccgctcggccggggggcccggcccatag

SEQ ID NO: 225743 - DNA, 240 bp, Homo sapiens
  chr19:4054913-4055153
  hyper
tcacccacgttggctgtgctgacggtgagcgtggccgtgtaggcgaagtccatgagcgcggtgagcgcctcggcgctgacgaagtcgatctcgtacacgttctgctggtccaccacggcgcccgacgtgaacagcttcttgaagtactggctgcaggcggccagcaccgagcggtgcgtggggaactcgcggccctccaccaggatcaccacgtcgcacagcaggccctgcgtccgctgc

SEQ ID NO: 225744 - DNA, 97 bp, Homo sapiens; identical to SEQ ID NO: 205124
  chr19:4064872-4064969
  hyper

SEQ ID NO: 225745 - DNA, 140 bp, Homo sapiens
  chr19:4198021-4198161
  hyper
agccctgccggccgcgtggaggtgcgaggctgcggacgtcgcgggcccggaggcacctgcgcgcccttggccgactcggaggaggtggagatggacgcccgcgggtcccctggagatgcagccggcggcctgcgctggtg

SEQ ID NO: 225746 - DNA, 105 bp, Homo sapiens
  chr19:4278856-4278961
  hyper
tcaccgccagacatcggttccatttcgaccctcactggcggtcattcccaccccctctgctggtcaatttcaccccttttggcggtcaagtgcagtcccccattt

SEQ ID NO: 225747 - DNA, 563 bp, Homo sapiens
  chr19:4279317-4279880
  hyper
gcccccctccccagcgtcccacctcccggcggcggcggggaaagtctctccgaaagcgtgaagggggattggaggaggtttttatttccctttgtgcgggtggctggggccggatcgaggcggcgggggccgcgggactgggggctccccgctgagccgagaggagcgcgacaaaggatgcgtcccgccggggtcacagtctccgcggcccaactttgcgcgcggcgcccgcgcccctggggagcccgcccgctgcgctgagaacccaggcgtccgggctgggagaggggccgggagcgtccgcaggtggcgctggcccggatctcccgaccccaggaagggatcccggagcttcctggaggcggcgggcggccgtgtcgctccagggaaccgcgctgcccgcggaaactccgcgcgcctccgcggatgcccctcgccctagcccccagcgcgcggggttcggggccctgcgaggtccccccttcccccgcggtgcttcccaagctgggctaaggcgggcttctcttcctccctcctctgtcgcctccttttcctccccctcg

SEQ ID NO: 225748 - DNA, 152 bp, Homo sapiens
  chr19:4280025-4280177
  hyper
ctgacagtggcccgattggggtgacaggcgcccaaatggccaagtggctacgggactacctgagctttgggggtcggaggccccctccgcagccgcccaccccggactacaccgagagcgacatcctgagggcctaccgcgcgcagaagaac

SEQ ID NO: 225749 - DNA, 236 bp, Homo sapiens
  chr19:4304482-4304718
  hyper
tcacatatcaccaccaacaccgcccagtgagccccaggcgctggatgtgagggctctgggcgaggccagcgcggaactacatttcccaggcggccgcggcgggtgcgcctgcgcaatgcgcgcggtgatggagcgctaaccgggggcgcggcggcggcgagggctcggcgggccattggctaccggccgcggcaaaggcagcttggggacccagcgtgcgcggggcccgcgggccg

SEQ ID NO: 225750 - DNA, 144 bp, Homo sapiens
  chr19:4432845-4432989
  hyper
aagtcagccctggcaacacacgtgcccggccaaggctcacttctgggcaggtgcgtaggtgctaccctgtcttacacccgccctcatgaggccacctatccccgaagctggccatgccccaagcctcggtggcaatgagcttgt

SEQ ID NO: 225751 - DNA, 248 bp, Homo sapiens
  chr19:4523781-4524029
  hyper
ccacaaggatgggcgcgaagggtcccaccagccagggcagcggcacggcctgcaccaccagctccagcagctcgtccacgcaggcgtgcgcgtgggccacgcgaccccggccctcggccagcgcggccgctggcacgtccctgaagcagcgggcatcagcgaaggcggtctgcagggcatccacactgcgccgcacctcagccaccttctcctgggcgccggcgggcaggccccgcacgctggactcc

SEQ ID NO: 225752 - DNA, 105 bp, Homo sapiens
  chr19:4580776-4580881
  hyper
cgcccaaggtgcggcggccggacgcgaagtggggcggaggggcctcccagtgccaggacccccacaccagccccgggtcgcctcgacttggctctcaggaccccg

SEQ ID NO: 225753 - DNA, 118 bp, Homo sapiens
  chr19:4581110-4581228
  hyper
ggtgccattagacacccccataatggaggctcagggagcgccccaggccaaaatccagcccctccaaagcgatgccaccggacccccaccggatccctccatacggccagcgaccccc

SEQ ID NO: 225754 - DNA, 105 bp, Homo sapiens
  chr19:5608066-5608171
  hyper
ctgagctatgccatccgccctggaggctctgcatacttcagtcaagtagctgagtggtgtcctgcccctctggccttcctacgtccttctgtttttgtccagagc

SEQ ID NO: 225755 - DNA, 141 bp, Homo sapiens; identical to SEQ ID NO: 205137
  chr19:5804852-5804993
  hyper

SEQ ID NO: 225756 - DNA, 776 bp, Homo sapiens; identical to SEQ ID NO: 205141
  chr19:6110226-6111002
  hyper

SEQ ID NO: 225757 - DNA, 180 bp, Homo sapiens
  chr19:6590336-6590516
  hyper
ccagcggggaacgtgaagtcgagaccttcaaaagaacttcttcgtttcccgaatcgttttcctggatgtcactgggcgcgagagcaccgcgcgcagcggactctctacgctgcaaaggcgcccggcgcggtccccaaagggacccctcccccacccggagcgagtggctggggccatccc

SEQ ID NO: 225758 - DNA, 616 bp, Homo sapiens
  chr19:6590602-6591218
  hyper
gccgagtcatcttccatttccatgtgtgcctacctttcccatcccgggatctccctgtacctcctggcagggctgcctgtctcgtagcccctacaccgggcagcctggtccccgcctcgcctccctgttctggtctctgtctctgccctaccagatcttcctctctggcctctttgtacccatctcattctgtcttttcggtcacgcgcctctctatgttttcttcccaacttttccatctcaactcaccccaagtgactcgagcggcagctgctgctgagcctgtgcgaagcgctggatgcacaccacgaggcagatcaccaagcccgcgaccaatgggaccaaagcagcccgcaggacgcacccatagggcctgcgccgcaccgagcagcccgaaccctcctccggcatcgccgcggcgatcacctccgctagcgcaggaggggcgatgggggcgcggagcgctgccgagaaggaaggaaggaaactgcagccccctcccggggctcctgggcgtctacttgcttcaacctgtcaggggaccagcctgcccctctctggggatgtccggccggtcgaggggagggacttgagcaattggcgaggggaaattccc

SEQ ID NO: 225759 - DNA, 130 bp, Homo sapiens
  chr19:7197095-7197225
  hyper
aggtgaacttttgacagcttcgtggtcagcagcgacgaccgcaggagcgcgtgtccttgaagcggggaagcgccccttttccttgcctgacaataccgccccacacgcgatgacgcctttggaatagaac

SEQ ID NO: 225760 - DNA, 992 bp, Homo sapiens
  chr19:7293530-7294522
  hyper
cagagaggagcccgcggcggggcgggcaccggggcaaggttcctcgggctcaggtcgggcacgcagggcgcggaggcgcgagcccgggcgggcaaaggccaaggtcagaggcttcccgctccccctacgcgatgcaggagctaccgtcctggccaccgccccccgcccctggggagggttctcagtccacaagcgggggctcgattttggcttgggtggggtcctctccccatcgcggcgctccccgcccacgcccgcgcccccagactcaccctctccggggtacaggtggcccgcggcgcccagtagcagcgcggccaccgccaccagcagcggcgcggccgccgccccccgccggcccccggtggccatggctgcgggagcgcggggtctcctcggatcagagcgcgcggcgctggcccgcgggggtcatgctccgaggcggccacccaagaggcgctgggggccgcgcgtccttctcttccacgcccgcgacccgcgggccgcagcccccctgccggggagggcccagaggcagccccgggaagggcgcgcgcggcttcgccagctacaaatactgagcggaggcccttgcggtggtggccccgaccccccggccgctgcggcccgggccccgtcccaggatctcggggcccggagctccgcgctgcgcccgggactgtctctcggctctcggccccgcgcgctctgggtcgcgatctgcgggctccgggacagagggacgcgcggaccgacggactagctgactggcgggcgggcacctgggctggcgggtggcgggcgggcggcgggagagagggctgctcgggcccgtaaacaacgcggcccgtcagctgggccccgtgcgggccgcgggaaaaggcggcgcggatctggcctaggaagggactctgcgcccgggagaggcccaggagagggagggaaagcttgcaggggagggaggtgccgcccggccccgccccgccccgccc

SEQ ID NO: 225761 - DNA, 345 bp, Homo sapiens
  chr19:7459630-7459975
  hyper
atcacccaggcttccgttaaccccacaaaacgcccacctaaccctgctgctctccctctggatccccgcaacccagctgtcccctcagagcccccggccctactgacagccaggctcgcattgctctccttcaaaaagccccccaaccccgctgacccgcccctcaaaagtcgccctcaccctcgccgcgagcaccctcccacttcggtgcccgcgcccctctcaaggccgagccgacgccccctcaccacggctcggggagcagcagccccaggtccccgggagcgccccgccctcgagggcacgcctccttccgggtcacgccctctgccccgcctccgaggc

SEQ ID NO: 225762 - DNA, 588 bp, Homo sapiens
  chr19:7460095-7460683
  hyper
gagctggcggagagcggcctgcgggcgatcgggccgaggtgaggacggcggcggggcggtcccgaggaaaacggggctcaggagggggccctcggtctcttcagggggtggcctggggcgcgggacccccggggctgcctcgggcctcccgccggctcctgggggacttctccaggcaggcgaacgggtgctggggtgcaggctgctccttcaatgcatggaggctctaggcggcgattgcagggtgcagaggtgcagacgatgcccgcccgctccgtccgagccccagccagtcctggggtgctacggcttactctcctccaggagaggagaggaggggtcacttgggccccagcctctgctcctcgttcaggagcgcccggggcaggaccagggatggaatggaacccaccacaatacccagcaccgtcgtatttcaggcctcccgggagaaccctcacaccccggagcagacagccctccctggcagggagcgtttgggtgcaaaaccgtgagaactatctgtgccatgggttttagtttcttgtataagaactcagttggtgctttcattgcggacgggaacga

SEQ ID NO: 225763 - DNA, 105 bp, Homo sapiens
  chr19:7553842-7553947
  hyper
gtcccggcccctgtacgactccagcgccgacgccaggccgctcagcgacgccatggcaactccgtgacgtcaccgcgacgtcggcgcgccgcgccagggggcggg

SEQ ID NO: 225764 - DNA, 389 bp, Homo sapiens
  chr19:7660603-7660992
  hyper
gcccctgctgctccgtgcacactgcagtgaggggcccgggcggggcgcaggggcgcgccagggtccgggtccgggttcgggggcggggcgcacctgggctcctccccggggcgggcccgacgcagcgtcgccagcgcaagcggccgcacctggctcagcagcggcggcggcggcggcggcggcagcggcggtagcagcagcgggcccggctggggcgcgagcgcggcgcagcccagcccagcccagtccgagcgcggacccggcgcccgcagccccggcgccgccatggtggaggcggcgccccccgggcccgggccgctgcggaggacctttctagtgcccgagatcaagtcgctggaccagtacgatttctcgcgggccaaggcggc

SEQ ID NO: 225765 - DNA, 540 bp, Homo sapiens
  chr19:7677148-7677688
  hyper
ggccccgccggaggccctgagctcggagatgagtgagctcagcgcccggctggaggagaaacgcagagccatcgaggctcagaagcgacggattgaggccatattcgccaagcaccgccagcggctgggcaaaagcgccttcctgcaggtgcagccgcgggaagcctctggggaggcggaagcagaggcggaggaggccgattccggtccagtccctggtggggagcggcccgcaggcgagggccagggtgagccaacctcacggcccaaggcagtgaccttctcgccagacctgggcccggtgccccacgaggggctgggggaatacaatcgagcggtcagcaagctgagtgccgccttgagctcgctgcagcgggacatgcagaggctcacggaccagcagcagcggctcctggccccgcccgaggcccccggatccgccccaccacctgctgcgtgggtcatccctggccccacgacggggcccaaagctgcatcccccagccccgcccggcgagtcccggccacccggcgcagccc

SEQ ID NO: 225766 - DNA, 333 bp, Homo sapiens
  chr19:7677697-7678030
  hyper
gcccagccagtcaccccgcagcccgaaacacacgcggccagcggagctgcggctggcacccttgaccagggtgcttacgccaccccacgacgtagacagcctcccccacctgcgcaagttctcgccgagccaggtgcccgtgcagacgcgctcttccatcctcctggcggaggagacgccccccgaggagccagccgcccggccgggcctcatcgagatcccgctgggcagcctggcagatcccgccgccgaggacgagggagacgggagccccgctggtgctgaggattccttggaggaggaggcgtcttcggagggggagccccgggtggg

SEQ ID NO: 225767 - DNA, 621 bp, Homo sapiens
  chr19:7853194-7853815
  hyper
agcctctctccgcagcctccacggagcgcgcggcgctgctcggctgccaggacctgctgaggacaaacggtgtgtgcagagccgggcgcctgggcgcccggggcgtgtgcggcgggagcgtctgagaccccagagatggagtcctgggtgcgtgggggccctgtggtccctgagtctggccacggggtgtggaagggagtcccctgagtcctcccaagtgacccggcgggcatgcgttttgggatgggggtcgttccagcctcgaagcagacggcggcgctgggtgccctggaggaggaggtgggagcctgccacagctgctgtgagggggcgcggcccagactatgggcgcaagggtggggtcttgtggccgggatgggaggggggccggaggcgaggcctgcggcgagtggggcggcggggggctggtctccgaagtcccgccccatcctcgcctccctcgcccctctcaccccgcggctcccaggctcggggacgcaggcgctgctgcagaccacgagcgcggagcttggggaggcgcaggcgaagctgatggagcaggagagagccctgcgggaactgcgtgagcgcggtgagggcccgacgcgaccccagccctga

SEQ ID NO: 225768 - DNA, 160 bp, Homo sapiens
  chr19:7990126-7990286
  hyper
ggccctctgagaccccggcgcagggccggctagggggcgccgcgcccctcacaccaacgcgtagtcgaactgcccgcgctcgagcgcctccttgtggtcggtccaggacgaggcgggcatgcggctgtaggggtcgagcaggatgcgcacgcagcgcacc

SEQ ID NO: 225769 - DNA, 300 bp, Homo sapiens; identical to SEQ ID NO: 205158
  chr19:7990894-7991194
  hyper

SEQ ID NO: 225770 - DNA, 420 bp, Homo sapiens
  chr19:8115159-8115579
  hyper
tccccgtgaaggctgccggcgggacaaacagtgaggggtgaggcagggagggagactcacgttggggacctcccccaagtctgggtaacaccgtcttggccgcggcccgcgggttgggaaggtagggggcagtgagccgtagcggagaggctggccccagcccgccacgccgcttccccacgctcgcagccacgcggagccgcgtcctggtccagcctcacccacccagagcaagaggcggaggaactggaacagcgccccggcccgtgggctgccactggccgcagcaacgggacgggtgagagcacctgcccccgacgcgtcttaactgctctggtggggcggggctgaccgtgcaagccccgccccagtctaagcccctcctacaaagcccggccccttaccataagcgccatctgt

SEQ ID NO: 225771 - DNA, 706 bp, Homo sapiens
  chr19:8274271-8274977
  hyper
cctggggcgggcggcgcgtgtctgcagctgctccgggtagcccgctaggcgcgccgtccccagccccgccgccggccctcggtgcgcccggccgcctgcacccccaggtaagcgagcaccccgcgccgcgaacaccgccccgaacgccaccctcacggcggtccccggccccgcctccgcggccatggcggccccagcccggcccccactcgcagctgggctccagcccccatcaccccgccggggactgtccccctcggggcttcccatcatggccgtctccccgagctatccgcgctcccccacgagggccggggcgcaacgggtgcccgaggacgcggctgtgaaacgggctggagcgagtaggggcgatcctggcctcgtgacgcgggggaatccggatgtgtgagccgggggagcgccccgtttccccgacgtgccagggctggggacgcagctggggccctggcctcggagtccgcagcccggccgcgtagacggcttctgagaaccgcttaaacacgtcattccaagcccgagctaacccatcaggcggccggggtgaggtggaggtgcccaggcggggataatgtcatttggcctggttggaccagccagcgagggctttttaggcccagggcctagccgggagtgtgtgcggagcagaaaagaggccagcctggctgaaacgcggagagggagggtc

SEQ ID NO: 225772 - DNA, 227 bp, Homo sapiens
  chr19:8579005-8579232
  hyper
gcgagttcgcgctcacgtcagcgccattttccacctctcagctctcgcgagactgggggcggggcctgcgcagggcgctcggagagggggcggggcctgagggcagagtcaccctggagctcaggtcggacgctggtgcaatcttgctatctatccccgggcagtcagcgcgcacttcagcagactccgtgcacggagatccgggatgacctcgctgtcctagtctt

SEQ ID NO: 225773 - DNA, 518 bp, Homo sapiens
  chr19:9648914-9649432
  hyper
aactttcacccagtgctcaccggaacactcagaaatcgccaggtccctgaaccgggaagatcctggggacggagccaacgcggatgcaaaaggcagcaattattttcctgccggaaaaaaattcacaaacgctgctttggaggcctttggagaggggcgcacagatgaaaacaccctgcggacaccgtaactataaacccgactcctcccgaggagcgacggtccgagcggacgctagcgggcccagcagacacgagcagagcgggccaggcctctctaacgtccgggccaaacccgtccttcaccccaaaaccagttcatctcctcggaactcacccaggccagtgaggccttaactctgaaaggcaaaaagactctcaggcgctcacagccggcgtcacaaaaggaacggcgcaccgctgacgtcatttacgctctccgcctcgggccaggcggggtttcgggactagggtttctgccgtgtaatacctcctcgaggcagaaaaattctactttcc

SEQ ID NO: 225774 - DNA, 136 bp, Homo sapiens
  chr19:10197446-10197582
  hyper
ttttccaggaaatgccgtaaagggatgaaaggcggggggggggcggcggaggccaaaaccaagggtcaagttcgggccgggagaacggtgcctagagatgggggagggatgatcccgtttccccttcccccaccgg

SEQ ID NO: 225775 - DNA, 262 bp, Homo sapiens
  chr19:10252656-10252918
  hyper
gccaactttgaccccgaagccttccctctagcaagcaggggcaccacctcgaggaagtagaagcggttggggccgcccatggagtacacctggacgcactcgggcaggtcctccccatactccacggtgcagcggccctgcacagccttgaagtccaccacggcctcctcgtcgctccagtagagcaggttgatgtctgcgtggtagctcgctggagtggacttgtgggtgttctcaggcctgcgagcgggagaggcctcgt

SEQ ID NO: 225776 - DNA, 105 bp, Homo sapiens
  chr19:10253329-10253434
  hyper
cccagttatggaaccgcagggtaaagacctccccagttagggagtcatagggtaaagacccccctacttagggaaccgcaggtaaagataacccctccccaaatg

SEQ ID NO: 225777 - DNA, 184 bp, Homo sapiens
  chr19:10363159-10363343
  hyper
ccaggaggggcggcgacagagaggtctgacccttgaccctaacctctgacccccgcaatcgctccaggtctcccggagcccgtgctgcgcaaagtcgagctcccggtacccactcatcgacgcccagtgcaggcctgggtcgagtccttgcggggcttcgagcaggagcgcgtgggcctggccg

SEQ ID NO: 225778 - DNA, 224 bp, Homo sapiens
  chr19:10381049-10381273
  hyper
gtaaagacgcctccgcggccaaggccgaaaggggaagcgaggaggccgccggggtgagtgccctcgggtgtagagagaggacgccgatttccccggacgtggtgagaccgcgcttcgtcactcccacggttagcggtcgccgggaggtgcctggctctgctctggccgcttctcgagaaatgcccgtgtcagctaggtgtggacgtgacctagggggaggggca

SEQ ID NO: 225779 - DNA, 114 bp, Homo sapiens
  chr19:10399961-10400075
  hyper
acgctgagtagacacgtgcccgctgcaccctgggtaaatacagacccggagccgagcggattctaatttagacgcccgcgaacgctgcgcgcacgcacacgtgtcctcggctcg

SEQ ID NO: 225780 - DNA, 540 bp, Homo sapiens
  chr19:10400310-10400850
  hyper
agtccagcttattatcatggcatctcagccagggctggggtaggggtttgggaagggcaacccagcatcccccgatcccagagtcgcggccggggatgacgcgagagagcgtggtcgcccccagaaggccctgggccatcatgccggcctccacgtagaccccaggggtcgctcactcctgccagctcgccttcaccaaggccaggagcttagcgcacgctcgcctcccgcccccccgccgcctctgccgccgccccctccttggaaaccaagttaccaacgttaaaccaatccccaagcgcaactctgcctcccccacaccccacccgccgcgccgcgcggagccgtcctctagcccagctcctcggctcgcgctctcctcgcctcctgtgctttccccgccgcggcgatgccagggccttcgccagggctgcgccgggcgctactcggcctctgggctgctctgggcctggggctcttcggcctctcaggtaagagccccgctctggttcggggtggacagggcgggggcggagtccc

SEQ ID NO: 225781 - DNA, 180 bp, Homo sapiens
  chr19:10401004-10401184
  hyper
cgcttcgagatcctaggtgttcttccgcacccaacccttcgccctggagacccagtgtctctcctgtccgctccccgggtacctccttacgctgtgctgtgcaccatggtccacggactggcatcttccccactcgcggtccgcgaagactccatctctccaactaccctgactcagagg

SEQ ID NO: 225782 - DNA, 840 bp, Homo sapiens
  chr19:10529691-10530531
  hyper
gcggggagaaaagtggctgtgggggttgaagaccggcagtcttttttttttttttttttttttttcaaataaggagaagggcgcggggggagggcggtggcaaacggcatcgcgtgccctggggagcccgtgacagggggcgcacgggggcaggggtctggtccccgggtcccgcagcagagcagtttcgcgttcgagctcttatcggcgtggggggggggggcggtgggacacgcgggcgcgtgcactccccccgcccagcagccatccttgggggggttgagggggatgggggcgcactcggatcccgctcgctctctgcttgctcgctcggcgcggcgctgggggaggcgggagcgtgagtcacggcgactcccgatttaggtgccggaaggggggctctgctggcgggggccgcagggaggaggctcgcctgtttactcgcctgaaaagggcacgggggtgcgctccgcggctacctgggaccttcctcagtttacctctggcagaagcgctttagaagaggcagcgatgtatagagcggtgggccggcagctgcggtatccgccacagggtgtcttcctggagccacaagggaaccaatgggacacaccccagaaacaccccagaggccccaggccgaccacacacatacactcacgcacacgcacacactaacatacatagacgtcctccgacactacagtcagacgacagaggccgaatcgcgtgcacaactccgcaagcacacaccgaccacaaacgcatccaagcgcttgagaacacattcacagtccccaggccacctgaaaaaagaccacgtagggatgcacatcctcc

SEQ ID NO: 225783 - DNA, 420 bp, Homo sapiens
  chr19:10530637-10531057
  hyper
gcacacacacttccagccgacactgaaaacacagacaaccctcggaagaggccacgtgcgcgcacatcccgccccgggcccgcaccatcactatcctccgacgcacagacaggagatcccacacactctgccgccgcccgctgcaggtaccgcgccggtggcactaggaccactcctcaaaaactgccccccgccaggggtagcggcgaggacacgccaacaccggactccgccctcgccatgatggaccgactgactgacactctggcaaccagtccggtgtctgcttccagatcggattaaccgtttaactccttcgtgcctgtgcgcgccgcggccaagcagggtgctttgaagacagacgagttccagcgccccctcccagcccggagcggggatctgcgtgggcgggaagggccc

SEQ ID NO: 225784 - DNA, 807 bp, Homo sapiens
  chr19:10531142-10531949
  hyper
ggggcgggacggggcggaggagccggggctggcgccgagcgggccgcggaacgcggagcgcggagcgcggagagcgccgccgggcactgagcagagctccaggcgccgaaaggaagctgcagagcccggcccgggggcgattggcccgcagcgcccccgggtctgtccccggggcgccatggccctaccgcggccgggcgcacccgcggggccctgggctcgctggcttgcgcgcagctgagcggggtgtaggttggaagggccagggccccctggggcgcaagtgggggccggcgccatggaacccccgaccgtcccctcggaaaggagcctgtctctgtcactgcccgggccccgggagggccaggccaccctgaagcctcccccgcagcacctgtggcggcagcctcggacccccatccgtatccagcagcgcggctactccgacagcgcggagcgcgccgagcgggagcggcagccgcaccggcccatagagcgcgccgatgccatggacaccagcgaccggcccggcctgcgcacgacccgcatgtcctggccctcgtccttccatggcactggcaccggcagcggcggcgcgggcggaggcagcagcaggcggtaagactccccgcggcggatgcgcgcggaacggatgggcgcgcagggaggaggcaactcgagctgccggccgcagggggcgctaggatgcgggtggggtcggtttggctggcgggggcggagggaattcggctgcgggggcgtctgggacctggcccctggttgtgcgctctacgggaggcttcctgc

SEQ ID NO: 225785 - DNA, 145 bp, Homo sapiens
  chr19:10589794-10589939
  hyper
gggagtttttttcccgactacgattggctggtgtaattgtcatcacttgaaaaggcagccaatgagaggcgcggtcgcctcgctggtggaagccgagagctgagcgaagtgaggcgtgcggagccaaaggcgctagagcgatagc

SEQ ID NO: 225786 - DNA, 303 bp, Homo sapiens
  chr19:10616223-10616526
  hyper
gagactacgtctcgaaaggaaaagaaaaaaaaaaaagatagatgggatttcgccatgtaagtgaataataaatggaaactctaggcccctggagcctccagggtgaatttgaaagattgaacgtcctggctcagggtctggaaggaatcacgtgtagggctacgttggagttaccccgctaccccaaatccttgttgcgtgtagatgcagttccagacagctcctcaggggggcggcctagatagtccgtgaacacgctgagtggccgaggttgtaaccagcgccttcctggcacgttgcaga

SEQ ID NO: 225787 - DNA, 660 bp, Homo sapiens
  chr19:10624894-10625554
  hyper
cccaacatgccacaaaggccaggagcaccacgctgagcgtgcgcagcaaggccagcgagcgcggcttgcgacgcgcccgggtcgaggtggtccccgcagtcccgggccgtgccggcaggcgccgcgcgttggcgcgtacctggcagtagatgcgcgcgtagagtgcacagatagcggccaggatgcccacgaaggcgagcacgcagaagagcacgtaggccttggcgtagagcggcaagacagtggagcaagcgtccaggcgacccaggcaattccagcccagcgctggcaggagcccgaggagcagcgacacgccccaggccgcggctgccatcgccagcgtgcgcccccgactggagacgggcgcgggccccctgcgcgccatggtgaggctgcgctccagcgcgatggccaggaggctcagcacggacgcagtgagtgccacgaagacgcctccctcccgtgcgaaccagagcgcgggggacagtttcagcgtgagcggccccgacagtaggatgttggcggcgtaggcggcgcctgccagcagatccgacaacgtgaggctgcccaggagcaggaacatgggagcgtggaagcgcgggtggcgtccgagcaccaacaacacggctagattctctagcacgatgaaggcgcacaccg

SEQ ID NO: 225788 - DNA, 283 bp, Homo sapiens
  chr19:10691749-10692032
  hyper
ctggcacccaatagtcgctcaatcatgaaacagcctttgcagtcagccaatggctgcaatactggccgtgatcagcagatggtgagcgagcgcttatttcaaaacgggctgcgattctcttaagtccccacgtggggcgggtttgcgactcccctgtgcatttctcagaagaaaggtcccctaaatgcttacggccagtgagctcgaagagcacgcggtcattgaggcccagccgcagctctggcattcctgacagaaacaccttgagcttgatggtaccgac

SEQ ID NO: 225789 - DNA, 86 bp, Homo sapiens
  chr19:10762176-10762262
  hyper
tagaaaagcagagggtacagcatgcactcatttcttttttgagacggtctagctgtgccatccaggctgaaaagtgcagtgactcc

SEQ ID NO: 225790 - DNA, 436 bp, Homo sapiens
  chr19:11144095-11144531
  hyper
agaaggtgatccaggccggcatgttcgaccagaagtcctccagccatgagcggcgcgccttcctgcaggccatcctggagcacgaggagcaggatgaggtgagcccagcaccggccccgacccctccccagcgtgaatggtggacgcgtgagcggctttcatttttgtttttttaccttttttgcactcttattttttttgcatccctttggagtaaagggagtgtgggctgaacggaaagaggatgagtacttgctttttctttgaagtggtttttttttctaaactgctggtgaaagacgccggattgacagccctggagactgaagtcctctatttatccacagagcagacactgcagcacgggcagcggcagtgccagcttcgcccacactgcccctccgccagcgggcgtcaaccccgacttggaggagcc

SEQ ID NO: 225791 - DNA, 187 bp, Homo sapiens
  chr19:11199872-11200059
  hyper
tcagaagatgcgtttccaattttgagggggcgtcagctcttcaccggagacccaaatacaacaaatcaagtcgcctgccctggcgacactttcgaaggactggagtgggaatcagagcttcacgggttaaaaagccgatgtcacatcggccgttcgaaactcctcctcttgcagtgaggtgaagaca

SEQ ID NO: 225792 - DNA, 460 bp, Homo sapiens; identical to SEQ ID NO: 205181
  chr19:11200842-11201302
  hyper

SEQ ID NO: 225793 - DNA, 266 bp, Homo sapiens
  chr19:11308102-11308368
  hyper
tgcacactcgatccccgaaccagacttgaacccctacccagccccgggtcccactcgccttgcgcgctccggccgctgccttccctgggtcccgccgcccgagcgtcttcgcgcgcgccgcagcctgggcgcccggccctcggaggtggctccgcccgcaccacgccccctccggctggtcccgcccccccagccggcaccgccccctccagccgcccgggcgccccggccgcggtggggggtggggatggagagacgctggttgg

SEQ ID NO: 225794 - DNA, 42 bp, Homo sapiens
  chr19:11373072-11373114
  hyper
ctgttgatcttgtgcgcgaaggcgcggcgctcggaggcagcc

SEQ ID NO: 225795 - DNA, 105 bp, Homo sapiens; identical to SEQ ID NO: 205184
  chr19:11465993-11466098
  hyper

SEQ ID NO: 225796 - DNA, 353 bp, Homo sapiens
  chr19:11529748-11530101
  hyper
catccctaagaggaaccagtcgcttcactgggtcaagggccgcgagtccccaggaggggactccagggcaagttcagattgggagcagataccgtccgacgggcgggcgcttggagtttctggacctgcgggtcaccagggatgcggggtccggggatcccttgtccccttaccagggccagctctttgcctgctgtgcgctccatggccggcgcccgtccctctcagtggcgccgctgagtgaggcggaagggccggcgggtggcgggtggcgggcggcgggcagtggccgggcgctgaggccagaggggcggagcggccgagctgctggggcggggcggggcagggcaggc

SEQ ID NO: 225797 - DNA, 1477 bp, Homo sapiens
  chr19:11590499-11591976
  hyper
ccaggcagggcgtggcagggcgggaggggctgcgcgctcgggagctgaccagctccgtggctgctgaaagcaccgagcgcggggctagcggtgcgggcgagcaggcgggcgggccgcgctcaaggtcacctcgcggcccagagccttggcgaggtggggagcctggacctggcctaagggggctgtctcggcctcccaccccatctcccggggggcggagacccgggagcccagaggtgcccccccaacccgcgggccctcctctcccctccccctccccgcagcccgaggcgcccgcgcgaggctgcggcccgcgaagaagcgccgagaaacaaagggacgcggcagcagcggcggcgggcccgcggggcctccgggcgcgccccctcctctcccctccccgcttgccgcaaggtcgacgggctcgaggacgagacgcccgcctcccgggtgcggccgaggcccggggcgcgcgatccgacgccacccgctttcccagggctctcggggacgctttgtcgctttggcttggcccagcaccagtgatcgggccctgcgtttgcctgggcggcctgcggggtctgggcctggatggaggaagcatccttagccgccgcggcccctcccccatcaggcctgctggagagggggcaatcccgcctccagggcggcgtcggacgcctcccgaatcgcagtcagtctccctaaggccctctcagaccaagctctaagcgccctcagcactctgggcgcggccctgcccactctcaggccccgaggcttggtcctacccccccaacccgggcctagctaggcctggtcctaccccccccgccgcacccgcccaatctccgcggagcctgggcccaactcctccccgtcccgattccctttcggcgacaggggaatacctacagtgaccattcttgtgtgcccggcgggcgcggtccgtgttgaggggggctccgggggtggtgcactcctaggggggcgcccgatgctcacgctggggtcccgcccgggcggcctctggtgcggccgctgcagatgtggcgatgaaggcggcggctccctcgagggccagggacgggcccgaacccggggatgcgcgcgcggatggccgggccccggggtggcctgcgggcggcaggggatggaaagagggagcgggcgcggggttgaggacgccccctgcgcggccccgcggggcccggggaggttgcgcttcccgacagagatcgcggcgctctgcctttcgccgccgcccctcggtcggtcctgtccggtcccgtgtgttcaagtcctctcccctcgcccaccctccctccctccctccggcccgcgctgcgcgctccgcgctctggaccgcgccgccgccgcccccagccctttatagcagcagctgccagcgccggcgtcgctcattggctgcggcgaccgagctccgcctcctcgcggctcccgacggcgcggcagg

SEQ ID NO: 225798 - DNA, 1052 bp, Homo sapiens
  chr19:11592604-11593656
  hyper
cgtgattggtcctcctgactgtggagtcatgctcgctctctgctagggggaacctggcctctctctaaggcgttgggggtggcgcagcctcctttggtgcgcgggcgccggtgcatgtttacgtcggggcgcgggaactagcacacactggggcggggtcgccagggcgtgaggcttcagcaccacagacagcaatccgacagtccggtcgagggcgctgccggcgaggtagcccagaccccctaactggagagcggcagtccccacccaatcctcgttcctgcacgccctttaggctccagactgtcagagagcgccaccagcgaggagagcctaatttgcccaatcaggggcggcccttgagataaccagttactggaagatgccctagagatcgagccaatgggagtgcgcgcaccaggggatgctgccacgcctggaaagggcaggccaatcgcagtggcccgcgcaataggggcggtggcggtgcagatccccgggtggcccctcttgggctcgccggggcgacctggctgcgggcgctaggggccccaagcgatggtctgttccccaccccgtgttcctcccggtttccgtcatcggaaactgagctaggaggggggctgctcctgggcgcgcggaccccgctgcggttcccatggaaacctgccggctccggcagtgcggggagagtggaggggacctgcctcgcggggggagggagctcgcgggggcggccccagcggccggactcgctcatccttgccgattcttctgtccccggctggggtagccccccggtccgcagcaggaactgaggcatagctggggccccgcctcatcccccgaactggtgaggaaccggcggggccaatctgcgcgtggcgccacagggctcccccgggcacgtgcctgagctcgcggctgcggtccccagggtcacgtggctgcggccaccagggcctacgcgcctcgcacgccacctagcggccgcgcctcgctccccgcccctctctctagcggcccgcaggaggcggcggcctcagcatcct

SEQ ID NO: 225799 - DNA, 706 bp, Homo sapiens
  chr19:11959492-11960198
  hyper
gggccgaacattccatccaatcagaggcactggctcggggccctgcccactgtgcatccaggcacggaggatgttgcattcctgccgtcacctttgtcgctgcgagggcggcggttgggatctggcctttccagccccgagagggacctagtgcctctacccagatttctgtcgctctgtcacctgcgctatgccctgctttactcacaggagctgtagagaggaccccggtacatctgaaagccgggaaatggtgcgtgtgctggccgggagtggtgcgatgggggaggggctgcctggaactggcgggacccgggcctccctgtgggcgactccggggtctgggaccgagtcctcctagagctgctcggccctcggtccccgcggccgctggatgtgggtgggccggcagccgggactccgggcgtcctgtcccgtccctgcccgtcgactgcggccttggccccgaagcccttttgtgcagctccgcgcccgcagcccgacgccccagcttgtgcgggggccacgggagggtcatgcgcggatttcgactcgggtgtggatttcgtccgtaggaggagcagcggtctgtggggcccacagcctccactttctcctgttaaaaattatactgaggtacgttaacaaaaagttcatttgaggaaacagccattcacgaatgagaaacacccggtcctggcttgtg

SEQ ID NO: 225800 - DNA, 808 bp, Homo sapiens
  chr19:12146021-12146829
  hyper
ccccacacccgaggcgggatccccccatgaccctcgcgtagtccccgcacaatgtggggagacgcggggcagcgggcgcggagctgcccagagagggctctgggaactgggtgacagtcaccgcgcagggacaggacgagacgcccgggtcccggcggccggcccagccccactgtggggccaaggggaccaagggccgagctgtcccacgggaaatcgggtcccagaccccggagtcgccgcggggaggcccgggtcccaccacagccggttccggccggttccaaccagctcctcccccgcctcgggacccctggcccgcacgctcaccatttcttgcctttcaggtgactcccacgaccagtgcgggtcacagcacaggcgacagaagctatggcagaggcacctgaaccctctcggaggggaaagccaggctcccaacctcagctcgccgcctggagccgggaaccgaggagagcagggccttcgccctccccgatggacactcggcaggccccgcccagcgcccctgattggacgaagcgccgggccccgccccctcagccgtgagtgacaatagaagcccttggtaacggggctctgaaaacgggtttgaccggatccagcgatagattctttaagccagaggtctgtaacctttttagcaccagaaccggtttcgtggaagacagttctcctacgggggcagatagtttcggaatgaaacttccacctcagatcaggcattttatcctcataaggcgaacccaacctagatccctcgcatgtgcagctcacaatagggttc

SEQ ID NO: 225801 - DNA, 33 bp, Homo sapiens; identical to SEQ ID NO: 205204
  chr19:12204551-12204584
  hyper

SEQ ID NO: 225802 - DNA, 900 bp, Homo sapiens
  chr19:12266893-12267793
  hyper
aatttctgggctgaagcaatccccccgcctcaacctgccaggcgtgacccactgcgcctggccttcaatttagtttttcaggaaaaaaggggggactggggaccccgcagcccaccgctcctcccacacgaaccacacacccgaggcaggattgcctccatgaccctcccgtggtctccgcacaatctggggagacgcgggactacgggcgcggagctccccagagagggctccggggccggggccagggccggggtcgcagtcgcagcgcagagacgggacaggacgcctggggtcccggctgccggcccaaccccaccctgcggccgaagggaccgagggccgagctacgccagggggactccgctctgcagacccgaagtcgctgcaggaaggcctgggtcctgctagagccggttcgagccggttcctcccggcccctcccccgtctcgggacccccggccccgcacactcaccatttcccggcttccaggtgtcctggcctcctctccacggatccctctaacagtccagtcacagtgcgggcgatggagcgacagaagctatggcggaggcacctggtccctctcggggccggaaaaccgagatcccgacctccctttggtgcaagacgcctgggagtcaggaaagcgggaatgcggcctccccttccccggatggacagttggcaggaccccgccccagcgcccctgattggatgaggctccagtccccgtcccatcggtcctgagtgacagcggaagccctgggtaacaaggcccggcagaaccgaaatgacctgttccaaccacagattatctaagcgagctccctccctgcgtcttgctctttgggtatttgcatttcagccaaatttgctccgaattgctagagggggt

SEQ ID NO: 225803 - DNA, 342 bp, Homo sapiens
  chr19:12595754-12596096
  hyper
cggggtcaggaatctgttcccctgccacggatatttgcgtctaagcagaatttgttaacgtacccggggtcgggcactggtgtcttcctgcagctccttctgagcgcggagacacaagcgtgcacagcgcaggaaattccaggctcagtttccagaaaaaggctctttgtccacagcgaaaaaggacgcccgggccatgccagactagaacggaagggtcagacgctcccagacttagcataaggctgcgaggccattcatggatttctgactcttgtttacaaatacagacacttagagtgacagagtgacctcatcatacctaacaaagagtgactacgt

SEQ ID NO: 225804 - DNA, 132 bp, Homo sapiens
  chr19:12707774-12707906
  hyper
aagggctccggggccggggccgcaatcgcagggacgggacagaacgcctgaggtcccagctgccggcccagccccacgctgctgggagaccctcgggtcagctgcgccagggggactcgggtcttcccatag

SEQ ID NO: 225805 - DNA, 175 bp, Homo sapiens
  chr19:12807097-12807272
  hyper
gcacgaggcgggcgtccaggtaggagcagatctcgagcagcagctccgggggaaggctcagaaggcccggctcacttacggccgaaaccctggacgcggcccgaggctccgaagcgctcggggacgcggcgggtgtggatagctgcgaggggcgcgagaacgccagcccggattt

SEQ ID NO: 225806 - DNA, 208 bp, Homo sapiens
  chr19:12900114-12900322
  hyper
actggaagcctgaccgtctgcacctcgccgcagcccttcccgggaaggggctctgggttccctcatattctccccttagattttcaggtcttctctgactcggggagggaagctctcagatgacagagctactctagggaaggaggggggctccctctaggtattctggatgatagtaggatgggacctgcagactaaaacgagagtg

SEQ ID NO: 225807 - DNA, 391 bp, Homo sapiens
  chr19:12900361-12900752
  hyper
acggagctccagatctcctggcagaagggaagggcaccccacccgagggaggaggcagccgccgttccagcccgcccaggcgccgggggcgcctcgaggcatcggcccgccctctccgcgccccgtcgggccgggggcgaagtccgacccaggcccgcgggcaggcggggacctgccgggctgggttgggccaggccgggcctggcaggacgcagccccaaagcggcggggtggggcggggccgggccaggcggccgtgggggccccgggggcggcggtcggggctggtcgggactagcagtctgggggcccaggcgcgccctgggacctggcagatagtcgggttccccgcttctggctcggggccccaggacagcgctggtcccacctc

SEQ ID NO: 225808 - DNA, 804 bp, Homo sapiens
  chr19:12995986-12996790
  hyper
tgaggcccctagggcacaaaatttaaggaggcactcactctcagaggccagccaagtccaagtcccgccctctgcaacccttcttcccctgtaactacagcgggcgccgcgccctttctcatgtccggggccccgccccctcacctgtgtgcgtgcgcagatgcgccttcaggtgggagctcttggtgtagctcttgccgcaacccgggtgcgcgcacgtgtgcgctgcctgcctcttgcgcgcccacgaacgtcggcctcgcttggatggcgcggtctcggctatcacacctggatcctctgcagtccccccgagtccagtgcccaccgtcccgggtcccaaacaactcaggaaggagggggacgtggcgggaccgggcgcgggtccctggagcccgcggaagagctggaagtgcccttggtactgaggcgccgggtacatcgcggggtacccggacagtagcccgtagggggcgcccgacgccgcaggcactgaaagcccggtccgcgggaagtagccacccgaggagccggcgccgggccccgggtacaccggttgcagcgccagcgccttgggctcgggggccggggctggagccagggctgggcccacgaaggcgtcgggagcccgggctcgcagggcagggcgcacccaacccgagtgatcctccgaacccaaaagcccagccaccagccccgggccgccagcatatgcgcccagagtctcgggcggcggcggatattgcgccccggaggcctcgctgggcgccagagcgcaggtctggggcgcgccaccgggctccg

SEQ ID NO: 225809 - DNA, 592 bp, Homo sapiens
  chr19:13029775-13030367
  hyper
aaaaaagaaatgaaagaaacgggtgcggtgcgtgggtgtttgtgcctttctctactccgttccggccacgcgccatgtgtggaaatcagacccgtcagtgcgtcagtcagggccgggttcagtcagtcaggaaatttgaggccaggcctgatgagagggagccccaatggcaaaggacaagcggccgggctcgggtccgctggagatggctgggatcgcagccgttccctgcctatctgtccgcccgccccacgcgcgagaaggaaacaagcgccgcgtactccctgtcgctccattccgtattttcccgccttcaagctcgcaccctctgcgcatgcgccgaccccgcccctggccagctgcgctcccgcggacgagtgtgttgtgacgcgtgctcccggccccgccctctttgagaacttgcgcggccaactgggcggggccgaccgttaagcagcagtttcgcggtccgcgggctgcgcgcgcagtcggcgccccttgggagcaggacggcgcgctctgggtgcgcttgtgtgcccctgtgaggctcctgggttccacggggcgcccaggttatacggatctcagagtc

SEQ ID NO: 225810 - DNA, 513 bp, Homo sapiens; identical to SEQ ID NO: 205219
  chr19:13049935-13050448
  hyper

SEQ ID NO: 225811 - DNA, 828 bp, Homo sapiens; identical to SEQ ID NO: 205220
  chr19:13050858-13051686
  hyper

SEQ ID NO: 225812 - DNA, 931 bp, Homo sapiens; identical to SEQ ID NO: 205221
  chr19:13054373-13055304
  hyper

SEQ ID NO: 225813 - DNA, 131 bp, Homo sapiens; identical to SEQ ID NO: 205222
  chr19:13094456-13094587
  hyper

SEQ ID NO: 225814 - DNA, 84 bp, Homo sapiens
  chr19:13106028-13106112
  hyper
atgtgtggcggggtccgagtcccgctgcgtgtcagcgtgtgtctgcgctggaacgcgggccagcacgtgtcagggcggccgcgt

SEQ ID NO: 225815 - DNA, 1217 bp, Homo sapiens
  chr19:13106172-13107389
  hyper
ttgtgtgtgtgcgccggccgccgctcccccgccctgcccgcccctccccgcgcccctcctcccgcccgcgccgcccgcccgctccctctccccggagtgcgccgcttccaaactttgtctaaactttcactttcacagcgcggcggctgcggcggcggcggcggcgggcgagggtgaccggccgagcggcggcggcatggagtagacgcgcggcggcagcggcggcggcggcggacgcgagaggcagcggcgagcgcggcggcggcggcggcagcggcggccccggagccggcggggccgagcttgcgagcggcgagcgcggagcggcgccgggccgagcgcggggccgcgggccgggcgggcgcagcgcggcggaggccggaggagccgagccggagcccgagcccgagcgcggccgccgcctgccgggcctcccctcgccgcggccggccgccgcgctcccgcccgggcgcccagctatgtactccccgtactgcctcacccaggtaccggccgccgcccccgcgcgaccgggggaggggagcgggcgcgggaggccggccggcggcgcgggcggaggggacgcgcggcggccgggaagggggggccgagagcccgcgggccgccgaggggtgcaggctgtgccgcggggagcccaggcacgcgtgcgggcgtcaccgtgcgcgtgcgaccctggccaccgggcggactccttttgggggttccgggggtggccagctgcgtcgtggcgctgcccgtggagcgcaggcgggagtgcgtgtacgtgtgtgtgtgtgtgtgtgtgtgtgtgtgcgcgctcgactggggtgcgatgggcagcgggactccggctgacctgtgggctactgtagcgcgcacccgggcagcgtggtcgctggcagtgtttgcggggttgacagagtggcaagagggtggtcccgagggcgcagaggggacactgggtcccgcgacgcttcctggggagggcgcagcggttcccgagggtggcagtggccggcgtgcgtggcggcggcccttgcgtgcggccggggtgcctggggtgggccgagcggcccgggcgtctccccaaagtctttgtttaggcctcacatgggagcggggctaagaaaatggcggggctcccaaatttcggaggggcaggggaggggagaggggggcgggcgcgctgccagcggtggccgcgcctctccgacccc

SEQ ID NO: 225816 - DNA, 360 bp, Homo sapiens
  chr19:13213570-13213930
  hyper
cccgggccggcccgccttctccccgcccccggcggcccggtttcctccctctcacccctggcggcgcagcggccggaggatgctggcccagtgcagataagggccaggctgcctggccgcgcctgataaggagcctggctgaccccggaggaaaccagcgggcggggacctagcagcgcgggcctcccggccccgcccccagccggcgctggcaggactcggtccgccacccctcagggcttcgccttccgctcccccagccactgtagggaccccgggcctctggggacccgggccccagggcagccggggagggaggtgcctggatgcacgcagggggtaaactgaggcagggaagct

SEQ ID NO: 225817 - DNA, 119 bp, Homo sapiens
  chr19:13263755-13263874
  hyper
aggagtgtttggccgcgacgagttggaaagcccggatgcgtccttcggttgggcggggtgtctcagtgacgtcactgggggtataaaagggcctgggtggcgggcgcctgggcagagcg

SEQ ID NO: 225818 - DNA, 154 bp, Homo sapiens
  chr19:13264169-13264323
  hyper
ccgaggtgtcgttgccggccgccctcccctctgaccctcgcctgcacccgccccgagaagccgagtccacggccgagacagcgacccccgacggtgagcacccgtttccggagccaatggacacgcaggaggcgccgacagccgaggagacctc

SEQ ID NO: 225819 - DNA, 180 bp, Homo sapiens
  chr19:13264480-13264660
  hyper
cagccccctccggcgcaagcggagggcgcctttcccaacctggcccgcgtcctgcagaggcgcttctccggcctcctgaactgcagccccgcggcccctccgacggcgccgcccgcgtgcgaggcaaagcccgcttgccgcccggcggacagcatgctcaacgtgctcgtgcgggccgtg

SEQ ID NO: 225820 - DNA, 180 bp, Homo sapiens
  chr19:13266248-13266428
  hyper
ccacccggcattaggtttttaaaaatgcccattagagccctagttattttcttgggtcactccccagctctagaataaccaccccgaaacgagaaagccctttcaatataccccacgtaggtttaagagtggggttgtgggcgttgccccagggcgaagggagggggcctgtcgggaaga

SEQ ID NO: 225821 - DNA, 557 bp, Homo sapiens
  chr19:13266493-13267050
  hyper
cgccgacggctggctctgccgccgcaggcttcccatgaccccaggggaactgaccccgtggccacagggtagaaggaggggcaagccggcctcagaacgtctgctggtggaatctgggagctttggctcccctcccgcccaacccacaccccctttcctctcctgtgtggattgtgaaggagagcttctcaccgttctccagccaagctcgcccccacggctgcctgattccttcctgggaacacgtggggggacttttaaaaggcgccacctactccgagtcctgacccacccaactctcccaggggacgtgggggcactggagccccacaccgcaggcggtagctcaatgcacccgcgtcggagttcctcccccgcgagcgtggcaaggctcagggaagtcccgggcccctggggagggggccttgccgcgcatcctgtcgcaggaaccgccgggcccttccttccgcgggaagcggcttggccgacccccgcccccgcccgggcctcttgggggtttccggtgcccggccaccgtggggctggggactgaaagt

SEQ ID NO: 225822 - DNA, 62 bp, Homo sapiens; identical to SEQ ID NO: 205232
  chr19:13274019-13274081
  hyper

SEQ ID NO: 225823 - DNA, 342 bp, Homo sapiens
  chr19:13961269-13961611
  hyper
aatccctcttagcgcgcaccccggcctgaggctcgaacccaggtccgcgctggagggcggtggcggttgccgagcaacgcgctgtttgttggcgcggggggcggggccggggccggcgcgcggtgactcaccgcggcgtgatgcggacgggcgcggcgcccagcagcctggccggcggcccgatctcggctggcctcggcgtccggaggggcccggcggcgggggcgccttagcccccaagtgggcgccggaggcccgtggggaagcggcggagcaggtcccgggctctcggactcggttcgaatcccagccctgcctcttactcttgactcttgatctgtg

SEQ ID NO: 225824 - DNA, 221 bp, Homo sapiens
  chr19:13975797-13976018
  hyper
ttgaggtctgcgtgcgtctgggtccctgcgtgtgcccgcccgcgcccccgtgtccctgattcccccgcgcgggccccgggagctgcgttttggagacccacgggcatcccccgagtgcgtcccggtgcgcctggcaggaggcctcgggacgcgcacggccgcggctggacccaccgcccggcgcggcgcggggaggagggagggggcggcggcagcgggga

SEQ ID NO: 225825 - DNA, 600 bp, Homo sapiens
  chr19:14073813-14074413
  hyper
gggtccagggggttcagggaggtggccagattggcgaactggaggaagaagagaagaaaatgggtgagggtcccgccgcctggcgccccgcccgcgcccccagtggcccgcctcgcgcacctcgcccatgacggcgatgggggtctcgcccttggcctgggctacgcggtgctcgatcaggtagtacatgtactcgtcgtagagcagccggatgaggtggaaggaaccgaagctggcggcgctgcgcagggtcaggtcccggatcaccatggagctggggatggagacggagaggagaccgtcaggccccgtccggcccgaccccctctccccctccccgctgcgatgcgcccgggcctcgcgccagcccagtgactcaggctggatcccgcacagccttcccggcacatgagcccagggccccagcctgcccgcccagcctgcaggctcgggtcgtcgtagaagagcacctgagacccccagggacgcggggccttccctggtgccgcccggacccgatcccgccgcgcgcgcacctgtagaaggaccacttgaggaggaagagcttggcggccttggggaagccggcgctgccctggt

SEQ ID NO: 225826 - DNA, 559 bp, Homo sapiens
  chr19:14089418-14089977
  hyper
tggggagtcagaggcgggtccctagaccgacccgtcgggcggaggtggggtctacagggcttgcggggcctggtgggcggcccagactgggcgcccccgcccccgcccgcccgctgccccccgcccgtgcgtccgccacctactttgagggccgtggcggccgtgccgaacactagcacctgggggattctctggatcctgaccctctggtcggggctggctcgggccgggagccgggacagtggctcgaagaccactttctgctgcggcaggagcaggtgtgggggcagcacgcccaccagctccacccactgctcggcgcccggctcgtaatggggcggcggcggctcggggctgcctagctgcggggcctcgccgctgcacgcgggcggccggggcggcggctccggcggcggcgtgggccggggatctcgctgctctgccttcctagcgggaaactgactgcctgagctctggaggacaaacagagacactggggggtcaacgggggcggccgcgggcggggctccaggcctccacccaccgggttgctgagcgc

SEQ ID NO: 225827 - DNA, 48 bp, Homo sapiens
  chr19:14316561-14316609
  hyper
gcgctccgtgggggccgcccctcccaggcccctcgccagtgggggtga

SEQ ID NO: 225828 - DNA, 443 bp, Homo sapiens
  chr19:14516821-14517264
  hyper
tcccggggctcagtcgggtaggcgggccctggaggcatgaggccccgcccctgtccgggatctggccccgcccaccggggggtcgggttgtctctttaaagggcgctggctttggagctgcctggccacaccccgagtgcccgctcgcttctgagcgttgttgggggtgggccctggggggaaacctggcccccgctccagacccgcccaccctccggctgtggtcccgcccactctcgggacctggcaggcgactggctctggcgccgcatgcccctccccgcgctgacgtcgctccgcccctccgtccccgccccgcaggtggggctgcgctgccgcctggtggccgggctgctgcactactgtttcctggccgccttctgctggatgagcctcgaaggcctggagctctactttcttgtggtgcgcgtgttccaaggcca

SEQ ID NO: 225829 - DNA, 499 bp, Homo sapiens
  chr19:14583048-14583547
  hyper
cggagccccagccccggccgcccgcacggtgcgcttgctcctgcggctctggcgcccacgggcccggcaccctcgaacctcctagaaccgcgcccccgtgtctccgcgccctcttctggtaggccccggaactgcatccaccctggaggcgcacgcggcgtccctgcagccccccgcgcggccccagtggatgccgaagccccgacgggacacacggtcctgcctgggctcgcagaatggctttttattcccaaaggctctgcgccgcgcacctgggcccagcccagggtgggctggcttagtcgttgggcctctggttgtgcttagaagtggctgaggccgctgtgccgggagctgcgcagcgagctggcctcccaggcgctcggtgttaggcccagccccgcggggccgcccttggctccggccctcgggggcaagaggcgaagcagttggcgcagcacggcctggcgcagtaggatgtacacccaagggtccagga

SEQ ID NO: 225830 - DNA, 143 bp, Homo sapiens; identical to SEQ ID NO: 205239
  chr19:14607038-14607181
  hyper

SEQ ID NO: 225831 - DNA, 180 bp, Homo sapiens
  chr19:14887413-14887593
  hyper
catgtggctttctccatcgccggccccacagacaccagcggcgcctcccgtttctcagacgcatccaaggggtcccgctggagcttcctcgctaccacccccagcggggccccaaagtacttaccgagaaagacgagaaagacgcggcctcccatggttccagctgagctgccggcagga

SEQ ID NO: 225832 - DNA, 1039 bp, Homo sapiens
  chr19:15090050-15091089
  hyper
ggccacgggttggggaggtggggagacgggcagggagacccggggataactaaggggataggaaactcaccagaacgaccaggagaaaagcggtggcaacggctctaaggggcaagcaggagctcagagacaaagggcggcggagaagtggggacgtgggcgcagggagcgccccacacgcctgaccccagcgcctcggatcccccacctgcccgcaacctccgcgccgcagccacaccgagtccccgcgccgagccgcggagtccccactcaccggcgtccggagcggcgggggcggcctgcccgcgcctcggcctgcgcgctgcgcccggatgcaggagccggagcccggcgaagcgcccggccggggccgcggggacccgccagggactgtgcagcaccggcgcggggaccggaccgtggaggcaccggcgcggagccgggacgcgctatgctgcgggagggatccgggccggccctgcgctcacgtgggtgtgggggcaccgagcggccgggggagggggcgggatcccctccgcgatgccctccgcctcccccgcgcccagcccaggctccgcagccgtgtgggagaagggggacagcgtgcttgcgaagggagggggactgggggtgggcgggggtgagtggcctctccggcatccagcccccgccccctgctcggagccgcgcctccgcgcccccgccccctaaaccgcctccggagccctcggaggccccagcatccctggcggagcgcggggaacaggccctggcaccgcgggacccgctccagcagcctcggcggaggcctggggaaggcgcggctctagtgtcccagtaacaacagccagggagagggctccgctgcccccttctccttgcgggtgcaccttccggccttggccacttggctgctgtgtgcccttgggccaactcctctccctctctgagcctggcttcctccgctaaacaaggaagatggcttggccgaccccacagaaaattaaagctgagaaaattaaagcgcgtgaggctggaa

SEQ ID NO: 225833 - DNA, 290 bp, Homo sapiens
  chr19:15235678-15235968
  hyper
acgaggcccctccctctttgactgcccccagcccacctcccattctgtgccccgcaccttgtgcagcagctgatagaagagccccaggcggtgagcggcgcccagcaaggcggccaccagcgtcccgcaggccaggagcaggaaggaggggaataagctcccagcgggggcggcggccgcgggggtctccatgaggtggtacctaagagagaaagggcacttcccagacttgggcgcgacagggaacctctccggaagaaatcgcgccccttctcgcagcaggatccagg

SEQ ID NO: 225834 - DNA, 601 bp, Homo sapiens
  chr19:15288255-15288856
  hyper
ggaaagagaggcagggcccacggacaaacagactgggatggatgcatagacagacggatcgatcgggtggatgggctcacttgcaagtgcgctcgcggccaccggcgtggcagtcgaagttgtcgtagaggcaggcgggcgagctgcaggcggggtcgcagcggctgttgttgaagaggcgccagcactgcagcgcctcgcattgccgccaggggtcgcccacgctcagcgagcagtcgccgccgtcccagccgcagcctgggctgttgcactcgcggtcgcagcgctggtccccgcgcttggcctggcaggcggcgcgcgggcaccgcggctcctccgagacctcgggtgccgcggcgggcgcctcgcagcgcggcccggtccagccctgcgcgcaagcgcagcggaagaagggcgcgagcggcgcggggcggcaggagcccccgtggagacagggggcggccgcgcagctggcgttgctggcccccggcggcgaccccgggaagctgcggcaggagggtcccgacaaccctggggggcaggcgcagcgcggcccgcggggcgtctgctggcatgggacgcccaccgggcactgcagctc

SEQ ID NO: 225835 - DNA, 540 bp, Homo sapiens
  chr19:15342749-15343289
  hyper
gcagccccgatagcgcccccgtgcgatcaccttgaggttcaggaaaccgtgctcacccagcgaggggtcgctcaggcaggcgggggacgcgctccgacggcgcccgcagcagccgcgccggggccggcacagcacgtgcgtgagcgctatgcagccgtagaccgccgcggccaccagcgccaccgagaacaccaggctccacatgaaggcgcgcagcagcttcagcgacaggcgcgacggcgccagcagcgcggtcaccaccagctccggcatgtcgccgcgctccgggaccacggcggcgctgccggccaggggcacctgcagcagcggcgaagcggtgtcagggctcaggggcccatcgcccttggcctggggcccctccgtgccgtcgggatttgtgggacgcgctgaaggaagaggcgggcggctccgacagaaaacagccagagcgcaccactcacctgagtgccaggtaaacacctgggcgcgacagggacaggaaacaagggtagggtgcggaggctggggaggaagaggttg

SEQ ID NO: 225836 - DNA, 72 bp, Homo sapiens
  chr19:15479836-15479908
  hyper
ctgaaaaaaggttggagaagcatctgaactgtaacccctacccctgatgccagtcccgagactgtcccacga

SEQ ID NO: 225837 - DNA, 511 bp, Homo sapiens
  chr19:15695278-15695789
  hyper
gtggggttgggagtcccagacgaggttcccggcgcgatggggccgggatgggggtcctgggcacagtcagagtccccaccccctcccccgggaactgcatcggccagacgttcgccatggctgagatgaaggtggtcctggcgctcacgctgctgcgcttccgcgtcctgccggaccacgcggagccccgcaggaagctggagctgatcgtgcgcgcggaggatggactttggctacgggtggagcccctgagcgcggatctgcagtgacccaccactgtcaggtctcagagccacccgcgccctcctcaggcacctttgcagattccggggaatcaatctgtgcctgagtcccacagacagccagcagggggcgtcggagaactgcagggatccagggcctggcgaggggaaggcggagtatttctgagccaagaccctgacagcctctctggttgagcacagtggccccgtgctgagggcgggttgtcccagagcgcaggtggggacag

SEQ ID NO: 225838 - DNA, 960 bp, Homo sapiens
  chr19:16187016-16187976
  hyper
gccaggccggagccccggggccgggaaggcggggagagccgcagggggaggaggaagaggaggaggagaaggcggcgcctcccagcgctttctccaaataagtcccgaaaaggggcactttccagcagctgtggccagcggtgccgacgtcaggccctcccccagcggtgctgacgtcggcggtccggccgggtgacctcatcgccccgacggcagccggcccggggggcggggagaggcgggggcggcccccgcgcaggcaaaggcttggggggccggggcgcggctgtgcagctctcgccggagccgagcccagccgagcgtccgccgctgcccgtgcgcctctgcgcctccgcgccatggccggcctcaactccctggaggcggtgaaacgcaagatccaggccctgcagcagcaggcggacgaggcggaagaccgcgcgcagggcctgcagcgggagctggacggcgagcgcgagcggcgcgagaaagtgagcgccccggcctcgggccccgcacccgcagcctcctcccccgcgcgccctcctttcttcccggcttcccgcgctgcccgcccgcgcgcagtcctcgggccgcctttttacgccctcggacgccgatcgccgacccacatccctgcgcccgcagccaggaccccctacttcctccgccgtcctccttcctgggcctgggacaggggagggggcgccgcctccgggtcgggcggggccggccaagcgggaaatggggggatggggcggagggggtgagcgatctccgggtggagaagtggagcggcgggagggggcgtatcgtgcaggctccgactccggggctggcgccggggtcccgggccgaggggaacccgcgaccggacttgtgggggagaatgaggatgaaaacgtggagcttccattgtctagggtttgaccggccgacagggatttcgacgggggaccg

SEQ ID NO: 225839 - DNA, 192 bp, Homo sapiens
  chr19:16222515-16222707
  hyper
ggctgcttccggctccgcgctccgctcgccccctcccaaggtctccccgcgactggcgggacgcaggggcgggcgtcggccgcggtgacgcgcagcgggcctggagccaataaggggcgggctcggtgctgatggacggtgctggtggccagtggagaggcgctggccgcacttcccgtcggggagagagtg

SEQ ID NO: 225840 - DNA, 105 bp, Homo sapiens
  chr19:16638141-16638246
  hyper
tgtgaggttcaatttcgtgtcctgaagctggggatgggaggctcaaagccacaaccaccaagtctcagtccagagccagtctccttgccatccttacacctgtcc

SEQ ID NO: 225841 - DNA, 278 bp, Homo sapiens
  chr19:17137103-17137381
  hyper
cacacgaagggggcgaggtggggcggggggagctgacctcagcacctttagcttttgggagtccctgtacctccacagagccacttcggaaactttagggcgccccctcctcaagacgattcgggaacaagaggccaggtccagcccagcgcggaggctgtgtggccttgggcaggtcgctgcaacactctgagccagtacccgcgacccccaccccagaaggcgaccgacctcctctgtcgccggaggatactcacggggcctgaggctgcgcggcg

SEQ ID NO: 225842 - DNA, 76 bp, Homo sapiens
  chr19:17137592-17137668
  hyper
tgcgccccgctccgcgcccggccaagctggggcagccccgggccagccccctccccggacccgcctcgtctccggg

SEQ ID NO: 225843 - DNA, 388 bp, Homo sapiens
  chr19:17355714-17356102
  hyper
ggggtgcacggcggcggcgcgcggatggggggctcaccggcaggtgtagctgaggttgcggcggatgcttcgcttgaaaaagctcttgcagccctcgcaggtgaagacaccgtaatgcttgccgctcgacttgtccccgcacaccacgcagtccacctgcagccccggccgctcctcgtcgcccggctcggcgtcgctggcggcaccggggggcgaggccgagtcgtcctcggccgcgcgcgggtagccgcccgccttgtccacgccgttcgtgtcgccgccggggccgccccagccgccggtcaccatggccatagccccagggcagcggggccggggcgcccccaccgcgctcttccctccgggcacccctctcggcccgggggac

SEQ ID NO: 225844 - DNA, 265 bp, Homo sapiens
  chr19:17357470-17357735
  hyper
gcgcccacccgccccgcgcggctggaggcgacaggcatgccctgtctgggggcctgcccctttttcccttttaatttccttttctttctgtgctttgcagaaagggcttggcctggcggccggctggactgcagatgtctcttccaggcgccctggagcctcgcagctgccgccacctccaactcaccccatcccccagtaccggggctggggcccgcccgaccagcatttattaagcaccctttgtatgcgaggcccgggctgg

SEQ ID NO: 225845 - DNA, 336 bp, Homo sapiens
  chr19:17392399-17392735
  hyper
tagctccacccactcgagccgggtgccttcgcgtttcccgtttttaaatgagatagtggcacacccggtggcatcctcccacccgggctcttatcggcggtcccagaccctgcttgagcgcctccgggtgtcaagggcccctgaggacactaaagctctcgaaccccgatgtggacccccgtgcggcgcggggcagcctggctgggaaccctgctcggccctggagaggggccccccgagccgaggggaggagcggcgcatgcccacaagccccccgcgggaagtaggaaatcgaccgaccaggcggtgcgcttcggacccagccagggcatgtgc

SEQ ID NO: 225846 - DNA, 240 bp, Homo sapiens
  chr19:17392798-17393038
  hyper
cggggccgggggcgggccaggagtgggggtctttggccggggtccactctgaccgcggtgtttgcagggcagtagaggagctgctgcgctgcggcgcggaccctaatttggtgctagaggacggcgcagcggctgtgcacttggcggccggagcccggcacccgcgcggcctgcgttgcctcggggccctactgcgccaaggcggggaccccaacgctcggtaagatagagcctgggtcc

SEQ ID NO: 225847 - DNA, 292 bp, Homo sapiens
  chr19:17501236-17501528
  hyper
ggtgcctctatacacgtccccgcagaccccccccccatatgtgtcctccaggccgacgcccccttccggcagggggccgactcaccctcgtgcgcgccgcgccggccgccggcagcccccggagggtccggagcgagagcgcgagcgagggctgggccggggtcgggaccccgagcggggacgcggccggggcactctgcgctgtgggctcatctcggcttccaggacgttactgccgggaagggggaagggggctgtcagcctctggacccctgtccccagacatcgccag

SEQ ID NO: 225848 - DNA, 392 bp, Homo sapiens
  chr19:17649952-17650344
  hyper
tctcagtcctgcagcgaagccaggcccctgctgcccgggccttcctggacgccgtccgactctaccggcagcaccaaggccactttggcgacgacgacgtgaccctaggctcagacgccgaggttagtgccccgcgaggccgcacccgggacccccaggaccctcccggccgaccgcggcgcccatggccccctctcctgcaggtgctgaccgcggtgctgatgcgggagcaacttcccgcgctgcgagcccagacccttcctggcctgcggggggcaggccgcgcccgcgcctgggcctggaccgaggtatgcacggcgtccggatccgggatagggggcgggatgcgggcgttcgggttcccctcccacgactgtcgcctaaaccctctc

SEQ ID NO: 225849 - DNA, 420 bp, Homo sapiens
  chr19:17716723-17717143
  hyper
agggcgtaggcgcagcccacccttggcgtggagccccccgagccccgcccctggggaggtcccaccaaggcgcaagccccgtccctccccgcccagcgccctccgcgcaggcgcagtgccgctcggccgaccgcccgcgctaaggcgcaggcgcggcaccgccctcctcggcggagcgcgtgtccgacttgagcttcacgaactccttggccacctcgtcgttgctgcgctgcgagaggattcgcagcaccgtgaggcccgtgtcgtccatgtggatgcggcggccgagcggcagccagcaggcggcgctcccgcgctgggccagctcacgcagctgcagcacggccagccccaccgtgcggtcctcgcgcgcgaagcagtagtccttgacgcacacctgcagctcatagcactcgggac

SEQ ID NO: 225850 - DNA, 180 bp, Homo sapiens
  chr19:17717367-17717547
  hyper
tgggccacgcccacgcctgttcttcccatttttccacccaccgaaaaatgaccgcatagttttacatccagctcccgcccctcagacaccgccctgcaaggccatgctcccaccctgagatacccgcgcctgtgccctctgccggctgaactgctgcccgcacggccctgcccctaatgt

SEQ ID NO: 225851 - DNA, 868 bp, Homo sapiens
  chr19:17798531-17799399
  hyper
ttcgaatttccagccgggtccgcgtccatgaggacccgtaacccagcccacaacaccagaccccttccaagcacccctgcaggcttcaatcaaactaccgagcccagactcttcctcactgaccctctaaaaacctggtctacacagacgccccagtctagatcgtttccgggtagaaccccggatacccgtccacgtccacacgggcctccgcgttcagccgcgtccacacgacccctccagcagcggccaccaggacccccgagagccctgccgcgtctacacggatcaccccctccggggcccagctgcgtcgacaagggctacccctctcaaaagtccagccacctggactcgggtcaccccccaggaaccccctgggagccgcatccacgcggaccccgaccccagcccgcgtccacacgggtcccccgacccccagcctcgcctcctacctccaacgcaaagcagagacatgtctccgagctcgcaggtgggccggaggcggccgggccggctctgtcgggtcgggctcagcggccgctgggctggggcatctcccggctgcagcccgcgcttggctcacgccggggcccggccgccaccggccatcttggttcagcaccgggggcgcggacagcgcctgacgtggcgctgatgcggggcgggcaggcggagcccagggacgcctgatggggcgggggcgctgcgggctgggggggcgttaaagggcctggctccgggaaggggcgcctcgccccacacctcctcgttgcagggggacaaggggcgacggcggcccccaagcaggtttcctcctgtgcagaccctcacctgcactgaaatggtgcacgtgcccccgccaccc

SEQ ID NO: 225852 - DNA, 180 bp, Homo sapiens
  chr19:18117978-18118158
  hyper
gcagacgacgcagaggcaactcccgctggagaaactccatgcgacttttctttggggaaactgaagcccagagagaggtcacgccgtcccgtggccacaccgcagctgtggacctgggggtgcccgagcgtcccctgcattcagctctgtggcgggacgggggctgaggatgactggagc

SEQ ID NO: 225853 - DNA, 177 bp, Homo sapiens
  chr19:18118523-18118700
  hyper
ctccctttgcatagcgggggaaacaggcctggaacagtcataggctctctggccctcaactggggcgagagtcccccgccccaaatcgggctggacatgcctcgagtcacgtcaacgaggggcggctggtgagtgattaagccgagaggctgaaggctctgctaggtgacctcaggc

SEQ ID NO: 225854 - DNA, 163 bp, Homo sapiens
  chr19:18271898-18272061
  hyper
gcagccctggctgacggcattaagagcttcctgctggcactgcccgcgccgctcgtgacccccgaggcctcggccgaggcgcgccgggccctgcggggtgagcctggcgggtagcccgggggaaggagggggctgtagcgggtgggagggcccaggcctggct

SEQ ID NO: 225855 - DNA, 180 bp, Homo sapiens
  chr19:18343415-18343595
  hyper
caactacctgggacacatggaatcatacccaagcatgaacgtacaggagcaccccaaacacatctggtcaccccagtctcacgcgcgcgcgcgcacacacacacacactctttcagtcccaaccgcacgtgggcacacccggtcacacagacccacaagccatgatgacaccagcaccct

SEQ ID NO: 225856 - DNA, 417 bp, Homo sapiens
  chr19:18343799-18344216
  hyper
tgagctccggccgcgggctcaggtccctctcgcggcagcccgcggacttgtccggatccgaatagaagcgctgttggatgcggatggggcgccggggttgccgccacaggtgcttcggggctctggtcatgctgtggcggccgcgagagcgactcaacctgctgcaagcctctgccccttcgccgacccccaggttctccatgcgccagagaaaggggtctgggatagcagggagcaggactcgtccccgtgagcgggcgccgaggagcgtctgctcccgggtccggcccagggccgggagtggaggcgacagcgaggagctgtccgcgccggaggtgctgaagcggtagaaggtggaactggggctcaaggtggggccgacaccgaggagctgtcgatgcccagatggtgctgaag

SEQ ID NO: 225857 - DNA, 330 bp, Homo sapiens; identical to SEQ ID NO: 205279
  chr19:18420497-18420827
  hyper

SEQ ID NO: 225858 - DNA, 571 bp, Homo sapiens; identical to SEQ ID NO: 205281
  chr19:18548568-18549139
  hyper

SEQ ID NO: 225859 - DNA, 300 bp, Homo sapiens
  chr19:18722131-18722431
  hyper
gggcaacgctaccggtacctgtcttatacggttgttgcaagaaaaagtgtttcgttggaatgaatgaaagacagtaattgtggaggggttaggcgcgcgcgggcctctggaattagcatgtgtgggcttgaatcctgactttgccaacgcgtcccggagcctaagtttcccacctgtgaaatgggggacagtattggtcataacgcacagggctgtttcccaaggtgcgggcctggcgcgcgggtgggttagaagcggaattctcctgctggattctggcgcaaactgcgggctggaggc

SEQ ID NO: 225860 - DNA, 360 bp, Homo sapiens
  chr19:18722467-18722827
  hyper
ggaggggaggggcggggcggggcgggggaggggccgcaccgggatccagatgttcggggtccgccaggcacagccgcgcctgattaagccacgtgggggccggccgggggccgctgagatgaaagcgcggccgcaggccagagtagggggtgcgccgggcccccacccgggacaccctcttcccaggccgaaacctgagccgccctctaacccgcagaccctgcgaggctgccgccccgtctgcgggggcggagcgtaggtgggggacctgcgggctgctgcgcggcgctgcaggcacctgcgccaggcatgccagcgaaagcgggggcatctttgcagaggatccgggtttagaggggc

SEQ ID NO: 225861 - DNA, 561 bp, Homo sapiens
  chr19:18723430-18723991
  hyper
cacccctggggaatagtcccctccatcccatccccctatatatttccttttggccccaagcgccagcagagatcccccgcccgtgggcaccagggaggtgtcctgggacccccgcgatgggatagacggtgggggccgcgatgcacctgccccgcccgacccgcacgcctcgggtgccgcagcgcagctaccccgcccgctctccgcatctcccaccccccgcttcccaggctgcctcgctcgggtgacgtcagcgccccggtccccgccgcagccgctgcatcctccgtgcccggcctgagctggagtcccccgcgccccccgcgttccgcccggccatggctgcggtggcgctgatgccaccgccgctgctgctgctgctgctgttggcgtcgccgcccgccgcctccgcgccgtccgcccgcgatcccttcgccccccagctcggggacacgcagaactgccagctgcggtgccgcgaccgcgacctcggcccgcagccctcgcaggtgaggcgcgtgcggtgccaggtgccagcgggggacgcgggatctctccgaa

SEQ ID NO: 225862 - DNA, 104 bp, Homo sapiens
  chr19:18880093-18880197
  hyper
tagggccggctcaggcagacaaaggctgggctttaaccctgtacccacaaaccttcctgactgtccagaccacctgcttgctccagcggcgcgggctgggtggc

SEQ ID NO: 225863 - DNA, 911 bp, Homo sapiens
  chr19:18900004-18900915
  hyper
ctggtgggtggggccgctgtaccccggcgggcaagcctcgcagcggaaccccgggctggtgttgatacagcggactcgggggaagcaggggtgggcgttgcactgggggaggaggggccacagagggtcagagggcttcgagctgggccctgggggccgcacctcgtagtgtctcggatgtggaaagttcaagggccatatgccagtgcttggagctctgagatggaagcaattgtcgcaggggtcaggcacgactttgccttgatgacggcaagggcgcaaccgggagaggagaggagagctgttccctcatgggcgaggggaggaaggatgagggcgggcatccccagcagaggggggcaggggtcgtcggggcgtgcgtgcccggcggtggcggggggtctgggcgtgcgttccctggctgtggaagggtcgttgggactggcgatcccctgcggcgaggagggtagctggggcggaccacccctggcggtgagggagtcgtcggggcgggcgtcactagctatgtagggggttgtgggggcgggcgtcccgggtggtgacggggatggtccttgggttgggcgtccccccgcggtaaggaggtagtctggccgtgcgcccccggaggtgagaggctcttcggggcgaacactcccagtggaggaaggggtctcccgggcggcgagagattggggggcggtagagggagtcgtcagggcggtggagtgtcggggctagcgcacctcgttgacgtcggtgcagtgcgagccgttgcccgtgaagcccgcggggcaggggccgcagcgcgcgccgctctccgtctggatgcaggccacgccggggaagcagaagccgggcgcgcagtggagcaggggccgcacgctgggtaggccggtgcgtactgactg

SEQ ID NO: 225864 - DNA, 105 bp, Homo sapiens
  chr19:18901141-18901246
  hyper
tttctgccccgtggcgtctctcacttccccaaaactctctcaccgcttctgtctctttttgtctctgtttctacacaccccatcccattcccgttcgtccgtcca

SEQ ID NO: 225865 - DNA, 561 bp, Homo sapiens
  chr19:19729186-19729747
  hyper
cttcgtcctcgggacccccctccagccctcctcaagcgcccctcgtcagtctggcctccacgccccgtcccctcagcccgccaacctcactgccacgaccctgcgtggcccctgccgagcccgcgggcagcacctggcctgtgcctcgtccaggctctggtcggtgatggccatgatctgctgcaggacgtcgctcgtgtcgaggcgccgcggggcggggggcgatggcgcggggcgcggcggggcggccatgagcggcagggccgggcgggcgctgtgagggtgccgtcgagcctggagcactaccactggcgccgcagccaaccgccgctgcctgagcgccgcgcccgctctcgctcgcgcctaagccacgcccaccgccgctatcgccagccaacccgtgtattgcaccgcctacagacacgccccttcatctccgtcagccaaccggcgccacgcaccgcccccgggactcgccccgaacttccccctctccgggcttggactgggtttggggttgccgaggcaacggcacttctcataagcgccctccttcccctt

SEQ ID NO: 225866 - DNA, 1103 bp, Homo sapiens
  chr19:19738572-19739675
  hyper
cgagggggcggtgccgaggcgtggaggtgatcggagtggacagagaggcggccccagaagttagtcggcgggatttgggcgcgagtgcttcccaagcgggcggggcaataggctgttccgggtgggacggaggacactggcggtctccgggacaaagacagcggttggggaagggatggatggccgggcctccaggcgtctccagactggggaaggggtagggggttaagggatcagagggcggcgtcctggccccgcaggcacgtgccgcgcccttcccccgggcccaggcccgcacccgcccgcctcccgtccgtgcaggcctcacctgggcctccagtcacgccgcagacaaggcgggctcgcgggggttcggggcgggctcgaggcccatggcccggcgactgcggcgggagcggtagagcgtccgggtgcgccctgtgcgggttgctgagagggcgcgggaggcggggtctccccggcgccccgcccccaccacctgggggagccctgccccgccccgccacctgggggagccccgcctccacggccgcgtcgggggcggtgtcgcccggaaccgcagcccccctgtttcctccccgcctcgcggcccctcagtcgcccctatttccggcgcgggacccccaccccggtacctgcacacctcatgcgcccgcagtttcgagcctgcggggctgagtcactcggcgacccgaaaattcccgccgtgaccccgcgctgcccgggcggagctccaggtggtcttgggtccgcgcccccgctccggacccccaaccctcccagccccaccccgctctcttcttcgtgtccaatcggccgccgagttacaagccactccctgatccgacttggctcccaccgcccggacccccgcccagcttcggctttgccagctcgcagtatcagcgagccgcggcctcctgtgcgaggcccacctctgcggccccagctgatcatcgggcgcacgctagggttttgcaatcccgcccccgtacccctcaccctgggacagcgctgccccctgcaaagcccggccctgccctgccctgccctgtggcttcctccctcggcctccctgcggc

SEQ ID NO: 225867 - DNA, 817 bp, Homo sapiens
  chr19:19843295-19844112
  hyper
cctggtgatgagggcaggggcgtttgaacagccacaggaacctgaccccggcagcaaggacctagccaggcttcggttctcacaagtgaggaaacgcacccgtggattcatcgtaaggtttccaaccaagtggtttcttaaacgcacaaaccccacagaccgagatgggatctccccaggaccctcccgctgtcaccgaacaatccggggagacgcggggctgcgggcgcagagctgcccatagagggctccaggaccgggggccgaggtcgccccgcggggacgggacaggacgctggggctcccggctgcgggtccagctcccacagagaggaccgagggccgaactgcgcccgcggtggcccccgggtctgcaaaccccggagttgactgcaaggaggtccccggcctcggccacagacggttccaaccagaaacctcccctcggacactggccccgcacactcaccatttcccagcgtccgggaagtcacggtgtcctccctacggatctgtcagtacctgcaggtcacggcgcgacaaaggatgcgctagagccaccttcggccttcaggagcaggtgaaacgcaatcttcccatgggccaggaatggcgacgtccgcactgcgcaggcccagcgtggcgccgctcacatcttttcagctgaggtcctgattggacagatccaatggccccgcctctttatcactgagtgacagcggagcaggaaggggcgtggttgagctggcctggcttcagtccggcttgtccccgccaggacgtttgcgtttaaaccgaatgtgttctttgcctccca

SEQ ID NO: 225868 - DNA, 180 bp, Homo sapiens
  chr19:20162592-20162772
  hyper
gctgggaaacgatcccagacccttgagggtctgtgagaaatcaaactttcggcactttggaagtcaggaaaccagcacgttgggggaggcgggatcacagttacttgctgagacaagctgccctggctacgttcactcccgtcaggtaggagaggttaaagaacaggaaggctccccctc

SEQ ID NO: 225869 - DNA, 540 bp, Homo sapiens
  chr19:20162847-20163387
  hyper
aaaatttcttaaccaatgccggccagcgatggcagggctgcgggactacaatcccagcgcgcacagggatcagggactgtgcgcatcactggaagaagcggcagaacggcgcgcgcctcgctgagctttctgggagatgtagtctcatggcaactcccagccttttggccacaaggctacgggacctacaatcccagcctgtaccaggatcgggagcagttcgcagcactagaggaaggggcagggcggtgcgcgccgcgcctgatatgctgggagctgtagtctcttcacggtttttagccaatgagtaggtagcttcagaactacaatcccagtatgcatgggggcggtgcgtagtcctggaggtaggggctgagaggtgtggacttaccggtgtccaaagcattgctagcagccaattccatgccgccccgttgccagggagagtgaatacagctagggacgtgaagggtaggtctgggctgggcattgaggagggtattaggctaggaagtatacctcacctttgtccaaatcggg

SEQ ID NO: 225870 - DNA, 348 bp, Homo sapiens
  chr19:23258238-23258586
  hyper
cctgcaggaccggcctccccacagtccgctcccgggtccgccgacctcagtcctctctggcgcagctcggccccaggcgtctctggccgcaagatggcggctgggcccgcggccgggacccccagcgtctcgccgcgtccctgctgggcgccctgtctggacctccctgggcagctctgcgcccgcagccccgagtatttcccagagtgcttagggatgccaggcgggtcatcagggtagaatcccgactaggtgtgtgcgtgggaggagctgcgacccgtggggttcccaagctttcctgttattttttttttcttttctttttagacagtctcgctctgtcgctaa

SEQ ID NO: 225871 - DNA, 840 bp, Homo sapiens
  chr19:30015889-30016729
  hyper
gaggtgccgaaacgcactagctggggactcccgggggaaggagataggagagacccaaggcgagccttaggactcgcccctatgactatgactacgcgctgcgtccgaaccacatgtccaccccgcatttgccttcggggaccagaccgcgctccctcagatggctggggagggagcagactccgggtgaaggctgggggaggtaccgggatgccgagtacgccagagcaggcgggggatgggttccggcttcctgccgcctcggcatctcgctttgcaccgggcaaagaaggggccacgaccggcgaagagcgcgtggagacacagggacccgcgatccaggggcaggaaccccgccccctcccggaaacctcccgggccctgagtcgtgcccggcgctccccaccccaccccacccccgccgcccctgccgtcactcacggccgctgcgggctggctagcgtgtgcgctctccgcgccgcaggcacctgctcgctgggcgctgtgcgctcacttctccctcgcgcactgcagactcccggcgctgccgccgccacccagcgtagtctccggctgggcacagcgttccgcccttctcgcggccccgggcgcccacccatccgtcatggcccaggcctgggccaaacagcggggcagctggttgcccaaactggggtaaggagttgagggctgggagctgcagagaggaccgagggacacacggggagcagggatgagcggccgtctcgagccgtgcagactgggaagaagccagggagagtttgggtgggaggactcccaacccaagcgggtgcggggcggggctgtactccaaccaga

SEQ ID NO: 225872 - DNA, 1620 bp, Homo sapiens
  chr19:30016835-30018455
  hyper
gtggaggcggcttggcgcccagccactgaccgccccctcccttcccctcccctccccctctccccgcctctctccggctccgggtccgccacgccggacccgctctccccgcgctgcgctgggtcggacgccaggtctgcgcgccgcggctgagcgcccactcgccctgcggaaagagccgcggaggaaccggcgggggcggctgcgggagccgaaggaggtggcaatcgggagcagaaccagaaggagacagggaggcagaagctcgcggctccgtggcacgcactccctcggccagggatgggtcccggcgcggcccagcccctgcccggcccgccgggcagagactgaaccgcggatccccaccgtcctgtggacgaccggacagagagaggcactgaccgatcgccagcagcctcccggtgggaccgcgtctcctgcacaccccgcgcagcgccccccgccggagccgcaccgggcaagccggcgagggagcggggctgattggcggccgccggcggccaggggagggggcgccgcgcggggccatggcaggctcggaggcgtcctagcccgagccggagccgatccgagcccacgcggccgccgcctctccgctcccgggcccccgccgccaccgcgccccccgcgggagatggaacagcggaaccggctcggtgccctcggatacctgccgcctctgctgctgcatgccctgctgctcttcgtggccgacggtgagcgcgggaactttgctgccgctgtggactcgggggggtctttgctggggccgccaccgagaagaagaagaaagagaacgaaccgggaagcttcgcggtctccagcaatcccgctgtgcagcctgggcccggaggggtagggagaggcgagcggcgaagggtcgccgcagcagcagcgccgcgcccgagtcgttcccagtcccgccggggccccggctgcggaaaggatgcctgcggggagcgggagtaggcgcgccccagccaggctctggcggtgcggccaggggcgggggagaagcacgagtcgcccctgccgccccgccccatccggagggaagcagtaggcagccgatggccggtccctgcctcggccctgcagccgcttccccgaactttgctagcccctccggccgtgcgccagggagcagctgcggggtggggggcacaaggccagccagccagagaccgactgcctcgctttaggttgccccaggcccccgacctacagctggtcacgcctctctctctctccccacccccagctgcattcacagaagtccccaaagatgtgacagtacgggagggagacgacatcgaaatgccctgcgcgttccgggccagcggagccacctcgtattcgctggagattcagtggtggtacctcaaggagccaccccgggagctgctgcacgagctggcgctcagcgtgccgggcgcccggagcaaggtaacccgccgcccacgcggtaccggcgcgcgcccggctcgcgcccggggcggcgaaggctaacccagggagggaagcagcgggcttcactcgcgcagggcgccgccctgtggcgcagcccatcttccaccttcgcatcccaaagcatcttca

SEQ ID NO: 225873 - DNA, 960 bp, Homo sapiens
  chr19:30019140-30020100
  hyper
accatgctagctccaaagcccgcttcctcctgggaaactcttggaaagccggacgtcctttgtgccctcaacccccatcccccgggcggtttcggtcctagcctgccggaggagggtgcccttgcctaaaggcggatccgagttcccctagccagaaggccgcgagcctcacgtctctctctccctctttgcattttaggtaacaaataaggatgcaactaaaatcagcgtaagtgtggagcccagcgcgggccgcgggagaccccttctggccgcctcgggtcccgcagctccctcccttagcaagccgcggcggccgcgcatgtggggccgcgcaagtagggcagcgatcgcagccttgcatcggtggctgctcggcgtgtccgggcgccatctgtcgccggttgcagggtcgggttctcttttgtgtaaatcaagggtccaaggcttgagtcccctaattcggctcggcgctgacctgtaaaactccccttggtcggactgcgcgcttagggcctctcgcgcctgccagcctccgctctgcgggcattcctcctagcaccgggagcgcgcggctgctcgccctcgccgcgaccgtggcgccagcttcccgccccctctgccccgccctgagcatctgctctgcgccctccgctgcaaccctttatcctccgcctggattgcgggtctgggtgcggggtgttgcaggcttgcaggggacggggtagggggtggttgtgccaggctgcgaggggcccgggtcatggggttgctaactctgggaggagatgcgcccaagcttcccacctggagcgtagaaaggcctggagatgacgaagcctcctcgtgggctcggttcagaggtgagggctccctgggtgtttgttgagagccgtagagcagtacttcccgaagtccccaccggggcgcaggggaggagcacttcgctggggggcttct

SEQ ID NO: 225874 - DNA, 221 bp, Homo sapiens
  chr19:30021134-30021355
  hyper
ctgcctcgtcagcgtcgccgccatcgggacaggcggtcctgctgcgccagaggcacggctcgggtaagggatcgcggagagggggcgcacgcgcggggatggcgcagggctagggctgcgccgggacgccccggggggctccggacccaggacccgccccctgggcgcatttgcatatgcatactccttcctagttaggtcgggagcgccccccccagggc

SEQ ID NO: 225875 - DNA, 268 bp, Homo sapiens
  chr19:30165119-30165387
  hyper
acatcgaggagtgcgtgcggcggcaactgagggccacgggccgcccgcccagcacggagcacgcggcaccctggatccccgacaaggccacggacatctgcatgcgctgcacgcagacgcgcttctctgccctcacgaggcgccaccactgccgcaagtgcggcttcgtggtctgcgctgagtgctcgcgccagcgcttcctgctcccgcgcctgtcccccaagcccgtgcgcgtctgcagcctctgctaccgcgaactggccgccca

SEQ ID NO: 225876 - DNA, 297 bp, Homo sapiens
  chr19:30215212-30215509
  hyper
agaaacctcaaagattacagcgctcgcacggcaggagcgcagcggcttcccatacgccggcagacaatggggcggaggaaggaaggggacggtggcctggggacccccgcgcccgcagcacgtgcaccgagcctggagcgcccgctttacagatcttgtcgctccacccctaaaacaaaggccccggggccccatctgtgccgggcgcgggggagggcgccgcacttgctgcccgccgcgtgcaaagcgagccagacaaagggctcagccctgcagacgcgagcagtggggaaataa

SEQ ID NO: 225877 - DNA, 720 bp, Homo sapiens
  chr19:30716535-30717255
  hyper
gtgcccgagtttgctcctgacgcccgcgtttcaatgtttaaggtaaggaaaacaaaggtgggggggggatcgcggggcgcggcgcggtgcggggggcgcggcgcgggggggcggcggcgggtgggggggcagcttcggcgtccgggaggtggcaaagtgagtttggactcttggcgcggcccccccgtcccctccccctccccatctcggcgaggcctgccgcccggttccttctcgccccatcgcgattaaaaaatacggtctaattaaatatccgtggctgtgacgttggcgagagaagctgtcagcgggtggggggtggggggaaagaagaggaaaaccgagccggcggctgcggccgggcatcgtatggcgctagagaacttcggcggcgagcgggacctgcgcctgggccgccgcctccccgcccgcggtcccgggaccgttactttgaaaaggagtcccgaggcctggcgcccggcgcgcgatcgggaccccgcgtccagctccggggacccggccggcgccccccacccgcgagcggcccgcgagccactctcaggccccgggaaactttcaagagggtctggggggtggggggagtaaaaaggggagggggtaggctggggccgcggaaacttctgctcaagtgactttccccattttctcctctgcctgggacgggggttcgccttgcgctctttctctggtccgcgctca

SEQ ID NO: 225878 - DNA, 1440 bp, Homo sapiens
  chr19:30717640-30719080
  hyper
ggagaaatgaggccaatcagagcgaggaagtgcgggcgtgggggctctggaaggcagaggagaggcagggcttgcgcggcgtctgggaagagtgcaatctggggggacgcctcccgtccccccagcgcagatgcatgactggggtaggaatgatctttgctgataagcctttttctgtttgcttcaagacattatttttcgaagatgaattgaggaaaacagtcgtaggcgagactcggggtgtattttaggcaaaaaaaaaaaagttagggttgggggagagctttcctttgatgagtaggaaagtgtccagatctcgacgcgcccatctgttgcagttttgcaaataatttaaaatatagatatctccatatagacggatgtatgtgaagtggaggaaggtcgaaacgcggggaagttagggaaaaagaaagaaaaagggctgggcagagagagacctgtgttgctcactcttcactctgcggagtgaactccggcagggctttctttggggacaggtggaaagttaagtcccccccttttcacttctgtattgtgagtggttcctactgtgtgcctgttggagaacatgtccaccgttcccgagttaggtggaggattggaatgttggggggcggggagcgttggagttgaggacgcagtggccaggggctgggggccgagaaagagcagggcggggtctcagccccgcgtgcgggtggcagcggcggccgggttttgtttgccagatattgttatgtctaacgggtgcctcgccggagacgtgatttgtcagccgccttcgttttcactttagcagaaaatacggcagctgcgaggtgtcccggcctgcggggctcgggcacccggtgcgtcctgggggctgggtcgtgtgcgcgggtgggagccggcggccggcggggccggggcgaggggcgagcgggaggggcggagtgagcgagcgcgcggtacggccctccggttcctcctgcgccttctcccggcagccgccgccgccgccgccgccgctgtgcaatttagcagaaatccgacaggggccgcgtttgctgagcgcatccggcggccgggcagcccgagcgggccgccgggcctggtcggccggtgtagaggcgcggagggggccggcggaggggaccggcggggatgggcgcgggaagcacgcctgaccagagcacgcgccgttccccaaccctggtgtccccggcgagttgggcagccccgcgcgccctgaccttgacgccccagtctccagccagggcttaggtgaacttggggtggggtgtgcgtgcgtgcgtgtgtatgtgcgtgcgtgtgtgtgtgtggaaggggtggtgagactgggaacgcgctgttttctttcccagtttgatactagcaactggatttttactttaagaccggctttgctctctgctgggg

SEQ ID NO: 225879 - DNA, 180 bp, Homo sapiens
  chr19:30719269-30719449
  hyper
gtttgatggtgaaatagtaaacccacgcacggagggtcgccaggaaagtggacattaccgctttaattaacttcgagatgctccggcggcgggacctggcgtagccgtgacgcgcccccataaatctgcccggcccggggctgctccgagaactcgtacagtagcggcgtcagatccatc

SEQ ID NO: 225880 - DNA, 505 bp, Homo sapiens
  chr19:30719535-30720040
  hyper
caagtgaaaaccgcgacgatctgcacactcaaaagcaagtgccaagtaagtgccctgcggtggcctcggcgcgccccggggtgagcgcgcaaagccgggagcgaggtgccgcgagctgcgcgccgccccgggccggcctcgcgtgtgggcggctgggcggctgggcggcgggaggacggcctccgcgggctccgggactgcccggctggctgctcgcacaactttttttttttcccccgtctgctgacttttcgggccaggtgaagtgtttgggccacgcgtgtacctgtggcgagactcgggaggcgatcttggggggcgcgcggtcgcagttgggcatcttgcctgggtcgggggcgggcagtcggtcccagtggccgccgctgagggcagagctgcgagcgagcggggccggctgctggtcgcgccgcgccgtaaatgcaagcctgtagccaaatgcttcccccattattctaaggtttgtgtctgcgtgtgcgtgtatgta

SEQ ID NO: 225881 - DNA, 307 bp, Homo sapiens
  chr19:31210545-31210852
  hyper
cagctccgtgatcccgcgcttggccgcgcgcctggagaggtgcgcccgggccaggagcagagcagggcgcggcgccaggcgggggcgcccggggcctgcgtgtcgtcgcgggtgggggcgggtgtcctcgggcgcgcacccgctgcggcctccggctctggaccagcccggtggctccaagggatcaaagcgaaaaacagctttggccgcaaagggagaacgccctgagccagctcgtccctaaggactcgtcttttggcgaggaaggggacgcctaggcccgtatggggcgcgctgtggcctgggc

SEQ ID NO: 225882 - DNA, 840 bp, Homo sapiens
  chr19:31839564-31840404
  hyper
tccgggttccaccgctgtgcccagtttgggcccaagaaatgaggaatcaatcgtgttagtactaaggtggccgaggggaccggctcgctcactcgttcgcgctccctggctcggcggacaccaggcagtcccccggcggtcggccgctcggaggacgcggaagatgtcccggggaactcaggtgaccccgcccgccacccacagaaagagccaggccggggttgcttcccattccctctgcagccggagagctgaggaggtagggacctggcgcggctcagcgcgctccgcgagcggctccccaaatgggtgcgagagggaagagggcagagcgcggcggggcgtccggggggcgcccggtacccgaggcgggcgcacgcacccaaacaggagagcggcgcccggagttactcagtgcgggcagaagagcggggcgaggagcggggtcgcgcccgctggaggcgcggggcgagcggaggaagaggaggaggagagcagaaggaaggggaagcggctcgtacctgctgcgcgccggggcgcctgctgcttcctcctcggcatgatgcttctccggcgactgccactgccgccgccgccgccgctgccgggctgaggacagggagggagggggcggcgggcccgcgggggggcgaggcgggcctgctctcagcctcccccccggagagcggccgcccgcaggatgctgctgcgcccaggctctccgcgtcccccccgcgccgcgctccgccgcgaaccccgaacgtgcggagggaagaaggagggcgggcgagggaggctcggggagggaggagcacgggggggaggaggaggcagaggagg

SEQ ID NO: 225883 - DNA, 480 bp, Homo sapiens
  chr19:31840512-31840992
  hyper
ccccccccgccccgtccccagacgaggtgcgcggggttcggggctggggggcggggagagggcgggcagagcggtgggaggaggagcgcgggagcggcccggaccggtactgccccggcccccgcccctaggccgggggtcacggcatccggggggacgcgcagccgccgccgcggcccggggctcggcggtccagtcttctgcccgtggcgcggctggagcggcggcgtcggcaacaggcaagcttaaaggaaaaggagatgatcgtgtcaatcgcccgcccgcgggggcgccgcgcccccgcccccggccccaggcccgcgtgggacccccgccccgccagcgaaaggggtgccgcccctccgcctccgccccgtgcgcacacgcgggggcgcggcgccagccccgccgagcccgtcccggggcgctcgttaccccccacccctattcccacccagcgttcgtccccagccacccccc

SEQ ID NO: 225884 - DNA, 180 bp, Homo sapiens
  chr19:31841073-31841253
  hyper
ccccggggaagccagagcccacgggcaggccccctccagggaggaggcgggcgcgggccggggcgggtgggggcagccctcagaccccgcgccacccagctcctcccccaggacccgccgtagccacttcccccaattttttttccccggacaaactttcctgggcccgtcccgggggtc

SEQ ID NO: 225885 - DNA, 480 bp, Homo sapiens
  chr19:31841354-31841834
  hyper
tccacggcgcgggccgatcctagggcgggacgggggcgggagaaggaaaccgggctcccctgcccatcccccgccaggggctccccccgagagcctagggggccgccgcgccgtgtcccgcgcccggcctgccggggctgctggactagagggattgattattgattggtgatcggggtcgctgaggctccgggccggcccggccgactggccgcggcaagaaggagctggctgggcggcgtgggcggcggggcgacgcgggctcacttacgggcggcggtgagggcgcgggtgggccggagctcatgcgggcgacccccgggcggcggcggctgagcgggagccggagcccgagcggcgcgggcggcggcgcatcgatgcgctgcgggctcgattgcgtctccctgggccagctctcaggccgggaatggggcggccgcgccggggccggctccgggcgctgccgggcggcggctgctg

SEQ ID NO: 225886 - DNA, 1020 bp, Homo sapiens
  chr19:33166914-33167934
  hyper
tgcgcctggggaggatggacgagggagcgggggaccgctaacggggctccctctgcgcgccccgtccgcagaggcgcacgtcgagggtcccgggcgggctccgtggacgttggcggtagcgccgagcgagtcacggaccatgaagagcgttcgtgccgcgcggcccaaggccgggatgggggttagccacatcctgccgcgctgagggggaggctaacgggcgcgggcggccgggcccagccggagcccaccgcgatggcgagggaggagtgcaaggcgctgctggacgggctcaacaagacgactgcgtgctaccaccacctggtgctgaccgtcggtggctcggcggactcgcagaacctgcggcaggagctgcaaaagacgcgccagaaggcgcaggagctggcggtgtccacctgcgcccggctgactgctgtgctgcgcgaccggggcctggccgccgacgagcgcgccgagttcgagcggctctgggtggccttctcgggctgcctggacctgctggaagcggacatgcgacgcgcgctggagctgggcgccgcgttcccgctgcacgcgccgcggcggccgctggtgcgcacaggtgtggctggcgcctcctccggcgtggcggcgcgcgcgctgagcacccgcagcctgcggctcgaggcggagggcgacttcgacgtcgcggacctgcgggagctggagcgcgaggtccttcaggtgggcgagatgatcgacaacatggagatgaaggtcaacgtgccccgctggaccgtgcaagcccggcaggcggcgggcgccgagctcctgtccacggtcagcgccggcccctcctcggtcgtgtccttgcaggagcgcggggggggttgcgaccccaggaaggccctggccgccatccttttcggcgccgtgctgctggcggctgtggccctagccgtgtgcgtggcgaagctgagctgacggacacccgacggccgcctgctgctgccgctccctcccctgagaaaagactcggga

SEQ ID NO: 225887 - DNA, 561 bp, Homo sapiens
  chr19:33555491-33556052
  hyper
acctgcccgggacgccggggacatcgccgcccccactcctccccgccagcctccgtccggccagcgccggcccagtgcgccccctccccctcccggcctagtggaccccgactgcgcgctcccacggcccctgcagggcccgggggaaaggaggtctggagcccgcaggtccccgcccgcccgcccgaagccgcccaccttccgaaagtagccgtcgttctccttctccagcggctggggggccgcgggcaacagcgcgtcggtcatgctagcggcgcgggcgcggagggcggacggcggactgaggcgcggcggctgaggctggcccgagaggacgtgcggccccgcccctgtccccgcccttccccgcccctccactcccaccccgtcccgcggcccttctagccccgcctgaggccgagcactggagccctggagacgcgccccgccccgtcgcgggccccgaacccgcgccccttgaggcgctcgtcacccggagagctgcgccctgggcgcggcgcctcggggttgtctgtgggcgtcgtggctgactcaactttg

SEQ ID NO: 225888 - DNA, 180 bp, Homo sapiens
  chr19:33717653-33717833
  hyper
aggctgcctcctcccggaagccgtccggactgtgcagccgaggccggcggaaaagatccaggggggccgcgtcggggccaccggggcggcgggcggggcgagcctggcactgtgcggccggcggcggaacagcctttgtttcttcctggcggccgccgcgacgcgccgtcccctgcatgt

SEQ ID NO: 225889 - DNA, 3032 bp, Homo sapiens
  chr19:33790839-33793871
  hyper
ttgactttgatatgtttatattatagatataatacataaaacatctagagtgagactctacgttctccccaaaagaagagaaccaagccgtccttccctgctcccagccccagtgatgcgttggcgggaggccacctcccttcccgaccaggagccagggcctctgggggacaagccttgtgggcagcccaggccggaggggctggggaaagctgagggcaaaggagaacccccctcacctcattggtcccccaggatcaaaagtaatcccaaaaccaaaaggaaagggagtctcagacccttcccccagctgccgacggagagtctcattttggcaagtatccgagcaaaaccaaaacaaaacaaaaaccaaataaaatggtggtttagcagagacgcgcacattcacattgcacaaggcactgctggggcacagaggccagatacaagtgttgatatcggctgataaagcaaaatatttggaaagcttgtcataactccggtccctctgggatggactgatcgtgcttcgtgttcctaggcaatgctgaaggcatacagtacaaacaaggctgagggtcccagtggcccttcaccccccatgcccgccccacagccagatctctaggtctccctctcccaccaggggtatacatcctcagagctgacccacgacctagctttctggtgtgactcggggtgggggctcccactggtcacctggtgacccccatcgcagtgagttccgccccaaggggaagcccagcctatagcaggctggggtggggtgtgtgcggagggaggtgggagaggcgtggaactagagaccctccaccttcatgtagaactaggggaacaaccttaggttccaagccccaagtccctatgtttccacccctttctaaggacaggcgtggaggagcggctggggctggcgggcttgtcgggatctcagctccctgagccctcctcctgccacgggcctgctcccctccttctctcatgggggtctgctgtagcctcgggaaggaggcaggaaacctccaaataaaatgacaaggcacgatttgctccccctactcagtaggcattggagcggtgagtttgcatttccaaggcacaaggttatcctaaatactagagttgccgggctcccagctcagccccaagaattctcccctcctcgcagggagaagccaccgcctggccccctcatcttagacgcaccaagtccggcgcagaggaagggaggggacacgcggagcaggccaggctttcaggaggcaccggaatctcctagtcctggctcgcacggctcgggcaagcctcgagatccggcgaccccaaaccactccctgggtccccgccggaggctggcccagggcggtcccacagccgcgcgcctcacgcgcagttgcccatggccttgaccaaggagctctctggcagctggcggaagatgccccgcagcgtgtccagttcgcggctcagctgttccacccgcttgcgcaggcggtcattgtcactggtcagctccagcaccttctgctgcgtctccacgttgcgctgcttggccttgtcgcggctcttgcgcaccgcgatgttgttgcgctcgcgccgcacccggtactcgttgctgttcttgtccaccgacttcttggccttgcccgcgccgctgccgccactcgcgcggaggtcggggtgcgcggcgcccagccccttgagcgcgctgccagggcccggcaggccggcggcaccgagcgcgggcgcggggtgcgggctgggcacgggcgtgggcggcggcgtggggtgaccgggctgcaggtgcatggtggtctggccgcagtgcgcgatctggaactgcaggtgcggggcggccaggtgcgcgggcggcgggtgcgggtgcgggtgcgagggcggcggcggcggcggcggctggtaagggaagaggccggccagcgccagctgcttggcttcatcctcctcgcggggctcctgcttgatcaccagcggccgcagcgccggcgccccgacgcgctcgtacaggggctccagcctgccgtccaggtagccggcggccgcgcagccgtagccgggcgggggcccgtgcgctcccccgggcatgacggcgccgccggggcccgcgggcgcgcccgggtagtcaaagtcgccgccgccgccgccgcccgtggggcccacggccgccttggccttctcctgctgccggctgtgctggaacaggtcggccaggaactcgtcgttgaaggcggccgggtcgatgtaggcgctgatgtcgatggacgtctcgtgctcgcagatgccgcccagcggctccggggcggcaggtggggcgggaggctgcgcggggcccgcgccccggggaaagccgaaggcggcgctgctgggcgcgtgcggggggctctgcaggtggctgctcatcgggggccgcggctccgcctcgtagaagtcggccgactccatgggggagttagagttctcccggcatggcgagcctcggcggcctccagcctgcgcggggcgtcgccgccgcccacccggagaccctgctcgcccgcgcccgcgcacctccgggtcgcgaatggcccggcccgcgccggcccagcttttatacccggcaggccgcgtcgccccctagagtccgaggcggcctctgtccccgggctgcggcggcgcggcgcctgctgggtcctagcgcgcggccggcatggggcggcgaaccagcgcggcacagcgccgcgctccccaggcaggccgcggcgcaacgcccaccgcctccagcgcgcccagcagagccgcggcgctcgctccaagctccgcccccggcccggccgtcgcccccgcgcccacgtggtcggtagcgggggccccctcctcctgcctgccctaggcgcccgtatccagccacggccgggagcccaggagtatcccgaggctgcacggggtaggggtggggggcggagggcgagtcttggtcttgagctgctggggcgcggattctctttcaaagccag

SEQ ID NO: 225890 - DNA, 897 bp, Homo sapiens
  chr19:34112312-34113209
  hyper
gaccgaattccacgcgagctgaagcccagggatatcccagaatcttcctcaggatcaatcttccgcctttcaccggccctgcgcccccgcagcatcgggtcctgggcgcgcgcccctgccccgctgtggtcaaggcccgccccggtgacgcctggtccttttcccgggttggcgccgcgtgcgacccaccgaggcagtggcagcactggccgcggtctggagcctagcgtcaggccggagtccggctctcctgaaccgggagaccggcgcagccccagccacgaccgctcccacccccgcggccgccggaccgcgcccagcagcgactctttctgagagcgctgccagaggggccgcgggagccgcagagcgcgcgtgggcgcggcgcccgcgagcccccgggagggccgagtgcatcgctggagcgatccccgcccggcccggccaccgccgtagccgccaccacggcggggcggggcacgggccgggggcggggcgccgggcgggcgcggcgctatttccagcctcgccggaggcttcgctctcacttcgctgggagccttcccggcgcgcaagccggatccggcagtgctgcggggaggagagaggacgaggcggcggcggcagcaggaggtgggggaccgatcgcgccgggggccgaagaggaacgccgccccgcgccctctcgctccccgcacgctccggctgccggccccacgctgctcgcccacagatcgcactgggttccgcttggagcgggcggaggcaccgggcccgagctgggtcggaggtcctctccgccgcctgcgcgccccaagcagaggatccgccgcggagaaccgctcccggactggaggcgcccgcggcctcgggtgcgtccgctgcgccaggtaagtg

SEQ ID NO: 225891 - DNA, 540 bp, Homo sapiens
  chr19:34113258-34113798
  hyper
tgcagagacgccaggaaggggtcccgagcgggccccggactgcaccgctcgccatccccgccaccgcacgcgaatgggagtccgaagctgcgggcggaggtgggcgcgcggggctcgggtctggttgcactttggggaccggccccggtagcgggaactttaattagactttctctccttggatctcactcgctgccgcgcttctgggaactgccgtccctcgggccctcttggtccctgcggactcccgctccgcctcctggccctcggtgctgcccgcggggaggcggcgtcgggcgctgagcagcgagcgccgagggccaggcaggagcgctcggggcgctggggcttcctggcgcgctcggagccggggctccggacgggttgcggcgggcagagactatgggggaagtttaagtggccttggcttcctacccagcggctccgtcgcgcgcgtccccgacccgcaactctccagggcaccggcctgtgagtgctggaggcgagtgtgcgtgcgtcagcgatggtgtgaaggtgtgt

SEQ ID NO: 225892 - DNA, 529 bp, Homo sapiens
  chr19:34113844-34114373
  hyper
agggggcggggaaatgatccgtttggccgcgggaccgagccgagctctgacggcggctgcaactccggctaccgactctgcagacccgctctggcctcgctggaggccagccgggccaggagggcgatcacgggttttggcagtgcccgatgctggggcttgggtctgatgtgaccccgattccttctccagtgcgggactcccgccgccctaactttcgcgtacatcttgtctccaggcccgcgaccccgacccggagttgaagcggctgcggcgccctcggctgtgggcgctgctgcccggctgtctgttttaacccagaagtaggcgccgatcctggggctctctgtcctgcagtcgtctccggcgtcccagaggactctgcgtccctgggccactcccgctggctcaggagccgtgatcagctccgttaaggggaacgcgcgtcccggcccctctccatctgcttggcgcgatctggcgcagcagcagagcacgtgggagaggcgttgggtgcagggaggtagta

SEQ ID NO: 225893 - DNA, 496 bp, Homo sapiens
  chr19:34262994-34263490
  hyper
ggggaacccgtctgcggctccgccagcgccgtcgccgtctgctcatcaagaaaatgccagctgcggcgaccatcccggccaacagctcggacgcgcccttcatccggccgggacccgggacgctggatggccgctgggtcagcctgcaccggagccagcaggagcgcaagcgggtgatgcaggaggcctgcgccaagtaccgggcgagcagcagccgccgggccgtcacgccccgccacgtgtcccgtatcttcgtggaggaccgccaccgcgtgctctactgcgaggtgcccaaggccggctgctccaattggaagcgggtgctcatggtgctggccggcctggcctcgtccactgccgacatccagcacaacaccgtccactatggcagcgctctcaagcgcctggacaccttcgaccgccagggtatcttgcaccgtctcagcacctacaccaagatgctctttgtccgcgagcccttcgagaggctggtgtc

SEQ ID NO: 225894 - DNA, 217 bp, Homo sapiens
  chr19:34269016-34269233
  hyper
tgcgcccaagcggccggcaggggctccctcgcgttcgtacccacaggcgcagagccgttctccgccgccaggtggggctaagtccccgctcccgagcagcggcttggggatccccggcggggccgccaggtggcagcagcgctctggccgcgcggctccagctcccgggcgccccgcgtccccagcctccccaccgcgcagtcggctcctctgtcac

SEQ ID NO: 225895 - DNA, 997 bp, Homo sapiens
  chr19:34286493-34287490
  hyper
cagtgccggccagtcgcgcgctccgtttcctaggagccgggaaatggtcgccgaggaggaggaggaggcacgggcggggcgcaaaggaaacaggaggaagaggaaggggaggaggagtgggagtgggagaaaaggaggaaggggcggccgaagcggagactggggaggggcgtccggggcgcggacctcggccgcggggagtcttggctgccgccgtctccatcgcgccgcgcgcgtaaaggaaatggcgcgtctagccgcgagcggtcggcccggtgccccagcgcgtccctcccccgcggcggccgaccgcgtgtccgcagacgtcacgggagaggggcagcggggcagagaccctgggagggcggccagggagcgggggaggggcggcctggcccccggctccgctccagccccgaccgactggcagcccagtttcttcccaagtcccgcccccagccccgggcgccgcggcggcggctgctctcctctttgtaaccgaggagtcaagaaatgtgagaaacgtgccctgtgttacttatttgggagccgaaaatttatgcccagctgaaagcgcccggggaaatattacatcagatgaaatgacaatgattaaaatcagcctctcccccgccccctccccgagcccggaggaggcccgggcgccgcgtggccggccggcggggggcggggggctgggccgcggagggcgctggggcctgggcgcaccgctcccgggagggtcctggccgcggccccggcgggaaggcgcgggcttcgggagaggcgggtggggatcgcccggcgaaaggaggggaaacggcgcgtttttgtcgccaggcgcgggcgcgcggagctaattgcgactctaatcctctgccccgcggcgcagccgagccccgagccaggagtcgccgcgcgcgcccgttcgcgctgggtaatttggggccggatcgctgccctttacgtccgggctgggccgcggcgaggcgctggc

SEQ ID NO: 225896 - DNA, 158 bp, Homo sapiens
  chr19:34287808-34287966
  hyper
aggcggcgaagctgcgcccggcgcccgagaccggcagctgcgtggggcgggggctgcgcccgagcccgatctgccggctccgaggtaagctcagcgcgggcggccaccgctcagagccgcgcaaccctgccccgaagtggctgcgataccgagaaagt

SEQ ID NO: 225897 - DNA, 140 bp, Homo sapiens
  chr19:34288005-34288145
  hyper
ttgtccctctgctgggcggcgggggctggcggcgcgggggtgcccagcacaaaggcctggtgcaagagtggggttgcccacgtgggctggtcctggccgcgggtggaccctccccacgcgggcggtctcggagcttcctg

SEQ ID NO: 225898 - DNA, 100 bp, Homo sapiens
  chr19:34288205-34288305
  hyper
cgcttgtggaggtccccgcactctggcccctgttctgggccgagcgccctgcagagctggcgagtttccggggtcagaaacgggctcacgcaactggggc

SEQ ID NO: 225899 - DNA, 214 bp, Homo sapiens
  chr19:35168868-35169082
  hyper
acgcggggtgatgacggcgccgacctcttggcactgttgtgagagcgaagtgggcgcgagagcagacgccagctacagttttttttgggttatgtcgtcatgaagccggcgctttcagttgtgcaaccttgaacaaatgggttcagtatctcggaatttcagttttgtcttcattttaaaaaataaatctggtttagaactcgacctcaagcga

SEQ ID NO: 225900 - DNA, 103 bp, Homo sapiens; identical to SEQ ID NO: 205367
  chr19:35169517-35169620
  hyper

SEQ ID NO: 225901 - DNA, 400 bp, Homo sapiens
  chr19:35454464-35454864
  hyper
ttgcgtctcaacaccgagaacagaagcgtggggggccgacagcgaagggcctaacgtccaagcactcacctgcgcggggtcccgcagcgccgccgctgccatcggagtctgtggtcagagcagggccccacggtgcgggaaaccacggggcgggggtagggggtctcgcaggctgaggctaccacccacctggccgtgccccagacgaggtgtgaccccgggctgagggtcgcactcctagcctcagtctcccccgtgcaaaatgcgcaaggggcccggggcgcaggctccgggggcgccgagagcgcgcagctccgctgggtacccccgttgcaaggggtcacggctggtgcaaaggcgcggagggggtcccggcctcactgtccccctcgcggtccgg

SEQ ID NO: 225902 - DNA, 140 bp, Homo sapiens
  chr19:35738845-35738985
  hyper
agacagcagagtcacgcccagcgctgcgcaggctgatcgccgcgccgcgcccccgccctcggtcgcaggtggctcgttccgggaattcctaagcggaaaccggtcccaagccccgcgccttcgctcggcccctttaagag

SEQ ID NO: 225903 - DNA, 180 bp, Homo sapiens
  chr19:36048599-36048779
  hyper
ctggaaggcctcgcgccactgctcgtccagcggcagctcctggcccttgataaggatggagctgcagcgctccagcacgcgctcgggggcgcccttcatcaccagcaagtgtcgcgggtcccgcgggtcctccagcgtatggatggacagctgtgggcgggggggagaggcgaggctgtg

SEQ ID NO: 225904 - DNA, 180 bp, Homo sapiens
  chr19:36048926-36049106
  hyper
aaggtaagcgttaaggcggggctaggtgcagatttggagtcctggacgcagggaatgaacagaattagggtgcggagttgggctgggggcggatttggagagcgaggtgctccccatggacagtcccgccgaggagaagctgtgggcggggctgggtggtgggcggggccttgcctctgg

SEQ ID NO: 225905 - DNA, 180 bp, Homo sapiens
  chr19:36049279-36049459
  hyper
gagttgaagggtatctcgcagacttttgggaagcggtcccggtagcccatggcgttgcccagcgtcagctccgagaacttgagcagcgccgtctccgatgcgtctccaatcacgatgcgctgggagcggggaccggtgtcaggggcgaagccggctacaccagcctcccgggattccctg

SEQ ID NO: 225906 - DNA, 116 bp, Homo sapiens; identical to SEQ ID NO: 205371
  chr19:36123862-36123978
  hyper

SEQ ID NO: 225907 - DNA, 360 bp, Homo sapiens
  chr19:36336521-36336881
  hyper
gagggggcgaggccagaccagagaggggagggatccctcgcactcccacctctccccttccttgtcccaggacaagttgaccggcggattgctgctgacgctgacgcatgtcaagtttaaggcgtctcccgggcgcagtgcggatgcgttggccaggatcgtcacgttagttgggggaactgggagacggggttggaggagcgagactcagaggttaggggcggcctggtctgcgtccaccccgcctgcaccccaggctccgcccagtctcgggtcccccaccccgcctccgcccgctttccccgggtccagggttcgctgggtccctgccccacctggctctgtccctcccgccccgcc

SEQ ID NO: 225908 - DNA, 159 bp, Homo sapiens
  chr19:36336999-36337158
  hyper
gctctcgggagaaggtgctcccagatttctccacgctgccgagatgcacgcgccgcgactcctgcggcagccgcgactcggtcacggtgcgcgagtcctacgggccgggagtgactggggttcgcaggcagccctgccgcttccaccaacccccaaccc

SEQ ID NO: 225909 - DNA, 343 bp, Homo sapiens
  chr19:36347771-36348114
  hyper
ccgggcggggcgagcgggatcgggccctcttggggtctcccagagacccaggccgcggaactggcaggcgtttcagagcgtcagaggctgcggatgagcagacttggaggactccaggccagagactaggctgggcgaagagtcgagcgtgaagggggctccgggccagggtgacaggaggcgtgcttgagaggaagaagttgacgggaaggccagtgcgacggcaaatctcgtgaaccttgggggacgaatgctcaggatgcgggtccccgccctcctcgtcctcctcttctgcttcagagggagagcaggtaccgcacgaggggagcggaggaatatgggg

SEQ ID NO: 225910 - DNA, 249 bp, Homo sapiens
  chr19:36478131-36478380
  hyper
ttcgcgctgagctgcgcgctacctggccacatgcgcgggtgacagccctgccgggagcgctgagtatgcggccagggcttcccgctgagcggcgcctctgagtgcccgcagccgaatgcggctgcttccttgcaggcggacacccaccgctgggcaccgtctggtaccctgcccctgcggcccccgcccccgcgctccgcccctgtgctctcccttgctggcccgcaccattcccgggctcaaaaaaat

SEQ ID NO: 225911 - DNA, 839 bp, Homo sapiens
  chr19:36909103-36909942
  hyper
gccacctggtccggcctagtctgcgcgtttctgctgggagtctttggcgtgcagaaactgaccgagggccatttctctgcagctgggcccggtgtgggcagaggatgctggggtcagtcacgcactccacggccacaacaaccttcgctcatacaatagtctctgcacccaagtcagccgcacagactccgtcacgtcccagccccggccccgtcacgcccacgacacacacacccgggcctgaggcgcgggctcccgcccctctgcgatactgcagtggccccgcttacctctctttaccccctgggccgcagcgcttttcctacagattaccaggaccgacgctccgggccaggactgctcactcggggcgcgaacccgaggcacagcgatgcccgaacggaggaagccgctgccgggtcacgccacaatccccggggcctaacgggctgcgcgcggaggctgctgggagggccgggcgcgctcacggagtgcgcaggcgcggccagtctcaagggtccgctcgctggtgcagcccctgctctgcgtgaacccggagccggagctaggtccgtcccagcgaggctgcgcttcgagtcccttagcgcctggggacggcgcggcagggcctggaggggagcggggacagatggctggcgcgttaaagaggggcgcccgcgaccgcctctctatagtgccaactagggagccctgtgagcgaggacggcgctgcgagtctgtccctggcgcgctcctgggtgggattctttcactgggtgtggctgttgggatttgagaccgtgtgactccggagattcggggaagccagttcctatatt

SEQ ID NO: 225912 - DNA, 113 bp, Homo sapiens
  chr19:37262887-37263000
  hyper
atagagccgccaactctctctctttctttaaccctcgccttcccttcaaaatctaacagagcccaccgtgtacatgcccacaaaagaagcgactatttcgtggaagcccgctg

SEQ ID NO: 225913 - DNA, 719 bp, Homo sapiens
  chr19:37263316-37264035
  hyper
agccacagacctgcaactcacgcacacaaggtactgcacagacacgcaaagtcacacacccaccccgggacacgcagtccaaccacacagtcaccggttcttcacatccgcacgcacaacgagggtcgtccaggacacacacacccactccgggcgcgcacagtcacaagcgcccacctgatcacccagagtcagcaccacacagccacagtcacagaccacggagacccacggcagccatcgcgatcacacacgcaaactcctctcctcagccctccacacacaaaaggaccggagccggattcctcaccctcagcattctctggttccgctcggggccagcctagccaagttcctcaggactccaaggcgcggcggcagctaaatcggcacagcaaacggtcccgccacctggctaagaggaagccaaaatctcgcgagacgtggcgtcggcctgcgggatcctctgggaaatgtagtccagagcccgactgcgggcttccctatgcctctcatttccaagcctggcttgtttccttttaccgctcctctccaacgaggatcgcagagccctcatgccgagcggctcgctatggggccggctcgcccgctagagtggtcaggcctgattatccctggcagctctgttatctggggtaagacacaggaaaacgtgcttccggttctcggcggaagtagccccgaacggtagaaccgat

SEQ ID NO: 225914 - DNA, 155 bp, Homo sapiens
  chr19:37266863-37267018
  hyper
ggccttccggtgggcgggaagacagcgcaaccccgccaggcctttctcgtcgctgcgcctgctcgctgaaggagtcacctacccgacgagactaacggctgcggcgcggaagccccacagcccgccgagaaccaggaatacgagagccaggcggc

SEQ ID NO: 225915 - DNA, 404 bp, Homo sapiens
  chr19:37568997-37569401
  hyper
acctgcctggccggcgggtcccaccctctctcctgccaggggtagaccctgggaccactcagctcgctctcgcaggccctgagcgtctgacgcctgcgcactgagcgcgggcgggcgggcactcccagaaacctccggggcgctgcaggcgggacaagcaggttccacaggccgagcccacgagcccctcgaggggtgagcggcccgggcctcctggcgttctggccggctagccaagcgctggactacatttcccagaggcacggcgtccggagcgctggactacatttcccagaggcaccgctcccggagcgtagcttcatttccgttagtttgcgagatttggaggcctcgcgtggggagagggccgcgtctgtggaggagcttggctccgcacctgctgg

SEQ ID NO: 225916 - DNA, 180 bp, Homo sapiens
  chr19:37569450-37569630
  hyper
cctgaactgcacctctgtcaaggtaggagtgtccgggatgccggagcggacacgcgcggagaaagcgtcgctggggttactcgtgtggccgtgtctccggttttgtgtgcaggctacagcctgcctggtattggcgactgcctgtgcatacacgactggacgtgtgtggctgtggttttg

SEQ ID NO: 225917 - DNA, 660 bp, Homo sapiens
  chr19:37960057-37960717
  hyper
tggaaggccggggagaggccagtgtgggaggacctggtggggaggaggccgtgttacaaaccctgcgcggagctgcaccgctgctgccagacactgcgacgccgcgaccttttctactccggactacgtttcccagcggaccccgcgggagttgggccggcggcccctttgtgtcctccgggggcggaggcagctgaggcgcttctttccgggcccgtaagggctgggttccatccaactaagggtagcggtgagacccgagtgcagattccccgagccttcggggcaggaaggagatcttccaccagttctgttctgcaggtcgggagtgggctgaggagtggcgtgtgggtctccggaagctcgtcgcaggccatctgtgtgactccggtgcgagtggaggttggtaccgttcagtgcgaggctgtcaccccgtgtgcctgtccacgtcctgtgtgactgggtgcgaggaagtcaatggcaccgtggaatgtgaggctgtgagttgaggcgggagcgggcgactgttcgctgcaccttgttgggccgatacccgcggcttctttgtgactgggttgtgagattgtcgcttgtgatagataccctggtggctgagccttgccggtatgggaaagggtgcccgtgtgaggcagtccatac

SEQ ID NO: 225918 - DNA, 420 bp, Homo sapiens
  chr19:38182931-38183351
  hyper
aaacctccagccccatcccgggatccgtgcgtcttctacagccaccacttgggccagcgtccaggacgcccaagcgtaacctccccactctaaaccgttaggaatcagtggctggactcaccgcgtcataaaagcataaactgtgacccgatgagtccgcgcactcggaaaacaagagaacgctcccacgtctccgggcgcagcttgtgccagcgactactaggtcagggggcgcagctgagagaattcaagcaacctccccgcaaccggttccgccgcgtttgtgggctggtagcccggaatacatttcccagaggccttcgcggccgacgtgcttcgcgcaggaacgcagccgcctcccgactggaggacgcggtagcggagctgctcaaagcgaggtgctcagccctgggaggctca

SEQ ID NO: 225919 - DNA, 289 bp, Homo sapiens
  chr19:38210087-38210376
  hyper
atagaccccacagagcccagcgaagcacgctttacaaaggacacacacggcatgtacaggtcacacaaggtcgactacgcacccctcacagtcccgcaactgcacccacgtcacacaggcaagccggtcctgtcgccgctgcgcggtctctcacgctccccgcctgtctcctagagacgggcccctcctccgcagctccagcaccctagggcctgaggaggcgggagactcgcccggcccgcctgggggcctccgcgctctgagcgcctcctgcagccccactctcacc

SEQ ID NO: 225920 - DNA, 57 bp, Homo sapiens
  chr19:38398221-38398278
  hyper
gggagcggtggattcgcgtcccggctgtgccactcgggagccgcgatctgggaaaac

SEQ ID NO: 225921 - DNA, 450 bp, Homo sapiens
  chr19:38720197-38720647
  hyper
cgacttgagcgggttctgaatggcggtggccatggcccgctcggctgggccgcctccggcccggggcgccgctgccgccgcgcgcgggcccagcccggcctgcgccgcccgctctgccgcccagcgcgctacgatttcattcattcttggggctgcggcgcgagcggagcggggcgggccgggggcggggctcagccaatccccgcgcctcccagcgcacgacgggacgtggagtctaggggcgcgcggcggcgcccgagggcgcccctgcccggactacacgtcccagggggcgtcaggaggaccgcgctcccattggctgctggggatacagggaggggcggggctccccccagagcatctttcctccctccctgggagtgctcggtctccaactcgggatctccaccctccaggcaccgcgggcgcggaagcaggtggtccctagct

SEQ ID NO: 225922 - DNA, 421 bp, Homo sapiens
  chr19:38755107-38755528
  hyper
aggtgcctgccctttgcgcctgcgcccagctcgccctgcctagccaggtgcgccccgccccctgcctgcccggccaccttcgggagccgcttccaataggcgttcgccattggctctggcgacctccgcgcgttgggaggtgtagcgcggctctgaacgcgctgagggccgttgagtgtcgcaggcggcgagggcgcgagtgaggagcagacccaggcatcgcgcgccgagaaggccgggcgtccccacactgaaggtccggaaaggcgacttccgggggctttggcacctggcggaccctcccggagcgtcggcacctgaacgcgaggcgctccattgcgcgtgcgcgttgaggggcttcccgcacctgatcgcgagaccccaacggctggtggcgtcgcctgcgcgtctcggctgagct

SEQ ID NO: 225923 - DNA, 399 bp, Homo sapiens
  chr19:38852129-38852528
  hyper
tgtgcagaggcctctgggcagcaggggctgacgctgaggaggaagattcgggctggattcgatacgggaagtgggtggggtgggaaagaggcctgcggaagcttccagtgcgcggggtgccttagagccagcagcctttcccccttgccactgcccaggggctacttgatgctctccttcatcgacttctgccccttctcggtgatgcgcctgcggagcctgcccagtccgcagagatacacgcgccaggagcgctaccgggcgcggccgccgcgcgtcctggagcgctcgggcttccacaacgagaactcgctcgccatctaccagggcctggtctactacctgctgtggctgcactccgtgtacgacaaggtgggcgtccggcggcgggcgggcagg

SEQ ID NO: 225924 - DNA, 739 bp, Homo sapiens
  chr19:38852766-38853505
  hyper
aggaggtggtctggggatgccgcttgcctggaggctctcgccccgctgcccaatcccttcacggtgccgggcgatccctgcagccgtacgcggacccggtgcacgaccccacctggcgctggtgggcgaacaacaaacaagaccaggtaggcggagcggattgggagccgggaaaggggcggcgcccggacacccctcaccgtgccccacccccggcgctgactctgccccgcgcatccggtaccccaggattactacttcttcttggcgagcaattggcgaagcgcgggcggcgtgtccatagaaatggacagctacgaaaagatctacaacctcgagtccgcgtacgagctgccggagcgcattttcctggacaagggcactgagtacagcttcgccatcttcctgtcggcgcagggccactcgttccggacgcagtcagaactcggtctgcgcgggaccagagtggagcccgaagggcggggcgagggctaccagaatctgggagcctggggggcggggacaccatcggaggggcggggcctgtctgtgagggaggccttaaccccgtttactgcccggagcaggcaccgccttccagctgcatagccaggtggacgtgggcgtggtgctggccgaccccggctgcatcgaggcctcggtgaagcaggaggtcctgattaatcgcaactcggtgctattttcggtgaggccccccggggagttgggatcaagggag

SEQ ID NO: 225925 - DNA, 579 bp, Homo sapiens
  chr19:38976232-38976811
  hyper
catggacatcctggagctgtcggagcgcctggacctgcagcgcttccactcgcacaccctgcgcctctaccgcgctgtgtgcgccctgggcaacaatcgcgtggcgcacgctctgtgcagccacgtagaccaagctcagctgctgcacgccctggaggacgcgcacctgccaggcccactgcgcgcaggctactatgacctcctcatcagcatccacctcgaaagtgcctgccgcagccgccgctccatgctctctgaatacatcgtgcccctcacgcctgagacccgcgccatcacgctcttccctcctggaaggagcacagaaaatggtcacccccggcatggcctgccgggagttggagtcaccacttcgctgaggcccccgcatcatttctcgcccccctgtttcgtggccgctctgccagctgctggggcagcagaggccccggcccgcctcagccctgccatcccgctggaggccctgcgggacaaggcactgaggatgctgggggaggcggtgcgcgacggtgggcagcacgctcgcgaccccgtcgggggctccgtggagttccagtttgt

SEQ ID NO: 225926 - DNA, 522 bp, Homo sapiens
  chr19:39574576-39575098
  hyper
agatgcagcgaggctggaaaggttggggatcccccggtcctgcacacctgggtacctggggatcgggcagggccaggataggggccggtgtccgtgccctggggctccccagctgatgagtgggcgcctgagggacgagcgcagggttacctgcctgggctctcacctggtggccggctcagaggtggcgcgccggagacgtatcataaccttcctgggtcccccttcccgcgccacgccctggtggggtgggcgggtgggtgtggggcgcccaggcaggaccggccggacctgtgggacccggggccctggctgtctagggaggctgtcaccccgaggcgaccggctcttccggggctgggacggctgtaggcggcaagaggcctcggcacccgcgaactcataaataccggggcggcgctggtggcgggagaggcgcgtgcgggcagccggcgcccccgagggtgagccggggtccgggagggcgtcccctttcccggatggtcccgacccggctccatc

SEQ ID NO: 225927 - DNA, 480 bp, Homo sapiens
  chr19:39754925-39755405
  hyper
tgtgtgctgcgcctcccctgtgagcctaacccaaggcaggggactggacgcgtgggaccctctctttggcctccctgacgtccctcaggagcagagatgcgaccgagtgtgtgggccgcggtggccgcgggactgtgggtcgtgtgcacggtgggcgcggcgatccgccagcgctgcctgctctcgcactaccgctcgctggagccccggacgctggcggcggtcaaggcgctgaggaaccgctaagtgagtgaccgcccagcccttgcgccccccggtacactggccccgccgggttcccacacacccgtcgctgacccgaggggtcctgcgtcctagcgcccagcaggcgcctcttgtacgtcagagcccacagttcccaccacgagatccccgcagtccccgtcgtcagcgcgaacgcaggctcagggtcagtcacaaaaggagccctgcagggcggactcggctccaggtcgcggg

SEQ ID NO: 225928 - DNA, 141 bp, Homo sapiens
  chr19:39993472-39993613
  hyper
tggcgcgcgtggctggcaggcggcgcttggcagccggaggcccgtgggcccgggacattcagcgcgcaggcgcctgggagctgcgcttctcgtaccgcgcgcgctgcgagccgcctgccgtcgggaccgcgtgcacgcgcc

SEQ ID NO: 225929 - DNA, 416 bp, Homo sapiens
  chr19:39997624-39998040
  hyper
gcaggtgggtccccggctcccggactgcgccctctgatgctcccttccccacaggcggactctgcctggacctgggccacgccctgcgctgccgctgccgcgccggcttcgcgggtcctcgctgcgagcacgacctggacgactgcgcgggccgcgcctgcgctaacggcggcacgtgtgtggagggcggcggcgcgcaccgctgctcctgcgcgctgggcttcggcggccgcgactgccgcgagcgcgcggacccgtgcgccgcgcgcccctgtgctcacggcggccgctgctacgcccacttctccggcctcgtctgcgcttgcgctcccggctacatgggagcgcggtgtgagttcccagtgcaccccgacggcgcaagcgccttgcccgcggccccgccgggcctcaggccc

SEQ ID NO: 225930 - DNA, 592 bp, Homo sapiens
  chr19:40006048-40006640
  hyper
cagcccagattcccactctggtccccactcccgctctggcccggatcccccgtctggttccgcctcctgctccggcctggatccctactccggtgccgactcccgttcccgtccggaacccaactccggtcccgactccggctcggaccctgactcctccagtccgggtcccagccccagccccagcccagctcctggcagggattcgggccgcgctccccgtcttggactcctacctggccccggccctacctttggatccgcccccggaacctgctccggagctgcctttgttgcccgaggaggaccctgagccggcgccgagcctgaagctcatcccgtcggtctccagcgaggccgggcccgccccggggccccttcccacgcgcaccccgctggccgcgaactcacccgggcccaccctggacttcaccttcagggcagacccgtcggccatcgggctggcggatccccccattcccagtcctgtcccctcgcccatcctggggaccatcccgtcggccatctccttacagaattgtacggaaaccttcccctcctccagcgagaacttcgcgctggacaagagggt

SEQ ID NO: 225931 - DNA, 142 bp, Homo sapiens
  chr19:40939939-40940081
  hyper
gccgcggccgcctcccgggtaccccggccggcccagggcggagggtgggcagcggggagggactgggccttcccgccacgcccagggcgggccgcgggcccatcccccgccgcggaggagggcaggttggggaacgtggaca

SEQ ID NO: 225932 - DNA, 169 bp, Homo sapiens
  chr19:40972622-40972791
  hyper
ctgtttgtgactgccggggagtgtgcggctgtgtgtgacaggtgcatttgtgtgtgacgccgcgtgggcggtggttaccctattggatttgtgtggtggtgggtgacaccgttccagtgtggacgccgcgtgtgacggcgtgagggtgtgaccccgtgagaccccacag

SEQ ID NO: 225933 - DNA, 153 bp, Homo sapiens
  chr19:40973006-40973159
  hyper
gggtcccgggggcgcgctgagcgcggcggcggcgcgagagagggaggcgcggcggcgcatgcggatctggctgagccgcgggccggcggggccgagctgagccgggctgggccgggccgggccgggccgggcagcggacgccgacagggaggg

SEQ ID NO: 225934 - DNA, 327 bp, Homo sapiens
  chr19:41025294-41025621
  hyper
ttcccctgggcaggtggaaccgcatcgtggagctagtggaacagcgcaaagaggaaatgagcgcggtgctgctggtggagaaccacgtgctggaggtggccgaggtgcgcgcccaggtgcgtgagaagcggagagctgtggagagcgcgccccgggccggcggcgccctgcagtggcgtcttagcggcctagaggccgctctgcaggcgctggagccgcgccaggcggcccttctggaggaggcagccctgctggctgagcgcttcccggcgcaggcggcgcggctgcaccagggcgcggaggagctgggcgccgagtggggcgcgc

SEQ ID NO: 225935 - DNA, 378 bp, Homo sapiens; identical to SEQ ID NO: 205429
  chr19:41190157-41190535
  hyper

SEQ ID NO: 225936 - DNA, 33 bp, Homo sapiens
  chr19:41304119-41304152
  hyper
ccttgtgctcacgcgaaccgccctacgccctca

SEQ ID NO: 225937 - DNA, 105 bp, Homo sapiens
  chr19:41859852-41859957
  hyper
ttttgaagccgcccccggccccacccaggaagcgcacggggcgggagcgggggcggcccccagggggagggcatgggggggctgggccaccgtcctcatctcgcg

SEQ ID NO: 225938 - DNA, 104 bp, Homo sapiens
  chr19:41860206-41860310
  hyper
ggctgggaaacaaggtaggagaagagggtctgtcaacatgggggcctccggagggtgtcagtgggaggagggggcaacaggacacctgaaggatggaagggtca

SEQ ID NO: 225939 - DNA, 456 bp, Homo sapiens
  chr19:42028297-42028753
  hyper
acgaggctgccaacctgtgagatagttggtccacttgtacaaaaccccctccatgcttcagagccccacaccgctcatcctcccggcccggcgccggccgcggtgatggggtaggcgcggggcctggggcagcctttcccggcccgcccgggccccctccgccggcacgaagccgctttctgcctgcgcgcgccgcagggacgtggcggcccttagaggccgggacagcgggcgcagcgtggagcttgggggccgcgaggcgcgggctcagacatccccgggtaagcctcggcggcggcggccgcgacaacggcaaaaatgcgactgcgaccgcgaccggtctcgtgctcgcgcttccgcggcccggctgctccctccggcgccccggcgctgcctcttcctcgcctgccttccttccccctgggctccccgtttgtttttcgaccttcctttata

SEQ ID NO: 225940 - DNA, 111 bp, Homo sapiens
  chr19:42749161-42749272
  hyper
acggctcaaaagggcggcgacatggggcaggatagcgagggttatttaaccgccagaacccgtggggcatgcgccgctgcgtgtgggcaaccgccacgaggggattggggt

SEQ ID NO: 225941 - DNA, 919 bp, Homo sapiens
  chr19:42927304-42928223
  hyper
ggaaccctggtccacgaagctcgcattccggactctgctcccaagccgatccgggcgtcagctagtccctgtgccagggtgggcctctcggctgtcacatcacccccttctcacaatggatcatcccgttgtccccgcaagcggcaatgggccagtccgcggacccccccaactccctgtggcagtgggccagtccacgctgtccccactgccccgtaggatgtacgaggttccttccgggctgctgccggtctccgcgcgctcacctttggccttgtcttttcgccaccgccggcgaccgtggctccttgagccctctttggcattcttcgaggccggggccatagcggcctcggcgggctccgttcccccggccaactccatcaattccccgcggtcctcccgcgggggccaattccagccgcgaggccctgcccggagggccaatcctcgctacacactactgtcgggcccccctattacccaatcccgagcttgctcttctctgggtccagctccctaaccaattctggtctccctccgctgccgtgctccgcccccaaccgccagaatttaagatctggctccgccccctaccgcgcattaaagggctcgcggccaacaaaaaggcaaccccgggggtggcgaaaagcgtccttcgggcaggactagtgcggagccccgcggggagcaccccagcagggaagtcccgatcttcccacgtgctgggaagcctcccatgtgctggctcagtctcgccatcccactcaccttcccagggagggatgccctagcacgcggcccggcccgccttttgaagggggaaagtggggcgcctctgagcctctgcctggggtgggggcgggccaggtcctctgccaactcaaagacgaggcggggcgccagcgctggaggcgtg

SEQ ID NO: 225942 - DNA, 243 bp, Homo sapiens
  chr19:43967267-43967510
  hyper
gctccctcacctgccgtcaaggtgacgttgccgtcgaagcagcccttgtagacatgatcgctggcgttgtagcagctcacgaccggcggcgatgtaccctggcacgcctcccggctcaggcccacacagctgtagcactccacgccgttgggcgggtatgcactctcattacctgcgaggggagccgagaggaagaaaaggtgtcgaaagggttcgggaaccgcagctcgtcctctagccccg

SEQ ID NO: 225943 - DNA, 111 bp, Homo sapiens
  chr19:43967734-43967845
  hyper
cccggcccccacggacctgccgggtcgagcgcccgcgaggtgaggttgagcttggcgttgcagcgatcctgagcgcattgctgcagctggatgaacgccagaagcccgtga

SEQ ID NO: 225944 - DNA, 240 bp, Homo sapiens
  chr19:44143996-44144236
  hyper
cgcgccgcccgccccgccccccgcgccccgccccctgcccgcccgggggcggggcgccgaggccggggcggggccggggaggggagggggagacggaggagaggcccggagacaatcggggggacggcacggtgggggaacggtgcggggtgcgaaagctggagaggagaggggtgaggagggcgggaaggggtgcgcgggagggcgacagcggcgtgggagcaggtgggggatctcggt

SEQ ID NO: 225945 - DNA, 796 bp, Homo sapiens
  chr19:45004125-45004921
  hyper
cacccgcgcatgcacgcagaggacagtcgcggaatatacagctgtatcagtaactccatcaaccccggtgacccgaggctaaagcgccacccgcacagataccaggtctccccgctacactcaccaccgcttccagcttcccgcgtagaccctgcgcatgcgcgcatcggacaccaagcgctgccccacgcccctaccaacctgggcgtccgctggcccgcagcccaggctgggcctgtcaccgcctcagtgcctagcacggctctgcggcaggacgaactcgggttaggcaaccccctgccccgattctgcaacacggccgactcgggttaagctagttcggtcccctctcctagtcagcatccgcaaggccgctgggggttaagtctgaagggccgagctgctcggcgacagcaagcgtccgcgcgcgggacaatggctgctcttgtggccgaacccggaagtgcacttgggctcggagagccagaactacaattcccagaagcctccgcggcgcggacggtcagtaggcggggttccggcttctccaaggaagtggggcgggggaccgggccagaagctaagagggcgtcctcgtccggggcccgggggggcgccacacctgtgcatgtgcaggtctagggggagcactaagaccagccgcggcgccgggaggccgaggccagtgcagcgacgcatggggagtcgctctggcgtgacgtcagaatccaatagaaatggcggggaccctttctgggtgccccctgcctgtcagacgctgcgcgcgaccccttgt

SEQ ID NO: 225946 - DNA, 169 bp, Homo sapiens
  chr19:45207313-45207482
  hyper
gccaacagcacagcgctggtggaacgtcgagacaccctgcgccttatgtgcagcagccccagccccaccgccgaggtccgctggttcttcaacggtggggccctgcccgtcgctctccgcctgggcctgtcccctgacggccgggtgctggccaggcatggcatccgcc

SEQ ID NO: 225947 - DNA, 195 bp, Homo sapiens
  chr19:45312129-45312324
  hyper
ccccgctgcaggcgctggtcagtaagcccggacagctctaggcttgggggcggacgagccccgagcctggccccgtgcactgggaggtccgctccgggcagtgggaggtcctggccccgcgcccgggcatcgggggacgaggggggcctggagggcggggcggggcggggctgccgggggcggggcctctggctc

SEQ ID NO: 225948 - DNA, 164 bp, Homo sapiens
  chr19:45348110-45348274
  hyper
gtgaccaggtccggaggccggactggagcccagccccacccagcccggccgggccagcgcagcgcgggggccggtctctgctgccccctggcgggtggctgcggtgagaaggcggcgcggagcaggtgttgggaggggaggaccagggcgcgcagggaggtagg

SEQ ID NO: 225949 - DNA, 209 bp, Homo sapiens
  chr19:45348863-45349072
  hyper
aaatacagggacagagaggaagacccaaagagagtgagagagacacaaagacacgtaagagagacagagaaatccagaaagaaacgagtgcagcgacacctagagttcggggcagagattagaaacgcacgagggtacgagaaacaggctcagggcgatgggctcgacctgcggggaggtcgcacaaccgggacgtgctgggggcagaa

SEQ ID NO: 225950 - DNA, 632 bp, Homo sapiens
  chr19:45349505-45350137
  hyper
ggccggagccagggtcggcttgactcgggggagcagcgggtggatcctgtgacgtcagcgggttcgaaccgccggagctgagcgagaggccgggggtgccgagccgggcggggagagctgggccgggagagcagaacagggaggctagagcgcagcgggaaccggcccggagccggagccggagccccacaggcacctactaaaccgcccagccgatcggcccccacagagtggcccgcgggcctccggccgggcccagtcccctcccgggccctccatggcccgggccgctgccctcctgccgtcgagatcgccgccgacgccgctgctgtggccgctgctgctgctgctgctcctggaaaccggtgagacgagcggacggccccctgccctcgcgcggaccccctccaaccttaccttccgagctggggaagccgagcaccttccccgcccacccccggctccccgagccccctctcgcgtgcccccttcctggctggccccacagactccgaccccctacacgtccgattctctcgaggagactctgacccctcctttctgcatctctctcaccaccacccccatccttcttaatccaattgcccatcctacgcctgcttgtctgtccc

SEQ ID NO: 225951 - DNA, 1024 bp, Homo sapiens
  chr19:45647787-45648811
  hyper
ataagagttgccctccttgggggcttcagggcgctcaaggtccaggccctggccaggggcccaggctgtggggggtagggactgactgggtgcctggggagctgggagtggacgggggacctggcatttggggagacttcaggcacaggagggacttcaggccaggcctgcggcagggcaggacggcgccggtgttcacgcaggcgcgcgaaagaaaaggagcgcccgggcctggctctcttcccggcttctttcctgacttggcctcctgggtctcctccgccatcacggcctcctcctcaccctcacaccccctccctccagccgcacactcagagcctggagacgctgaacctgggccacaaccccatcgggaacgagggtgtgcggcacctcaagaacgggctcatcagcaaccgcagcgtgctgcgcctcgggctggcctccaccaagctcacgtgcgagggtagggtacggggccgggccagggtgcgggctggtgggctcagccgggcggccagccgggtgtggggcccgtggccagcccctgcggtgcccccccaggcgcggtggcggtggcggagttcatcgctgagagcccccgcctcctgagactggaccttcgggagaacgagatcaagacaggcgggctcatggcactgtcgttggccctcaaggtgaaccactcactgctgcgcctggacctcgaccgtgaacccaagaaagaggcggtgagcaggggacggtcctgcagccctggggcgggcggaaggccgggtggtggggccggcctgagagccctagccaggcgctcccgccacaggtgaagagcttcatcgagacgcagaaggcgctgctggccgagatccagaacggctgcaagcgcaacttggtgctggcgcgggagagggaggagaaggagcagccgccacagctgtcggcctccatgcctgagaccaccgccaccgagccccagcccgacgacgagcccgccgctggggtgcagaacggggcccccagcccc

SEQ ID NO: 225952 - DNA, 38 bp, Homo sapiens
  chr19:45655081-45655119
  hyper
tgggcctcacagggctcattcggaccctgggttgcggc

SEQ ID NO: 225953 - DNA, 46 bp, Homo sapiens
  chr19:45908810-45908856
  hyper
tgtagtcctggagcccgcaggggctgcaccccggtgtctctctcgc

SEQ ID NO: 225954 - DNA, 230 bp, Homo sapiens
  chr19:45947821-45948051
  hyper
agggcgcagaaacccggagactgaggcgcagcaaagaggagatacagagatcagggccccggagcaagaaattcggagacatgcgtggaggccgaagcaacagggaactgtcggggcgcagagatataaggaaagaccacgcgacagatcgaacaaggacggggcccagaaataagcacagaaataatgcagttacacacgggcaacaccgaggccggcagggacgcccc

SEQ ID NO: 225955 - DNA, 262 bp, Homo sapiens; identical to SEQ ID NO: 205479
  chr19:45959073-45959335
  hyper

SEQ ID NO: 225956 - DNA, 721 bp, Homo sapiens
  chr19:46001721-46002442
  hyper
ggctgaaggatggcggtcctggcccgccagctgcagcgtctcctctggaccgcttgcaagaaaaaggagagggagaaggaggggagggaggaagaggaggaggaggaggcggggcgcagggcccccgaagggcctcggtctctgttgacagcgccgcgccgcgcccagcggccgcacgggggtgccgaggcgtctgggggcctgcgcttcggggcgagcgcagcgcaaggctggcgcgcgcgcatggaggatgctcactgcacttggctttcgttacctggtctgcccccgggctgggccttgtttgccgtcctcgacggccacggtggggctcgagctgcccgcttcggtgcacgccatttgccaggccatgtgctccaggagctgggcccggagcctagcgagcccgagggcgtgcgcgaggcgctgcgccgagccttcttgagcgccgacgagcgcctgcgctccctctggccccgcgtggaaacgggcggctgcacggccgtggtgttgctggtctccccgcggtttctgtacctggcgcactgcggtgactcccgcgcggtgctgagccgcgctggcgccgtggccttcagcacagaggaccaccggccccttcgaccccgggaacgcgagcgcatccacgccgctggcggcaccatccgccgccgccgcgtcgagggctctctggccgtgtcgcgagcgttgggcgactttacct

SEQ ID NO: 225957 - DNA, 197 bp, Homo sapiens
  chr19:46271418-46271615
  hyper
cggcgtggggtagcggttgccgcggtagcaggccttgagcgctgcgcgggagcgctccttgaagcagtagactgtctcctcgccgtcccagatggtcttgggcagcgggaacttcttgcgcagtcgatacttgtccactgcgccaagcgcgcggccgcgggcccgctcggcctcatggtagcgcgcgcgcaggtaga

SEQ ID NO: 225958 - DNA, 33 bp, Homo sapiens
  chr19:46273813-46273846
  hyper
caatgcagcccagggcggcggcacgagacagaa

SEQ ID NO: 225959 - DNA, 105 bp, Homo sapiens
  chr19:46404950-46405055
  hyper
gatctggttctcttcgaatgagaagcgcggcttgcgcaaccgggtggtttcctccgcttcgcccgccgccgccgaggccatggcgccccccgacgccgccgtcct

SEQ ID NO: 225960 - DNA, 104 bp, Homo sapiens
  chr19:46405191-46405295
  hyper
ggcggggggcgggcgggggcgacgggcacccgggtaagtcggaagcgcctaagagtagctgacaccggctgagcgcttggctcggacttcgcgcggcgcgaagt

SEQ ID NO: 225961 - DNA, 480 bp, Homo sapiens
  chr19:46519213-46519693
  hyper
taggcctgagggttcggagaaggtgcggtcggggaggagtctcgcgattgagtttgtcggggcgggcgggaagctgacagctgcctctgtggtctcaggaggcggactccgccggtgcagccgcccccgacgcgggaggaccgggcctcatcgtcccgggagcgctccgcgtcgcgaggccgcggcgccgcgcgctcctcatcccgggagagcggccgcgggagccggggtcggggccgccctgcgcgcccctcgccctcgcccacaggtctgtgcccctgccctgcggtagggaggggacgcactggcgctgccaaggcccgtctccggacctagccgcctcctctcccacgccgtcctaggtggtcgcgcgctccgcttcgaccccacggcctttgtgaaagccaaggaaaggaagcagagagagatccagatgaagtcagtgccccttcctccctcacctgcccctgtccctggccc

SEQ ID NO: 225962 - DNA, 105 bp, Homo sapiens
  chr19:46931909-46932014
  hyper
tgactcgtggctcccgggtcctgggcaaggctgcaccaaggagggtctaaagatgatgcttcccctttcttggcgtggcctccgaaggtctcacaggccccaacg

SEQ ID NO: 225963 - DNA, 271 bp, Homo sapiens
  chr19:46932091-46932362
  hyper
gggaggcgcgtccctcaccgctggcccagaggttgcactcagtgccctgtcgccggactaggacgaggatgtggccgctgcacttgctcccgcggtgacgtcaccgcctccttccgctctgcggcctggcggtctccatggcaaccgctgaagcatccatctcctctgccattggccgactggccgcattgaaatcaagagtctgagggggtcattcggaggtgaggggtcggccaccagccctcagaagcgcccgcgattctcctttgaa

SEQ ID NO: 225964 - DNA, 685 bp, Homo sapiens
  chr19:47258852-47259537
  hyper
tcaccgtcctggtgcgggagttcgaggcatttgacaacgcggtgcccgagctggtagactccttcctgcagcaagacccagcccagcccgtggtggtggcagccgacacgctcccctacccgcccctggccctgccccgcatccccaacgtgcgtctggcgctgctccagcccgccctggaccggccagccgcagcctcgcgcccggagacctacgtggccaccgagtttgtggccctagtacctgatggggcgcgggctgaggcacctggcctgctggagcgcatggtggaggcgctccgcgcaggaagcgcacgtctggtggccgccccggttgccacggccaaccctgccaggtgcctggccctgaacgtcagcctgcgagagtggaccgcccgctatggcgcagcccccgccgcgccccgctgcgacgccctggacggagatgctgtggtgctcctgcgcgcccgcgacctcttcaacctctcggcgcccctggcccggccggtgggcaccagcctctttctgcagaccgcccttcgcggctgggcggtgcagctgctggacttgaccttcgccgcggcgcgccagcccccgctggccacggcccacgcgcgctggaaggctgagcgcgagggacgcgctcggcgggcggcgctgctccgcgcgctgggcatccgcctagt

SEQ ID NO: 225965 - DNA, 270 bp, Homo sapiens
  chr19:47359761-47360031
  hyper
gacctccagccattcggcccgtaggccgatgcttgggaaatcttgacagcggcccaagccggcagtcggcacttctctcggtcggttaattgtttactcgtttgtttatttatcctggagtggaggctagccgggtgcgcggaggcggctgcccccagggaagcccgcttcctgtggttggcttgctcaactactatccgccctcttgcgcactggaaaaaattgcagagctgggaatgcaccccttgatggttccgttcatgcagtaaa

SEQ ID NO: 225966 - DNA, 105 bp, Homo sapiens
  chr19:47363328-47363433
  hyper
ttcacagaaccaaaaacaagttgcatggacgcgcgcgttggctgcagattttcttcacagccaggagaaagagcacgcgctctccagccccgcctcttcttccgg

SEQ ID NO: 225967 - DNA, 363 bp, Homo sapiens
  chr19:47522920-47523283
  hyper
attctgacccccgacgttaccgtggggcaagggaactcggaccccagggtagcttggccccctaccagggaaaggcgagcagggcgggtccgggggcggagacgcggcgggcggggctccggcagaccccgcccccgcccgcagcgctggtcgcgcgtctccaagtctgcgaggccgaggtgggcgccgagagctgggcgccacagcccgcgcgtcccgctgcgccccgcgcgccccggggtctatggagctgcccctccgcgccgcccggccggccccacgccgcgcccggagcctgctctgcggccaagtaatcggactggcggtcctgcgggtaggggaagcttgcgggctggcaggagg

SEQ ID NO: 225968 - DNA, 136 bp, Homo sapiens
  chr19:47523636-47523772
  hyper
ggctggggctcgcgcgccggggtcttcagggaggaagttgtggtcgtggggatgtggcggtccgaacacgtggcgccatcccgagaggctggggggatccctgggcaggacacaggatgggggtccctgccctctg

SEQ ID NO: 225969 - DNA, 104 bp, Homo sapiens
  chr19:47523884-47523988
  hyper
cgtgcgtgcctggcccgggaggcgcccgccccccgcccggcttgggcatgcttggcacgcagcgcgcgggccggttcgatccgtatgcgcgccgcgtgcgccca

SEQ ID NO: 225970 - DNA, 138 bp, Homo sapiens
  chr19:47675975-47676113
  hyper
cagagtcaatcacagatcatctactccagagttgaaaagtgtacacgccaaaaaaaaaaaagagaaaagaaaaaaagcacatatcttcacggatgacagagttctctaggacttgctctgtgccgggcgttttccatg

SEQ ID NO: 225971 - DNA, 180 bp, Homo sapiens
  chr19:47729864-47730044
  hyper
gctgggccccgatctcccgggcccactgttcctcctccccgcggactcccggggccgcctgggtgggaccgcccgccagagcccccggggcgctgggcacgggcgactccaggtgctgctccgccagcgagagcgagggctgaggaccttggagaggcagaggggcgcggtcagcaccca

SEQ ID NO: 225972 - DNA, 152 bp, Homo sapiens
  chr19:47730760-47730912
  hyper
tccccttgggctgccgggacaagatgggggatgggaaaccaggacacactttccctagagcgcctgccggcagggatggggctccacgggcaccacagggttaacagcccatcaggcaggggacctttaacccttccctccccaagactccc

SEQ ID NO: 225973 - DNA, 170 bp, Homo sapiens
  chr19:47731298-47731468
  hyper
tggcccggctgggcccgccacctccccccgtcctctcccacttctccagttcctccgagtctccagccctctctcttcccggctcctatcaccccgggggcggggcgggcactcaccgtccgggcgcgggcctcggggccggctgcggggacccccaggccagcgggaac

SEQ ID NO: 225974 - DNA, 550 bp, Homo sapiens
  chr19:47742713-47743263
  hyper
gtcctggctttccgcggtggggaaggggtctcccgggtcccctcggtgtggccggccctgcaggccgggaggctggaccggggccgggtgggggctgggcgggggcgcgggcgtccgcagggtccgagcggccggcgcgcgtgtgaaggttaccgcttcccggcggggcgggggccgcgcgctgttgctggggtctgcggggcctgcctgcgcccgcgccccccctccttcccggccagccagtgagcggtacccgccgccgttgccaggggaaactcgccgccccgttacccagcaacaagcctggcccaaccaggcgcgaggaccccccaggccccgcccgccgctgcccaccgcgtgcccaatgccaggcgggcagagccggcccagctcccggagacggcgagcgcgctcattggccaccgccgcgtccgcccggatctgggggagccctcggcgcggggggcggggaaccgggccccggggagctgccgggcgcgcggcctgcaaacctgcgaccggctggggtgatacccgggctgtgcaccat

SEQ ID NO: 225975 - DNA, 330 bp, Homo sapiens
  chr19:47910407-47910737
  hyper
atggaaacggaggggaatgaaaagagggagtgggagagaggccaagacgaacacagagcgggccggaggacagcggcgggggaggcagagcggggcgagcaggggcagtggctctgcggggctcggggcctccgtcagcaccgcggacagcgcccgggctctcgccccgggccggcccgcgggccctcctgggccactcaccagttgttgacttgcaggatggtgagccccgtgtcctgcgccagctgtttcttctgctcctccgaggggtacgggtgctgcagccaccagcaagagtcactctgcctgcctggccggccgcagtctgaa

SEQ ID NO: 225976 - DNA, 402 bp, Homo sapiens
  chr19:47950995-47951397
  hyper
ccctgagccacatcaggcctcgcccattccgaagccccgcccctctccgggccgcctcgggcgtgctcacatggtctcgtcgtcgccaaactccagctctccgcacgcgtcctcgtagtgcacgccgccgccgcgcgccgtgccgtccaccgtgcggtagggaaggcgcacggtgccgcgcgcgcccgagctgcgcacgacgcgcacgtccacggtgcccatgcactcgctcacgtgcagcaggcggtcctggaaggagaagatgcctgcgtggtcgtcgtccaggatggtgacggtggccagcagcggcgccaccagccgccccttgggccgcccgccgccgtccggctcgaacatgccctgcgcgtcgcccacgcgcaggttcagcagccgcacgaagaa

SEQ ID NO: 225977 - DNA, 275 bp, Homo sapiens
  chr19:48076347-48076622
  hyper
gggggctcgcgcgccgggcctcgcgcctggcgcctcgcggggctcccagcggcctcccgccttccccgcgccgcccggggcgcacgcgcagcccggcccacccccggatctcctcgctcacgcgcggcgcaggcgcgcgtacgtgaccgcgggccgcctcacgcctcccagagcggcctcgcgcgtgcctcctggccgcgcgctctcggctgcttctccgaggggcggggcttgccgcgggcgggaaaggaggcggttggtcgccattttgggag

SEQ ID NO: 225978 - DNA, 271 bp, Homo sapiens
  chr19:48229020-48229291
  hyper
ggtctgatttctgccccttgcgcccctgtctctccactcccactccaggctacgacttcccggccgtgctgcgctggttcgcggagcgcgtggacctcatcatcctgctctttgatgcgcacaagctggagatctcggacgagttctcagaggccatcggcgcgttgcggggccatgaggacaagatccgcgtggtgctcaacaaggccgacatggtggagacgcagcagctgatgcgcgtctacggcgcgctcatgtgggcgctgggcaa

SEQ ID NO: 225979 - DNA, 105 bp, Homo sapiens
  chr19:48823631-48823736
  hyper
caaacagggtggggctcctgtagggatggacatataagacccttcagacagcaggcgggccagggcccagagagggtggacaatgaactgcgagggactgggaat

SEQ ID NO: 225980 - DNA, 643 bp, Homo sapiens
  chr19:48901493-48902136
  hyper
cctccccatctcggcgcctgtccctcgctgcatctcctcctctgtgcgtctctttatctcgtctccctgtccctgcgtctcccgtctgtgcctccctctcctccccgtctctcccggcccgggcgctcagaggccgcccggcggggcccgcaggcgatgcgcggcgccggtggcccccgcggccctcggggccccgctaagatgctgctgctgctggcgctggcctgcgccagcccgttcccggaggaggcgccggggccgggcggggccggtgggcccggcggcggcctcggcggggcgcggccgctcaacgtggcgctcgtgttctcggggcccgcgtacgcggccgaggcggcacgcctgggcccggccgtggcggcggcggtgcgcagcccgggcctagacgtgcggcccgtggcgctggtgctcaacggctcggacccgcgcagcctcgtgctgcagctctgcgacctgctgtcggggttgcgcgtgcacggcgtggtcttcgaagacgactcgcgcgcgcccgccgtcgcgcccatcctcgacttcctgtcggcgcagacctcgctgcccatcgtggccgtgcacggcggcgccgcgctcgtgctcacgcccaaggtgcgcgcgaccggggcggggc

SEQ ID NO: 225981 - DNA, 105 bp, Homo sapiens
  chr19:48994476-48994581
  hyper
atcctccgcccactcgaaactgcctcctgcggcagaaggaaagaccgcggtcaggctgcagacacctgcggcactcccgccctctggtcccgcccctcccgacca

SEQ ID NO: 225982 - DNA, 204 bp, Homo sapiens
  chr19:49014628-49014832
  hyper
gccctgctgggctgcgggaagacgcgcaccaggtgacggggcaggacccgcagacagacccctgggcagacagcgaggccgccgcgggggtgggggccaccggacagactgatggcccgacagactcaccggggtgggccggggacgccaggcagccggaggcggagacggccgcaaggaggatgagggcgccgggggcaggca

SEQ ID NO: 225983 - DNA, 584 bp, Homo sapiens
  chr19:49242360-49242944
  hyper
gcaggtgctccgcccgccactcgccgcttcccacgcccgccgccgcgggccggcccagagcgtcgcacaaagcgaaggcgtccacgcagctgctctcgccggggccaccgccggggctgcctgctaggccgtagcgctctagcgcctcggccacgagctcgcgcgccgtggagcgcgccgtggccagcacgctcttgtagttggcgcccgatgccagtccggcgccgaagatcttgaggacccccggaggcgccgtggcgcgggtagccagcgggggctcgggggccacgcccgccgccagctccggcagcttcttctcgctggcccagcgctgcgcgccccccggggtcccagggcctcctgcgccgctggaccccgtggtcccggtccccgagccccggaagagctgggagatgcgcttggcgcggctaccggaggctcccccggccgccttgacagcgcccactcgccgcagctccacgtgcggcgggggcggaggtagcggctcgctgctgcggctccccgtgtccgacgaagaagacctgggagtccgccggggaacagagtcgcgggagagagaccca

SEQ ID NO: 225984 - DNA, 48 bp, Homo sapiens
  chr19:49467050-49467098
  hyper
tggggtagggggcccgatttgggtctgagccaggtctagttctgaggg

SEQ ID NO: 225985 - DNA, 196 bp, Homo sapiens
  chr19:49660928-49661124
  hyper
tcgcggcctgggacccgccctctccccgcctcccgctttggcgtctccaagactccccgccccccagacctcgccccgccccaggctaggctggaaagtggaggatccggtttgctctgggcgggtctggaagcagagccggcggagggagcgccggggccctgggctgcaggaggttgcggcggccgcggcagca

SEQ ID NO: 225986 - DNA, 617 bp, Homo sapiens
  chr19:49925606-49926223
  hyper
ctaccccccatttcaagccccgcgcccccaacccaacgcacacgcaggtcgcgcaggaactaggcgcagtccggagcgcagggcatggtctttattaagatggggacgggcagcgcgctcagggcgcatccaacaccagcagcttgtgcatgtacgagttcagccagtggcggcgctcgagggcggccagcaaccgcgcgcgctcccggaaggccgcgtcgtccgccagcgccaggctcctccgcggcctgggggtggcgggatccgcccaggcccgtcctggggggcggaggctgtggagagacgcggtgaccgcgcgtccagactcgctcttgccgccgcctgtcctccccgcggtctaactcgaagccccgttactgcccagtccgtggagtggctcggtccggctccccctgtctctctcgttctctgtgtgggtctctgtctctctgctcaccaggttcgaaactccccaggtactgagaccgagtctgatgcacttgtccgcccacagcgctcagcgcatggccaggcgcacaccaagaacccaataaacgttgctcaaagaatgaatccgtttctgcaacgactcctttcgagcctctccacgcctttct

SEQ ID NO: 225987 - DNA, 273 bp, Homo sapiens
  chr19:50058957-50059230
  hyper
cgccacgtcgttgcgcacccaagccggtttatttggtctcccgcacacactcaggcctgcatcaccggccgtgatttctccgcttgcagcttcactccggagcccgcgaagccggtaccgccctgggggaggtagagagaaggacgaggtagaggccggcccgggggtgaccagtggggctccaggtggtagtggggattcctaagcgggtcaaggtgaagcgggttgctggctaaggagtaggagttggggagggggcgaggcgaccgcagt

SEQ ID NO: 225988 - DNA, 352 bp, Homo sapiens
  chr19:50312465-50312817
  hyper
cacagctccaggctcggcagcagagtcagggtcaggagccggtgtgggacctgaagcagggcacaggctggggctcatcgcggcccggcccctttccatcgcagatcccgcctcctcgcgactcggcccccaggtcacatccctccgtcggtgcccgccacccactcaccgtggggctcccgtgcggcaggtacaccgggtagtcgcgagcggtctgcggcggcagggaccccaccagccaggggagcagcacggcctcgggcgtccccagccgccaccaaccctctgttgctgccaccacccggccggacaccaccagactgacgaaggtcgtgcccgcggcctcagcgaa

SEQ ID NO: 225989 - DNA, 198 bp, Homo sapiens
  chr19:50353784-50353982
  hyper
gcagagcgaatgagcgaatccacggaaggccggggagcgacgtgagtggcgagaagcttggagtcgccagggacggcgggcggagcctgggcgccggggctaatgggcggagcctccagggacagctggccccgcccaggccgcgcggggcccgctgggagttggagtcccttgcccacctcgccacgtcaccgactg

SEQ ID NO: 225990 - DNA, 180 bp, Homo sapiens
  chr19:50553765-50553945
  hyper
tccttgtgctgactcggctcctggccacgccctaaccccacccccgctgcctctaaacccgtccccacccctgcagcctcacaggctgccgtcagattctcaagcccctattcctctcggtggcctaaatccccaactgctcggggccacttttcaggccaaaatgggcccaaaatgggg

SEQ ID NO: 225991 - DNA, 180 bp, Homo sapiens
  chr19:50828991-50829171
  hyper
gcggggcgcacggcggccagtaccgcggacagctcccccgccgcagtgcgcagccgcagcggctaggggccgtcttaaccccttccgggccggagcctattcaacgcgcagccgcagtgttgctgctttccggcgggaggccaagggccaagagtctaattaactccttccctcccaggg

SEQ ID NO: 225992 - DNA, 564 bp, Homo sapiens
  chr19:50831535-50832099
  hyper
ccatgtgccgcccgcgccgcccgcgccccctggcggccccccggcgccgccgcccgcgtcctggaagcagaggcgcttgagctcgccgcccgctccgtccaggccgccgccgcccgcgcccgcctcgtcgtccaggcctccgtcgtgggcgcctgcggcgttggcggcgttggcggcgcccgcggggtcgggcgcctcgaaggagtcgagcgcctcctcagcgtcgcgatgctgccggtaggtcatccagcagcaggcctccacgtcggtctcgtcgatgccccagaagccgagctcctcctcaaacaggggcccgcacacgtcggctgggcagtgcagcttgccggtgcggtagtagttgagcacgtacgcgaagactcccgggtgccggtcaaagaagaactcgtcggcgcccgggtcgtagtcgaagcgtgccgccgcctcgggctccgtcaggccggccagccgcgtccccggcagggtgcgcagcgtcgagcggtacgtctcatggcgcacgccgcccacgttgatcacgatcttgccgctgtcgccaccgccgccgcc

SEQ ID NO: 225993 - DNA, 407 bp, Homo sapiens
  chr19:50833793-50834200
  hyper
ggtcacagggtctcaaagggcgaggcgagaacttctaacgaacgctacaccgcggcggactgcagattggaggaccgagggtagatgaggactggtgaggagggggcacgcaaggaggcagagaggacgggagaggggagaggccaaagcgccaggaagcaccgtcaagactgaggcaatataggcaggaccgataaaaaatggggtgggctaggagtctcagaggtcgggttctggggaagaatggagtgaggggcggggccagaaaaaggggaccgcctcggagcgggccgtccccgccccctgggcggtcgtaggctccgagaggcagagcgcaggctcagggggctggggcggggccagcggctgcggctggggctgcggagggaggaggcggcgcctgcggg

SEQ ID NO: 225994 - DNA, 180 bp, Homo sapiens
  chr19:50834230-50834410
  hyper
cgccctcgggcagcacagtttctggcccgccgcttcctgctgcaggtgcggcggctgattcgtatcgcctcccaaccccatcccacccccgctcccgtttctgggtttcttggcgtctctttttctcccttcttgagtatttgtgccgccgtctctgttcccacccctctgagtctccga

SEQ ID NO: 225995 - DNA, 154 bp, Homo sapiens
  chr19:50979534-50979688
  hyper
gtcatgatgcggagcgggctttatgacgtcacacaagagcgggctcctgatttgtgatgacgtccctggagggggcggctcctggagatcaggccaaaggggcggccccatcctgctgacgtcaggccccaggtgcggacgggtgccagtgcgc

SEQ ID NO: 225996 - DNA, 164 bp, Homo sapiens
  chr19:51071280-51071444
  hyper
ggggtgcaaggcccgctgcggggaggcgcggggggcggggctgcggccgggcctggagcctctcgcgctctcccccctccccggctcctgggtggggagggggcttccgcagcggcggcggtggggctgggggggccgctctgcctcctcgcctcgcgcccgcc

SEQ ID NO: 225997 - DNA, 83 bp, Homo sapiens
  chr19:51111319-51111402
  hyper
cgcgcggtggcctgcgggctcgcgggagctcacgcgaactcacgcgcgagctcacaagctgcggcggccggctaggcgactag

SEQ ID NO: 225998 - DNA, 499 bp, Homo sapiens
  chr19:51170581-51171080
  hyper
cagcaggggcagcccgttctcttcgctggccctcggggaggtcggggaggggggcacggaccggcgtgggctgggcggcgggacccccggcccgtcctccgaggggggaccccttccgctcgtcacaggggcccggggctggcagttttcaaggaaccgcacgtgcagcggcagccgctcgggttcttcgggggctgcggacctccagggcttgcttactccggggtgcggggccgggggctccgtccccagctgcagcaggaggggccccaccccgggagcggtgggcggcaggcggtgtagcagggaacgccgggcggcgggcgggctggcgggaagggacttctcctggctgcccagcccggccctgtaccccagctcccggcgcgcagggtccggcggggaggccccccagagacgcagcactggctcgtggtgggcgtggggcgagtggtggtgcggggtgggcggcggggcctcgtagcggggcgatgggggc

SEQ ID NO: 225999 - DNA, 420 bp, Homo sapiens
  chr19:51227677-51228097
  hyper
gccggcctggacgcaggcctgcaccagctgcacgtccgtctgcacgcgttggacacccgcgtggtcgagctgacccaggggctgcggcagctgcggaacgcggcaggcgacacccgcgatgccgtgcaagccctgcaggaggcgcagggtcgcgccgagcgcgagcacggccgcttggagggtgagtccgcggcgcgcggggtggaaaaaaatgagactatctgggccaggaatgggactggttgagaaggtgaccctaggtgtccggggcgggagagttcgggagagctgctgtgtgctagcggacggggttagagagctgggaggctgaatgcagggagcgggtgggcactccagacccgcgcggacccgactggggcagcaccacgccccctacagtccagctcccaccgcctggcc

SEQ ID NO: 226000 - DNA, 600 bp, Homo sapiens
  chr19:51228232-51228832
  hyper
ctgaatgcatgaccccgcctccttctctacccggccccgcccacaggctgcctgaaggggctgcgcctgggccacaagtgcttcctgctctcgcgcgacttcgaagctcaggcggcggcgcaggcgcggtgcacggcgcggggcgggagcctggcgcagccggcagaccgccagcagatggaggcgctcactcggtacctgcgcgcggcgctcgctccctacaactggcccgtgtggctgggcgtgcacgatcggcgcgccgagggcctctacctcttcgaaaacggccagcgcgtgtccttcttcgcctggcatcgctcaccccgccccgagctcggcgcccagcccagcgcctcgccgcatccgctcagcccggaccagcccaacggtggcacgctcgagaactgcgtggcgcaggcctctgacgacggctcctggtgggaccacgactgccagcggcgtctctactacgtctgcgagttccccttctagcggggccggtaccccgcctccctgcccatcccaccacccggcctttccctgcgccgtgcccaccctcctccggaatctcccttcccttcctggccacgaatggcagcg

SEQ ID NO: 226001 - DNA, 117 bp, Homo sapiens; identical to SEQ ID NO: 205552
  chr19:51527588-51527705
  hyper

SEQ ID NO: 226002 - DNA, 44 bp, Homo sapiens
  chr19:51830366-51830410
  hyper
gcaccgcgctgggccgggccgccctcctgcgctgcgaagccatg

SEQ ID NO: 226003 - DNA, 501 bp, Homo sapiens
  chr19:51830799-51831300
  hyper
ccagggtgcctggaggggggcggcggtgggagtgacccgaggtacatgaggtgctagaacccgaggcgatgggtcactggggtagggggcagaatgctgggtcaccggggaacggaggagcctgagagtcggggggctggcctggctgggcgctgcggcccggcccctgacccggatccctggcaggctgagcagcggcacggccgaaggcctgaaggtgcagacggagcgcacccgctcgatgcttctctttgccaacgtgagcgcccggcattacggcaactatacgtgtcgcgccgccaaccgactgggagcgtccagcgcctccatgcggctcctgcgtgcgtcttcgggcggggcggggccgggaaggtgggcggggccgggggcggggctagggaagtggagacgccgggaccgcccttcaggctggccctgaacttaggagatggacgctgagactgaaaagcaatgcgagtaagaaaccgatccacgcaatca

SEQ ID NO: 226004 - DNA, 714 bp, Homo sapiens
  chr19:52207092-52207806
  hyper
aggttatgcgtaagggtttaaggagtgaggggaaggggtgcgtttagggcaggggagcgagaaggctcgggggcgggctcaaggctcagggccaggactccagggggcgtggtctggctcggggggcggggcttgtaggttactcagtggcaagccggagttgaggcgtttaaacccgcgtgtcccgcagctccggactcaggacttgtcctatttccgagatatgccgcgggccgaaggatacctggcgcggatccggccggctcagctcacgcaccgcgggacgttctcctgcgtgatcaagcaagaccagcgccccctggcccggctctacttctttcttaacggtggggcggggcgcggccgcgtgagtgagcggggtcgggagaggggtggggctcgtgcctggctgacgtgcgcgcccccgcagtgacgggcccgcccccgcgggcggagacagagttgcaggcctcgttccgggaagtgctgcgctgggcgccgcgggatgccgagctgatcgagccctggaggcccagcctgggcgagctgctggccaggcccgaggctctgacgcccagcaatctgttcctgcttgcagtcctcggggccctcgcatcagcgagtgcgacagtgttggcgtggtgagttctggggactccggagccccagcatctagctccccgctgtctcagatcccaccgagaagtctgggtt

SEQ ID NO: 226005 - DNA, 388 bp, Homo sapiens
  chr19:52222530-52222918
  hyper
ctgcgccacgcacacgcacctgcgagtcctcaccagcgcctccactgccagccgcccaggatcctccgcctccacctcccgataggctccggcgcccaccgcgcccgccgccgcgggttcccagggctggtggtagttgccgtcccacacgtacgtggcggggtcctcgtcagcgaagacctcgcggaacatgtcgaccatgtagaggtcctcggcgcggttgccatccaccaccatgaggacgcgcagccgcgcgcgcgggtacagcagggcgcgggcggacgccaggcactggcgcaggtacgcggggtcctcctggtaggcggagatggtcagcgccacactgcgcgcggtggctgcatccagcggcccccgcgccgccgccgcc

SEQ ID NO: 226006 - DNA, 814 bp, Homo sapiens
  chr19:52531292-52532106
  hyper
gactcacaagggccccagacccagacagagtcggactcgtcgctgatttcctcagactcttcatccctacagccaaaggacccgtcattaacgccccgcttcctcagcgactgcgttcaaatacagccccaatcaggacgctccacgcaccatcggtacacagacccacaggccgcgagtccatgcccagaactcgactcacccgagcccgaacctctccagacaccactggcagcgacaaaacgccgcatccacgtccgaaaacgcttcctattcagacgcgctcctgcgcggactccgggaagctgagcggtaaagaccgtgaagcgaggcgaggaccacggagcctgcccgggatcgcgagttcagactgcgggcgccgctctatgaggtcacagggctgcgcccatcgcagcgtttctgacaggagcggccataatggctgtgggaatcactcttagtcacctcagtgcctttctctcttcgttgcaagggacactcaagagtcgggtgcccagccaaggccaacacggcgcagtggcattctattcagcctgctgtggaaaaaagatggcggcgccctttgtgcccattatagctgagagtggagccttagctggagcaccatgggcacggccatcttagaggaaggcagcagccgtacggcagagaagatgctcatatccaggacaatttggaaaaataaacaaggtttgaagaagtcacggtgctggccaggaagcggtcacagagttgccaaaaccagtggtcactgaaagtgttagatttggggatagggcgggggttctgggct

SEQ ID NO: 226007 - DNA, 105 bp, Homo sapiens
  chr19:52643396-52643501
  hyper
taagcggggccgaaatagagcctgttatttactctggttcacaggcagcatgtctttggttttctgactacttcttgtcctgtgaagcagcgttgctgcctgcct

SEQ ID NO: 226008 - DNA, 35 bp, Homo sapiens
  chr19:52674677-52674712
  hyper
ttcgattcaggcagacggggcgaagcaaatgttta

SEQ ID NO: 226009 - DNA, 134 bp, Homo sapiens
  chr19:52715132-52715266
  hyper
tcagttttcagcctcctgctcgtctactttgcaaacgattgaccgtcaagcccgggtttgagcctgactcactccagaactctggtttatggctgtacacttgcttagatacttacactggcccccaccgcctt

SEQ ID NO: 226010 - DNA, 240 bp, Homo sapiens
  chr19:52873065-52873305
  hyper
gcaggtctagcctccaaaacgagacgagctgggagcgaggcggagggaagcgcaggctccgcccaatcccacccgggcctggcctcgcctcgcctctcagctgcgcgcgcagtttcctggagacccggaagcagattacgtggagtgacggtcatgctgcggcgtgtgagtttccctttgtttagattaaatctgggatgctgagtcccctcgcgcttctgtacccggcatctcaggggt

SEQ ID NO: 226011 - DNA, 405 bp, Homo sapiens
  chr19:53030696-53031101
  hyper
ctttctggcgctctcgcctccacaacctaaaaacagagacgctaggagagaggctgaaagacgcgcaagtcccgccccggccccgccccggccccgccctctgccggttctaaagggcaaggtctcagcgcctcgcgccccgccgctacctcgcccaggccccgcccacctcctcccacctcccgcccaggcctggcttccgtcctgcgcgcggagattaacgcaaacccggaagcggatcgggtggagtgaaggtcacgtcgccatggtgagttttgctctgtgttgcattaagtctccgcttcccaggtccccgccgcttctgtccctgggacgtggggtccccacagacctggaaattctcgcccgtcttccttcgcccagagcaaattgagacagcccagt

SEQ ID NO: 226012 - DNA, 462 bp, Homo sapiens
  chr19:53237997-53238459
  hyper
ttttcagcaggaaaactacgcaacagaaagtgtatacattgacctatagcagaaagaccggggacgagaccagcctcaggacgactttaaacccaaaaggaagcgaccctcgggctctcacggggatgtctcaatttgctctgggcaaaggaagacgccggagaatttccaggtctgtggggaccccacgtcccagggacagaagccctgggaacctagttagcgcagacttaatacaacacagagcaaaactcaccgcggcgatatgacctacactccacccgatccgcttccgggtttgcgttaatctgcgcgcgcaggacaaaagccaggcctgggcgggaagtgggaggtaggcggggcctgggcgaggtaggggcggggcgcgaggcggagagaccttgccttttagaaccggcagagggcagggccggggcgggatctgcgcgtctctcagcctcg

SEQ ID NO: 226013 - DNA, 530 bp, Homo sapiens
  chr19:53445362-53445892
  hyper
gggctcaggagaaacggtgattacggagggaagacctggggagcataagggcccggcacgaggagggaggtggggggcgacggcgccttaagacaagactgggaggcgcccagggcgggaatccgcctcgcggtaaggactttaaaaagtgcgggttgggaggagtcagaaaaaagttttgagcaggaaaactacgcgatgggaagtgtatacgttaccctatagcagaaagattcgggacgggaccggtctatggtgactttaaacccaaaaggaagcgacccccagactctcacggggacttctcaatttgctctgggtaaagaaagacggaggagaacttccaggtctatgaggaccccacgtcccaggtacagaagcgcctgggacccgggaagcgcagacttaacacaacacagagcaaaactcacccccgcggtgggaccgtcactccacgcgacccgcttccgggtttgtgcgaatctgctctctggggacagaagccaggcctgggcgggacccgcggggag

SEQ ID NO: 226014 - DNA, 104 bp, Homo sapiens
  chr19:53445963-53446067
  hyper
ggcggggcgggggcggggccggggcgggacctgtgcgtctctcagcctggctcccagagcctcaatttttcgggttttggaggcgagaccggccaggaaggctg

SEQ ID NO: 226015 - DNA, 137 bp, Homo sapiens
  chr19:53446345-53446482
  hyper
gcgggcgcgggggcggaagtctgaggtcccagctgctcaggaagcagcggcgggaggatgctgagcctgggggtccaagccagcctgggcgacaaagtaacaccgcctcccgcagcgctcccttccttgtctctctc

SEQ ID NO: 226016 - DNA, 436 bp, Homo sapiens
  chr19:53606066-53606502
  hyper
cacaggacgggccccgggcacctccccaacgagggctcaagggaagcggtgactgcgaaggggaggcctggggagcagcagggcccggcacgaggaggagggaggtggggggcgacggcgccttaggacaggggtgggatgtgcaggatcccaggaccaggcggaggcgcggcctccccgggactgggtcggcggcgctgcgctccaggggccgacgagagcgaggctgggaggcgcccagggcaggcggtgaggactttaagcgatgcggggcgggaggaggagtcagtaaaggattttaagcaggaaaatcctgcttaaacgtttaaaaaaccgggaaaggccgtgtttacttggcccaaggcagaaagaccgggggcagggaccagcctcagggcgactttaacccaaaaggaagcgtctccgggcccacaca

SEQ ID NO: 226017 - DNA, 131 bp, Homo sapiens
  chr19:53696533-53696664
  hyper
gcaggtttaatctagatagagggaaactcacgcggcgactaacagccttcactccaagagatctgcttccgggtttgcaagaaactgcccgcgcagtaggcaaaggggcgggttgcggtggggaaaggcca

SEQ ID NO: 226018 - DNA, 493 bp, Homo sapiens
  chr19:53757805-53758298
  hyper
tttaagcagagaaacgacgcggtgggcggtcggtgtccacactgacctaaagcaaaaaggtcggggccagtacccacttcagaacgattttaatccgaaatggacgcagatctctagaccctctcggagcgacgggactgggaacgtcttagggccacgccgcgagaggaatgagcaggttcggggttttaacctacagggcgaccccaaaacccgacagcggagcgtgggaacctgtggcccgcgaggcgcaggcttgaacccgaaagacggagactcacccgagagcgccagtagccccgcgagatccgcttccgggtcggcaggaacctgcgcgtacgcgagtgcactggggcggcgcaaggggcaagggcaggggcagggcgcggacaactgtggggatgggcgggcaaatggcggggatgggcggggacaatggcgggatgggcggggacaatggcgggatgggcggggcctaggggtcggactgccg

SEQ ID NO: 226019 - DNA, 45 bp, Homo sapiens
  chr19:54206968-54207013
  hyper
tttagtgtaatcaatcgaaatcatttccttcattaagagagtaag

SEQ ID NO: 226020 - DNA, 1312 bp, Homo sapiens
  chr19:54371779-54373091
  hyper
gaggggggtgttaagatccagccccgtgcttccgaagtgcagaaggagctgggaaaggaggagaagacagggctgcgtcccgcacctctgggtgccgagagccgaagctggggttccggggcccgattctcagcgtgagcgatgggtgtggcgtctggagtggacgagggaggacactgaggggctgggtgtggcccggagagtcgggtgcgctgcgaggaatcccggaggggtgtttcctcaccctccagggtctggctgcgcattcctgagctctgatctcgggcgatggctggaggccctaagggcggggtggacccctcccctcccctcccctcggcgcgcccccctcccctgcgcgcccccctccgcggctagcccaccttccgcgggggacagaatgagtgacgccctcgctcgtcctcctcccctgcttgggacggggcagtagcccgccttctagagcacgggacgctgggccagtcccgatttccttctccttcgagggtcctggaggggcgtgggggcaggcagtgtctggctccgggtggagcctcccaggtgctcccgcaagccccgaatggcgattagggaggccgtgggaggcgtagctgggcctcgggcctgacgccagcaccgcgtgcagtttccggcctggagcctgagcccctcagaggcccgggtccctgcccactccggtcttagagatgctcttgggggggctctcagcccatgtttatagggatccagaaatgcaggcctccaaccctgagagtcggggtccccaccccccggaaatccgggagagggcgggcagccccggaggcgggcgggggtccgggcaccgcctcctggtccctgacacattccagatgcctgggccgactcgaagcccttataaggcgcggagacaccggctctggctgggccgcccgcctccacagccgccgcccagggttctcccgccactgccgcccgcacccccgcccccgcggggttaagatcacacacgcgcccacgccggcccgcggggcgtgcactttcgctgggttccgtccgccgcagcccaaacagttaactgaacggggaggggagggggcggggcttacccggggtcaccgccagggccctgctgggttccacgccacgttcctgtctccgcagggcgttcgatccctagagggaggagcctgtccaaacggacgctaacggcctacctccccctcaggtgctcttacagcctgttccaagtgtggcttaatccgtctccaccaccagatctttctccgtggattcctctgctaagaccgct

SEQ ID NO: 226021 - DNA, 609 bp, Homo sapiens
  chr19:54382389-54382998
  hyper
tacgttggttaactcgggaaagaactcaaggacactggactagaacgtggtgggattcctaggtcggtttcggggccatccccgccgcctatccttcgccctaggtcacctggaggtggctggaaggccagtggactccacatttagggagagtggttacaagaggactcggattcccccaccttcccttcggctttgggaatcccaggaaacccgccccgaacccctgaaaagtcccagagaaggtaagctgggcgtccagagtccctcccaggcgccgccgcagcgtcccgcccagcctcgcggggcacgccgggaggcggagttctcggtcgtgtcccgagagtggctggtccgcaggctcggactaccagtcccagaatgcactgcgcccgcagcccggggcgggccgtggttgcccctggcaacagagagggtctcccgggagcggggactgggaagcgctcccgagccggggaggcgcagagcccgaccagagagaggcggggacgcgggtagagcgaccaagaggtgtggaggccggaagagactgaccgcgccggcccttggagagacccctttcctgagagggggcgcacagagaggatg

SEQ ID NO: 226022 - DNA, 600 bp, Homo sapiens
  chr19:54385476-54386076
  hyper
gctcccaccgccgccgcccgtgcctccggctgccggcgcccctgcctttggctcttcctccccactcgcccgctccccctggcggagccggcgcgcccggggtgccgctccctgcctggcgcgctccgcacctggaggtgccttgcccctctcctgcccacctcggaatttccctgtggctcctttgatccttcgagtctccagctcctctcccttccacctgtttcccccaagaaaggcaggatcctggtccctgctacgtttctggggccatggctggtctgggccccggcgtaggcgattcagaggggggaccccggcccctgttttgcagaaagggggccctgaggcagaaggtggtccacgaagtcaagagccacaagttcaccgctcgcttcttcaagcagcccaccttctgcagccactgcaccgacttcatctggtgagggaagggggctgggggactgggggacgaggggactaggggtgcagactcctatcacgccgacccctgtggaaggaagaaggagggggctgtagtcccgactcccaggttctaggatggccagggaacgctgggagcttcgactcctgggtttc

SEQ ID NO: 226023 - DNA, 332 bp, Homo sapiens
  chr19:54411189-54411521
  hyper
gcagagacccagcgcgtccgtgttcaccagagcagccacgcaagctcacatgcacccccaggctcagacaccggggagaagtccttcccaagcggggagatcacagtctggcctcttcttgagagacctagagacctgatcagaggaagagacccccacgccagagcaaccaaaaacagccagaacccgagagcctaggaatcggcgacggaggcacacggcaggcagacgcgccttctgggcctctttcccttgacccacttgagagtctggggagtgccggggaccgtgcagatggactacatttccccgcaggcctcgcggcagaccct

SEQ ID NO: 226024 - DNA, 344 bp, Homo sapiens
  chr19:54411572-54411916
  hyper
ggtcagggccagaccagtggagcggtgtgccttgtctgtgtgtttggaggggactgagccccaaagcttcgcagtcttccttgcggacccgggcacgtcttcttccctgcagtctcctgggtttccatgacccggtccgggtggatgctggggctgcccctctctccctcatcaccgccgcgacacccccatccagtgcccgcaggccccagcccccgctccgaccctcggcgggcggcctgcccctttaagagtggccccgctgacatcacggcggggggggggggtggcccggctcctggctccgcggcggctgcaggacccgactccgctctgcgcccgcc

SEQ ID NO: 226025 - DNA, 534 bp, Homo sapiens
  chr19:54412573-54413107
  hyper
ccgccgagtgaggccgcggccgcggggggtggggggtgggaggccgggagggggccgggacgccgggctccggggcgggggcggggggcgcgggcaccggcgaccccggtggcggcggcggcggccgggggaagcctcggggccggtcatgcggctgcggggcccgcggcccggagcgtccgcccagccctgagcgaggtgagcgctagcggagggtcctgggaggaagaaggggcgcccctcgaggtggctgcgagccgggtttggggcaacaagggacccgagtggctccaggggtggtgagatcctggcggtcgggacgcccgaattcgagcggctatgggggatgcagggacacctgggcctggcgatcccggaggacggggtccgagggtcccggagtgggaaactgcactcctcgcgtccgagtcgcagcgagcgtgggctggggagggcagaggccgggtccctgaggaaggcgaggtacggggcgagggcggaggacccaggcccggccagagcaggatgtgggtc

SEQ ID NO: 226026 - DNA, 53 bp, Homo sapiens
  chr19:54413510-54413563
  hyper
gaccaggcagctcgcggtcaaacccctgagccgccaggcgggggatgggagga

SEQ ID NO: 226027 - DNA, 588 bp, Homo sapiens
  chr19:55865817-55866405
  hyper
ggggaagcgcgggtcgaagggcggcgtcgaccatttccccttggggggctcctgggcttccacatccaacatccacgaaggaggcaactcctgcgagacgggacgggacggggactccgtggggccgagggggcgccctcgctccgacccgtctccccatcctgacccccgcccctgaaccccacccgtcgtgccctcaccagcctgacgttggcggccactggatctgctgtgggatggtcccggggtgccgctcgcttctgagtccgcggggtgcggtcccacccgggtcaggagaaacgcaccccgcggccggattggctaggacgcccgagccccagccaatgggagccgtcgtgcaccgcggggctggtaggggcgcccccaccccaccccttgctcccccgacgccccctcgggggcctgcgcgtgcacacaggcaccgaggtgcgactcgctgagtctcaggctcaagctttaatctctgcgaagttgggcggctccacgggctcgcccccgcccccccccgccccccaatatataaaggcatatccatagttctggtatctaccagagggggcaaatccc

SEQ ID NO: 226028 - DNA, 330 bp, Homo sapiens
  chr19:55953358-55953688
  hyper
ccctgcatcactccgcaacagccgggccggctctggcgcgactttctcagcccctgcccaccttcagctacgccggcggccgccacctgggtctctgaccaccacgccctatccctgcagcccctcctcctcggatggctccacctcccttgctgggccccgccccaggctcgcagtcctcccgcccgagagcacacgcacctgggcacgttgatatcccggtgcgcccggggcgcacgggacgccttgctgaaggccactttggcgccgacgcccacggccagggcgaagctgatgaccccgcacacgacgtaggctgtgctgcccccg

SEQ ID NO: 226029 - DNA, 300 bp, Homo sapiens
  chr19:55953723-55954023
  hyper
ccggcccccttccaaccacccggcctggccgggccctggccccccgcccgcacccccagcgcccccggcgcccccagctagcggcggcggcgtggtggcccagcgcggcgtgtcgtagttggagcaggaggcctgcgccaggcgcatgtgacggtgctcacagcagaagcggtagtggcaggtgccacagcagaagcggtaggagccggtgctgcagttgaaggtggcgtcgtactggcccatgacatcgtagtagccgtggcagagctcggcgggagggggcgcccgggccgccgcgcc

SEQ ID NO: 226030 - DNA, 633 bp, Homo sapiens
  chr19:55954087-55954720
  hyper
gtcagcgccccggtcaggcgccgcaggtgcgccagcagggcgggcagcgggcccgcgggctcggcgctcgtggcgttggacgggcgcgccctggcctggccggcgctagaggccaggagtacgaggagcaggagggccggcatggggcttgcagggggtcgcactgggccgccaggctgcggggagaacgagagcagaggttggagcgctgggcgggagagaaacggtcagagggtgagaaacgtagagatgggtgggcagagaggctggggagggcgggcggggggcggcagagtgtggggagcaacaggcgccaggaggcaggaagggcggagggagctgagctgcgtgggcccaagttggccgccccacgcgcggtgggcgacgatgggagagtaatggaaacgcgcccgggcacggctgggggagagaaatgagcatgggcggacagaaccgggatcaggcgagagatgaatgcgggagaagcgattgggagggtcgacagacaccagaggggtgtgcagacattaggacgaggagcgaggcgaggcgcgatgtaaggagaagaaacgggggcggcgaagaggagagggcaggggaggcagctggagggaggcgcgcgaaggggagggg

SEQ ID NO: 226031 - DNA, 49 bp, Homo sapiens
  chr19:55954938-55954987
  hyper
tgacattcggggaccgatgctgctttgtggtgagcgcctgtcctgagcg

SEQ ID NO: 226032 - DNA, 480 bp, Homo sapiens
  chr19:55962747-55963227
  hyper
ctggagggcgcggggaccccagttccgggcgccaggggcggcggggcggggagaccctgggggctgcacgggggcgccgtgcctcgcgggccgcggggaaggcagggaccgagcgagggaggaggaccctcccccgacccgcagcccaggcggcggccggtcccggcgcccccgcccagatccctgcgccgcccggcccgcgtgcttgtctctgggtctctgcatcttcgcgtcccggggcgccccgtccacgcctcctcccggacccccgcctcccccgcccgtctctgtctctagcgggggtctcagccctcgtctgtcgctgcgggtctcctcgcatctcggcgtctctctccgcgtctctctccgtcccggcgcctgtgtcccgggctgtccccagctccgagcctcagttccctgcgcgcctccatttccctccttcccccgcccggtctccgtcacccctctgtctccacatcc

SEQ ID NO: 226033 - DNA, 150 bp, Homo sapiens
  chr19:56112796-56112946
  hyper
aactatgtgtcccattttgcaaaagtcttgattaaggcttagagaagcgaacaccttgcccaaggccacgcagagagtaaagatttgaacgaatgatgtcttgactccagggcccaggctcttaacatcgcagatatgtttcctcatcca

SEQ ID NO: 226034 - DNA, 445 bp, Homo sapiens
  chr19:56159255-56159700
  hyper
accgccacccaatccggggacccccggagactcgccagctctccaggatgggaatttcgtgatgttccctgcctgagcttcggggagggcgggggagtgctgtaaggggctatcgcgcaagtgcagaccctctgcttctgccgcaaacggcgggcctcacctggacccggggactcttcaacgaggggcgctagcctggcccgactgggcgagtccccgcgtccctgcccgttccgtcgctcagttccacgacacgctcccctgccgccccgcctgttcgcgggtgggtgggcgcttccctcggctccccgtgacactttgcagacgctccccggcgccgggcatgggcgccgccgccgtcggtccccgagccggattccgcgagcgggtgggtgagcgcggggggcctcggcccctcggaccccgggcacccgcgggcggggga

SEQ ID NO: 226035 - DNA, 269 bp, Homo sapiens
  chr19:56159761-56160030
  hyper
ctccccctcccacccgcgggacaaagggcgggggcggggggggcgcacccccacgcgtgacctttccccgtactgcgcacgcgcccagcccccaccaccgggggacggtccgcccgcccacgcgagtgcgggggaggggtgtgggggccccgaaggtagaggaggcagcgcgcacgggctggacctcctcctaccctgggaagttggggcagtttccccctgcacctgcctcttccttaggcctggcagtggcccgcgatgagagaggg

SEQ ID NO: 226036 - DNA, 420 bp, Homo sapiens
  chr19:56728624-56729044
  hyper
cggagactagcgaaggctttgaaattcttctcctcgatgatgactccagctttctccttctaggcattccggttgggcatgaccggtcctgtcagccgagcggccagtttcagttcttcagcagaactgtctcccttctcggaggccgagggcttcccggggaagcggatgcgtttggagcggggctccttcagccgccgcacgttggcctgcagggactgcgcctcctcggatccgcagaaatgccggcgtccgggcccccttcttcgcgtgccggccaccctgagctcctccaggcggaggccgcggccgtgcgcaccttcgtgtggtaccgaaccgtggggcagcgcacgatgggccggatgggccccgacgcggggcaggggcgaggcggcgcgccttggcttgcccggcctggcg

SEQ ID NO: 226037 - DNA, 592 bp, Homo sapiens
  chr19:56879423-56880015
  hyper
attctctgcgcaggcgcagcgttctcaacaccgccaacgggcacaaagccacgcccccacggccgaactcacgcctacgtactcagtcaccagcggaaccctctccaccaggctccgcgtcgaggccctacggggcgtcaatacgcacgcgtactttgtgtcccaggtagctcgtctcttagccatgtacgcctctgcattccggtcactgggagcggggccgtgggggctgcacatgcgcactgcgagtcctcgcctactcccagaaaccacccgggcgcatacgcggtgcggccgctgcttcaggtcggcgggctccagggagacctgggtgggcagcgtcgccgtttctcctttcttgggcagtatttttcccagcgccacgcggaggctgggccattatgaggtttgtgttgcgtcggggcggtccgtctcagaggcgctccggggaggagtgggcggctgaatggccagaggcccagggatccgttcaggtcagcgctggcgtccgggcctgagtttggaggtggcgggtgccttacaagaatgctcgcgtgatcagtgtgttggcgtttgtgtacacagaggacat

SEQ ID NO: 226038 - DNA, 822 bp, Homo sapiens
  chr19:56904506-56905328
  hyper
attaaaaaaaaaaaaaggcacgcataacagtgaatgcaaaacatccgcaatttcagggggtcggagacccctgcgcacccacctaaggggtccatgcacctgggctatgaggctggaagcagaaagggggcgccagaaagcgcacgccgcgagggccggcgggaaatgtagtctcacgccggtaaagccacagagcgacgatgaggcgagacgtctgcgttcttctcaggcctgagacccaaccggcccgggcaccagctcctgctggaccccagagcgcctggaaagctccggaacctctcacctgccgcctcctcgggtccaagtgccaccgcggccgcgcccccggcagcccagggcgcgcttccaccacggtaccggtggattcgccgtgcgcagccggaagatggcgcagacgcacaaagcacaccgatgctgcgccatgatagggccggcgccgcagtgtcttccgggaaacatagtctttaggcgtaaaggcagcagcccggccttgaagccggatctcgcgatgtttcagggtgagccggacgcaggcgtgcctgcgcagtgcgcggaggagtgctgttcgtgtgttcgagtccctgggttgcttcctggggtctgtggtgctgggtgtgctatctgcgtgtgattctctagcgagagattgtgggcgagtgaccgagtgggcaaggggccgtcactgtgtgtgcgtgattttgacagtgtgtggtggtagcttctgactccgcgtgggtcgttgaatgtatgactgggaccgtttagcggtggatacacaactgtgtgcggctgtggaagatt

SEQ ID NO: 226039 - DNA, 840 bp, Homo sapiens
  chr19:56915127-56915967
  hyper
tgctgtgtgcccagggcccacgacagtgcccgatacagcaggcgctcaataagtggcgaatgaaagacagggcaaggcggagagagaagaaacagaaagggaaagagaaagcccgggccgccagagcgcttaatcacacgtacatcctaccgggcccctctccagctggctcaggctccacactggtcctccagctcccttttctcagcgatggactcacagccccacccggagcgctggagcgcggacgcggtcactgcgcgtgcgcctcaccgcgctggcaccccggcctggcagcctttggggacctgaaccagctgcgcctgcgcaggtggaacgggtggaacgggtgggggagcggacagtcgaacggcctgagagggctcagctggtccgggtgggattctgaaggccagcggaggtgggcttactagggaaaggggcgcagcagtaactacccgcaactgagcggcgggatctgcggccgcccggggccctcggccaacatcccagcatcctctgcgccgcgccggccccggactccatttcccagcggcccctgcggcctgccctagggctgcggcgcctttgtgagcgcggccgccggccaggatcgagccctggcccgggccctggcccagccccggcctccaaggaccgcgccgaaggaggtgcccactggagggaggaggcggtgaggagcgcgggatggagctgacgccgggagcggccatgccaccatgtgtgggaccgtgtgtgacagtgtgtgagaatgtgtgagacattaaggaaccgtgtgtgacaatgtgtttgacagtgtggaatcgtgtgtgagaccat

SEQ ID NO: 226040 - DNA, 104 bp, Homo sapiens
  chr19:56987598-56987702
  hyper
taccttggtaggaaggggacacaaccatacttagcgtcagtggagggctctgtcctccactcaaatgtacacatgcagaaaactgacgacgcaggtggttggcg

SEQ ID NO: 226041 - DNA, 300 bp, Homo sapiens
  chr19:56988207-56988507
  hyper
ccacatcagcctgacactgacacacgcacacactccagaaacacaaatcttcacagtcagcgtcacacacccactcccggcttcccaatggctccattgtttccttcgcgtgggtcacgcagcgatacacatccgcggtcccgacatagctccctcacacacaggcacacacggctcgcctcacacgcggcgccaacttcacacttgggcgcacaagccccgagaaccacagcagcgaagggcgcaaaccccacgccgtggcgggccgagaacccacgcaggcgcgagcccaccgcccac

SEQ ID NO: 226042 - DNA, 360 bp, Homo sapiens
  chr19:57617766-57618126
  hyper
aggtggagtcggcggcggccgagctgcgcggggctgtgcggggctggattctagcctgcaggacgcgaaaacggcctgggtccggcttcctcctcccctgaagcagcgaaggggcgtcactggcgcgctgttaaacgtcttcgccatcggttccctgcatcctccctcctgcctgggtagccagctcctgggcgcgcccaggcgcacacgcttccctcgctcctcctgcagccacaacgcccccaccccccccgcccgcccgccttgtgcggcagcggtgaccgccttctcctgctgccaccccctccaccccctgttcaaggtctgtcaccgtagggggcgggggggcgcgtggagccg

SEQ ID NO: 226043 - DNA, 240 bp, Homo sapiens
  chr19:57831882-57832122
  hyper
gtgtggggcctggaccgctgggtaggcgcgtccagcggcctgagcaggggagggtaatgaggctgttacgcgccttctccgcatcttggcgggagcctgacgccccgcttcttccctaacggggtgttccaccggcgcctgccgaggcctaggcctccgcagccgccctccgtctcctcagccccgacgctgcgcccgctttgtgcgcatttttctctggggaaactgaggctccgagtg

SEQ ID NO: 226044 - DNA, 729 bp, Homo sapiens
  chr19:58038570-58039299
  hyper
agcgcggcggactgcggcgtggtaggaactacaccacccagaatactgtgcgccgagcgtgccggggccttagaccaatcattgcccaggaaaggggcacctccgtaagtgcgcaatacgccagaatcttccggcgtctttccggtggtggtcgtttttgctgcctgcgagcgcgtccgcgggctgggcgtttccggctcgctgggtccgggccaggtaactggagccggaaaccggtggaggtggtgtccgcccgcagaggagcttgcctggtctcggtctgagcgtcgcccagcgatttgccaccgcacgcacgccggatcccgggctttaccgcccgcctttccaggccccgccccgcctaaagtcccatggccgaggcagcgctagtgattacgccgcaggtgagagcggagtcctcggatcctcacctgggtcctgaggccccggactggggtcacctgcgtgggtctctgcagttcaggcctcttctccaggacagcgaggagttctgggtggggtcctcagagctgacgggcggtgaggtgaagaagggagagcgttgcgtaccgtgggggctgcacgcgcagagcctgggaggtgcgccggggtcgcgagcattcggaaacttgggggcggacctgtgtctgcagggagcagagagaatgaggagaagaaggcacggctgccatggcagcctgagcaaccggggtttttaattctgagtct

SEQ ID NO: 226045 - DNA, 316 bp, Homo sapiens
  chr19:58071012-58071328
  hyper
agtctgctcacctgcgctgcgtccttcgtctccgccatccgaccgttggcaggacgaggccgcgtggggcagctcccacgggctcaaaaccctaccccgggtcctacaacggtgcggaggtgagccccagtcgccctaccatccttcccagcacagttctgagagcgcggaccaacacgccccaccacaaacgtccacgccagcgaggccggaagtcccgcccctgtgtcgcggtcgcctgccacgccttttcctgcgccggcccactgccttctaggtaatgtagtcttgtcccgtaagaggccaggcttggctc

SEQ ID NO: 226046 - DNA, 813 bp, Homo sapiens
  chr19:58125365-58126178
  hyper
tgagggtcctttaaaaggagcgaagccacgccctgacctcagagtctcagggcataatttctcagcgcccctcgcagtaccatttggcctttgcccagcgtgcaggggagttagccgtcaccacggccaagtgcacatgagaactgcattgcccagaaacctgtgcgccgcccggcggcggcactcttaggggcgtctccctgcggacggaagctctctgggcgggacttccggtatcttcctcgcggtggacatcttgtcggctcttaggtggaaccatcggagcagaagctcggggttgctgggcggttccgaggtgacggaagcgggagggtgcgggagaagtcgctgttcgctctgcggagtggctcgccagcgaagaccccgcctgcgcccccggggacggacgaccgcggtgccagggtcccgcgacctgggaccccctcgcggctccgggtggtctacgaactgtgatggcggcggccgcggtgatgggcccggcgcaggtgggtgctgcctttcccagactttcgcccgccccaaatcctgaagttccaaatgaggagcgcctgtctgagtccctgcagcgcaggccccagtgtccaaggcagcggggcgctggtgggtgggggcgagtgtgactggcagaggggcagcctgagcataggtttggagctggactgagcccgtagcagtcgggagcgtgtgtgaaccgtagtcaggcctgcaatgtcgaggggagaagttgctccttcattgcgaggacgataggagccatggcgggttttgaatggtggagggaagggatccgaa

SEQ ID NO: 226047 - DNA, 420 bp, Homo sapiens
  chr19:58238616-58239036
  hyper
gtaactctcccacacccacccacaccgagataggaccccgccccaagagtgcgtcgctgtcctgggacacaggggctgcaggcactttacgattcggagtcggagaaagggtgactgagggcccggaggacgcagcacccacccgcgcggagtccgttagctccgccataggaccgtgggcgcggacagctgccgggagcggcaggcgtctcgatcggggacgcaggcacttccgtccctgcagagcatcagacgcgtctcgggacactggggacaacatctcctccgcgctttcccaacacctccacctgcggcccacacaagcgttacagaaccccggccagggacagcctgacagaaacaaaatgtccgctacaaggaggagccggaagtcccgcccacgcaccccccgcaggcact

SEQ ID NO: 226048 - DNA, 245 bp, Homo sapiens
  chr19:58385532-58385777
  hyper
cataatgttttttgtcagtgtgaactctctgatgattactgaagctagcatatttgctaaacgatttcccacattctccacattcataaggtcttttcccagtgtgaactctctgatgattactgaagctaacatatttgctaaaggatttcccacattctccacattcataatgttttttttcagtgtgaactctctgatgattactgaagctagcatatttgctaaacgatttcccacattct

SEQ ID NO: 226049 - DNA, 600 bp, Homo sapiens
  chr19:58609301-58609901
  hyper
tgcagggcccctcaccgatctggatctcagccacctccggggggacccggcccctgccccgcactccacgcgaagggatgccagaccctcggcctcctggacgcacagcgggggctcgcaccccaaccccgggaacaccctggcccctttccctaacgctgcccactgaggcgtcctcaccgtctaccctgttggggtcgctctctgacccccgcgctgcatccccgggaccgacccacctgctgcgcagctaccccaggccggtcccagccgcccggagccccagtgcgcgatggcggccggcaaactgcgcctgcgcactgggcctcaccgcggactacgactcccacaatgccgcgaggctgtgccgcgcaccggggcgagcaagggagccgtgacaggtgacagtgcgcatggccaatcagacgcgagtgtggcctcccggcgtcccgcccactccggcgcctgcgtcattttgggcaccatggcaacgaagtaaacaagcgggtaaataatagacccctgacagccagagacccggagaaacaaagacggtgagaaacggagaaacaaagacaaaaagacgcgcagaccgggagg

SEQ ID NO: 226050 - DNA, 315 bp, Homo sapiens
  chr19:58629358-58629673
  hyper
gagtagagggctcgcgccctgcggggagaggcgttagggggtccgcgcccggcgaggagatgcgcgtaccagccccgcacgccaaggggagaagacacgcgggacggtccgcgcctggcggagagagttcctcacgcccgccccgccgggaaccacaagccagcgcccctaacaagcccctgcccagagcagggctgccgcgtaccctcacagacagaaagagcgaccacgcagccaccgcccagccccagccgctctggagtccttgaccccaccctcactaggccttggctccgcgaccggtgggcgggaacg

SEQ ID NO: 226051 - DNA, 652 bp, Homo sapiens
  chr19:58661655-58662307
  hyper
cactggctcacggccgccaattcagccggaggccgacccaagcctacactgcccctcacacctgacagaaaagctgcagactcgggggttacccccggagacggaccaggacacccagcaggcgtggcaaaacagtctctatgggagggcgggctagagatgcgagcgcggaactcacgggtgacgctaaggaaagagcgggggcgtccagaccagccccggagcgacctcgtcctcagaggagtgaccccaatcgccacggagcgtccccacccaccaggagaactacgcccctggccagaccctcgccctagcgggcccgacatgcccaccacccaggtgaaacccacccgcggacgcgcccctcgccgccccacaaggacccggcggacctccacccgccaagacttccctccgcaggaaacggaggcagcgcagggctcagggatgcgtcggcacttacggttggcggccggcggcagccatgttccgggcgattgcgcttgcgcggctgccgggacaaggatgtgcgcgtgcgcggagtccccgagcttcccccgcccaacgctggggcggccgcgggtaccgggttattcattaccctggcgtggacttgcctcggggcggacgcgcaggcatttactttctccta

SEQ ID NO: 226052 - DNA, 898 bp, Homo sapiens
  chr19:58665953-58666851
  hyper
cacaactactaaatcaacaccgacacactcataagcagccccttcctcgtcctttttttccttctgagctcgggaacgtctgctgggggtgagggggactcgcagaccacccccccccccgccccaggcggaggtcgggggccgtcacctggccaggtgtccggggaacggctcgggcggctgacaccgcagtccgcgagaggcgaggaggatccttggactgtgggcaggatcgcaggcagcggaggccctgcccggaaggcgggatctggggacgatccccattcctcccagccgcagacgcggagcccacaggagtccccgcagccctagcccgtgcacccacggcggagccgaggccgcgactccgggcctgttggctggaacccgcagccgtgtctcgggccgccccggtagcggccacccctgagagcactcggccccgttctatcccgcagtggtttggggagtgcaggtcatcactcccacccgccaaggcggacgccggaccctccattgcgcatgagcgcccactgcggcgccgttgctgcgcatgagtgtgcttccaccgcctacatctcccagaaaaccccgcggcgcggcgctccaccgcttccgccctcgggttgcgttagccgcgacgatggcgccccccagtggcagcagggaggctgtgggggtgctgggcgttgcggtgtgcaggttttctgggaggatacctggcgccgaccttgaagggaccccaacgtgagagggaaagacgcccgtgatgccaaggcttgggcagcggacagccaaaatcctgaaaccccgcggtgctccctgtgattcactttccagaggcccctcagtgccccgacgctggcccggagggcggtcgctgactgtcttgagactg

SEQ ID NO: 226053 - DNA, 849 bp, Homo sapiens
  chr19:58694383-58695232
  hyper
cataattaatcccgcccccaccgccacccaaccaagcatcacccattccagcacttccggcctgacccctgtccagcgcctttcctttctccagcttctgctctgccccaagagtggtcgccttcgtggcagggcacgactctctcccagctcgggtcgccgcccacattagtgtggggccctgcggcctagcgtccctcaccagaggcctccccttgcctagctggaccgccgagggacatcgacgagtatcctcctcctgctgtccccggcttcgcctgccgcccctaaccggccagtcaagatggccgccgctgggtgaggcaagctggcgcgccgcgggggcgtctgggagttgtagttcgggacggcgggctgacgcacttcgccgccggccgacgggcgccattgtgcggcgcgcgccgggtgagtgccgcgcgaaacctgcgtccgtcgggggctgcgctgggcgggtccagaaccgttagttgggggcgagcgcggcctctgcattttccgccgagctcgggtaccctgagccggccgtgcctgcagtcctcccgccgctctgtgggatggggtcggtgacccggaaccccgaggggagacagtgctttcggggcgccgcggtggagagaacagatcgcctccggaagcgtggggtctgggccagggaggcgatcccctccgatgcgcgggacagaggaggctcggtgtcctctcggggaggggaaaactggtcctatccagtcctgtgggagtcctatgactcactctgggcgttttccagtttgggtggacttgtcatttcccgctgagggagccgttcctgggcggaggctgcggtag

SEQ ID NO: 226054 - DNA, 410 bp, Homo sapiens
  chr19:58858518-58858928
  hyper
gagacccccatctgcgcctccagctgcagggcctttgctgggcggttcctcgcccgcaattcccccacgagccctggggagacccagcgctaaccaggggtgcccaagggaggagccgggagaggccctcctggaggtgggcacagcccaggcaaacatcagcagacggaaccagcacccgggacccagggaaacgtcacctgccaccaggagctccacagggtcgctgagctccgattcgaaggtgtggggcacccaggagcggtagcggcacctgtagttgccggcgtgctggggccccacgaagatcagctcgaggttcgccgcggccccgggggtgcggaccgtcttcacggccttcgtctcgccctcgcgcagcagctcgaaggtgacgtcggggatgggtccct

SEQ ID NO: 226055 - DNA, 263 bp, Homo sapiens
  chr19:58874184-58874447
  hyper
cgtttctccccactgcgcctgcgtaactatgccgcggctgcgggcgcgcgccttctggttcccatggggacggcgccacagccaagctactcgggcgtcctgcgttgccatggatgcgctccgccccttcctgcacccggccagcctctgcggcacacacccaacagctacacaggcgcctggggctgcccgggtcgcggacgcaagtcgggccaacgtagcttctccctggcggtcctcctccggccccaggccgtctttac

SEQ ID NO: 226056 - DNA, 538 bp, Homo sapiens
  chr19:58907576-58908114
  hyper
gaggaggaggaggaaggggacggcagcccaggctccggccctatcctgccccccgcctccccggtggagtgcctcatctgcgtgtcgtccttcgacggcgtgttcaagctgcccaagcgcctggactgcggccacgtcttctgtctcgagtgcctggcgcgcctatcgttggccacggcgggcggcggcaacgcggtggcctgtccggtgtgccgcgcgcccacgcgcctggccccccgccgcggactccccgcgttgcccacgcagtccggtctcctgccccgcgacgcgcgcgcaccgccctctcgccagggctccgtgcgcttcgaccggcgccgcggccttctctacctgcggccgccgccgcccccgcccgggccgcgcaaggcccgcgccccgccgcccccgccgcctctgcgcctgggccgcccgctgtcgcgccgcttgtcgctggccagcccggcctgggtcttcaacgctgccgtggcgctggcggtgctggtggccgcgggcctcgtggtctcgggcgtctacatct

SEQ ID NO: 226057 - DNA, 71 bp, Homo sapiens
  chr19:58920316-58920387
  hyper
gcgccgtgggtctcccgggcctccgtaccgtcctccttcccagcggctccgggaagcggttccctgtcttc

SEQ ID NO: 226058 - DNA, 925 bp, Homo sapiens
  chr19:58951201-58952126
  hyper
gggctagccctgccgctgggccgaaccctcacacttccgctgggtgacggtcgcactcaggacctgtcttcccaaatgcaaaatgcgcgcaaggcctctgggcaccgcagggacgaaggctgggtatggagaccctggagacgcgtggcgctggctccactttcgggaacaccttggctcataaaagcagagtaattagccgggcactatggtgcgtgtgaaggcgcggtgacggtccctgcacccactcccgtgccctggtgtggctccagaggcctgctgtagcccaacccaccagcagcaaaatgaggaccgcaatggcggcgccggaagtcccgcctctcaatgacagctcggacttgccactggtccgagctttcattggctcaaggatccccgccgtctatgacgctatttccctatgcccgtcacgctactgctaggtcgttgccaaggtgattgaggaatggcgtttattgcgtcgctgctcaggcaacgcaaactacattatccagaaggaccctcgcggtgcctcagggctggccattggcagccgaggagacaggcacttccgggcggagtgtaagacgctggccaatcacagcctggcagcgggacttccgtcgtcgtcctcggaccatcactttggcatttctcgattttgtctgcttctgaagggaccgcgttgtcaggcgagggacggaatcttggaggctccctgggcccatggaaacaggagcgaggaaggcacgagagtcggggaagttccgccttcttgacatacaagcgcccccaccgcggcgaatatcgcccctgagcccagtgttcgccccccacaacaccgcaccccccttccccaccctgtgccttagataaagccggcccagtgggaccctcaggttgcaccgcgcggaggtgtccgcgg

SEQ ID NO: 226059 - DNA, 525 bp, Homo sapiens
  chr19:59010487-59011012
  hyper
acctggcacgcacacgccatacacgttaacctgttgcaagaagtccacctgcgacaacacgccctccacctcgtgcgtggacacgttctcgcccttccatctgcaaggagggagccggcgcttgtgaccacgcccccgggaaggagaggccccgcctcttgcccccgccccgccccttttggggatcaggaggcccagtcagccccgccccctcgaaaatcgagaagccccgccttcgcgtgagaagtcctgactccaagttccgccctcttacgacaggaaagtcccgcctcttcagcctgactccctctaggatctgaaagcgtccgtggccccgcgccagccccgccccgagaaaccctgcctcggaccggaaggtgtccccgaggcggtcgcggaagtagaggaagccttcgcggtccatggccagtacgtccccggtgttgtagtaaacgtcgcccgattgccgcacgttgcgcaccagcttccgttccgacagctctcgggggccgcggtagcccacga

SEQ ID NO: 226060 - DNA, 806 bp, Homo sapiens
  chr20:590308-591114
  hyper
ccgcctaccccgacctggcggccgcagcgagggacgcagcacactcacccccttgcgctggttgctgaggcagaaggtgcagatggagcgcggctggcggccgccgtcggcggcggcggggacggcgcccttggcactgcccgcggcacggaagcacggctgcccgtcgtcggccgagtcgcccagcagcagcacgttggccaggtgcgcgatgtagctggacgccaggcgcacggtctcgatcttggacagcttgcggtccaccggctcggtggggatgagcgtgcgcagcgccgtgaaggccgtgttcacgctctgagtgcggtcccgctcccgcgcgttggccgcctgccgctgtcgcaccaccaccacggggcccgcgccgccgccgccgcccgcccgccgcccgcccccggggcccgggccgcgccgcgccgcctccgggccctcgcagcagccgaacgactggtccgacgcgtcgctctcgctgcggttctcctcgtcctcgctcagcagccgcacgtccgggtacagcacgtgcgcgccgacgggccgcagcagcgcgaacgccatgggcgccggccgcgtccctccgtgcgccgcgtcccagcgtcggccgcgccccgccgtgcgctcccgcgcgctcccacggccccgccggcccccgccttataggcgagggaggggccaatggcaaggccgccccggccgggggcggagggctccgcccggccaatggggaggcgtccgcccggccaatggggaggcgtccgccgcgccctggccaatggcgacgctcccaccgc

SEQ ID NO: 226061 - DNA, 428 bp, Homo sapiens
  chr20:644206-644634
  hyper
catgggcagggaaacgcagccggggctgggcgagggcgctgcgggcgcaggtagggggcccggggcgcgtggagagcgagttccgggcgcgagggcgaggcggaaggctcagctggccgggccggcgggggtcggcgggggtggctcggccgccttggcgcaggccgcctcgcagtgcttgtggaggtaggacttgagcgcgaagctcttgtcgcactggcggcagcggtagtgcttgaaggccgagtgcgtctgcatgtgcgcgcgcaggttggagcggtcggcgaaggccttgccgcagtgcgcgcagccgaacggcttttcgccggtgtgcgagcgcatgtgaccctgcagcagccagggccgcgagaaggccttgccgcagacgccgcacttgtggcgcaggttgtgcgtgagcaggtgcatgg

SEQ ID NO: 226062 - DNA, 873 bp, Homo sapiens
  chr20:708545-709418
  hyper
gattacaggcgggagccaccgcgcccggcgggatattatatttccataaggccctccgggggcctgggaacggactggtgcttgcgtgcggggcttttccactggttcccttccgtactcgggcttcccccgctgttgttactccctcaacgggaacacaactccaccgccgcctccgggacacacccccgccgcgtgggccggggtccgggacgcgcgctcagctcggccccgcgggggcggcgcaggagggaagggggtgcggaccccggaggcgccgcaggaagccctcgcccacccttcccggccgggccgggtccgcagctgacggtgggggtggggagcagacgggcggggcgccggccggcttgggggtcccctggtcccgtccagggggctcgggccgactccgggccagctgcggaggcgggggaggggaccccgctttccatggcagtgccgaggcggcgcgcacaaaggcgccgcgatcagcgcttcatcggttcgagtcaattatctgaggcgcggaggcggcgggcggggcgaggcgattccccggtggggctgcggagcgcggcgccgagactcagaggagggggcgctggggaagcggcttctccgtctcctgctccgccccgggcttcgtggcgaggcgccgtcgccccctggtggggcctcatccattcctcgctcactcgctcgttcacctttttctcaaccttacagcgggtggctctacggtacgagctgagggtgaagtgctgagaacagggcaagcgggccgtacctttaaatgccctgtcgggagctgggcccctctgagtggccaacctcaccaggaaagggcgctcagcctcgcgctgcagatggact

SEQ ID NO: 226063 - DNA, 595 bp, Homo sapiens
  chr20:1783949-1784544
  hyper
gagcggcgcagggcgagcctggaggctgcgccccagacctggaccagccacggacgccgctcccgccgctccctccgctccgctgcgctccgcacgctggcgccggctccccgaggccccgggcgccccggccgcacgcctgggtaaaaggtcccgaggagtccgcagaagcgcgcccacgcccgagacggccgtttccgccggcctgggaaaggggcggagaagggggtcgcccgggccgcagcgtgccggtccccgccggccgagccgtgtttggggccagtccccgcaccccgcttcttccccacctggggagcggggcgccgcggtaggggcactggagcgcacgatgcaccccgccaacgagtcctttctgcagacggggttcctgttttcatgcaaatgcctttgttagcgcaccgggaaccagggggacggaactgcagctgacgcgggctgcgcgccgcttttccgccttcgcttgattcggcctcaacgacttaaacgcgccgggaacaaaaacgccggcgccgcggaaaccctcaggagcggcacgagaagcgcggctccgctggggtccgcgagaagcggtgcg

SEQ ID NO: 226064 - DNA, 678 bp, Homo sapiens
  chr20:2187845-2188523
  hyper
ttacagccttggccttcgagcagcccagggagagtctctgcgtcctccagcccccgcttcccttcatgtcggaggtcctaagcccgcagcgaagtccgcaaagagctttccccgacgcctacgagaccggaagtgcctgggcccaggtggaggaaggacccgcgtggccgcctccgcgctctccctggggtccgtgccccttccggcgtttctcccgcgtccttcaccatggcaactcgggcgtcgggagcgtgggctgcgagccgagtgggtgggggagccgccgggctctatccgccagcccacgagaagtgacgcaggtgacgggaggccgcagggacctgagggcggagaggggaattcagaaagtgccgggcggcggcttccgcttcctctgcggggtctctgggtggtcgtggctgggagctgccggggcccggtggccgtgcgcctctgctccgggcaagctctccctgcaaggcccgggcggcggcagggggcagtagcggcccgcgatgctcagaggctcgctggcacggagctcccgggctggggcgtccagatctggagaagccgggggccttggtcacactcagagctgacgtccagtgcggcccttgctgaggactcgagcgaacagatctctacccagcccccgccccacgcgcacccagcctg

SEQ ID NO: 226065 - DNA, 147 bp, Homo sapiens
  chr20:2444521-2444668
  hyper
aagtggaactcgagcaataccagtctgaaaaataaacaaatatgctctgatgcccagtgatctgaagatcagaagtatactttggaatatcattgccaagagagcccctcgaaatagcttataaatactatcgaaatagcttataaa

SEQ ID NO: 226066 - DNA, 651 bp, Homo sapiens
  chr20:2674067-2674718
  hyper
atctccccgcccagcgccccaggaggggaggggacagcgccggcgcccgcggacccgctttctccgagggagcgcccaagaggcgagcgcgcactgagccacccggactcggcgctgcgctgctggaggcgcctggtgccgtcgggtcgggctgagctagacgcccgcagcctcagcgggaccggatccggggcggcgggggcgctcactcaccgcgcgccctcatgttccctgcgcaggacgctctgccccgcagcgggctgaacctgaaggaggagccgctgctgcccgccggcctgggctcagtgcgctcctggatgcagggcgcgggcatcctggacgccagcaccgcggcgcagaggtaagcgctcggaccggacccggtgcgctcgggttggacggctgcgcgccgcctcagctcagcttgctggagctgctggagccaggggcggaaggagccctaactctggacggtcccggcgagctccccggcccaccccgtccggagtgcctgtgctgcctcctgaggctgtggggcgggctggggcggggcttctgcctccactccgggctgccccggtagatttctgacggccgctcgcgggtgcggcggtgaacgccaccccagccgggctgtctatggctctgaga

SEQ ID NO: 226067 - DNA, 257 bp, Homo sapiens
  chr20:2820747-2821004
  hyper
gccagcaggcctccagggcactggggagcttcccgcgcggcgccgccctgcgcctcgccacgtgcccgccgccgtcccgcgcatgcgcgcacccgctcgcgccaattaccaagtcccggggctccgcggtgttcacccgcgacccgggtatgcctgcgcaccgcgcgcctggcccgcagcgggctcctagccaagcctcatgttcccgcgccccagtcggccagtcggttctgcaaagctcccgccccgcagagacc

SEQ ID NO: 226068 - DNA, 440 bp, Homo sapiens
  chr20:3063045-3063485
  hyper
gatcgcttcctctacgggacctgttgcttctctggggtggatctgcccacgacctcaggtccggggactggccggtgggcgtggtggcgggggtccgcgctcccacctctctccctttccctcttcccgccagagactgagacagacgcgaggccgtgcattggcggaggtttattgtccgtgctgcaggggcgggcgcgaagagcgcgccggtggggcgagcgcggggctcagtaggcgtcgggctgggcgggctcgaagggctcgggcgccccggccagctgcaccagccgcagcagcaaggccccggccggcccgtccagctgcgtggcgttgctccggtcgctggcgcgggcgcggcggtgaaagccctcgcggcactcgggctcggtcacgcagctctctgccgggaggacgtgtgagcacgggcgccctggggc

SEQ ID NO: 226069 - DNA, 633 bp, Homo sapiens
  chr20:3073286-3073919
  hyper
ggggacaatgactgcggccctggggtcccacagacgttccctttgctagacttaaggaagagctaggcctgtccgcgctcccagcccccacgcagccagacacccgcgggtgctgagatgaagagtgaagtcaccaggagagacaggaaacagcgcgggcctcggggacccgagggcgcggaagctcgggggccggggtcgagcacagattgggaggcgcagcgctgggcgcacgtccccgtcggcccggcggcccctaatgaggcgcgctgtgcgcagactgctaagagcagcatgagcacggctccggcggcccccagggccccgcgggtcggcgccaccccggagcgcggtgcccggaatcacttagcgccatcagccgggcggctgggagggggaagcggccgatccgggcggctgggagggggaagcggccgatccaggcggcagcggagggggctgcagcggaggcggccccggcttgcacgctcgcccttccgcctgcccggcagggccccgtctgagccccaggccccaggcccagcggcgccgctcgccggtgaaggaaaccagcgcagagaggccgcgctgccaggcgcgtggtggtccgggggtccacgtgtgagcctcgcc

SEQ ID NO: 226070 - DNA, 170 bp, Homo sapiens
  chr20:3154656-3154826
  hyper
ccgctagggaggggtcgggacgagccgtcgcgggtggatccgcccggccgagcaacgacccgcccgggcgcgaggaccacgggctgtcgtgcgggaggcgtcgaggggcagtaaactccgttcgtgaccaaacggagacgatttgaaacttgctgctcacactggatcac

SEQ ID NO: 226071 - DNA, 780 bp, Homo sapiens
  chr20:3220135-3220915
  hyper
ccggggagcttctgggaaaacgttcgactgcgccacgagcccaccgagctgtgcgactgaggcagaccccgggagggcttcccccgcgtccgctttaagtacgcggccggcccctgtctcctcctttcgaccggggacctccgcagggccacgcccgctggctgccccgcctcctgcatttatcccggtagctccggccgcaagtccttctcctcctcctccaggaagcgcgccccgactgactagacggacctccgtgcattccccgggctacgccctcgcccgctgagacggcgctctccgagctcggctgctttgggttttcgctgcgagcctcgccaacttatctgccagcctcttcacgtcctcggccttctatgaggtcaaggtcatggttcgccccctttttccttccccaaatggcccttgcgccctgtcccctttcctggaccggctgcgacccgcccggggacgcgccttttcggggcgcttagtctcctgcgagtagggcgtgtgcgcgtgtgggtgcgcgtgctgcgatgcgatccggcaaatgcagctgacgaacccctggcctgatccacggtggctcccagtagaaggctctacagcccttggaaacggaacacgcagctccgtaaagcgctaaccaacctcccgacccctccggccgccatcgctttccggctcagccgcgctgggacggagtcctcggccactgtgccctaaccatggtagaggaacggggacaggccggggcaagcccacctctgcgaagga

SEQ ID NO: 226072 - DNA, 693 bp, Homo sapiens
  chr20:3229124-3229817
  hyper
tctgcggaggctacaccctttcccccgggccagcttccacatctgcccagtggggcatttccccttgtcccacccagcgactggttgacaggaagcagggtgtctatggactggcggcgggcgccccttttcctcacctccctgcgcggccagcgggggcccggggtgtggtcaggtgggaggcccgcgccacgtgcggcaggaaccgcctggcgagtggaacccgagcttgcacggggacagctgatgcctttctggtcgctcctctagagctccgcgggctccggcaaacccccccgttagaacttgcggttccaacgcgcagcgccaaatctggcccttacttgacccgtcagcgcctccagtcgtccccatgtataaagtaggaccgaggagccacctcgccaagctttcactgcgcggaaacgcgcccatcaggctggaaaggcgtggttcctactacagctcggccgcggcaggctggggccgagaaccggcacccgtgcacggcggactaagacgagggtgagggacacgggtgggccgggagagccccgttcccatagccggcttccttgagcccctccccaagttctgggactccccaagttcccaccccgcaagccagtgtggtttcttcagatgaattttattcttactctccacgggctgctccggcgtctagggagggag

SEQ ID NO: 226073 - DNA, 206 bp, Homo sapiens
  chr20:3451579-3451785
  hyper
cgcacccacgtactcgcgcacgcgcgcgccggccccgcccaccgccccgctgtggcccctttggaccgcacgagccaccgtccgcacagccccgccccgcacggccaggcgaagcggagccggccgtgcggtgtgtgtgtatgtgttcgcggggcgccgtctcagccccgggaagatggtggctgcagcggcggcaactgaggcaa

SEQ ID NO: 226074 - DNA, 640 bp, Homo sapiens
  chr20:3641323-3641963
  hyper
ggcgaagtcatcggcccacccgggcggagatatcccctggagaacccccgccctcgcccggatcccggccgcgcgtacccacgaggcccgcgtaggcgcgcaggcagcgggcgccctggtccagcaggcagccgtcgggggcgctgggcgctggggtgcacgagacctgaaaggccaggaggcgaggcctgcgcggcgggagggcggtgagccggagagaggccccgtccccaccctcgccacggccccgccgccgcccgcgcgcacctgcagacccggctgcgctcgcagaagtttaagggctcaaggcaggagggcggcgcggggccgggccccgaaaaggcgcaggagggcacgaaggtctggcgccgacgctcggcgcacgcggggcccgcgcacgggcagaagagcagtgcgtgggtgagcgcgggcggcccgcgggcgaagaagcggcgcagggcccggcggcagcgggcgcggggacagcccccctgcgcagcccggcccaggcactgcgccacatactcggagcgcaaacgctggcaccgcgcgtccgccgtgcaggcttcggccgcgtccacacatcggttccctccgaccgagctcgccgaccctgggaaaggcgcggggaggctgcagg

SEQ ID NO: 226075 - DNA, 742 bp, Homo sapiens
  chr20:4129265-4130007
  hyper
gggagggagggggtgcgggcccagatgtgggcgtgggacccgggtttccgaggcagggatccagcagtctccggcttcaggggcttctagcttcccggctcccggcggggcgggcccggggaggagctcggcgggtccccgcccagaggcggagcggagggccgggccggagcggggtgggtaggggacgcgaggcggagcggggccccacacaggccgcggcggctggctcgggcccctacggtcccggcggcggctggaggaggaagccaggcggctggcggaggaggagagacggaggaggccgagaccggagcgccgctcgccgcagacttacttccccggctcagcagggaaaggtacggtgcgcccgctctccggccccgggccccggctctcagcctcccccgggcgcaggcaggggctgcggccgccgcgagagggtgaggggcccggagcggtccccgagggctcggccggcccggggcttgggcggccagcgcggcgctcgggcgctcgggcgggggtgcggggcgttccgggaggctcgcggggagcagggggcgccgcgcccccctggcttccgccggggtaagcagtggtgtgggccggggtggcggcgatcccggcgccagggctgctcggcccgggccgggcgccgggggtagagggccggacggacccccgggctacgtgcgggaggggagcgtcccgggcgccctgcaggcgcgctccgtgggcg

SEQ ID NO: 226076 - DNA, 1111 bp, Homo sapiens
  chr20:4803016-4804127
  hyper
aaaacacgttctaggcgccgggattccagatacctgggaaatagagtgcacgcagctgttgagaggcctcgcgcttggcttctcctatcactgaggcgcagaggtgctgtggacagcccagacccacacggcgcccgaggtgaaacagaaccctcagtctccctatgaggccactggcactctcggctgtccccagagctctccgacttagagctgaatgcaaagtaagcgctcgaaatgcagaagtagccggggccgcccacggcacctgcctcgctcggggcgagagaagacgccaggctgaggtcccagcgacctcaggcaccagctccgaaggagggcggggagaccgcaaaggggaagtgcccggagggccaacggcccccgcgcaccctgcgcccctctgaagcgcgccgcctccccgcgccggggactgggacctgcctctggggaatccgcctagaagacggcggcggactggggtcgggcactctccagggctgtcaggccctccccagccctgcacctgccgcgccgccccacctcgccaggaagtctcagagaccccggggatggggtgggagcgccttcccatcgcgggctcaaaaagaaggaaggacgcccccaggggtcgtagaaggaggactagctccaagccacaactttcttcggacccaaggcaggccggctggggctccgcgcctacacggcccctggcgggggtccgcgcgccccgggagccccgcggctcggggaggaaagaggagacaagagacaggcgaggattacggggctgacccagccggggtagggaccatcgtggaaaaactttggcgaggtggggggacgcggaaagagagcggcccgcgccctgcaccttgcgccgggcatcccgcgccagtgcctcgctcccagtgccccgcgccccgcgccccgcgccttgccttcaccccgggccagctgcatcgcgcccgcgccgcaggaaccgtggagttggaaagtgggggcgccgcggctggggggctgcttcagctgcgcctcggccagcgatcggcgggccgggctcaaatccagccaggctgggcaggcggtggccgcgcgactggggacc

SEQ ID NO: 226077 - DNA, 180 bp, Homo sapiens
  chr20:5296459-5296639
  hyper
agcctctgctcagcgtgggaccaagaatggggagtcctacccctcctcggctttccagccccctaacccaagacaagagggcgcgcgcccgggctgggacaggtcccagccgcattttcgtagattgcactccccgcccgggagcgacccgttccagcagcccccttcccgccccatcaa

SEQ ID NO: 226078 - DNA, 840 bp, Homo sapiens
  chr20:5296676-5297516
  hyper
gcaaagacaggaatcaagtcagaaattcaggctctagaagcaaaggctgcggtgcctcctggctggaagaaaacggcgggtgggtggaggatgcggtgcgcgggaatttccccacggacgcttgctgtttcctgctcacctttcaggaaggtgcccctctacctgcaccctcccctgcaatttggagctcgtccgcgagctcagctacccgctggctccctctgcccgcgcccgcacaccacagactccgcttaccgtaccctacccggtcctagagggcccagaggggatctcctgaaaccaactcgcctgcttggagccagccccgacgcatatctcgagagtggcgggaggcaaagcagccggaatgcccgagaaaaaagtgggcgtcagaggcccttgtcctagcgactcccccaccgcaccgactgagtcccgggactgcagggatctaagcccttacctgtctcggcgcctcctttctgtgcgctctgctgctccggaagccggatcgagagtcacagtgtggttgggcgcaggcgggccgctcggttttcacctcgaggacccggacttgcacttgcagagccgctgcgtgggggatgtccctcttttttcctcgccccggcgggctcctccggcgtgtcagggtctctgggttccagctggagttggcgctccggccccacagctctttccagcgtctcggacctgtgcgccccgccccgcgctggactccgccccggggtccccgcctgcctcctagtccaggccaagggtggatgcccagctcccccaccccaccgcgtgctctcgggctggtgcgtccagggcgcgggc

SEQ ID NO: 226079 - DNA, 180 bp, Homo sapiens
  chr20:5297591-5297771
  hyper
atcccgtctgaatcggaccacacagtagccgggtttctaccgtgcgcttgggaacagtgagcaccgccctctgccgccagtcgtggcaccgcacccgggtcgcgcgcgcaggaggggagagtcctgtcttccggaggtgcccagtgccagcgtccgcgcccactagaaggtgaccctttc

SEQ ID NO: 226080 - DNA, 540 bp, Homo sapiens
  chr20:5891923-5892463
  hyper
ctcccctcggccgtccattctttggcccgcctttcccccacccccgctccagaccctgcacaccaggcgactggactggcgtaaatttccgcccatttgcgtcgccgcctgggggtgctgcttcgtgacgtcagggctgagctagggggcgcccgctcctggctgcccgctcctcccggccctgcggcccccgcctgccctttaaaagagcggggcctgcgccggccgcgccacaccgcggggaccaggaggcacgctggttttccggggccgctccatcgcgccttcctcctgcgcctcgcttctccggtccagccgccatcttcctttccgcacaggggccgccgagcggggccatgcagccaacgctgcttctcagcctcctgggagccgtggggctggcgggtgagtgggcgcggcgggccggtcagcaccgcggacagcgccagcctcgctcttccccgccgctcccgcagccaggctggcggatcccgggagagagggagggttgaggggaaggtttacctcttgcttcgtttc

SEQ ID NO: 226081 - DNA, 1140 bp, Homo sapiens
  chr20:6748234-6749374
  hyper
cggcgagccgcgccgcgaagggggaggtgttcggccgcggccgggagggagccggcaggcggcgtcccctttaaaagccgcgagcgccgcgccacggcgccgccgccgccgtcgccgccgccggagtcctcgccccgccgcgctgcgcccggctcgcgctgcgctagtcgctccgcttcccacaccccgccggggactggcagccgccgccgcacatctgccgccacagcctccgccggctacccgaacgttctcggggccagcgccgagtggatcaccggggaccgcgaggcacccgcgcgccgcagaccccgcgcgggctggagcacccggcagagcgcgccacagcgccgtggcctctgctgcccgggctgcgccagagccgcggacgggcgcgcagagcgccggggactccggagccgatccctagcgccgcgatgcggagcacctactgcaggagatcgggggcctgggacgcgctggccgaggtgtgatcggaccccaggctagccacaaagggcacttggccccagggctaggagagcgaggggagagcacagccacccgcctcggcggcccgggactcggctcgactcgccggagaatgcgcccgaggacgacggggcgccagagccgcggtgctttcaactggcgagcgcgaatgggggtgcactggagtaaggcagagtgatgcgggggggcaactcgcctggcaccgagatcgccgccgtgcccttccctggacccggcgtcgcccaggatggctgccccgagccatgggccgcggcggagctagcgcggagcgcccgaccctcgacccccgagtcccggagccggccccgcgcggggccacgcgtccctcgggcgctggttcctaaggaggacgacagcaccagcttctcctttctcccttcccttccctgccccgcactcctccccctgctcgctgttgttgtgtgtcagcacttggctggggacttcttgaacttgcagggagaataacttgcgcaccccactttgcgccggtgcctttgccccagcggagcctgcttcgccatctccgagccccaccgcccctccactcctcggccttgcccgacactgagacgctgttcccagcgtgaaaagagagactgcgcg

SEQ ID NO: 226082 - DNA, 255 bp, Homo sapiens
  chr20:9048355-9048610
  hyper
tcctcctggccagccggaccggctcaggcggctgagcatgcctagtgcagctgcgagcatggccccagtccccaatgcgcaggtgccacgtctccgggttttggtggccgccggccgggagaaggaggaggcggagtggggaggagggagccctccggagttcgggagcagcacgttgtgagggtccacacaagggtgatgccagaccgaacaccattagggcctgggtgtgagtgtgactcggaggcacctggg

SEQ ID NO: 226083 - DNA, 480 bp, Homo sapiens
  chr20:9048883-9049363
  hyper
aaacaaataagcacgtcccccacccagccaacggctttgggggccccgttctggccagtcctgagcccctccacacggcccacggcgggctgcgggtctcccatccgaggagggtgccgcttttctgcccccgctccctgggttctgcgcccagcgccatcccgtgcgcccccgacccttgggcatggggcacatgccgcggggagccgccagggagaccccagaggagcgcgccgcgggccggcttccccggatgccccacccacctcctcttggcgctgcccaccacctgcctcggctgctcggcccccggctcgcgaggctgcgcccccgacccagtcggcgcccactcctcgccctgcgggctcgcggcaactgggcggccggcccggcccctgcccacccccagcccagcccggcgcgccgcactgggcatgctccgtagcctgggcaggttggggctgcgaggcgacagctcgg

SEQ ID NO: 226084 - DNA, 360 bp, Homo sapiens
  chr20:9049856-9050216
  hyper
ggaaaaggcatttcgggtcccgcccgaggatgctcccgcccgccttggccctcagggcttgtttgctttccgcgggtgcgtcccggacgcgcgcgcgcgcgcacccggatgcccagcggggaccccgtgcaggtgccgggtgccaggcgccctgtgcgcgcgggaggcaggggacccagacgccatcccccttcccctgcagtcatcgcctgctgggtttcctcagactctctccagacgttcaccctcttctgggctagaaatagctcggctcgacgtgtatatgattattttggttggaaatagttggcaccgtgcaacgcatgtaaatgtgtatgcgtgtggatcttcttgcctctt

SEQ ID NO: 226085 - DNA, 180 bp, Homo sapiens
  chr20:9487280-9487460
  hyper
gaaatagaagggcgagtcctttgcttccgcagcgtccggtgggaaaagatgccacgtggcgcggtgcgggcggactcagaggccccaggcgcccccgggaactgccacttactcagggcccgcggtccctggcgaaaacgggcgtggcgccagtgctcagaccgtgaagtggaaaaacgg

SEQ ID NO: 226086 - DNA, 180 bp, Homo sapiens
  chr20:9487658-9487838
  hyper
gcagctggctccaagtgcgtggccggaggcgtcccccatctgcacgagtccccagagtcacccgggaataactgcgccgccgccgcctccgccgcctgggctcccgacctccgcgcgacccgcgttagctcgcgttgcctgctgtggctttgctgctctgggctacaaggccgggccggc

SEQ ID NO: 226087 - DNA, 144 bp, Homo sapiens
  chr20:10653880-10654024
  hyper
gaacgcgcccctgtccggcctggaggggtcaccctcaggaggcaggggctcccgtgggggagttggcgcgctcagcccaggtgcagccgctcgggcgcaggggcgaggagtcgggcgctcgagggctgccgagcctgctcgcgg

SEQ ID NO: 226088 - DNA, 934 bp, Homo sapiens
  chr20:10654669-10655603
  hyper
cacctctacccagcacgccgggcagggcgcatgcgcgcttattaatattcatgagagggcgtgctcaccctgggcacgcccctccccttcacgttgctggggagggggtagtgcgaggaggaacttggaaggggttgggggcagcgggatgctcagggcggcgtagaagaaccagggccccacaccaacccccgccctcgggagcttcgggccaggagggaagggagagtgcggggaggtacttggaagggatcgttgctcagggacgcctggaggcccccagcggggaccgccccctcgggcgccccgggccgtgcgcctttgcccgcgcgtcggggccccaggtgtaggcgccgcggcgctgactgagcggtcggagcggggcagcttccgccttccgaaccgcctgcgtcagctgcggctttcgccccgggaggagggcctgcctgcccgccgggagttcggcccgcttcccgcgagcgagccgcccagagcgctctgctggcggcagaggcggcggcgaggctggcgcgcttgccgccgtctgctcgccccgcggaggcgacctgggcagacgctgctgggaactttgaaaaactttcctggagccaggcttgccgcagattcgaggggaagcctcggccgcgtcccaccccctcccaaatccgagtctgcggagcctgggagggctcccagcttcctatccaaaccgcgccggggcagaggcgcggggaaaccgggggtagaaggcggcgggcacgccggggccctgttcaggctttgggaagggccggcggagatgctggtgggcttggacgccctccccggcccgacgccccggccgcagtgccgggattgcacctgtaggcggcctccgagcagctctctgggtggcaagagatgggcctgggagggaccgtgtccccagcaccgc

SEQ ID NO: 226089 - DNA, 540 bp, Homo sapiens
  chr20:11871347-11871887
  hyper
tcctgcttgaggacagggcagacattgcgcatgccccgtatccaaggccgcctccgggagcacctcccatgccgctccgctccctcccggtgaccgggcacgcgcgctcgctcccgcagagcgtgccctgcgtgcgggtgcccgccgagcccgccgggcgctggatctccgagtgccccggccggggcctgaggagcgggcacagggcaaggcggcggacggctgcgtcgcccgaggcgaggaggagcgctggcggtgagtgagggcgccgcgggcgagcgggtcggcgcctccgcgcgtgcgcagcgcgggaccgcccgggcaggggcgcgcgccctgcggccggccggaggggccgagcgaagcgaggagaggccgggctggtggccgcaggtcggcctcggacccacgggaccagaggatcccatatccgtcccccgggctcgagaggcgctggccgcgcgggctggctttccgagggggggggggtcccagtggggcgcgtcgggcccgcgcggaggtcctggtgccgggggcgga

SEQ ID NO: 226090 - DNA, 360 bp, Homo sapiens
  chr20:11871901-11872261
  hyper
tcagccgaaagaccgcggggaggggcgcacgagcccgcctggccgtgcggacgcccgcggggtgcgcgaccccggaggtggcggaggtccaggcagggggcgcggtcgggaagcctcggcgcctagcaggtggcgggggccgcgcccctctcccggggaggcgcgcggtgggaagcggagcaaacttcccctaagtaactttcctgaggcgctgccggcggggactccggggaccgacgctccgggtttgcgcggcctcaggcgccgcgggaacccagcgagtggcggcgggcgatggcgggggcggcttcctcctgaggctggactagtcctccgagttctgagtggcatttgtggccc

SEQ ID NO: 226091 - DNA, 465 bp, Homo sapiens
  chr20:17549573-17550038
  hyper
cccacaaaaacacccgcagcaaaaacgctgggattcatctgggccctctgaaaaccgtgtttccgacgcaaccgcccattagaaaaacacaattccaaattaaaaacccggagaactgagcggcggggctggcgccaccgtcccgggacagcgcggcctttcccagccacacccctgcgcgccgccggcctccttccccggcagttcccaaagataaataaatgctccttgtttttccagacctgaaattaacggtgactcacagagcactctgcatggccacggtcgcctcgggaaggaggaaaaatgtgcagacttttttcccctcacgcgagggcaggacaagccagactgggccaatcaggggagggcggcgggaatcgcaccaaagtaggtaaaaaatgcgggaggcgtccccgctgccgcggcccgcgactccgctcccgtgggtcctcccccagtgcg

SEQ ID NO: 226092 - DNA, 187 bp, Homo sapiens; identical to SEQ ID NO: 205715
  chr20:17661564-17661751
  hyper

SEQ ID NO: 226093 - DNA, 455 bp, Homo sapiens
  chr20:18039560-18040015
  hyper
gccttgttcgggtgcgcccaggacaaccggcacagcctcttgtgtcgctgcggtcgccctcctccaggaggtcgtcagacgtgtgccagctgccgggtgctgcgggggcgcgtctggtcagggatgccctggagcccaaggctcacccaacagccagcctcacctgtctgtaacctgaccctccgcgctcccagcctacagggcccgggaatcaacacagcggttttccctgttcccttccgccctgaatggcccttggggacacaaccgcctggtaacggatttctcggcgctactggcggactcgcgcggcgcagggagccggggcgcagctctgccggggctgcgggcgggaccggtgcgcggcgcctctaggtctgccctcaaggagtcaccctctctggactgaactctgaactccagcttttctctaagaaaaaccagctaagaacgaa

SEQ ID NO: 226094 - DNA, 180 bp, Homo sapiens
  chr20:19192854-19193034
  hyper
gaccagcctcgccgctgcaggctgccgggagctgcgctagctcatgctcccagctcgctcggtgctccctgttcgctccggcccggccccggcccccatcgcgccgaccatggaataggcgggcggccccgcgaggcgctcctgcagccggcgaggccagagccagtccggggtggcttt

SEQ ID NO: 226095 - DNA, 616 bp, Homo sapiens
  chr20:19193278-19193894
  hyper
actgggcgatagcgacgaggagggcgacgacgaggagacgggcagcggcgaggaggaggaagaggaggcggaggcggcggccgggtgggagcgcagcgaggacgcgcggctgctgcgcgcagggctgcctcctgccgctgtccccgccgcggccgcccgcgacaggagcggccgccgcccgccgaggccgccgcccggccgcccgaggatgcggccgtccggcgacgaggaccgcgcgcgtcgccgccgccgccgccgccgccggagggaccttctgctgagccagctctgcttcctggcctcggtggcgctgctgctctggtcgctgtcgagcctgcgagagcagaagggtgagtgcacgctgcctgccccgagtgggcgctgcggctccggcggctcggggctcccggggctgggcgcggggctccttcgggcggcccggccggagccccaggataagcgggctgggttggcggggggagtgggatgccaggcacgaggactccccctgccccacgcagaggcatggaggtggggaccctgagcgccagcagccagcaggcttaggcgtctggccgccctgggaacatttacctgtgcccgcctgtgcgctgct

SEQ ID NO: 226096 - DNA, 180 bp, Homo sapiens
  chr20:19738195-19738375
  hyper
ggcccctggccagcgaggccgaagcaaaacaacccgcccaggcgtccagagcgtatccaaccctggagaacctgccccggaaccaagagccgcagccagctcaggcctctcgagtggggcctttccagcccctgcaacagatcccgggatctgtagttgggcggaggggctcgttatggg

SEQ ID NO: 226097 - DNA, 180 bp, Homo sapiens; identical to SEQ ID NO: 205724
  chr20:19738432-19738612
  hyper

SEQ ID NO: 226098 - DNA, 116 bp, Homo sapiens
  chr20:19997780-19997896
  hyper
cctgctttctgcagccgctgcctgggaggggttccgaggttctgggcagccacagccccggaggccttacaggagcgacctggcaattcccgccgccggccgccagaggaagctgc

SEQ ID NO: 226099 - DNA, 3000 bp, Homo sapiens
  chr20:20347459-20350459
  hyper
gcacgcgtctcttttgcgtccagattggccgcgaccggagctcaatagcaggaggttaatttccttcacaaaggtgaagggggcacggctccgtgggggctgcgcccagacaggcagcccctttatttcgcagcgccttgattggagcccttgatttagcatctgatgtcaaccggcaaacaaaatgcccgctcggaatgaaaatgcatgaggccgcgcggggaggagaaagccaacttcactggggcgcacgaggccgaccgcgcgtttcgggcttcggccaactcgacccggattaaccgagccttggaccacgcggaagctccgggcggcctgggtcgggccccgccaaagatgccattcccaagcctccaagaacccaaaagttcagaaattcacgttcctctgggaacccagcccagcccgcccgcgctccaatcccgcgctttcgggagactgagaaggccgtgccaattccttctcaaactcgaaagaaaccttctctagccccgtgggcgcgcggaggctgcgagcacaaacatcgccctcggccactgccagaaggccgggccccctgtccacacttggaaccccggggaacccttttgcttggcctcttgggtccagcggcccatccgtccaaggtccgggcggaggccgtccggaccctgctgctctctcggattcttgtttatttcccaaacaccacgcggagccactgcgcctccgcaacgatctcccccgcaccgccccggcgcgcccccgcccccacccaatcagcgcgcacaacttccccctcggctccggctcgcggattgaaccctcctgacatatttggggccattcttctcctttgttgctattttgctagcgacccgcgggtaatccccgcgcgggaggggggcgtgcattgtcgcgctgatggacgggcccatttggcggctccgcgccccccggaggagagacacaaagcccaggcacgtgcgcctccccatagagaagcagcagaccgtgaagggaggcggggccgggcgtgtgcctggaccgggcggggcggcggcgccgggcggggcgaccaggggcgcgcgcgggggccccgcgccctcaggtacatctgccgcacctaccgggcgacccccgagtcccggcccccttttggccgccccatcgccctcccaccctgccaggctgaggagctgcggacgcgctgattggctccaggggaagcgggaggcgagaacaatggccccctccccccgttaaaagggagcggctgccgggcccggggacagggacgcgcgtgcagggcgcagagctgggccgagccgtcgccggcgccacgcgagtcccgcagccgccgcgcccgggcaatgggccgggggcactgagggccgccggggccgagcgcggaggggggaccgagccagtgccgtgccctcgggccgcgccaacatgccccgcggcttcctggtgaagcgcagcaagaagtccacgcccgtttcctaccgggtccgcggcggcgaggacggcgaccgcgcactgctgctctcgcccagctgcgggggcgcccgcgccgagcccccggcgccgagcccggtccccgggccgctgccgccgccgccgcccgcggagcgcgcccatgcagcgctcgccgccgcgcttgcctgcgcgcctgggccgcagccacccccgcagggcccgcgggccgcgcacttcggcaaccccgaggctgcgcaccccgcgccgctctacagtcccacgcggcccgtgagccgcgagcacgagaagcacaagtacttcgaacgcagcttcaacctgggctcgccggtctcggccgagtccttccccacgcccgccgcgctgctcggagggggcggcggcggcggcgcgagcggagctggcggaggcggcacctgcggcggcgacccgctgctcttcgcgcccgccgagctcaagatgggcacggcgttctcggctggcgccgaggcggcccgcggcccgggccccggccccccactgccccctgccgccgccctgcggcccccgggaaagcggcccccgccccctaccgccgcggagccgcccgccaaggcagtcaaggccccgggcgccaagaagcccaaggccatccgcaagctgcacttcgaggacgaggtgaccacgtcgcccgtgctggggctcaagatcaaggagggcccggtggaggcgccgcggggccgcgcggggggcgcggcgcggccgctgggcgagttcatctgccagctgtgcaaggaggagtacgccgacccgttcgcgctggcgcagcacaaatgctcgcgcatcgtgcgtgtggagtaccgctgtcccgagtgcgccaaggtcttcagctgcccggccaacctggcctcgcaccgccgctggcacaaaccgcggcccgcgcccgccgccgcccgcgcgccggagccagaagcagcagccagggctgaggcgcgggaggcacccggcggcggcagcgaccgggacacgccgagccccggcggcgtgtccgagtcgggctccgaggacgggctctacgagtgccatcactgcgccaagaagttccgccgccaggcctacctacgcaagcacctgctggcgcaccaccaggcgctgcaggccaagggcgcgccgctagcgcccccggccgaggacctactggccttgtaccccgggcccgacgagaaggcgccccaggaggcggccggcgacggcgagggggccggcgtgctgggcctgagtgcgtccgccgagtgccacctgtgcccagtgtgcggagagtcgttcgccagcaagggcgctcaggagcgccacctgcgcctgctgcacgccgcccaggtgttcccctgcaagtactgcccggccaccttctacagctcgcccggccttacgcggcacatcaacaagtgccacccatccgaaaacagacaggtgatcctcctgcaggtgcccgtgcgcccggcctgctagagcgcgccctccacc

SEQ ID NO: 226100 - DNA, 180 bp, Homo sapiens
  chr20:21086873-21087053
  hyper
cccagtcccgccgtcctcccctctccagacccactgaccttgggaaggcgcagacccaccgctcgccaagcctcgccccgcactgtgcacgggaagagggggctccgcgcgcagcccagtccggttagctggtcggcgtcggcggggctgccgaggtggcgcagagctcccctcccccac

SEQ ID NO: 226101 - DNA, 180 bp, Homo sapiens
  chr20:21494019-21494199
  hyper
ggcctcggcagccaagttttgctacttacgggagtactgaaggccctcggtgctggccagccagcgcgtgtacgggttgtcgctgctgtcgtagaaggggttcttcaggggcaggctctgcaccgcgtccagggcgccctgccccagcggcccggccctcttggctggctcgggcccctc

SEQ ID NO: 226102 - DNA, 300 bp, Homo sapiens
  chr20:21494477-21494777
  hyper
agaaactggggatggggaggaaaaaaatgaagcccaacccagtgcctctctctgtcttctttgaaagcacgcggaaatggacgcaggaagccgggcggcctgcgcgccgagcgccgcgggccccggccttagtttctaactccaggaggggtgccaaggcggcgtcagctcgggctccggcggccgctcggcgcgcggtggcggctggtggcgaggaaaaaatgggccattgcccgagcgatcagtccatataaggctgggctccactcacgaacctggggaggcggggagagggggaga

SEQ ID NO: 226103 - DNA, 180 bp, Homo sapiens
  chr20:21494874-21495054
  hyper
aaggttggccacgtgtgggcgggtcttgggagtcaagtggatgaagacagtatttgcagatgtgaaattgtgggttttggggagctccgcgctcccagccaacggccctctagagcaagatgagaggtgtaacgtgtcaattaattgcaaagacggggcgagcctttttttttttaaacc

SEQ ID NO: 226104 - DNA, 180 bp, Homo sapiens
  chr20:21495180-21495360
  hyper
ccaggaggagggaaaaaatcctctttaacattcaccggttcctacctccccgcccccgcgcgcccacccccggcaagccggaaaattggcgatttgtggcgcctttggaaaagggggagggggcgaaggccgagctgcggaaatctctcctttccatcgttggtggttgcctaaacaaga

SEQ ID NO: 226105 - DNA, 180 bp, Homo sapiens
  chr20:21502237-21502417
  hyper
tctccactgggcgccatctccaaattaccttcgggacttctgcctctgtttcaatccccgatcccgagctccctgcgacgcacagggggcgacttacccggtggaggtgggtgcagcggccgccccttcctcaccgcggccccgccagccgaggcgcaaccggccccgggcaatcgggag

SEQ ID NO: 226106 - DNA, 1020 bp, Homo sapiens
  chr20:21502491-21503511
  hyper
caaggcgcgtctttatctagtactccacctacccggacccccctcgctctgcgcccttcccccaccgcgcgccctaccaggcggggctcaggggaccgcaggcggggaccgccgcgggtgccgcgcccctccctcctcctccgcctcccagccccgcaccttcccagcccctgggacagtcccgctttccctgaccgcaccggaaagtgcgcagcggcgggatcacctggcctcggcggctggtaaaacttttcctgactgcaggcgcgacagaggggccctgcccgtcctcgagtgctcgccactcctgccgtgatccgcaaagtcggggagaacttcggaggcccgcacttgcccacctgctgcgtccggactacgcggcttggggatcgagccgagtcaggacccgggagagcgaggggctcataaccggggtccgccgtgaacccgagctccggcgccgctcggcggcgacgacggtgccccgagacccctctctgctggcaggccgcggtgaccgtgcccggagcgcgttcccgcgccgggcggctgtggcaggaggaccagacagtcagcgcctggcagcgagggcgacgccgggcttcctccatcgccaccgccgggctccgctgcggctcccgggctccgccgggtgccccgcgccatccccatcccgcgttcaccggaaacgcgtgcgagctggaggctcacctggagcgcgactgcgccgctggagcctcggctgggcgagcgcgcaggtcccggccgctctttatcccgagtcgcgggcggctgcggagtcgcgggcggtcgggcggcggctcgacgcggccggcgagcgctccccctcccggctccgggctcctggctccaggctcccggcccagcggccccaccctcctagctccggccccgcggccaccgcgcagccccagcggagggggcagctcccccgcgccgcgcgcgctctgtttgttttccttgccggactgacgtgagtcaaaatattggccatatgtt

SEQ ID NO: 226107 - DNA, 180 bp, Homo sapiens
  chr20:21503814-21503994
  hyper
taaaaccaaagggccagatgtggcacgttatttatgtgtgaaaccgcgtttacactagatacgcggatccaaggccgatagcacgacttcgcgggaggtcacagacctctcgccccggctccaggctcctcccccagcacgatctcctctccaggttgaggggtgtcggtcttgccggga

SEQ ID NO: 226108 - DNA, 591 bp, Homo sapiens
  chr20:21686207-21686798
  hyper
ggggcgctggggcgcagtgacgggaaccaatgagctgccaactcgcgcgtctccggcgtgactgccgagattgacgtggaggacacgtcaaattgattcccgcacgctgcagcctcccggtcagacgaatttctcccaatcggatgaagttcaccctgggcctggggtcgcgggcgtggagagtgtcctgggagggggcagcagcggcggcggcaggccctggagcgggcggcagcgcgctccgctgccgcgcacagcgcgtctccagcccgcggctgggccgccgcggctctcggctctcgggcgccctccctctatgcctctcacgcggcggcggcggcgcccaagctctcccggactgcgccgggcccagccccggccaccccggccaccccggcgccaggcagctggccggcccgctcgctatgggtaaggggcgggcgacaggcagggctcgggagggctgatgaggtgggtcgggtccgcctgcctcccttccctctcgtccgctttccctgggcgacccagtcctgggtcctggagaagctgcattctcctctgatccccagccttcagggggcagttgagcaa

SEQ ID NO: 226109 - DNA, 180 bp, Homo sapiens
  chr20:22563011-22563191
  hyper
gtgaggcctgggctccggcggccgccttcttgccgctgccggcggcgcctgcggcctccttcagcgccagctgcttctcgcacttgaagcgcttctggcggcgcaggtagcagccgttctcgaacatgttgcccgagtcagggtgcagggtccagaaggagcccttgccgggcttgtcgg

SEQ ID NO: 226110 - DNA, 600 bp, Homo sapiens
  chr20:22563332-22563932
  hyper
tggggctctgctggatggccatggtgatgagcgagatgtacgagtagggcggctttgcgtgcgtgtagctgcgcctgtaggtcttggggtcgcgggcgcggctcaggcccgcctgcccgtacatggggctcatggagttcatgttggcgtagggggccaggccgcccatggccccggccgcctgccccccgagcgggctcaggctgggactcaagtgcggccccatgcccgccacgccggccgccccggccgagccgcccatgcccgccatggcgcccgcgccgggggacatccccgccagggacgggctcatgccagcgcccacgtacgacgacatgttcatggagcccgcgctcatgttgcccgagccgctgcccatggcggccgccgacatgctcatgtacgtgttcatgccgttcatccccaggccggcgttcatgttgctcacggaggagtagccctgcggacagagccccgggagggaggcgacagcgttagcaccgcggctggagggtgcccagacctcccacccaccgcccaggcctccgcgtccggggaggcctccggggagccctttcgtccccgatggcccagtctccg

SEQ ID NO: 226111 - DNA, 180 bp, Homo sapiens
  chr20:22564705-22564885
  hyper
gctgcccagaaaggctggggttgtggggcggggtgggggggtgccagcgagggaagcggtcctgaggttggggaaggagcgagcgccgccgctccacttccccctggaaaagacgagcgcttacctcgggctctgcatagtagctgctccagtcggacggctcgtgcccttccatcttca

SEQ ID NO: 226112 - DNA, 180 bp, Homo sapiens
  chr20:22565078-22565258
  hyper
ggcggtagttggaagtgggcgggaggtgggggggggcgaggagcggaggaggcccaggccagcgccccgcggtagggagcacccgccgccgccgcgctcacgggctgccgggtggcggctgaggttggcagtgccgagctgccccgaggcggcgggaagcgcgcggcgcgggggctagtg

SEQ ID NO: 226113 - DNA, 755 bp, Homo sapiens
  chr20:23617972-23618727
  hyper
tgtgcctgcccccgcgctgcggcgcagctcgagctggctcctggaagctgatcttaggcgccgggcgcggacctgacgtgtccgtgcggttccaggccaggccagactcagggcattcccggacacgcccgccaagggctcgggggtgacagcgaagaccgggaacagggtccgggtgagaagcccaggcgccggagaggagcagcacggggtccgggagcagcgcggggggaggctgggacggcggggccggggcttcggaccctgcggggggcggcacgcacctgcttgcgggcgcgcaccacctgcagcgcgcggctgtggtacatgtcgttgctggctttgttgtactcgccgacggcaaagtccagtgcacgccgcacaccctcctcctccacgctggcgtccatggggcctcccactaggcgcggcggcttgccgggactggagccggccgcggggctcacggccagggccacggccaggatggccagcaggagcagcggggcgcgcaggggcccggccatggtcggctaggacgcgggacgcggggagtggggcgcaggcgagaggctggagctagatagagaggacccgctgcgataccgaggcgaggccgtgagccccgcgaggccggcgactgcggttttatcccttccggccttcgccgccccaccccaccgcggcctgcactcccttttccggaacgcctcgtccctcccacctcccttctccctccccgcctcccctgcctc

SEQ ID NO: 226114 - DNA, 441 bp, Homo sapiens
  chr20:26190046-26190487
  hyper
gaccggaggagggggcgctgggggtgggaacgacacaccaccgctcggcctcgggaacctgagggacaacccggagcgctccaggagcaccgcaaaggcccagggggagccaacgctcgcgcaaactccccgggagggcagcacgacgggccggcgggacagcacccccaccgctgcggaggggggccgcccgcaagtcgacaaccacaggaggcgagagcgaggggtgcctgccgcgtcagaggaccccccgacccaccccgcgaggcagaaggcgggggcgggacagcgaggtcaggccgggttccgcaccccatgccttcccaacgcaccacccgcaggcgaggaagaggagagacaaggggcccccgcgggcgggacgagaagaagggtcccattcgccacgaatgtccgcccctcgcccgtcgcggctcggacacg

SEQ ID NO: 226115 - DNA, 600 bp, Homo sapiens
  chr20:30193498-30194098
  hyper
ggaccttcagttggagctgaactcggaatccgaagttggaacccccgggggccgagggctgccggtccgggctccgctcagcaccctcaacggcgagatcagcgccctgacggccgaggtgagatccagatccgaccactagatcatccttataccgacggggaaacggaggccagagagggcgtgggcgcttgcaccacttccgtcccatccttgcgggtacctggctatgcgggggtgcctaaggagcctggaaaaagcgctcccccgtcgtgcttcctggggaagggggcgttcgctgcgctcggagcggcgtcccttccaacccgccggtctcatttcttctcgttttcacaggcggcatgcgttcctgcggacgatcgcatcttgtgtcgctgaagcgcctcccccagggaccggcggaccccagccatccagggggcaagaggaattacgtgctctgtgggtctcccccaacgcgcctcgccggatctgagggagaacaagaccgatcggcggccactgcgcccttaactgcatccagcctggggctgaggctgaggcactggcgaggagagggcgctcctctctgcacaccta

SEQ ID NO: 226116 - DNA, 1108 bp, Homo sapiens
  chr20:30555564-30556672
  hyper
acccacccccccgtcagacccaggccactggaggtgaacacaggagaaaaacgaagtggagagaatgggaagggggaggcgataaacaaaaaagaaggaagtgcagtccgaggggagatgagagacagaaagcatggggttggagccccgcgcctccgaggaaggagggagagggtgacctggggtgcgccccgcctcccctgcttccgcattcccgggggctgcccccccttcggccgcagctcaggcgggtgggggcggggcggggcggcgccgaggagaatgaataattgaagtggaggggaggaggaagaagaggagaaggaggaagaggagccgcccgcgcagggtcctccccacgccgcacccccctccgccgcccggaagtcgctccccgcctccctctccgccaacatggccgcgaagtcggatggagcggcggcctcggccagcccggacccggagggggctgccggtggagcccggggcagtgccggcgggcgcggggaggcggcggcggcggccgggcccccgggggtcgtcggggcgggcggcccggggccgcgctacgagctgcgggactgctgctgggtgctgtgcgcgctgctcgtgttcttctccgacggtgccacggacctgtggctggcggcctcctactacctgcagaatcaacacacctacttcagcctcaccttgctgttcgtgctcctgccctcgctggtcgtgcagttactgagcttccgctggttcgtctacgactactcggagcccgcagggtccccgggacccgccgtcagcaccaaggacagcgtagccggcggagccgccatcagcaccaaggacagcgccggcgccttccggaccaaagaaggcagccccgagccgggtccccagcctgcgccctcctcggccagcgcctaccgccgccgctgctgccgcctctgcatctggctgctgcagaccctcgtccacctcctgcagctcggccaggtctggaggtaggagaagcgcaggtggagggacctgagcccgaggagtgggggtggcgaagggctacctgacgtcccagccctgatctgacctttccgggctaccctcctgtcctgac

SEQ ID NO: 226117 - DNA, 247 bp, Homo sapiens
  chr20:30582821-30583068
  hyper
gcgagaggaaccagcgcgcgggagcctgagcaccgcgtccttcccgcaggtacctgcgcgccctgtacctggggctgcagagccgctggcgcggggagcggctgcggcgccacttctactggcagatgctgttcgagagcgccgacgtgagcatgctgcgcttgctggagaccttcctgcgcagcgcgccgcagctagtgctgcagctcagcctgctggtgcaccgcggtggcgcgcccgacctgct

SEQ ID NO: 226118 - DNA, 879 bp, Homo sapiens
  chr20:30639838-30640717
  hyper
aagcctcctatggatggtgctaatattttttttctcttcgtggagggtttgggatccttcttgcaggagacggaggttatgaccctcggggagccggttaggatcctggggtggcgtctgaatcttcggggaggtgttaggacacttggggcggagttagcctcgctcagggcgcggctaaggcgcccagatggcctgcgggcgccaccacgtccctggtcccagctcgggagcacatcagaggcttagaggcgagtgggaagggactcagacagtgcaggacgagaaacgcccgcggcaccaaagcccctcagagcgtcgcccccgcctctagttctagaaagtcagtttcccggcactggcaccccggaacctcaggggctgccgagctgggggggcgctcaagctgcgaggatccgggctgcccgcgagacgaggagcgggcgcccaggtgagtgccgcgcacaggggaccgggaatacccggcccgcgaggggtcccaggaggcggagggagcccaggagcctggggagggctggctacgggtgcggctgggggcagcgaggggagacggaacgtcgggggagccgcgggtagcccgggggatgaggggtcgacagcgagtggagggtgccctagggaggggcggcactgttgcggactgctggattcccggggaaggggacgctcgggcccgtgcagtgactttatccaccacttctctgggccgtccaggttccccttcttgggggggggcggggattttttttttaatttaaaaaagaaaaagaaggaagggatggggcttcacagaacccgggaaggggaaggcccttacggttcccggtgggggccgggtcacgccgggttggcagccag

SEQ ID NO: 226119 - DNA, 574 bp, Homo sapiens
  chr20:30946061-30946635
  hyper
gactcccaggcgccctttcggtttgtttttgttcaaaaaaaaaaaaccccacactccccctcctcactcttcacacacactcacacacacccacggcagacacgcacgcacccgggcgccgaagggaaagccgcgtctcgccctcccgccccgccgtcggtcctgtctcagtccctcagcagagcgggaaagcggaggccggagccgtgacctctgaccccgtggttatgcggagccgccgcattccttagcgatcgcggggcagccgccgctgccgccgtgggcgactgacgcagcgcgggcgcgtggagccgccgccgcccctcccccaccgccgctctcgcgccagccggtccccgcgtgcccgccccttctccccggccgcacccgagacctcgcgcgccgccgctgccacgcgccccccccaccgccgccgccgccccagccccgcgccaccgccccagcccgcccagcccggaggtcccgcgtggagctgccgccgccgccggggagaaggatgaaggacaaacagaagaagaagaaggagcgcacgtgggccgaggccgcgcgcctg

SEQ ID NO: 226120 - DNA, 83 bp, Homo sapiens; identical to SEQ ID NO: 205766
  chr20:30954186-30954269
  hyper

SEQ ID NO: 226121 - DNA, 109 bp, Homo sapiens; identical to SEQ ID NO: 205767
  chr20:30956817-30956926
  hyper

SEQ ID NO: 226122 - DNA, 386 bp, Homo sapiens; identical to SEQ ID NO: 205768
  chr20:30959966-30960352
  hyper

SEQ ID NO: 226123 - DNA, 295 bp, Homo sapiens; identical to SEQ ID NO: 205769
  chr20:31015930-31016225
  hyper

SEQ ID NO: 226124 - DNA, 104 bp, Homo sapiens; identical to SEQ ID NO: 205770
  chr20:31017140-31017244
  hyper

SEQ ID NO: 226125 - DNA, 153 bp, Homo sapiens; identical to SEQ ID NO: 205771
  chr20:31017703-31017856
  hyper

SEQ ID NO: 226126 - DNA, 359 bp, Homo sapiens; identical to SEQ ID NO: 205772
  chr20:31019123-31019482
  hyper

SEQ ID NO: 226127 - DNA, 106 bp, Homo sapiens; identical to SEQ ID NO: 205773
  chr20:31020682-31020788
  hyper

SEQ ID NO: 226128 - DNA, 634 bp, Homo sapiens; identical to SEQ ID NO: 205774
  chr20:31021086-31021720
  hyper

SEQ ID NO: 226129 - DNA, 4888 bp, Homo sapiens; identical to SEQ ID NO: 205775
  chr20:31022234-31027122
  hyper

SEQ ID NO: 226130 - DNA, 583 bp, Homo sapiens
  chr20:31350980-31351563
  hyper
gcaggtgggcgtccgccccttgcaactgggatgtggggtcttcaggcgaggcgctgtcccttcccccaatcccagctttaggaaagagctcgtgagtgtgggcttagactcgcgcgggctggggtgtgcgccgtggagggcgtgaggcagagggcgacctcccggggtgctcctgagctgagccatcaagcgcggggagcagcggggctgccctctgcctgtgcacacctggcccgggaggagccggccggaggggcggcgcctccctgtcccggccacgccgcctaccctggggtcttaccttccattcttagcctaactcccgtgtgcggctggccccacttcccagactcgcacactaaggcctcaaaacctctagcaccagctcctggaagataagcttcccggctcgtggttgcatggggagggtgtattgagctccactttatcggggagaaagtggaagcggagaaagacctaacaagttgtaagactgcgctgcccttgggcccaggcttcccgctggaggatctcacctgtggatggagttccgagcccaggtcttgcccgcgcctccagcttt

SEQ ID NO: 226131 - DNA, 452 bp, Homo sapiens
  chr20:33464343-33464795
  hyper
ggccccgcccctctacggaggccccgcctctagttcggcctgttttctcagtcccggcacccgccgcgaccgcaaaggcggccgcggttctaggaacttgacgtgatggggcttcctgaggagcgggtccggagcggcagcgggagccggggccaggaggaagctggagccggaggccgggcgcggagttggtctccgccgcccgaggtcagccgctccgcgcacgtcccctcgctgcagcgctaccgcgagctgcaccggcgctccgtggaggagccgcggggtgaggcccggcccgggcgggcctggggtgtcagtgaggagaagagtgggggctccctgggggagtcgggggctcccttgggaagctgaggggtgggtgaggagatggaggttctgtgaaggaagaattgcggttctttgaaaatggaaaagggattccgggaggagac

SEQ ID NO: 226132 - DNA, 47 bp, Homo sapiens
  chr20:34359742-34359789
  hyper
gttcctgctagggcgcgggcctgtttcccgcgcgtcagggtagtggg

SEQ ID NO: 226133 - DNA, 550 bp, Homo sapiens
  chr20:34652340-34652890
  hyper
agcagctggggctccggagggtctgggtctctgtcacttcttgctgcgtcgccttctgtgagtccttcccagccccctaatcatgcccgcctgagcaagaggatgagaaaatgccgaccccgtagcggggactctgctgctgtgcggggcgcggttcgccgaacccactggccgcttctagagagtcggccccagggccaggacctccacttggcaggcgctggggcgcccaggggcagggccagcgcgggaaaggccgcgagtccttcgaccccctggcagtctgggagccggccgcggctgccatggcaacgcccggaagctgccgggaggggaggcaggcccagccgggacgaggccctgcctccagccaacgctccgcccagaacgaagccccgccccggaacgaagccccgcctccagcaactctctgcccggagagaggcccgacagctgcgacccgactggttctgtccgagcccgacgggccgcgctgacccagcgactgtgcctgactgaccacaggtgccgccaccgcctgataatacga

SEQ ID NO: 226134 - DNA, 163 bp, Homo sapiens
  chr20:34680201-34680364
  hyper
cggcgctggcgggaacccgggaggacgtgggggccccgggtggggtctgctcctcttcttcgcccggcctctgagcccgccgcagctcaggttgacgccgggcccacgtggggaagccggcggcgggtccccagcgccgggagggttcgcggggctcagcccc

SEQ ID NO: 226135 - DNA, 238 bp, Homo sapiens
  chr20:34680573-34680811
  hyper
gaggagggggctgagcgccgtgggagggagagcaggagcgagcgcgcgagagagcggggcatttctgcgcagctctagcgcgcctcggagcccgccggggcagccgccggacaccaggaccgcgagccagacagctcccggaagccgcgccgccgccgccaggttagccgcacccgccgtccccctccgcgtcccggggaccccgccgcgtcgggtcccgcgtgtgcgtgtggggtgg

SEQ ID NO: 226136 - DNA, 558 bp, Homo sapiens
  chr20:35491172-35491730
  hyper
ggcaagcggctgctgcccaccgacgacgcggccaccgacggctcgtccggggaggcgggcggccgcgggggctgctgcgcggagggcgcgggctgggccggctgccccgtacggacccccgccgggcccccggccgcggactcggcgtcgctgctcagcgccagctccaggcccagcaggcgcgcctcctccgacgcgcagtccgacacctccgagctgctatccgtgaggctggggggcggcggtggcggtcgcggccccgcacccgagcgcggacggcccttggcacggaccccggtgcggaccccggccacccgcacacccgcaccgcgcgccccgggagccactgcgcgccccttcttgtccggccgtgaggagaacgcggcgctgcaggcgactgctgagcccgggcctgggccgcggcggcccttagccagcgaccagccggccacgtctttgggccgggccggcgacggcgcgcggtggctctttttcctctccggggcaggcgcgggtgcaggcgcgggctggggaccgcagccccggaccgggggctcg

SEQ ID NO: 226137 - DNA, 329 bp, Homo sapiens
  chr20:36775028-36775357
  hyper
ggaccagggcagggatgtcctgattcctactccagtgctcttcgtgccccctcccagggctcatgacccacatcccagcgtgcagctcacctgtgcaggccacggcggcgaagacccagcactggccatacttgacgcgctggcagccgtggttcttccagcgccgcaggatgtccacgctgccgatccaggacatggggctgacgccgtccccgtagttgttgtcccagcgtcccagcagcacaccctggtcatcgttgcagttgacctgcaaccagtggggcagcacggggactgagcctgggatggggtgtcggctgtgccgcctg

SEQ ID NO: 226138 - DNA, 584 bp, Homo sapiens
  chr20:37274625-37275209
  hyper
agggctctgcctctcgcccccagaagtcctatccccctgccaaaacttgatcctttctggccaggtcgcctctttcctggtcgcccaggtgcgaaaactgaacgacagtagcagcaggcgcccccagctctgcgacgcaggcctcaagacttggctgcggaggatgcacgcagacagggacaaggcgggggacggcctcgaggcggtgagtgcccccgaccccagacaggtggagaagggccgaggcgacaggagggcacctggggcgcggtgcttcccttcctccaggtccccgctaccgggctgccagcaacggcccagtgaggccaccagggggcgttgcggcgccgtcacggggagcgaggaggcgtggctgcgaaacgagggcttagaagcgggttggggaggggaaatggagtgactcggagacttcccctagaaaccgtcaccgccgccccatttttcggcagcccctggccgagggttgggaaaatgggagtcgctctgcggggtgtgaggtgattggggctgggtgggggatagtagaagggaagagccttccaaaaatactgagtattcctagg

SEQ ID NO: 226139 - DNA, 799 bp, Homo sapiens
  chr20:37302716-37303515
  hyper
tccggggcctctggggacccgagagggacgttaagttcagggcttcagggtgcagccctggggtcggtacccccagcctccaacccagagctggcagcgctcgcccccttctccgcgcgggccctcagctcagctccctcttcgctccccgtgtccccgcgagcgggagggaggggatgctaggacgccctgtcggcgtcgtcgccgctttccgccattgtttagtcgtgatgctctcattttctctgaatcaacaattttctgctcggctccgcgccgaccggcgaacgcggggcttttcctcgcccgcctgatgacagcagagcggcgcggagcagctggtccggaaggaagcgccaggcgcctgcccggtcccaggcgtccgctgccgcccacccacaccagaccccgcccccgcgcgtcaagccccgcccatccataccaagtcccgcccccacaccctcacccacacaccaggccgtccccaccccgcccccagagccccggggcgccccgcccgctagccgcgcacgcgcagtgagcacggcgacccccggtggtcgggtgtctccgcaggccgaacacgctgctcgcccagctgcggatcattaccgcccttttgttctccgtcgcgcgctcgccccacgctaggaatgcaaactgtaggcgccgccagcccccccttcctgtttccctgggtgggagtgggaagggagttttaaactgaattgtgctcagactcccagcccagtcttcccggagccatccgttccttcatccaatgcggacacccatatct

SEQ ID NO: 226140 - DNA, 960 bp, Homo sapiens
  chr20:37351571-37352531
  hyper
tgagctaatctagaaatactgcagagaaagagtggctggggttcccagggagaaagggcctcgagagaggggagatggggagctgcttccttttttgtttccttcggtttttccgtccgcccccgcccccacttccagtcacagccgctacttctccattcaggctgggactgccaggtggagccctgcggtttactgctcaggaggagcccggccaggacatcagctggggacttacgcagggacccattcagagcagcggaccctcacggagactactacaaagggactaacacaggcacgaacgcaggcaaccccattcgggaacacatacgtaatccaacacactagctctggcacacacactggaatgcgcgcaaaaccacacagacacagaacacacgcggttaccaaacctcattctcagaggccacactgatccaacctcaagcagagtctgatacagcatcggtctttgtctctgggtctctcccttactcgcgctcacacacccgtaccccaatcaacacaaacagcccaagctttcacagcctggaggcggccgtcggagcagggccccagcgcaccgcgagcctctgcttcctccgccttgcagcgccgcgagcccttctttcctccgcgcctggccccgtctgcgcccctctcggcgtgggcattcgcagacccgctaggaggctgacgagaggtgtcctcatagagtcctgccttcttccagacccccaaacgaaaagaaagagaaaagccaacctttcgcctccattctgcacgcatttggagagcggctggtggcgagcgatccgcacaatcgcttccctcgcggcgtccctggacgggcggagagaacccgggtgactgagcctgaggctgagcttccttgggagcgatccatgccagccacttctaccttcaagggggactcgcggccgggtttacgcgcga

SEQ ID NO: 226141 - DNA, 420 bp, Homo sapiens
  chr20:37352933-37353353
  hyper
cgtcccctgcctccgggtatttcctctctccaatcccccacccccgcaccgcctgattccgaggggcgggagcgcattgggctgcgcacgggtgggggcgccgcgccagcttcgcgtagctgctctgacgccgctgccgccgccgccgccgccgccgccctccgcagcccagctcgcgccccgcggcagctccgcagtgcactagccaccaccgccgccgccgccgctccgccagacctgctgccagcttgcccggtccagccctgagagagcctcgaacgccagctgcgagggtcatgagccagagagccccggggcgccgcgcggagagcaagcggagatagcgactttgcgccccccagccctcgccttcttgcatcgcgttccccgcatcctcgggtccttctgtcctttccgctg

SEQ ID NO: 226142 - DNA, 180 bp, Homo sapiens
  chr20:37353544-37353724
  hyper
atggacatcctgaaagccgagggagagccctgcggggacgagggcgctgaagcgcccgtcgagggagacatccattatcagcgaggcagcggagctcctctgccgccctccggctccaaggaccaggtgggaggtggtggcgaattcgggggccacgacaagcccaaaatcacggcgtgg

SEQ ID NO: 226143 - DNA, 105 bp, Homo sapiens
  chr20:37433709-37433814
  hyper
cacatctcaaagggcgtcagacgtcagcagaggtacgaccacttccttcctccagcgcttcacctcccttctttccagaaagaggaaatgatgcgagtccacacc

SEQ ID NO: 226144 - DNA, 1380 bp, Homo sapiens
  chr20:37433940-37435320
  hyper
gccttcaagctaggaaccctgagttcctggccctggcattcattctgtgtgaccttgagcaggttaccactcctctctgggcttcaggattcccgtctgtcaaatgggagcagggataccgtccttggcttccctctttccatggtcggggtgggggttaggaaaactattttggaggagggggcagcgttaggaaaactattccgaagcctggccacgtcccaaccggtttcaacttcctgcagctcagaagaggggtccccacccgagagcgccgggaccctgtcccgcgctgcctcccaagccggatggggttgagcgcgcccaccccagtcccaggagctcaggccccgccttgggggaggagccgagaggcggcgcggaggctcgcggccgagcagagccagctctgtcgccgctggagcagctgcggctcggggacccacagacacagccggggtcgggagccgcccggggcagggctcgggagagcgggtgagttccccggcggcgccaccaccctccttgcgctctgcggcttcgcagggcgggggatgaggatggggcggggaggtggtcccagcctgctatcacctagctgggggccggggcgctttggccaagggacgatagcttgagataaatgggagtgtggggactctggaaagacgggtaccgagagcgctaggtccgggagtcgggctggaatgggggcgttctccccggcctcgcaattccttgacgaggccaggggagggggcgcattggcaggttgttggctgcggccgtcgtagaccgatcttggggcggggaggtggggtcctcggtctgttctggactcatggggccgccgtctgccgggggtgcaatgccgggcggcgggagccacagcggacaccaaacaacccccccccgcgcactctcccggccgggcatggtggtgccgccccctcgcgtggcggggcttggtcctggcgggcagcggcagggcgcagagagcgctcctgcccgggcgggaaagatccccaaggcaggcgcctccacctgcagacccgccccgcctcaggatccggctgacagcaccagccagcccggggagaccccgcgagtggtagttccccgggaggggcgcgcccggcctctcccagggccccgtgcgccggcggctgggtcccccgcgccaggagcgctcccctctgggcgactccggctcatcgattccggcccagaggagcgcccccgggcgccgaggatgggcggagacgtgcagccgcccctgagaggtcgcccagaggggtctccccaaggtcacccggagtgcccaggctgagctgcccagaccgccccgggtggagagccgggaggcaggcgctcgctgcc

SEQ ID NO: 226145 - DNA, 180 bp, Homo sapiens
  chr20:37435398-37435578
  hyper
tgatgcagctcccagcccttggaggataattgagcctgggagagctttgaatctggccctcctgagaccccagggctgcgccgctgccgcgcgccaggcctgggtcccggtgctcccgggcacctcaggagcggagggagagggatgtggcttcatcagcgcttctaggaaccgaaaacc

SEQ ID NO: 226146 - DNA, 960 bp, Homo sapiens
  chr20:39316709-39317669
  hyper
ggacgcgtttatacctgcaagactgggcgtagccccggttcttcagggtccgccgcttctgcttcaggcggatcacctcgtccttggtgaagccccgcaggtggcggttcagctcgcgcacggacatggacacgagctggtcgtcggagaagcggtcctccacgctgccgttgccgcccgccgccgtcgccgaggccgtcgcgtgcggcccgggcccggggtggctagtgggcagctgttgcgccgggctagcggcgctggacggcggcggcgacgcttggtgatgatggtgatggtgcgggtgagcgtgcgggcccagctcgtcgtgggccacgccggcgcccgggtacgcgtggtgcgggtgagggtggtggtgatggtggtggtggtgagcgccgcgaaagctgtcgaagctttgcagcggctgtggcactgggtgcgagccgatgagcgcttccaccgcgtcctcgggcgtcaggttgagcgcctcggggttcatctgctggtagttgctcgccatccagtacagatcctcgaggtgtgtcttctgttcggtcgggctgaagctgggcgacgagggcacggagctacacggagtgctgagcggtgtggaggacaccgagccggctggctgcaggcgtgtgcagggcctgcccggacgctccgcgcgccccagtggctccttcttcacgtcgaacttgagcaggtcgaagtcgttgacatactccatggccagcgggctggtgggcagctctggccccatgctcagctccgcggccatcgctgaagcgaggcgcagccgccgctgccgcccgggaaactttgcggccggccggagcgcgccgagccaagcgcgggggggaagagcggagaagagctggggaggcggggagcgagggcgcagcgggccggggccgccggccaagcctttgtctggggacgcggcggcgcgccggagag

SEQ ID NO: 226147 - DNA, 240 bp, Homo sapiens
  chr20:39317731-39317971
  hyper
tagagtcgggcggggtggagaggcaagcggagcgcgcggtggggctgaggggaggcgtggggcgagtgcccgttgctcgctctctagctctcttgctcttacgctctctcgctcgcagccgctcgcagctcggcggtgcagctgtgctggatccggcggcgccgcagccttttatcgcctcctgatgtcactggggtgcgggggcccgggcggcccggtgcgcgggccaatagctgcacg

SEQ ID NO: 226148 - DNA, 1158 bp, Homo sapiens
  chr20:39994655-39995813
  hyper
ctgcgagagggcagcggccgcccggatgcgcagctctatctcctacctggccgggccaggggagagaagggaggcccggggcgggggagccccgcgtgctcagcgcgcggaccgcctttcctcctctccctccacctggtccgctcgcccggagtctgcacacagcgcagctggaaaatgttacttcgctggaaaggtttccgctggcactgccaggatcccaagccgccgcgccaggccccctcggttcctttttcctcgccagccccgcaacctcccggagcgtagggcgctcgcctgggcaggggctcggccccgggcgccgccccctctgtgcagcggcctcggggtgcccggggcctcgacgccccccgcgggtgcgggcaggtgggagcggcgacgcgcgcgggcccatccctccctcttcccgcccgccgcccgcccgcgcttacttgtgcggccccgggcgcagccgcgggcgccatcccgtcgtgtagagactgtagcgggaggcaccgggcggcgcaggccgcgccaggagcggggtgcccctggcctgcgcccccgagagcagcgccgcgacggcgcacagccagacgagcaggcggcggcggcccatagcggcccccgcgcctctgcccggccccgcgcggtgccccccgccgggtgtccgcctgcagcgccgcgccgcccccgccgctggtcggcccgggtcccgccccgagggtcccggggtccccttcggcccccgagctcgctggcccggccgcctggcgcttcgcggcggctgcgtcccgcggagtggccggcgctgctagcggctggggccgcggaggggaggcgggaggcgggctctttgcggattagcataaacttggggccgcgccgctcgccgccgccagcccctcgccccagctccgagcggacggccgaggagccgcctgcgaacaggaggttccaaagggagcagccccaggtggcaggggcgcaggccgccgcgccctgggaggccccccgagcacaccagccactctgtcgcctgcgggcacggggcgagacgcagagaagcggacccctgaggccagcctgggcgtggactttccaggagtcgtccaccctcaggatacgcttgtcttcagagtccgtgtgaacccggga

SEQ ID NO: 226149 - DNA, 267 bp, Homo sapiens
  chr20:40321459-40321726
  hyper
ctcaggcaaaggccacgtctcggaacagttggctgcacaggtcacgtgacgcgcccctagcccggctctatttggctgcaagagcgctctgtcgcctgcctcggactctgtttcccagaagtcttcctggaaactacatttcgcagggggctttgcggcgcctacttcctcctggctgattagatgggactggtgccgttggccggacgtttttgggagcttcacaggctgatggggaagggcgaaacctgctcgattaaaacaacc

SEQ ID NO: 226150 - DNA, 1644 bp, Homo sapiens
  chr20:41817543-41819187
  hyper
tacctctgctcaccgccttcccgtggccaaacccaaatatgagttccccgaacttttcaggagcggacgcgctcacgggtcaaatccactcccctccaagggccttaacacgggcgcccagctacctcggagaaaagccagcgggtagggcggaggtattgctctcggtcatcaacgcaaacatcccctcgggtgcctacagcggcctgcttaggggagcagcgtgttcagagcaaatggagagcttcctgtatctccgaggaaaaaagaaaagccgccgccccggcagcctcggcctgctggggacctgtcctccccactaaaagcgcgcgctgcccgaggagctgcccgggagagaacgctccaccccgggcgtcggtgccgctcctcgtctcgccgccccaaacactcaagtggcagattccgacaagtgggaggcagcaagtggaaatattcgcaacaaccgcggaaagttactccagcccggggggccggcaggaaactgaagcggggaacttcgccaaacgcgggctgccgagggacgcgaggggccgggctcgctggccggggcgcgcggggacactgcttcccgcgcctgcaagctgagacccgggttccggccatggggacccgcgcccccgcgagcccacacaactttctcctccgagggccccgcggctgggggcccgcgcgcatccaggagggagcggggagcccaggggagccgggcgggcgcactcacctgcggcgctctgagcccgggcgccgggcagtggcggcagctgcagcctcaggagcaggctgagggcgagcgcggcgaggctcgccatccgggcggcggcgggcagctcagccccttcccgcgggggccggggccgggactggggcgggcgcggggtggccccgcatcgccggcgcggccgctggctgtgcgcgcggctggctccgctcgggctcccggagccggcgctcctgcgttccaagccgaggcgcggcgcgaactgaggcgggaggctgggcgggggcgggacgcggggggcggggggcggtgtcccccgagtcctaacgccgccgccgttgccgccgccgccgccgccgccgcccgcccgggcgctccgcctcggccgtgcacacaccctcacgcgcacgcccgcgcctggcacacgcccgcggctggcacacgcgggctcccccgcgcaccctctccggggccgaccagctcgggccgctggcacagtcacgcgcgtccacacatcacccccgcacccacacgccgggcagggtcctcgcctcttcgccccgcgccgcgccgcgcagccaagcatcgtctgccctgtgggggcgcaggtacgggggcggtgcggggaggaggaagctgcagcagccgtttgaactcggggtggggaacaggtgaatgggggttcggtggcgagaagagggagggagggagcagccctcgcaactcaagataaggggccaggtgaattgcgaaagcgggtgggggcgtctgcccaaagctggggcaggcggctgctggccagggtctcgggcacaccctgagatgagaatttcatctaagagcgcgcgcgcgcacacacacacaacccactcacactcttctgggcgcatcgctgaccgcgccac

SEQ ID NO: 226151 - DNA, 175 bp, Homo sapiens
  chr20:43438095-43438270
  hyper
cccaccaagaaaggcgactccagggacaagagcacctgaggtcaggggcacacaccagcgggcggacaagtgtagagttggcgccgccctacacctctctccgggaagagaggggaggaaaggccgtcacctggccggttcccctccgtctgccccaggcgtataagaagcagga

SEQ ID NO: 226152 - DNA, 867 bp, Homo sapiens
  chr20:43438692-43439559
  hyper
gaccctgggggcgccttcccaggggattgggggtggggaggagggcgcacgggtcggggagggggctaccggacctggatcccgggacaccccgggggtctggggggcgggccgcgcgcttacctgcgtcctcgtcgtcgaaggagttcatgcacgggaagtagatggcgagcgcctcgaaggaggcggacagactgaggcggctctgcgagcgctccatgcccgcgccggcgccgggcgcctcggccgcggcggcggcggcggcggcgggcggcttgggcagcttggccgccccattcttgacgcggagtacggcgcgcggcgtggtggcggcggcccggggccgggccgaggctccgctgcggggctggcgggcgcggcggggccggcgggcgggccaggagctggcggcgcgcggagcccgaggcgcgctgtgctgctggcggcggcggcggcggcggcggtggcggcggcggtggcggcgcagcgcgctctggtccgcggcgccccccgccggcagcgcgaggcgggcttggagcggcgccgcagccaatccgtgccgccgggggagggggcgccgctgcggggcgtgggagcccggagggcgcgggctgcggcctcttctagcagcccccgggcccggcaggtgcgcgcggggaggcaggcgccgggcgaggttgtctgggccctggtccgagggctgttcccgaccccgcctcggcccccaccctcagccggccgacttgcggagaggccggcgtccagtccctcacccagacaggcctctcccagagacactggcgcgctcggaggggatgcgctcaaagggtcccgcccaggcgggtcggcactcggcctcccacacag

SEQ ID NO: 226153 - DNA, 739 bp, Homo sapiens
  chr20:43726577-43727316
  hyper
agaagtactcgaggcgtcgcagcaccgggtcgtcgcgcacgccttccgggctgcggcccgcggccaccgcagccacggcggccgccgcctcgcgggcctggtactcgggcaggctgtggatgcacatggcggcgatggaggcgagcaccacgctgatggagacgcagctgaagagcttgctcggcagcgagtagcccgggttctccatggtcagccagaggcggcggcgcaggcggccacagcgcgccgcgccatagcgcgccagttctcgctgcacgtcggagatctcgtcggggcacgggtccacgctgctcggcgtgtcgctgtcctcgtcccaggcgtgcggctgggtcagccgcctctccaggtagcgcgcgcggcagcacgcggcaagcgcgttctcgcctaggccccagtagtcggcctcctggccaaaggcgaagacgcacagctcgtcgagcacgtgcaggtggccagtgcggtagaagtgcagcaggctcaggaagaagcccgggtgccggtcgaagtagaattcgcgcgccgcctcgtcgtagtcgtcgcacaggcgccgcgcctgctcctccgacgccgcggcctgcaggcggcccagccgcgtgcccgggaagcgcgccagggcgcgcgcgctcagctgccgccgcacgccacccacgttcacgcgcagcgcctcgtcgcttcgccgccagcggatcccggtgtcggggcccgggaactcgctcac

SEQ ID NO: 226154 - DNA, 201 bp, Homo sapiens
  chr20:43976986-43977187
  hyper
aagaacagcagcagcgcgaacagacgggcgggggccatggcaccgcggactggagaaggcgcgcaggctgcggcgagtggccccgggcgggcgcgccacccatcttataggcggcctaccggccccgccccggcccgcccccgccccgccgcccgcaccccgcccggaattccccagtggaagcgaggcctgcggggcact

SEQ ID NO: 226155 - DNA, 180 bp, Homo sapiens
  chr20:44099011-44099191
  hyper
cgggcctcccctcccaggcacaggagcagagaagactggcgtgtgccccgagctccaggctgaccagaactgcacgcaagagtgcgtctcggacagcgaatgcgccgacaacctcaagtgctgcagcgcgggctgtgccaccttctgctctctgcccaatggtaaccccacggcggccga

SEQ ID NO: 226156 - DNA, 360 bp, Homo sapiens
  chr20:44099242-44099602
  hyper
gttccgggaacaggggcgcccccggacccggggacccccgggaaagtcaaggcggttgaaaccagatccgtcagtcctctccctcgcacggcccaggggtagacaaaggcgtcgttgaaacgcagccaagggggggtccccacccctagctgggattcgagtctctggtgcatgacgggcttccgggcacgcacagccgggacattgttccccgcggcctggggacccggggccgcagtttccttctcgaaccggccgaagcctgccctgcgggaaagcccggagcctggggcgctcacctctcctcttggagtccctccctgggggcctcccccagccctggggaaagactgggagagc

SEQ ID NO: 226157 - DNA, 73 bp, Homo sapiens
  chr20:44462767-44462840
  hyper
ctcctcctcctgcgccgggctggggtacccctcctccgggatccggtacacagcgtcgcgcgctccccccagg

SEQ ID NO: 226158 - DNA, 398 bp, Homo sapiens
  chr20:44518897-44519295
  hyper
cgagctggacaaggcgcacgctctttgtggaagcaaacacgtccaccaccgcgtagaggggctgcgcagctggcagtccccgggcgctcgggcccatgtcctcgccgttgatgatgatgtgcatgtcggccgtgccatcggggcgcgggcaaaagaggacacccaggcggctacggcgcgcggtcggaggcagcacgttcagctcatagagctggtccaagagatggctgtagagccctggccggctgcggcccaccaggcggtcccggggaatgcgaaactgctcaatgcgcagatatggttccacgaggagggttggaggtcggctgggggccgctgcctccgcctccgggcggccctcccggggcacgcggttgtggtggcgcgtgatggcgaag

SEQ ID NO: 226159 - DNA, 171 bp, Homo sapiens
  chr20:44540034-44540205
  hyper
gaactctgcatgtgcgcctgccagcagcgctaggaagagggccccgaagagggccatggcgagcgggcctgggggtggggtggggtcgcaggagttatctgagccgcttaaacccattccttggacgtccaaccataagtgggaactagcctggatcgttaccctccagat

SEQ ID NO: 226160 - DNA, 321 bp, Homo sapiens
  chr20:44540445-44540766
  hyper
cgttgccacggcaacgactgcacgcgcattcttggagggtggcttgcggtctcataggcctcgcgcccggggaggagaggaggtggccgaccagaccgtgggctcccgggtctcccggctccctcaggtcctaaatctctcccattagagattctgcctggagcccccatgttagcgttctccttcatcggctctcctccccacgccggcttcagtgcaccacgcggctcggcgagggactgggaacgggatagggacgcgccccaactcactcagcggtggagctggggggcggcgcggtcacgtgggatggcgggcagc

SEQ ID NO: 226161 - DNA, 717 bp, Homo sapiens
  chr20:44642394-44643111
  hyper
ctttgaggagcggctctccaagaagcttttcttcttctctggttagttacctactttccctcccccgcccggtcaatccccatcagtcaaggaggctcaagagaccatcgataacccacgaaacgtcttgtgcgttttagaaaaatacgccccctggcggacgcagtttagcaaacgtaggggcggctgagtttctgccccctcctctccacgccctcgcgtcgctctacccagcgcctctgcccctgggttgcagggactgcgggcacgcgggctaggaaaggcctcgccggaatctccctcctcgcgttctaggagtacgtgctccctctgcgcccccaaaccgacgtgaccctcctcccctgcagggcgccaggtgtgggtgtacacaggcgcgtcggtgctgggcccgaggcgtctggacaagctgggcctgggagccgacgtggcccaggtgaccggggccctccggagtggcagggggaagatgctgctgttcagcgggcggcgcctctggaggtgagcgccgccgcggccgccggcagggggagcccgggcgccgtcggtccgtccgctagccggctcagcacctgtctcctccgcgcctgcccgcaggttcgacgtgaaggcgcagatggtggatccccggagcgccagcgaggtggaccggatgttccccggggtgcctttggacacgcacgacgtcttccagtaccg

SEQ ID NO: 226162 - DNA, 284 bp, Homo sapiens
  chr20:44660657-44660941
  hyper
cgtcccgcccaggcagctactggaaaggcgggacccagaactagcctacctagccgccctctcccctgccctcatctcctggcccggatccggcctggagtctggctccgcgctgcgcgccgcgttacataagcggctgcgggcgcgcggccggctaggctcggcgctgcgctctcggcctgcgcggtcgccatggagaccggcgcggggccacctagttgcagggtctcgggccaggaagcccctattcctgtcccctgagcgccacccgcccccgcgaagga

SEQ ID NO: 226163 - DNA, 360 bp, Homo sapiens
  chr20:44803019-44803379
  hyper
gtccagccgccaagggagggttgggggagggcaggaaagggggtccgcgggggaaacgcgttgtcctggggccccggcgtgtgctgggcgggtgagcagccgcgccccgacggcagggcgaggggctaggaggcctgggcctcgtcgtccccgcggtggccggcgtagagcgcggccaggggccggaagcgcggaccccagctgctgagataggcgaagtcctgctcggagcccgacgagccgctgtgcagggagctgagcgaggcggccggcgagtccgcgccctcgaaggcgtaggtctggaaggcgtcgtagggcggcaccgacaggtccccgtccgccagtgccaccttgcggctg

SEQ ID NO: 226164 - DNA, 167 bp, Homo sapiens
  chr20:44803465-44803632
  hyper
cggggggctgcccgcgcccccgcccgagcccccgcccgctcccccgcccgcgctgccgcccccgtcgccgcccttgagctcgccgaagtcgtagaggctccgcagcgccgacatgtcgtaggcttcggtgtcctgctcgccgccgccttcgtcgttgtatttgatga

SEQ ID NO: 226165 - DNA, 1800 bp, Homo sapiens
  chr20:44935884-44937684
  hyper
tcggggagacctcgggggatcctggatcagccctaccctctgcagccccgcctgggacagggcccgacgttgccagagaagaggcagcggggaggcgcgagcgagacgggtccacactgtgcccacccagggctgcccggcaccccgcgcgcccacgcagtccactcttcacagtaaacgccgcggcccccgagggttagccctaagtggcgctctctttggacgttaggctgtcgggggccccgtccttcttccccagcggggacggtgtctccggagtcgggtcctaaggaagagagcagcgctggctctcgctcaccgccagcccgcccgacggccatagggcagggggggtcgcgccggtggggccggcaggggtccctgtgggccgcctccccggctcagaggggaccagaaccgtgcgtgtcgccgcggctggagtcagcctccgggtgtccccggacgcggcacgacctcgcacacacacaccgcgcgcacacgctcgcgccgtgcggtattttcccggccccggaccccgcctctgggaggggccggggagccgagccccgctagcagggttgggggaccgggaacgcctgggtcccagccctcgcgtcagggctgtgcgccaccttcccagccccttttggcgcgccggctcggcccctggcgctgccacccctcggcccgcgggggtcccggaggctcccgggcgcgcggcggacgaggttgtggggacgggtgggagctgcgggcttcgggccgagaggcggctcggctccgcgccggggaaagtttggacgtgggaaactccctccccgccctcccggccgagaggagggggcgcgcagggccgggcgcaggcaccccggctcctcctgcggctggaggctcgccccccgcgccgcctgcccggccgctcccgccggccagggggctccctccctgccgggcagcctcccctcggcggcgatccggccgctcctcccgcggcaccccgcgctcttacctcggggagcggcccggggctccccctagtcctgccgcctcgggacgctgcgtggggcgggagccccggcgcgggcagcgggcgagtccggagccccgcggccgcccgcaggagccggagggagagcgggagcgagagggggagccgcggcggcgtgtgcgcgcgtgtgtgtgagcgagagagcgagagagcgagagagcgagggagtgagcgagcgagcgggagcgagggagtgtgcgtgtctgactggggggaagtgtgcaagggacggatcccttccttcctcccgcagcctctggtggagactcggagaatgcagggcccgccgggcaggagccgcgcagcgccaagccgcaggcggccgccggcccggacccccgcagccggggaaccccagcccccgccccccggatcgcgcccctcctacaccaggaggggacagcctttccctctctcgggcggcccagtcccaggaaaccccccaggggacagtgcccctccctcctccaaccccagatccgcgcgaagggagcgcccccaggagggggaccatctacctcctcgcctggcagctccccaggtggccgcagtttgagaccagagcctatttccccacctgattttactgcgaatagggcttcccatttccgccccctgactactgcgggaggccgccttcagaggagcaggggcgcaggccagggtaggagcaggcttctcgaacagtggccgccccggcttgctgcccagaaaggcaccttgcacagaccagatctgccagttcagaaaca

SEQ ID NO: 226166 - DNA, 900 bp, Homo sapiens
  chr20:45523152-45524052
  hyper
gtcatgcctgggttgcagggaggatgtgctgccccggggagggaggaggtgcggggtgtcggtgggtggggaggaggctgggccctggcctccaggaccggcgagagtgagcgcgctctgctcggctgcaggctcaggaagcggcgcggcggcacgtgctgggccagagccccgcgccctgcgtccagccgccgggtgtgtgcgcccgcgtagcccagcgtcgcgcctcggcgcccccacgcgcccacgcagcggcgcggggacccgggcgggggcagagggagggcccggcccagggaggagaaggggccggtcctcccggcgcaggcagcagccgcggcagcccaggaggcggaggcagcggcaacggcagagacagcaacgtgcccgccgcagtcagcccggcctcgtcggacccgcaccggcccgcccgcccgcccgcaccgcgtcggggcgccctctccactgcgcgcggtgagtaccgccagcggcgcccaccccaggccgcccgccgggattcgccgggcggggggagttgttcaccgggaccccctcgccctgcgcctctttctggcactcgccaagcggggcctccgcagctgtcgggacgttctggggcgcacgggcctcccagggccaggaaggcacaagggcagaggggacagcagcagagcccccctctggaaaggctctcccaggctcggggccccagtttccccatgcgctttggggcaacgaccctgaagtttgctctcccgcgcgcgggacaagtgcatggcgcgcaggcggtgtagacgcggctgggtccttggcgttttgttcgattatggtcccggcggttcgcgataaggggcgctcccccagtccgcaaactcaagccctcaggtagtgtttatggga

SEQ ID NO: 226167 - DNA, 180 bp, Homo sapiens
  chr20:45524108-45524288
  hyper
tgagactttgccttctagctattgatatatttcttttcaaaagtccgtttgcgctcggcccgctctggttcaggtctggggctttgaaccggggcagggaatcctggcgcctgctgcgggtagagttgaaacttagaaaagtttacatccgaagggtgtttagaaggcggcaaggatttc

SEQ ID NO: 226168 - DNA, 1469 bp, Homo sapiens
  chr20:47443692-47445161
  hyper
ccgcccctcctctgagcttcaggttttatcctactccatcaacgcgcagggacgttgggctctggggctcctacggtatgtcctagatgagtggtgcaccgggcgcgtagttattcctgggaaaaagacgcaggagcgccagctcccggcgccgccggggtccccaagcccctgcatcgcggatgtaactaattttaaaactatttgaaaggcggggacggggaagaaaagacaaaagggcagcgcgcgccgcggggaagtggagtgcgggagagccccggtcggagcaggaccgtgcgccggccagggagggaggcgacgcgacagctctggaggagctcggatcccccccgctttccgcgcgccctgcggggcgcccccgaggcaattctccacccacggggaccacggccacaggttgtggggaccgcagcggggcgagcggctggagggaaagctgtccccaagctcccgagcgacactcaccgactgcaagaagcgcaaggtgcccacgtagtccctctcggtgcccaagatctcgttgaggacgcagaggcggaggcgcagctggcgctcggactcccgggcggccgcgcacgggccggggccggagctgggcgccgcggcgccaggggcccgggggtccgggtgggcgcagtccccggccccgtcgccgccgggctcgctgccgctgggcgcctccattctagcgcggccgcgcggcgccggctccttccgtcgcgccgagcggcaactcaggcgtccaggcgccccatcccggacggggcgcgccggcgggccgggctcagcggcgggccgggctcccggcgcggcgggcgggactgggggccgggcggctgggccgggggcggaggcagcgcgcgggggccgggcgaggggcgggagggggcggccctcggggctcccagacggctggccccccgcccccgcgccagggaccgtctgccaagtgccacgccgcgctcggccgcagaggcgctctgcgcgtgcacggggcccctggggacgcggcgcggcgctcggcgcctccgtcggaagctcgggggtcgggcgggagcctccggaagggccccgcggagccgggagtccgaggccgcgcgcacgccgaaccgagcgtaccaactccgcgcccggacgcgtggcgcccccccaacccgcagtcaccgcgggctacgccactcccacccggcacacgcgacacccgccgcgcgcaggctcctgcttgcaggtccggccgctgctcgggccaagtaaacaccgggctgggaaagctcgctgcggagccgctcgggggcaagccagccccgccacgcgcgcctccgcggccccgggaagtcaggggcgaccgctgcctgggcagtgacggcccctctctgggcagtgacggcccctcccgggaacgccgggccctcgcggtgccctcggtgctaccacgaccttgggaagga

SEQ ID NO: 226169 - DNA, 1010 bp, Homo sapiens
  chr20:47934765-47935775
  hyper
aggtgggtccgaggaggggtcgggtctgggagcctccgcccccaactcaaggcaggctacacaagatctgtctccgttggcgtcccggtacctagcttgagcccgaccatgggcatgcgtggcgtggcgcgaatcctgtccctgtcgctcgtcctggccgcggtggccacgggggcctgggagcgggggccgctgggcgtgctcttgccctggcagggctccgccgcgctgggccgctgctgtcctggccgtgacccgatgtttgtcgcccgcgggcccccgcgctgcttctgcgaccaagcgtgcggcgcggcgcggcgcgggactgctgcgcagactatacgcgggtctgcccaggtgcacccggggaaaggcaaggcactagcggaacgctcggagcggaggggagctggggcgggggatgagcggaggaagggagcccagcacctagggggctctgggcttggaggggtcacacgagccgagggcggggcgcggcgcttggggactggaagggtgcgccgcggggcagacgggacgtgcagggggtcgcgcgggcaaggagggacgcagacactcaggacctaaaggggaagcactggctgtggagctgcgagccgagaaagacgcgcaggttatgaacctgggtgcgttcatctcgggggacctgaaggagagggactcgtggagagttgaggggtgtttcggaggaggggcgcaaggactgctcacaggacttgaagggcggcaggaaggtggaggattcggcccaggtgcgggacgcaggcggtggaagggaaatgagcacaagaggcgcaggcaggaaggagagcgcctggtgcgagagaggaaggagcgcacccagtaagcggtgtcgggggggtcgtgaagcttggagggcctcgaggggagggaggcgcttgggttgaggtagggcgccagatttcgcaaatcaaaatacagcacacccagttaaactcgaatttcagataaacaaatctttctagaga

SEQ ID NO: 226170 - DNA, 104 bp, Homo sapiens
  chr20:47935858-47935962
  hyper
gtcctgtattttatctgagagccccagctggggacgggcgcggggccaagagagctgcgagggaggaggggttgcaagcttctttcgggcggaggggtcacaag

SEQ ID NO: 226171 - DNA, 747 bp, Homo sapiens
  chr20:48100303-48101050
  hyper
cagaatggggattgcgcgtcccctcaggcctcagcccttgcctgcctcccaccccgctcccctccagcctggagctgcggagcccgagcagaccaacaggccgagctgcggcaggcaaaccccctgtccgtgtccccatgcacccccacggaaggccgtacgccccaacactcacccccagggcggccgcctcctggggccagggaccgcgcatcgtcccggccgcccgggcgcccccgcccgtgggcagcggcggtcccggggccgggctgagccgggcctaccccggccgggcaggcaactcgcccgggctgcaggcgccgcggggccggggcgcgctctccgaggcggggggcgccggcgggcgccgggggcgcgggggcaggaccgcggccgcgcggcacctcctccacctcctcctcctcctgctcccgcggcggcggcggcggcggctgcctgggcgagatcaacaagtcggggctgagcttcggctccgcgctcgctgctattctgtcccgcacttcggagcgcccggagccgggcaccaaggcaggacggcgccacctgcgggtcggaagcgagcgcggcttaactcctgcctgcccggcccagcctgccggggaggccgggggcgggctccgggatcgggccaaggagacgcgcgtggccgtgcatccctctccacccaggccacctgcacagctggcctcgcgatcccgccttccttcgtcccgtcaacaacgtgtg

SEQ ID NO: 226172 - DNA, 97 bp, Homo sapiens
  chr20:48194980-48195077
  hyper
aaaaaaaatctcatctcaaacacacaaacatttcactgctttaaaaaaaaaaaaatagaaatctttggtggatgttcagccacgctcatggttcaca

SEQ ID NO: 226173 - DNA, 943 bp, Homo sapiens
  chr20:48598696-48599639
  hyper
gacccgcctcttaacggtcgccgcgtcccgtctctcccccaccaaagcacacttccctttgcattgtaattatctgtttacttcgtctgtctccctcactggaccagaagctacccttcgggagaggctctgagtgttctgtccggggctgtgccctggccccaggtacagtgccccacacgtgctgggcgctccgtaaacactggataagggaaggaacgggtgctcttggctagctgggccaggctgctttgcaaaaaggccgtggcatttcaagccgccgagagccacgtgcggtgtccctttcctcgcttcctccccagtgatgtgcgtttccctcgtcaatgccacgctctccaggcgccagccgggcggaggaaatttccgccccctcccaagcccgaggcgggggcgggcgtcggaaggtcaggtgtcccggccggcgcgcagcgccagggggcgtcagaagcgctcagaccaccgggcgctgagccggtgggcgcgcggcgtcctgccggggtcccacctcgcagaggcctcgcttcgctcgacgtcccgccccggacagccccagcaccggggacgacccgcgctgcgccagcgaaccccgcctcggaggagtccccgcccgggctctcaccgccacgcggcgcgagcccggccagcagccggcgcacctgctcggggagtggccttcggcggagacgagcctccgattggcgcggaggtgacaaaggggcgtggcagataaggccccgcccctcccaccccccaccacccccccggagtacttaagggagttggcggcgctgctgcattcattgcgccgcggcacggcctagcgagtggttcttctgcgctactgctgcgcgaatcggcgaccccagtgcctcgaccactatgccgcgctctttcctcgtcaggaagccctccgaccccaatc

SEQ ID NO: 226174 - DNA, 146 bp, Homo sapiens
  chr20:48771157-48771303
  hyper
tttgtttacagcagggcccccgtgccaggatcggggctggaacatggtagaagctcaataaatgcttgatgaatgaattaaggctcagccagatgcgtctaatacttcggcagataaatgacagcagcagggatttaccccaggtc

SEQ ID NO: 226175 - DNA, 104 bp, Homo sapiens
  chr20:49225384-49225488
  hyper
cagctcccgtcccccaaagacctggcggggagccctgaggattgaccccagagagtggccgtacctcatagtggtctccgggacagaggcgtgcgtagcccacc

SEQ ID NO: 226176 - DNA, 281 bp, Homo sapiens
  chr20:49226018-49226299
  hyper
tccagcccccactggcccagctctcgatgtccccactgcccggcccagctcttgctgcccctgctgcccagcccagcttggcccggcccacctcggcgcactcgtgcaggctgcggcccagctcctgcaggctctctcgggctgcgcggctcggggggcaccgggcgaaggcccgctgcatgctggaggcgccgtcgcgcaggcggcactggatgcagtagtcctcgtacagctcatccacctgtggtgggcacacgggctggtggcgctgcccacgcgga

SEQ ID NO: 226177 - DNA, 630 bp, Homo sapiens
  chr20:49639051-49639681
  hyper
actctccttcctcccaggatcgggggagaaacctcggcccacagccgggatgcgcccccgccggggtcaccgcggcggcgaacgtcccggacttcgcatcccggtgaccccttgggatgaaccgaagccggacccgcaccttggccgtaacaagcgcgctccacgccgccacgcaccagcggtgactcccgagtcctctgtcgccctggcctccccgcaggcgggtttcgaggcccccgcagggagttcagggccacggccacgtgcagccgcccccgagcccgagtttgcaggctcggggtccggttcgcgctttggtggcgcccggcgaggctgcagcgcgcaaagttcccacctcaagttcccgtcgcggcgtccccgcctcggagttggcccggccgcggcttccgttccccccggctgcccacgggtccggggcgaggacgcgagaggggcctggaagtcgcccggggagcccgctctgcctcccggagccgccgccaaacttcggtcccggggcccggctcagctcccgccctcggagccacggccgccccgtctctgcctcccggtccccgccgggctccgagtgcgccgggagcgcggcgcagcagccgccgagggagggag

SEQ ID NO: 226178 - DNA, 465 bp, Homo sapiens
  chr20:49639760-49640225
  hyper
ggcctcgcctcgcttcgggacagtggcagcggcgccaccgtcacggggcgtccaggcgcccaatcgggaccccgcaccttggatccgggggccctggcgcgcctgctggattgcgctcctcgcggccagttcctgagcccgcgtccgggactgctcgcgctacgccctccctcccgttgccttcttccccgtctgctctcccaggagcgaccaccctgcggccccttcgcctgcacgcgacagccttcaaggtccccgcgctccgctgccctggagcttcacgcaccaggcggcgcggcagcctcctagggtcgcgcgccctgtcagctttccccgcggtgcaagtgctccggtggtcccgggtccgcgcccctagcagcaccgccccagggtctacatgtgctagatattaaaaccccactctccgctgccccggggccgcgctccacgcgcttacacatcctg

SEQ ID NO: 226179 - DNA, 360 bp, Homo sapiens
  chr20:50383670-50384030
  hyper
ccacccgccgcgtctcctgttccgagcaactgacgctgcaataagcggccgccaccgggaaatgcccagagaggaccagacgcccgaggaagggcggagcagagcggccgcaggccccgcccaacaccgcgctcagcctcccgcgggctccagcctcacctgcgcggcctgtggagctgcacatctccaggccccgccccccagaactctgattggcgggtctaggcgggggccgggaaatctgcatttgcaccagcgcccacccccgtccttcccacccccgcccctcacgcccaggtaagtctatggcaggcgatacgagagccccgcaaacctcaacgcgtcacgctgccatcctcc

SEQ ID NO: 226180 - DNA, 240 bp, Homo sapiens
  chr20:50384882-50385122
  hyper
ggctgcagcgggatgttgtccgtcatgtcggcggcgccgcccgccttggccgccgcgccccccgcgccgcctgggccgccgcccggtccggcctccgcgccgccgcccgccggcgccgcgccgccccgggggaggaggcggcggcagcgggcgggccgggcccgcagcgagggggcgagctcgcgagcgccgggccacgcgcggagcgcccgcgcggcccgaccgacggacacgggcgca

SEQ ID NO: 226181 - DNA, 180 bp, Homo sapiens
  chr20:51589799-51589979
  hyper
ggcgccagaagtgggactggagcgaagtagaggatgccgaggagaaaacagcaggcacccaagcgggcggcaggtaagagaaacggctccgcttcggggctgccctgtgcgccgagctcctcgcccgccctccttgcccctgggtgcccgggggcaccacccacttaagctttcggggga

SEQ ID NO: 226182 - DNA, 157 bp, Homo sapiens
  chr20:52209206-52209363
  hyper
cgggaccgcccaggcagccccaaatccagcctcccgggcccccagcagcgccctccgcctctccaccatcccgtccggctcgcagtcggggccaaatcgagagacaagagggctgtgcctgaaactgagcggtttcaccactcggcacctcctggca

SEQ ID NO: 226183 - DNA, 197 bp, Homo sapiens
  chr20:54934126-54934323
  hyper
cacctggctcctgggcgccaccgccccctgcgccccgccgcccctggccctggccctgctcccgcccaggctagacgcccggctgctccgcacggcgcgcggggactgccgcggccaccaggtaagcaccccaccccgaccctgatcccgggcggtgtccaggtccccagacgtccgcagggccgcgccggggtccg

SEQ ID NO: 226184 - DNA, 480 bp, Homo sapiens
  chr20:55206373-55206853
  hyper
tcagccgccaccctactttccccctccctaccagcagctggcctactcccagtcggccgacccctactcgcatctgggggaagcgtacgccgccgccatcaaccccctgcaccagccggcgcccacaggcagccagcagcaggcctggcccggccgccagagccaggagggagcggggctgccctcgcaccacgggcgcccggccggcctactgccccacctctccgggctggaggcgggcgcggtgagcgcccgcagggatgcctaccgccgctccgacctgctgctgccccacgcacacgccctggatgccgcgggcctggccgagaacctggggctccacgacatgcctcaccagatggacgaggtgcaggtgagcggcgctgcggctcctgaccggacctgttcaccctacggccttctgcccccaccccgcactcctctaggctcccccgaacttaagggaattttgtcctctct

SEQ ID NO: 226185 - DNA, 145 bp, Homo sapiens; identical to SEQ ID NO: 205870
  chr20:55966824-55966969
  hyper

SEQ ID NO: 226186 - DNA, 316 bp, Homo sapiens
  chr20:56784797-56785113
  hyper
gaaaataatatccacgtggttacatatttttcaaaacagtgtctactatccaaagatcaacagagcacaaaagtaccaagagtggaaaatctctggtgtataacggcctaacgggaaaggagaaaattggggaatgcaacaggatctgcaattcgggtgggggcggatggacgcggatggacggcccgcctggatccgcgcgaggcgccactcggggagttgatctgcggtctcgcagtgacacctacaggccgccgtggccgcgcacctgcggcaactgcgttcgacagcgccacctggcgggagccgacgccgg

SEQ ID NO: 226187 - DNA, 54 bp, Homo sapiens
  chr20:56785191-56785245
  hyper
gggccgctggggctggggtgcagcccacgaggaagtgtccgtggggtgtgcgta

SEQ ID NO: 226188 - DNA, 224 bp, Homo sapiens
  chr20:56811736-56811960
  hyper
acaaaggtcaacagatcaagcgaacactctgagattgcacgaccgccccggcgtttctccgactgcaaaccgaaccggatgctcctgctcgcggctcttggcagcacgaggtggtttcactgcagcgaggtccgcttggagagaactgggagcgcgtgctccttactccgaaagacaaaagcatgcaggagacggctggctgcgaaaacccactaccaaagctt

SEQ ID NO: 226189 - DNA, 922 bp, Homo sapiens
  chr20:57224671-57225593
  hyper
agcaagtccctgcagcctccagcccggcccgcgcggcgacccagtcccctgtcgcccgaatcttccaccgctgcgaagcgtccccgggcgagcgccctgctctccgcgctgcgcggaagccagagccggtcctcacagtgaactcgcccagccctgctcgcggctctctcgattttatgtgggtttcgttggatgcattttgttatttgcctcaatggatgtttcacattaatttttagttgcacaacgaacgcgcgggaacattctccgtgagagaaaaagcacgggtggggggcggttaccggtgcttcccccggtcgcctgggggtcccgcacgcgccccgcgggtgccgctgtctggctggggtccctgggtgagccgcgggcaccggcttcgcgtctccccgggcgcgactccgctttgcaagcgctcagcacacgggaaaccctcggaaaacacacacgtgtgtaaagtttgttccacgcagaaacaaaggacgcgtgggggccgcttctggggcctcggtcctttgttggaaccccgcaccgcagcccggcccgcagcctcgccccgcaaggggaagccggccctgcacaggcccggggcccggaaggcgccgccgcacagctctgcgcccccgacccgctccggccgcgcgctgggccaggcccttggcctcaagcctcccgggcggctccgggccggacccgggtctccgtcgcgggacgccagcctgtttgtgggtgccgtgctcgggcccgggcggcccctgcccgacgcggccccacggagcccctgcacgaaccccgccgacctggcccggggcggcaagtcgaggtgcttagggcgccctgggcccggccaaccgtggaaaacccggcccggggcacgggggggcgcgggggtcgcagggccagggcc

SEQ ID NO: 226190 - DNA, 208 bp, Homo sapiens
  chr20:57414593-57414801
  hyper
cccgccaggccccccgcccatcgcttcgcccaaatcctttcaaacaaggttccctcctgccacctgccggcccactagggtctgcgccacaggctcggcgccaccacgcagctcgcggggaggtggcccccacctccttactgcacatgcccggcagaagtccgggcgcgcaacttcgcagaacctcactgcccgtccctcctcgcct

SEQ ID NO: 226191 - DNA, 158 bp, Homo sapiens; identical to SEQ ID NO: 205875
  chr20:57415180-57415338
  hyper

SEQ ID NO: 226192 - DNA, 302 bp, Homo sapiens; identical to SEQ ID NO: 205876
  chr20:57415539-57415841
  hyper

SEQ ID NO: 226193 - DNA, 2076 bp, Homo sapiens; identical to SEQ ID NO: 205877
  chr20:57428311-57430387
  hyper

SEQ ID NO: 226194 - DNA, 33 bp, Homo sapiens; identical to SEQ ID NO: 205879
  chr20:57470653-57470686
  hyper

SEQ ID NO: 226195 - DNA, 251 bp, Homo sapiens; identical to SEQ ID NO: 205880
  chr20:57478608-57478859
  hyper

SEQ ID NO: 226196 - DNA, 437 bp, Homo sapiens
  chr20:57484405-57484842
  hyper
acctgcttcgctgccgtgtcctgacttctggaatctttgagaccaagttccaggtggacaaagtcaacttccagtaagccaactgttacctttttatataacagagatcatggtttcttgacattcaccccagtccctctggaataaccagctgtcctcctccccaccagcatgtttgacgtgggtggccagcgcgatgaacgccgcaagtggatccagtgcttcaacggtaggatgctgtgggcttggctgttcgtaaagaacgctttgcttctgtgttgttagggatcagggtcgctgctcacgctcttggctttgctctctttggttaagatgtgactgccatcatcttcgtggtggccagcagcagctacaacatggtcatccgggaggacaaccagaccaaccgcctgcaggaggctctgaacctcttcaag

SEQ ID NO: 226197 - DNA, 204 bp, Homo sapiens; identical to SEQ ID NO: 205882
  chr20:57485751-57485955
  hyper

SEQ ID NO: 226198 - DNA, 57 bp, Homo sapiens; identical to SEQ ID NO: 205883
  chr20:57797335-57797392
  hyper

SEQ ID NO: 226199 - DNA, 268 bp, Homo sapiens
  chr20:57797935-57798203
  hyper
gagcaggctgaagccgaaggaagggagagcagggttttgatcctagttccttggcttctgcaaatcggctgggaccccccgctgagcaagcgactgtcgtcacggcccccgcaccagacgaccccagcctgtggatgatgtttcactgccctcacataaacgccacccagaaatgcaagagtaagaatgttcacgaagaggggaggcaggagccccagctgataacaggaggaggcaggaagggggccttggaggaggtcagaggggg

SEQ ID NO: 226200 - DNA, 105 bp, Homo sapiens
  chr20:57875351-57875456
  hyper
tgagtgtgagcgcgcgtgtgcgtgtgtgcgcgcgctctcgtggccttccggcagctggcagctgtcccggcccccaccccaccctaccccaccccacccagccgc

SEQ ID NO: 226201 - DNA, 360 bp, Homo sapiens
  chr20:57875574-57875934
  hyper
cggcgaggcagttccagcccctctggggggcggggaggcgacgggggtggtgcagaagccagaaaagcccgagccacagccggccagctccgcgcagggatgggcagcgcgctctgaaagtttatgaccgccgcagccaactcctggccggagctggagacgcagcgagcgatcggccggcctcgaacccccacagctggagggcgaggccagctgtacccggccccagtgccctttcgcggccacaagcggccgtcctcctggtccggtgctccggcgcctgatctaggttcatggagccggggctgtggctccttttcgggctcacagtgacctccgccgcaggtaagcgcacggggc

SEQ ID NO: 226202 - DNA, 314 bp, Homo sapiens
  chr20:57978781-57979095
  hyper
aggaacctgagtggggggcacggggcccgaggaagaaggggccagcgggctgttccccacgctgcacccccactctggcgcagcgaagtctgcagatctctgggccccggcgctgccgaagcctcccccacgcgccgcgctcactcgctgcacaacagcgccaccacgaggccgcgggcggaactgccggcagcacagcggtcgcaccccccgggccccccgccggctgtgcggatcccgaatccctgcttggctcggagctgccaggtctaagccgaccctcagagacgcacgcccctgacccactgggcagc

SEQ ID NO: 226203 - DNA, 968 bp, Homo sapiens
  chr20:58179832-58180800
  hyper
cgcacgccgggatgcgcctggctgcagccggcgaggctattgtctccccgccctgaagccagccccggcgtctttctccagctcgtttcctttcccggccttttttttttttttttttttttaattttcttttttaaaaagacgccccctccagccccctcgccggtgaccttggccgcctcggatgctctgattccacgcggctcgctctaacttgcccccgcgccggccgggcccatggccgcgtcggaggacgggagcggctgcctcgtgtcgcggggccgctcgcagagtgaccccagcgtcctcaccgactcctcggccacctcctccgcggacgccggggagaacccaggtaacgggctgggcgggggcggcgggcgggtcggggaggcccgaggcaggtggcgctgagagcaggaccccgcgaggctccgcgccccgcctgcattcggggagccgcggcaggaacccgcgctcggccccgcggttcctatccccagtctcgcagggctggggcgcctcggagccctttgtccataaaagagctgatttcctgggtagagccgggcgctgcagcttcccctcctctccggctggtgagctctgccgtcccctcgaaggaggcttcctttcctcgggtgctgaccggctgggggaagagaggcagacccgtggccgcctccgcccagcgccggttctgggccattccctccctccccactgccgggccccagctccggacgtccccgcttgggcatctgctcctggaaggcagcgctccgcagctgaggccaccgcgctgagggcttccaccaggcgcctgactccagcggggcctggcgcacctgggcgcgctagcccccggacaggtgtgctgggcagagccgccggcagggagacgaagggcgtgcgccaggacagagcccggtttcgtgacagcgtgtggactccgtccactcttccac

SEQ ID NO: 226204 - DNA, 307 bp, Homo sapiens
  chr20:58514222-58514529
  hyper
aagtgcacgcgggagccgagctccagcaggaagggcggtactggaaagccgaaggtgaaaacgtcctccgtgccctcggggcctgcgggcccgcgccaccgcgccaccgcctcgtgggtactgcgccagcccgagaaagtgtagcgcacagccacctgcttctcgaaggccacgttgcacacgcgcaccgtaccgctgatgccaaggtccgagcaagtgacacgctccaggcacacgagctgccgctgcaggcgctcgccaaagtcggcggcctcgacgggcggcgggaaatcgggcaccaggcaat

SEQ ID NO: 226205 - DNA, 329 bp, Homo sapiens
  chr20:58514801-58515130
  hyper
gggtcgcagcccgacggcgctggcgttggcggcggcgcgcggcccgggctcccagggggcctacaggcccgcggctccagggccacgccgccgtccaggtccgacaggcagctgaggctccgggggccgagcttccgggatcccagggcgctaggcaggaccgcggagctcgggcctctggacatggccccgccggccgtcggaagatgaggcagggatgagagacgacctcccgaccccgcgacagctccctccgtgctcagaagccgcagagagtccaccgtatctgcaacctgcgggggacctctcgggcccggtgcgccctaccc

SEQ ID NO: 226206 - DNA, 105 bp, Homo sapiens
  chr20:58515465-58515570
  hyper
gagctgcgcgcctccgcctccagctcccctgccgcagcgcgccgcagccgggcgtccccgcgcgggcgccggagaggaaggaaggctggcagcctcgtcacgtgt

SEQ ID NO: 226207 - DNA, 158 bp, Homo sapiens
  chr20:59804278-59804436
  hyper
ggggaaggacgggacgcatcactgctgatgccccttctgaaaccccctgcaggcgcggctgcacctcaagcccggcggggcgaggacgctgagctgcagacagcgccacctagcgtccgagagccacggcgcaccggctgtgcgcatctctgggcgag

SEQ ID NO: 226208 - DNA, 1731 bp, Homo sapiens
  chr20:59826957-59828688
  hyper
atggaagtgcacactcccaccgcgggcccgggcgggaagtcggactaagaccgcggcgggaccgccccatccagaaagggtgccccgggtgtgggggcggaaaccccagcgctgtcttcagtctccacacccgcgcctttttcccctggaaaacgagcgtccttggcctcttcggccgcaaccgggcggctccagacgtccaggagggcagaggctgggctggtgcggcgcggggggcgcgggcgcgggctctgcgcctttaaggcccgcgtcggcagagcgagcgcaggggccgggcggcggggcggggcctcggcggggcggccgcggcttcacctgcagctccgagcgcgcggaacagaggcgcgggcggctgcgaggccggcggacgcaccggcccgagggaacgcgccgccggccggacttggcctggctcccggagccggggcggcgagcgcggcgggcgcagcggggctggaggctccgggcaggcgcgggggagcggcggcggcggcggcgatcggagcggcggcggtggtctcggcggcggcggcggcggcggcggcagggagcgggctcccggtgccgggcaccgggcgggcggcggggaagatgaccgcgggcgccggcgtgctccttctgctgctctcgctctccggcgcgctccgggtaagttgccgcctcccgcccccgccgttcggaagccccgggcagcgggaggtcgtccccggatcccgcggggcgctcacacacccggcggggctctcccgggctcccccgccgcgctccccgctgcatccagcccggcgcccgcgctcggcgaagctgcctgcggtcggcaggagcgggaagccgcctgggcagcggggagcggcggagcagggtgggagtggggctcggtggaggacccggggagctccgcctgcaccggacccgccgagcctccctcgaacgcccaaagcccgtagccgctacccggagctcggcttgcctgcatggggcaggcttccactggcggagccggcgcgccctccatcgcccgggagccgcgcgccgcgggagttgccgagcccagccccggccgtggctgaaggcgtggggcgcccggcggctgcgggccagggatccgcgagtgcggggcgcctgcccgacctctcctgcccaaggcctgggggtccgtctagcggcgccgctcagttctgtgggtgccggcaggacccgcgctgcgggtgggcggcggggtaggactgcggggcactctcacccccgagccctcggcggggctggagcctgcgtgtccggcggggccccgggggctgggagctgggccgggcttgggccgggaagccggacgccgggcgggcgcggcgcgggagggcgccccgggagggcgagcgggtctcccgctgcctctgcagagccccgcgggccggattgccagctttgctctgcgcctggcgaggtgcgcggcccgcgggggcagagagcgcggcggctccgggggcgcccctgggcggaggcggaggggcggcgggagttgcaggaaccccctctcgtggccgatcggcctcgctgccttctcccgggcagcgctgttgtaacctcggaaataaacaagtgccagcggcgggaggcccgctccgaggccgcggggcgctgggggacgcgctgggcacacgcttcgggcgggcggaaactttcctgggcgagttgagcctcccaccgggctgc

SEQ ID NO: 226209 - DNA, 240 bp, Homo sapiens
  chr20:60552103-60552343
  hyper
cacacgacaccgcccagcggggcacacgccacacacacgacaccgcccagcggggcacgcgccacacacacgacaccgcccagcggggcacgcgccacacacacgacaccgcccagcggggcacgagccacacacacgacaccgcccagcggggcgcgcgccacacacacacaacaccgcccagcggggcgcgcaccacacacacacgacaccgcccagcggggcacgtgccacacaact

SEQ ID NO: 226210 - DNA, 243 bp, Homo sapiens; identical to SEQ ID NO: 205894
  chr20:60941671-60941914
  hyper

SEQ ID NO: 226211 - DNA, 180 bp, Homo sapiens
  chr20:61447619-61447799
  hyper
tggcgacccctgagcttctgggaaatggacatggccagcaccgccttcaggttcctgcccagggcacggttccttcaggccggggatcccggggaggggttcttcccctcggccagggtcatcgttttgcgatctctcctgggagtctgggtttggagtctggtcttagccggtagcaac

SEQ ID NO: 226212 - DNA, 211 bp, Homo sapiens
  chr20:61447928-61448139
  hyper
cgggccctggtaccggggattcaccctccccggggtgttcctgggccttgggtcgcctgggtccgctccggcgcctggggaggggtctgcggcttcggaaactcgcgggtctcccctgcccctccctgaaggcggcccttcagcgccgcgcgcttccgcccccacactcgggttgaggagcaaggagagaaaagagcgtctttctctcttg

SEQ ID NO: 226213 - DNA, 207 bp, Homo sapiens
  chr20:61492810-61493017
  hyper
ccgtcagccgccgcctccatgtgcgagcagaggatgtgctgcagctgcgtgtactccacctccgtcatctccaccaggctcaggtcggtggtcgtgaagctcagccccggctcgcccagcgccgcgtccccgccgcccgcgccctcgacggccgcctcgccgcctgccgcgcctgcctccggcggcggctcccgcggtccggggccc

SEQ ID NO: 226214 - DNA, 449 bp, Homo sapiens
  chr20:61583882-61584331
  hyper
gagccagggcgcgtcggacagtcagggcgacccagccagggcgaccgttggccccgctcctatggggcagcagggaccgacgtcagcagggtggggcgggcacccgagtggtatgccccgccctgccccgcctgcccgccctggtggccgtctgggggcgacaagtcctgagagaaccagacggaagcgcgctgggactgacacgtggacttgggcggtgctgcccgggtgggtcagcctgggctgggaggcagccccgggacacagctgtgcccacgccgtctgagcaccccaagcccgatgcagccacccccagacgaggcccgcagggacatggccggggacacccagtggtccaggtgtggcgggggtgaggggagggggggtgggagcggtggagatggggccgtggggagggagctgagatactgccacgtgggacgatgcta

SEQ ID NO: 226215 - DNA, 111 bp, Homo sapiens
  chr20:61636765-61636876
  hyper
ccggggtcttcctgcgcccgcggtccagctcctctgcagacggccatcgtgggctctccgcagggctgcggagtctcggagtcaccgaggtgggaggtgccggccacgcgc

SEQ ID NO: 226216 - DNA, 1724 bp, Homo sapiens
  chr20:61637313-61639037
  hyper
gtccctccaggcctttcctgtccgggcagagagacagtcacaggggcgatcggaggacgcgtgcgggagggccgggggcccgcgcggtcacggcttctcgtgacagtgtttgcaaagcgcggagggcgtcccggagaaggcggcgcacttgtcagggcagggccccagggcggcgcctgcggagaaggggcacacagtggcctggccgaagggcgtcaagggcgcggcgtttacgggcgcggccaggccctggccctggttgaggaaggccaccaggcgccgcatctcgtccagggcctgcgcctgcatgaggatatagttcttggcgagcagcagcgtggcgatcttggagagcttgcgcaccgacgggctgtgcgcgtaggggatgacggctcgcagcccgtccagcgcgtcgtttaggtcgtgcatgcgccgccgctcgcgcgcgttgatgctgagccgcagagaccgctgctctcgcggccgccgccgcccgtccgccgcgctccctggcccgcgccgccgccgccgctgctcgaaggcgtcgtcctcgtccccgctctgttcgccgctgctctccgccgcctgagctggggcgcgaggtgcaggcgccgcggggaggtcgccgcccgggcccggagtgccgtagccgcgggccgcttcgggttctcgcgccgccccgtaggcgagacccgcagccgccgccgcgtagccgtggcttagtgccaggtacgcgtcccccgacagcgacttgagctcggccatggccgcgccgcctgggctcgggggctcgccgggtgggcggatgctcatgtgggtgagcagcccccgaggccggcccgagcccgccgctgccgctgccgctgcgatgaggctcccggctctgcgcgtcggtctggcttgcctgcgggtcccagagcctcggcgcccgctgcctcctccgcctcttccttctctcccacctcctctccctcccagccgcgacgcgcagggggcgggctctacctccccctcgcccccgcttcggttttaagccgcggaggcgcccggtgggacctcgctgctgtccaatcaggggggaccgggtgagctcctcttcctggagccgggctccaccagcgccgcaggctcacaggccgggggtgggggctctggaccgaggggcggcgcggggcggcgcggggcggcgcgcgcggtcctggagcgctagtacttgcttctcgactccccggccgccgcctccggccgccccggggattccgccaccaaacgcacgcgtcccaggtgggcacccgcctcggtccgtctttgagtctgaccctagcgcaagagtccctggcgacacgcaggggccagagcgggggggcgcgccgcaatagcagcagcgccagcgccaacaccctgtcccgctgaggggccgcttcgggtcggggtcagggtcgtgggcgctctggtgcagccgcggcgcagcgtgtacccggagcccgcacactccctgctcggggcgccctgtggccaggcttgaggggcagagtgagagggagtttctagaacctgttgaaaaacgccacgagcgttgcaggccggggagggcgggaaggtggagggcagcgcggcctggggctccccgggggtgggaggggagctctgtgagctgcaggaccgcctcttccctgccagccgcttcctgggcatctatcagcgaaacgcgtgaggcttggtgg

SEQ ID NO: 226217 - DNA, 1313 bp, Homo sapiens
  chr20:61733295-61734608
  hyper
cgcccggtgccctccgtcttgggagtctgggctgctgctccgcgggctctggagccggcgctccccacgagcccggactctccgccgcgcccgggagctgcgcaatcggctgctaagacgccggcgccaccggctgggccctgttctcccctctcttttctacagtcttacccgcagctgacagggttcgaaagagcatgaaacggaggagacgttacagcaacgtgtcagctgaaatgatgggcgtagacgcacgtcagcggcggaaatggtttctatcaaaatgaaagtgtttagagattttcctcaagtttcaaatgaggcgaatcccgttttccgcgatgctgcagcgcgcgggttttaaccgcagggtcacgcggaacgccgcgccgcgcgactgtgcctcggtctctgcgcccggctctccctccggtccgcaagaggaggaaggcccgcggcgtgccgaggtcagcggcgcggagccaccaggcgagacggtcacggacgcctgaaccgaggtcaccgaggccacggggccgggaggccctcagcagagcccgggggctccgcacctcaaggccggccaggaagaaacagcagcaggagcccagggcgccccggggagcccccgacacgcgggccgagcgcccagagcggcccaggccctcgcgaggagaccggcctccccagggcggggcttccgactcgggcgcccgtgagccccggaggcggcgcgaaggggcagagtccgcgtttctaaccagcccccgggtgggcggtggcccgcgcggcacggtgggcgcgagcgccgtgggctggggccggcctgggctttcagggcgagggctttccgcgccggccccagcccacccggccccgctgcgcgcccctcacgctgcagcctgggaacctgggccgggagctgcgggccgctccggggaagcgggcctgacctcccctccccaccgccgcccctgcggtgagatcctgcctgccggggcgcaggggcccgcggttgggctccgggagacggaagaggccccacagctcgggccccacgcagtggacgctgccacttaattttggcgtaattgatgtcaaggcgggtgcccgggcccccagtgaaatgcctcatgaactcgctgcgaggaacggcgctccacgcggtgcacggtggccaatcagagctgccgcttctgatggaggctgagccggctggggaggcgtcttggccaagaaccagccccagcctcgctcagggccccaacccgcagaccatgtaattaagctgcgttctgcagccagggcaaggt

SEQ ID NO: 226218 - DNA, 163 bp, Homo sapiens
  chr20:61759914-61760077
  hyper
gggcacccttcgccagagtgtgtgcagggcctttctgtagtgccctcccccagaagcacatgggcccgtcggcccccgcgtcctcggacacgcaatgctgtcggtcgttctaaccgggctgtcctgacgggcgcgcagcggcatcccacggcagtgttcacga

SEQ ID NO: 226219 - DNA, 540 bp, Homo sapiens
  chr20:61806369-61806909
  hyper
caagagggagggggagggggtgggggtctcggcccgtgtttcctcccctcctcccgctcccgcccccgccggagccacctgacccgtagcgaagttgccggccccgctgcgcgccggcctttgtgcgcaccgaggcggccgccgggaaccgggagcccgagctggcccggcagcgccgccgcccccaccttcgcgccccttttcactcccccactgtccccggagctggcaaataaacaaatccacaaacaaattatccgtgtgctccggagaggcggcggcgtgggcggcggcggagagaaggcgccgggcaaggcgagactaggcccccgcggagcgggggaagcacagaccccagcccgggcccggcagcagtaagttgacttttatgaaacctacgaagctcgcggggccaccgaaaaggtccccaccggagcggactctgcggggcgggcggggcagaggctgcaggcgggctccccttcccgcgcggctcctaccggccggctccgcccccaagccctggacggcccttccccc

SEQ ID NO: 226220 - DNA, 180 bp, Homo sapiens
  chr20:61808471-61808651
  hyper
gacgcgaacccgcggtcagggcccgagtgcgggtgcgtgtctgcgggtgccgctgggctgcgtgccggcgaggcgtgcgcgtggcgaggcgtgcgcgtggcggggtgtggctagaggtgtcaatgtgcagctggaggggctgcgcgcgtgggtgcaggagggccatgtgaggggctggag

SEQ ID NO: 226221 - DNA, 2160 bp, Homo sapiens
  chr20:61808702-61810862
  hyper
ggcacggtcgagggcgctcgatggctgagtccgcgtgagccgaggagcgcgcggggcgggacgcggtgcgaatgcgcgggaggcacgaggcgcgcagtgcgtgtgtgcgcgtgtgcgcggcgcgcgtgccccgcagttctcaaggacacctcggggaggcagcggcggggccggtgtccgggtgacgtcaccgcgcgccccagtgataatcggccggtgccggagcggagcgcggatacgcgcggaggcaacggcgacggcggcggcggcggcgggcgcggggacagttgcatcggggccgggccgggctagcaggagctgggcgcctgcagcgtggaccccgtggacactcggctcgcagccggcctgcggcgctcggggacttgcctggctcccttctcggggttcccgcgcccttctccgcccagggcagcagcgcgcggggcccccgggagccgaagagcaggcgggaactggcggcggcgcgggaggcgcagggagcggaggcggcagcagcggctcccgccgggactggtaattacgctcggggccgggccggggcgagccgggcaagcggcctctctgggtctccccgtctttctctccacgaacagctcgagcgccttctcgcgggcccgctgcgcgcggagaggacgagctcgctgggttgtaaaaagagacgagttttcatctttgagcatcgagattcgttcttttaaccgcattcggtgcgcgctcctgggtcggcacgggcagggcgacggcaggggaaggcagctgcggaggagctcgcgccgcccagtcggagcggttctgcgcccctcggagccccgcgggaggcggccgggtgcgcacgcgctcaccacccccacccccggaatccgtcttcgcgattcccgggcgccccagctccaggaacgcccggagggacgcacttgggggcccactctctgccgcggaaaggggagaagtgtgggctcctccgagtcgggggcggactgggacagcacagtcggctgagcgcagcgcccccgccctgcccgccacgcggcgaagacgcctgagcgttcgcgcccctcgggcgaggaccccacgcaagcccgagccggtcccgaccctggccccgacgctcgccgcccgccccagccctgagggcccctctgcgtgttcacagcggaccttgatttaatgtctatacaattaaggcacgcggtgaatgccaagagaggcgcctccgccgctcctttctcatggaaatggcccgcgagcccgtccggcccagcgcccctcccgcgggaggaaggcgagcccggcccccggcggccattcgcgccgcggacaaatccggcgaacaatgcgcccgcccagagtgcggcccagctgccgggccggggatctggccgcgggacacaaaggggcccgcacgcctctggcgtcgcggggcgggtgggggcggccgagggcggccgaggggggagcctgcggccggggccaggctgcggccagccggcccccggccacgtgtgtccgcagcgcggagcgcccaggcgcccgcagagggcggcggggcccgggagacaaagggagggtccacggggagcggcgggcgggtgcgtggggcggcgggctagggtgcggcgctgtccgcggtgctggcggcggggcggcccccgcgggacgggagggcggccaagtgcggccctcgcccccacagcgggcgccctggacagttgccacggcaacgtgggaggaggtggggcagggtctgaggtcaccgctaagtctgcccttcctcgggccgctgcgccgcggggcggggcggaggcggcgctcgctgtggccccagagcagcccccgcagcccaggaccaggcttgcatggggacgggggtctgcgtccgcgtccagggtccaaacgagggcggtggacacgccggaccgcatcccgcccccaaagccggctctgggctgtgcaggaccaggcacgtgagactccgcagcccagggagaaaatgacaaatccctcccccgccgccatctgcagccgcagtgacacccactcgggtttgctgcaggggttttttttctgtccccggaagccagcgccacctgctgacgcccggcaccgcctctgcgccgcctcccccgcgcccatcccagg

SEQ ID NO: 226222 - DNA, 1316 bp, Homo sapiens
  chr20:61884624-61885940
  hyper
gcaggacctcaggttatctccgcggccccagcgagcctcccaggaaagcgccggaagctccttccttcctgcaggaaggacacgatgcctccgccgtccctaggtccgcccgcaagcctgtgcccctaagccgagcacaggacacccaagctgcacagccacggactccgagggtttcgctgctcaaaactctgaaacagccccttctggcccttctagcttcaagaggaggaggggggcgcgcggtccagctgcgctccgcagcccacaaagcatcgtttcctttttaagacgggagacccagggccaattagcatcgaagcaaagcagcttccccagcctggacaggcgaggcctttgtttagccccctcccccgagggcaccgggctccgggaaagaatccgccccccaggcgtcccagggagcttcggactccggggcagaatggaaacttggccgagggagccccgaccaatcccgacaccgaagacgcccgcgctgcgccccgggcatcggctccagccccttctcgcctccgcgtagctccacgccgggcggaatggggggcggcgggggcgggcggggccggtttgctcgcgggtgggcaggacgttctcaccccccgccccctacactcgcaaactcgcaggcacagcctccgtcatcgccccacccgaatctcagaatcggaacttggccgctcactcggcgcccggggccggctgcgggaaacgctcgcacagacagagacaggcgcgcacccgggggcgcacccggggccacacacgcctccccaggcgatggggtccaggcggccccgcccgaaggcttccgtccggccagcccatccagccgctgccccgcacctgtccccgccgctccggacccgcggccgccccccgcgcacgcacaccggggacgggacccggcgccgcgactccccacgccccgcaggcgacgccaccttcggccgtagcagcccggggtccgaggcatcccccctcggagctggcgcgggacccagcgaacgggccccggggcggagggacgcttcgggaccccacagccgccgtgggtcgggcaccgggggctccaggaggctcgcggaggggtcgccactcaccagctgaaaagcgcagaggacgacgagcgcgcagcggccggagcaggagcccatggtgcccgcctatacaggaggcccccgggtgccccgcgctcggcccccgcccccgctccgcccgctccccacgcgccgcagcctggaccccgccccctccgcatcccgttcccccctcctccccgcaacccccggccc

SEQ ID NO: 226223 - DNA, 357 bp, Homo sapiens
  chr20:61886006-61886363
  hyper
cttcgcgccggccggagagggggaccgttcttaaaggggcgatggcgcggcctctcgggtagcgaggggcggcgccgcggccccaggacagacctgcagctgaggggagcccgccctggacgcggcagggatgaccggcgtccgccccctcctgcaggatgacctgcccagcacctgctcccgccgtgcgccctccggcgtgagatccccatcaaccttccccgtgtggggtctgagcgacccgcatccgcgaggcgttttctctgagagtctcagagattccttggcttggagaagtcctggacccgggtccagagctcagaggtcccctccacgggcgggcgggccgaggactca

SEQ ID NO: 226224 - DNA, 837 bp, Homo sapiens
  chr20:62103142-62103979
  hyper
gtccccgagagtcccggagagtccagacccagcgctgccgccgtccctccccggccggccctttgttcggcgcagaggccgcggggaggggcctcccaggctgaggagggggctggggcggccgcacgtctctgtcctgcgggcctggagcccccaccccgacctgagcggccccgaccccggaatccttcctgcccgcgcgctgtacaatcgctctccggtctcggcccagcactcccgccggggagcgccggccccggacccagacccaggggcagggagccaaacccgccgcagccagcctggccggggtcgccgatggggtcgccgatgggggtcgccatgggggtcgccacgggggccccgccggccactcacacgtaggcgtggtagatgaacgcccagccgcgcggccgctccagcacgttgtagaggaaattctgcagcttgcggtagaaggcgttgcgcttggggggcttcccggcgcccgcgccgcccgcgcgaggtttgctgaggatgctgccgcgcttgggggcctcggagccggcgatcagcagcgccccgtcccgggtggagtcgggcgcgccggggtccagccccacgaagcccaccttcagcttcttctccccgctcgggccggggtatacgccgccgttgcgcgacttctgcaccatggtgcctggcgggaggcgccccgggtcgggctcaggctcagcgggggcggagcgcggggggcggcgcgggccccagcccaggccccccggccgggagccgcatggccgaggcggcggttccgcactcctgccgggcttgggccgcgcgcggagacgctgcggc

SEQ ID NO: 226225 - DNA, 793 bp, Homo sapiens
  chr20:62119313-62120106
  hyper
agggggtccggggggcgcggggcccaccccccagcagcaggcgcacacggctctggggtcgctcagtttattggtaaaacgggcactgagcgtggcgagcgctgggcgcggaagcctggggcgggggcgcctttcctcttgaagaacttccactggaccttgatggcgagcatccagtcgctgaccgagggcctctggcaagcggaggtgcagacatgcgcctggcgggggtgcggggcgccggaccggcgcgcggggcgggggcggggcgggggcccgggcccggggttcggagcgcggcaccgccggggagggtcgcgccgcgggcgcccgcgcttcacttgcccgccttctgcgccttctgcgccgacttggtgaccttgccggcgccgccgctcttcttctccacgttcttgatgacgcctacggccaccgtctgcctcatgtcgcgcacggcgaagcggcctggggggcggggggcggcgtgtgggcggggccggaggacttgaccccccccaaccccagggctctggccgggcgggggcgcaaccgcgtcgggaatgtcctcggaacacgcttagcgcagagcgcgcccctgtgaagacggccggcctcgcgggagtcctgcctgggcggctgctccacggtctgcggggcggccacggggcgggggcagccctaacgctgccactgggcgaccgcgggccttcctcactcgcggggcctccctcactttcggggcctcgtctgcacacagggcccaccccagctcgtctgggcagggtcacctgca

SEQ ID NO: 226226 - DNA, 42 bp, Homo sapiens
  chr20:62152087-62152129
  hyper
gcatataagtgggcgcgtccgcgcgtgcgcaccccgcgcgcg

SEQ ID NO: 226227 - DNA, 105 bp, Homo sapiens
  chr20:62273400-62273505
  hyper
gccccggccccgccccggcccctgcccgctccgagctccgccccggccccgcccccgcaccttctcgcgcagccgctcgcgcagtgcggccaggtgtgcctcgcg

SEQ ID NO: 226228 - DNA, 924 bp, Homo sapiens
  chr20:62283760-62284684
  hyper
tcgcggcggagcagagcgtttcgggaagggcgggcccagcgtcctcgcgcccgaggtcgcccggcagctcccctgcgtccagaatccgccccccgcccgggcctgcgcccgcccctccgcctgagctccgcgcgggacgggccgggaggccggggtgggcgctaccttcgaaggcggtgggtccgccccgcgggaggtggaggggcgggaggggcggagccctctggtctccggagggtttggggatcgcagtcgcccctcccccatccagaccccgcggcgcaaagggcagtggcttttctggccagagcaggtggcgcgggcgtcgcaaagggtggtccccgaggccgcagcggtgtggggggagggcgcggtccccctcactccgggctccgccgtgtctggcccgcccccctccttcagcgccccctccagcccctgtgctgcactggcgcggggagcgccgggttcccggctggggctttggcagagggtcccaccctctccccgcctccccacgaaggctctggcggacccagatctcgggtcgccggacgccccagggaccccgcccgcacatcgcgagcgcgcccacccggtcgcgagcccacgcccgggtctgggagccaccctgcggcagtcgcgccctgcgtggcacgctgctcccccaggggcgaggcgcccccgcccgacgtcccggtcccgagcgctccccggcgcggcgcctcgcagcccagcgccccaccagccccgccggcgccgcagaccccagcctcgggcgggtcgggcccaggcttgcaacgcgcagggtaggagaagggaaattggcgtccgctgccggccgctgccccaggcgaggccagacgaggcctctgctcagatcccgccgccccacaaagcccgtggccccggagcctaccggaa

SEQ ID NO: 226229 - DNA, 660 bp, Homo sapiens
  chr20:62383555-62384215
  hyper
aggctgcctttttctattatttcctccccaagcaaatccatccactccacacctgctacctgacaacgacctgccagtgctgagctccagggtgggcgcggtgggtgcagacaggtcggcaggcacaaggacagggttctccctcccgaggcagggcgggggcgggggggcgcagaggtggctgagggttgggggctccaagcagagcgagctgagtttgccgaggcctggctgccttggcggccagcaggtgagcagggtgggccgaagcctctgcaggggccatgtggcccagccacacccaggaggccggggcagagcagacaggggcccggggcggatctccctgccctgctgtcgtcccccctgtgcagagtggacccggtgtggggtccggggcggtctgcgccctcatcaggacccgcctgcccggacatcgtggccacgcgcagcgcgcggcacgcggaccctccccgcactcaccagcgtgtggcgcttcatgtgctcgcgccgcgtgaacttcttcccgcagatctcgcaggggtagggccgctctcccgtgtgcgagcgcatgtgtcgcttgaggatgcactggtgcatggccgagaagctgcagtacggacacttgaacttcttcctgatcaccgtgaactcattcac

SEQ ID NO: 226230 - DNA, 121 bp, Homo sapiens
  chr20:62384862-62384983
  hyper
tgggggaccctcagcacgcccagtgccgttatgctactcaggcccagataccagcacgtcagacctgggcatgggccactgagagagcccggagcagccacgtccacgggaccctacggga

SEQ ID NO: 226231 - DNA, 460 bp, Homo sapiens
  chr20:62461444-62461904
  hyper
tttgtttatatttcttcgctgtcagaaaatatccgttcttcgccccatctggtctgtaccctggctcctcggtccagccctattgtgtgtgcttcgttaaacctacaaacagtgaatctgtcagcggggccaggggaaccccaactagcaggagccctccctctggcgcagagaattccccgtttgccttagggattgagttgtcagacaccggctcgcgctcccccgcgaaactgacatgtctatttacagagaaacaaagacgcggctcgcagcggaccccgcttcctccgcgcgccccgtccgccccgcgcgccccgagccctccgcgccccgagccgccccgccccgaggcccctgcgccccggttcggccggcgattaagatggagaccaggccggcgcccggcgtccggggagacaatgaccccccggcctcagggcgccgggacccgcccgcg

SEQ ID NO: 226232 - DNA, 339 bp, Homo sapiens; identical to SEQ ID NO: 205912
  chr20:62495239-62495578
  hyper

SEQ ID NO: 226233 - DNA, 361 bp, Homo sapiens
  chr20:62525784-62526145
  hyper
ccaggcagcctacgcggggcaggccgtcagtgagtggcggagcgcctgcagttacagggacagggaagggtggccgacgggatgggcaagggcagagggaggtggagtggacgttcgtggtcctgcctctccacgctgctgtttggagatgattccgggagggtgggagggcgctggcgacggcatttcagtggttggacaggaaggaaggaaggacgtcccatctcggcgctccagggttgagcaaatgtcagtcccaggacggtggctccgggtgggggcgggggcgacggtccgcagccgtctcccaccagctccctgttcagttctttgatgagaacgattacgttttctcagtctt

SEQ ID NO: 226234 - DNA, 1008 bp, Homo sapiens
  chr20:62600640-62601648
  hyper
tgggaggcagagacgcgactggcgccccggatgagaaggggcttcggccctcccgagcccagcggggacacagagccctcgcggggagagggggctccgccgcgctgcgcgcaggagacgccagcagcgggtccgccgcgtaggccgttcggcccgggaccccggcccaggcctggcgcgcgggtgagcgcggccagggacgcgcacctggggccagcctcgccacccacctgtcacctggggccgggagcgggcgcggggcgcgggcctcggcctggccgggcagggccgatcgcgggcgcggggtgggggggcgaaggcagtgaaccaaaatggcgactttttctggagaaggaggaggcaggaagacggcgccggcgcggggcgcgggggctcgggcgcggcggggggcgggggggctccgggcccggccccctccttggcctgcgcgcagggtcgagatccggggcgcggtgggcgccggggctgcggccagaatgggtccggggcgcggccgggcgcttacctgcggcgcccagcggggctgcggccgggccgggccgggccggggcggggggcgcggggcgcggggcgctgggtccgggcggcgcaggctgcgcgccgcgctgcgcacatgcgcgctcccgcccctcccacctttgacagttttactgcgggggggagggggcgaactctcgcgttattcccgcggccgctccgcgacggggagggggcggggagggggcgggggcgggggcgggggcccggcgctggcctgtggttcccccgctccgcggttccgcccccgtcggccgggcccgcagtccagagtagccggttctgccgtcctggggcgggggacgttttttggacagtggggtaaactgaggcccgataggggcgctaggcactgcccggagtccggcgcgcacggattgaggcgacctgattccgccgcatcctggcccgcgcggcgagtgtggtctctgggctcgggaccctgacctc

SEQ ID NO: 226235 - DNA, 238 bp, Homo sapiens
  chr20:62605238-62605476
  hyper
gtggtcctctgtcacggcagccgcgggaccctcacgcgctgtctgggccgtcccttccagcgtgtcgggcgttgtgtccagcactggggaccgcccacaggcgtgacttgagccctgtttccagcctctgcgcggggttgcccagacgcccctccagggcgtgacgccactgccccctggtggccgcggctgcccagacgccctctcctcgcagacccagcaccgccagcacttggga

SEQ ID NO: 226236 - DNA, 81 bp, Homo sapiens
  chr20:62673344-62673425
  hyper
agaccgtcacaccgcggctggagatggctggggggcagtgtgagtggtcctcagaggaaacagctgcgcccagacctggga

SEQ ID NO: 226237 - DNA, 473 bp, Homo sapiens
  chr20:62673632-62674105
  hyper
tccccaggaaaagacgcagctccgtaaacacagaaacaaccatcgctccctccccgctcttcccctccccattaaaatccggaagagccagcgggaggtcgcacctgctgggggaagtgagtccttgttttgggggaaatgaggaggtcaggcctctgggcgcagggcagagccgcgtgcgctggggaggtgggcagccctggggctggacgcgggttcccgggtcgccttccggcctcgctcccgtcgggaggtcccgacacgggcttcctcgcagcctccccgcctggcccggcccgattttggccgctgcggtcaggggaagaggcggccggggctccccaccaggtgagcaggtcctgcccggcttgaggccaggggtccgggctgcggcccgagataagcgtcgcgcccgccgccgcttcctgcgcttccagcgccgccacttcctgttttctcgcgctggcgggcgg

SEQ ID NO: 226238 - DNA, 582 bp, Homo sapiens
  chr20:62679894-62680476
  hyper
ccgccggggtcccgcgacaactcggtgggcgcgtagggcgcgcggaagggccgcagcgcgcagtcctcgggcgccgcgggcggtgggaagaaggcagcctcgccgggctccaggccgtccagaggcgagcgctcgggcgtgggcagccccaggccgtcgaactcggcgcccagcgggggcagctcgcggaaggcgcgagccgagccagacgccgcggggaaaggctcgggcggtggctgcgggggcgctaatcccgggagcaggaggccgggctccagccgccgggccttgcgcgcctgcttcttgcggcgcggccggtacttgtagttggggtggtcgcgcaagtgctgcacgcgcagccgttcggcttcctccacgaagggccgcttctccgccgcgttcagctccttccacgctttgcctgcgggccgtgggcgccagtgagtggaacgccgtcgggcgggtgggcgccgagccctccgtgcgcccgggacgccccgcgagggtttggcgcagcccccgcaccccgcggcccgggacccctgccccccccgccccaccccggcccgagccccccccgcc

SEQ ID NO: 226239 - DNA, 300 bp, Homo sapiens
  chr20:62694625-62694925
  hyper
ggcgggcgcgacgggcgcgggggtcgctgctcctgaggcgatgatgggcaaggaagaggagattgcgcggatcgcccggaggctggacaagatggtgaccaagaagagcgcggtgaggggcgcgggccgccaggaccccgggaaccccgccccgccgagaccccgtcgagcccgccgacccccgttagggccggaagacgacctgaggggcaggacgagacccctccccggcagagactaaccgggacgcaggggagacccccacccgtggccgagacccctgccccgggccagccctgc

SEQ ID NO: 226240 - DNA, 180 bp, Homo sapiens
  chr20:62695013-62695193
  hyper
tcgcccgcagtcacaggctccgcacccttccctgtcccttaactccagacccccagcctggcccgtcgactccttccttggccctgtcccgcctctcggagcccccggggtgttcgggcctcctctgcgggccgcgccagccccttgccttcctccatcccggcctgggcatcctcacag

SEQ ID NO: 226241 - DNA, 1077 bp, Homo sapiens
  chr20:62714666-62715743
  hyper
gcgtccatactccccgcttccctcggggtcctggggagtggcagcaaaaagaccagcgagccttcggagaattataactttatgtgggaggctggggcgcgtcgcacactctcagtcgccgtcaccgcgggaagatggtgccatccacgttctcctccaggatggtctccacgcgcctccgctgccggggagagaggctggggtccggcgtgtgcggaggcgggcagggcccctcccctttccccgcccctaccggggcttgtctgcacctcttggcggtccagggggtccgggatccgcgcgggcttcagctgcggcggcaggaacagctccagccggatggcggcgcgcgcggacttctgccgctggatgagcagcgcgatctcctcggcctgcggggcccgggtagctgagcgcgcgccgagccccgccccgccccgccccggccggctccgctcaacgctcccggtgcgccccctctgccctccgaccccctcgcctcacccgcatgcgggtgtagcgcagccgcagggcgcggactcgcccgcgggcctccgctgccttgaggacgccgaggagccggttctggcgctcggcgggcagctcgagcgactgcgtccacgggcgcgggtcgggcatgcggtaccccggttccaccgacccgcacgggaaggtggaggccgccgcgcccacgtcctccagcaggtcgccgaagagcagatggcggtggcgctgcgcagggagcatggccgccagtccctgcggcgtcagggcccagcccggcttggggggctctgtcgcgggcgcccccttggcacgctcctcaccctgcgccgtgcctggcgcgctcttcccgcttcgctcccgcgggcccttgcgcccgccctccttcgctggcggcggcatcctcccgccctgcggagggaggagggcgtcccgtcggtgccggggctggcaccgggccctgcccgcccctcggcagggccccaacgtgcgccccagctcccgcccgctgggctctccgcagtcggttttgagttccgcacccccagcctctgagctttgcccaggcgctct

SEQ ID NO: 226242 - DNA, 105 bp, Homo sapiens
  chr20:62733382-62733487
  hyper
gcttttctgagcctcggtttccttccgtgtgcaaaggggaccgcagaaccctctttgtggggttgtgggggaaggctggggcgcccgggagggtcccgggtcgcg

SEQ ID NO: 226243 - DNA, 420 bp, Homo sapiens
  chr20:62733537-62733957
  hyper
agggggcgctgtgggctcacgcgggcccagccttgggccccggggcgctgcggcgggaaccgcggtgactagcggggtcttaaagcgggtggcggggccgggctctcctgggaccaggagcccagagcgtggagacgtggcgggctgagccgctcagtgcggcccctgccccgcgcccaccccgccccgtgtcaggaggtccgcggagcgggaggacccgcctcccggggagagctcgcccgcccctccctcccggctggccgcggggcggtctgcagaccctttggccgtgccggatctgcctggtccccggggagaagacgctgaggatcccattgctggtctgtggatggggacaggagacgcccgaggtaagaaggggtccgggttctttggaggaatcctggttggcgccttctc

SEQ ID NO: 226244 - DNA, 680 bp, Homo sapiens
  chr21:15588318-15588998
  hyper
ctacgccaggcgagggagcagtgcggtgggcggtaccccaagtccgctgggggcgtggccctggagccatgcctcgcccccagcgcgcgctcccggcgccggccccgccccctcacccaggcggcgccgtaaagccggagaaggggcggggtctcagctcctacttcattctacggccgagaccggaggatgttccctgctcaggaggaggccgacaggaccgtgtttgttgggaatttagaggcccgagttcgggaagagattctgtacgagctgttccttcaggtaccgtctctgggaaggggcggcggaggggcggagcacgtcgggccggaaacatagcgcgcacctggaccacccggagcccggcccccttccgtcccatcctgagcaggggttttaatttcgtttcctcttggcgcacctgtctccaggtgagcggctggggagtgaaatgagggcgcgttccccatccccatccgcgctgcagagtcctggggttgggcagggacgtggttccttcaacccccgtttctgattaagggcttcccagaggctgcctgggcctcgggtgtgcgcgggcagaaccgaaaacagcctggtcactgttctccgtcaagtagtaagcacgcctgacatcccccaaaaggagaggggtcgcttttataatgtttcctttt

SEQ ID NO: 226245 - DNA, 105 bp, Homo sapiens
  chr21:16130747-16130852
  hyper
tctagtttttggaaatctagtctactgttgcttgagcttcttggcaggtcatcagtaccaactagaagcgggtaatagattactagggatgccagcggcatttaa

SEQ ID NO: 226246 - DNA, 447 bp, Homo sapiens
  chr21:16438267-16438714
  hyper
tcacgaggccggggcggcagcgcggtggagcctctcggtttcctgcagcctaatctcactgaacccgcctctaaattgggggggccacagattggtgaaacgagaaagtggaaggaggagagagtcatacgaaaccataatttccccttatccttgtatttgctgtttgaaaaatcgtatcctcaacgctccccagacatctcactagaactattaacaccccctcaacacctccccagatgtcaggtttctttttgacttgagcatctagcatttagtaattcgccatgaaaaaaattaccaggggaagcgagtgttgttgctgaaattgtttttgcttgacacaaaaaagctaaagtacagcttagtctcacccgaaattctgaaacggcatgcccgtgttaaaacacttattacataagacaaatgagccgatgaggcactcca

SEQ ID NO: 226247 - DNA, 83 bp, Homo sapiens
  chr21:17102748-17102831
  hyper
gcgcagaaggtgaggcgagtccgccagccggcgggccccacttctccttccgacgggctgtcctctcccgctgcggccgggcg

SEQ ID NO: 226248 - DNA, 180 bp, Homo sapiens
  chr21:18885533-18885713
  hyper
ggcgctcgctgcccgcggccacccaggaacaatggggcgtgggggagggggcgggcgcgatttgggggcgctgctgcaggggcggcggggcgggcagaattgcacaggggcgcttttgctgggccgggcgctcctggagccgtcccgtagggagccgcgcagggcgcgcggagtgcccgg

SEQ ID NO: 226249 - DNA, 282 bp, Homo sapiens
  chr21:18985373-18985655
  hyper
gggcctagccgcacgggaggcgacacaccctcgccctaccctgagcctggcgcagaccctcgaccgcgacggcgcggtccgcagaaccgcgggcttccctccccggcaaaaagcggcgctgaaggcctgtgggacccccgcccggccgccctacgtgcgtcagcgccttcgggggtcgcgcgggcttggtcctttcggctgtctcggcctttttgtttccccctcaggtctctccacgctgcacttgacaccctcagggcggaatggcgagttctagaccca

SEQ ID NO: 226250 - DNA, 960 bp, Homo sapiens
  chr21:27011572-27012532
  hyper
aagaagttttgagccaacgaggggaagaaaggagttggggcaaaacaggaggcgtttccctacccgcatacatccccgtccccgagacacccaatccccccacccccagcctgcccgcgcctcccgcccccagctcctcgccctggggacagctggcagccccgcgcggaccagacacaaagccgatcaatcccggaggcgtgggggcggagggacgacccgccggggctttcccgggcgctgctctcctcctgctgccccctcgctaggacccggcggacgcctcgtctggttttcacgccctctagcccctacccccacacccccaaaacagaacagacccccatccctgggctggaggacccgcctcttggcagccagctgagaaggcgccccggggagggggaaactgacatcccatctagagccgtccctcctcttcctcccctcccgactctctgctcctttcccgccccagaagttcaagggcccccggcctcctgcgctcctgccgccgggaccctcgacctcctcagagcagccggctgccgccccgggaagatggcgaggaggagccgccaccgcctcctcctgctgctgctgcgctacctggtggtcgccctgggctgtaagttgctcgggttcctctacccttcctgcctggaccagcctgcccccaccctccagccccccacggggcgctggctgacagtgtctgggcggctctgggccgaggtcgccgcggggcgtctgaccttgcgcccaggcgagcgggaaacccagggtgcccgcgagcggacgctgggagcaagggagcgcgaggtcgtgggtttcttgtgaattgcgtctgattttgtcagttctagatacagaaaattaagggttcccactagcaggttctcatctgtttgcaaagttggggtaagttttcagacagagggacgtgattcgaatgcaaaa

SEQ ID NO: 226251 - DNA, 236 bp, Homo sapiens
  chr21:30670774-30671010
  hyper
acccgggcacgcggcgactcggctgaattagggcgtcctgcagctcccgaggcgaggaggcgcttggcctttccgttccgccctcagaagggagaggagaggtggtcctcgagtgggagtcagttcaggatgcgggctgtgccacgcgcggaggtccggggaccccaccgccgcctcctcgaggcccgccccgccccttacgacccgtccctgcaaccccccgcgtgggcttccgg

SEQ ID NO: 226252 - DNA, 351 bp, Homo sapiens
  chr21:32716148-32716499
  hyper
agtcaagggggaaagatgacgctttcaaagcccgaatctctttaccctggagccagaaccagcgtcgccgccgtcccctgcagctcagccggcaacgcgcgccgagcctcggggcgcagcttggagacgcgcttgctcgttctgggaaggggcacgggacgcacggttccccggccccagctgcacagctcagctcggggctctcacctatcctcgttcagagccacattcggctgcctcccctgaccacccgacacaaagagattcgccggtggaaagaatcgatttcaaaattcaagctcaccgctgctcaacaaggcgcgcacgtttctccccgtctggcttcacatg

SEQ ID NO: 226253 - DNA, 256 bp, Homo sapiens
  chr21:32931603-32931859
  hyper
ccaggctcggagcgcgcggctggaggggcgcgggcggcgcgcgctccagagatgccttcctgcgaggctccgtcagcgcggcccggggagatcgcccgcaggcagcggaggcgcggcgggccgggggacgaccagggagcccctaacaaagcagctttgggagggccggaggcctctgcctccctcggcgataggtccgcgaagctgcctgtcatctcgcataggtggaggtggccaatggcgtgcacagacggag

SEQ ID NO: 226254 - DNA, 105 bp, Homo sapiens
  chr21:32932326-32932431
  hyper
aaggttgtggagaacgcggaaacggagacgctggcggtacagcctcgagcgaaacctttccctacacgaggccggagcttcctcctctcctgaagagctctagac

SEQ ID NO: 226255 - DNA, 32 bp, Homo sapiens
  chr21:33058221-33058253
  hyper
atcaaagctgtgggccgggtgtggtggctcac

SEQ ID NO: 226256 - DNA, 508 bp, Homo sapiens
  chr21:34392154-34392662
  hyper
ctcaaaaccgagtccgggcgcgccttgcagggcgcccgagctctgcagcggcgttgcgggctgaacccatccggcacaaactgcgggccactggcccctcacacctgggagtttgcggcgctggcctgcagcccggggcccacgtggcggaagctttcccgggcgcgcgctgcgcagccccgcggggccggggagacaccgctcgggagtcctccgctcggctgcagaatctttatcagctgcactttaccgcagccctggctaggacgctaggcggtggagcgccctatccaggtgcgccgccgcaccatggatcaccgcgcccggtcccgcagtcccgccatggcctggggaggcccgaagcccggggacagtggccggcccatctccggctccgcggacccccggctcaggcgggagggcaggcgggtccctgcaggcccccagggagcccgggagcctctctctggcgtcattcagtcccggggcaacctgaagcgcggtagat

SEQ ID NO: 226257 - DNA, 497 bp, Homo sapiens
  chr21:34442192-34442689
  hyper
tccttcaacagccccgcttgccttgaaaaggcgcccttactccgctcagggggcctgtcccgcgcggctggcacaggcgctcacaataacctcctaaagcggtgccagccgcacctccgcgcggccccggcacaagcagccaatgaacacgcggctgcgcccggcctcgcgcctccattggctgcgccccgccacccgctgccccgcaggttcccaagccgggtttaaaggggtagggcgcgggccagggccccaccatcgtttccccgcgcgcaggtccgcggggaggggcggcctgccgaccggcccaccccagggcgttcctgaagggcgtcctcggccgcccccaccgcctcccagatgtactatgcggtttcccaggcgcgcgtgaacgcggtccccgggaccatgctgcggccacagcggcccggagacttgcagctcggggcctccctctacgagctggtgggctacaggcagccgccctcctcctcctc

SEQ ID NO: 226258 - DNA, 960 bp, Homo sapiens
  chr21:34442822-34443782
  hyper
ggcggcagcgcccggccggacgccaaggaggagcagcagcagcagctgcggcgcaagatcaacagccgcgagcggaagcgcatgcaggacctgaacctggccatggacgccctgcgcgaggtcatcctgccctactcagcggcgcactgccagggcgcgcccggccgcaagctctccaagatagccacgctgctgctcgcccgcaactacatcctactgctgggcagctcgctgcaggagctgcgccgcgcgctgggcgagggcgccgggcccgccgcgccgcgcctgctgctggccgggctgcccctgctcgccgccgcgcccggctccgtgctgctggcgcccggcgccgtaggaccccccgacgcgctgcgccccgccaagtacctgtcgctggcgctggacgagccgccgtgcggccagttcgctctccccggcggcggcgcaggcggccccggcctctgcacctgcgccgtgtgcaagttcccgcacctggtcccggccagcctgggcctggccgccgtgcaggcgcaattctccaagtgagggcgggcctgggcctggggcgcgacctcggcccggcctcccttcgctcagcttctccgcgcccctgctccctgcgtctgggagagcgaggccgagcaaggaaagcatttcgaaccttccagtccagaggaagggactgtcgggcacccccttccccgcccccacccctgggacgttaaagtgaccagagcggatgttcgatggcgcctcggggcagtttggggttctgggtcggttccagcggctttaggcagaaagtgctcgctctcacccagcacatctctctccttgtccctggagttgcgcgcttcgcggggccgatgtagaacttagggcgccttgccgtggttggcgcgccccgggtgcagcgagaggccatccccgagcgctacctccccggagcggagcacgccg

SEQ ID NO: 226259 - DNA, 304 bp, Homo sapiens
  chr21:34444198-34444502
  hyper
cctttccccaaaagtagcgtaaccaacatttaagcttgcttaaaaacgaaaaccaaccgccttgcatccagtgttcccgatttactaaaataggtaaccaggcgtctcacagtcgccgtcctgtcaagagcgctaatgaacgttctcattaacacgcaggagtaccgggagccctgaaccgcccgctgctcggcggatcccagctgcggtggcgacggcgggaaggcgctttccgctgttcctcagcgggccgggcccttgaccagcgcggcccgcaggtcttccttctcgccgtcttgcagtt

SEQ ID NO: 226260 - DNA, 540 bp, Homo sapiens
  chr21:34776217-34776757
  hyper
aagacggggggcacccctcctggcgtcctggccgccgggacacccctctccgggagaggacactcggtgcccctccgtgaagccggtaacctcggctgcgccacctcccccacccgcgcgcccgcgccgggaaagccagcgtggccccagtctccgaatttctcggaatgaacaacagcaaattgaatccagggctccggcgggggccgcctttgctggccactggttctgcagcctggcgagactgcgcttagtccccgcctggagtgcctcccgaaggcctggctggaagctagactcagtccctttgtagtagcagcggtggagcagggaccagcgtcttggacgggtgacccagactcaattccgactttggccgagggcatgtttgacactgggtgtgaaatctagacagttcccgcggtcatagagatggggcagcagcattcaggcagggctcagaactgtccgggtcccatcagtgttggggcggaagaggaagagtgtcaactgagccaggcatttatttattttattgtt

SEQ ID NO: 226261 - DNA, 160 bp, Homo sapiens
  chr21:35986819-35986979
  hyper
ggcgagcctgtgggactctgcagtgagctccgcgcgccccgggggtgctaggggaccgggaccctcggggcgccgtccccacgccccagccctgacgggtccgcggccgagcagcccgggggacgtcgctgcctccccgccccgcgcgcggccgggactg

SEQ ID NO: 226262 - DNA, 900 bp, Homo sapiens
  chr21:36041535-36042435
  hyper
ccagtgccccggctaaacctttgccgcaggatcccggagccggcgtccttcaaggagcacagagggccccgtagcacgccccttgcccagcgccaccgacccttaagcagcgtcaaggaaggagtcccgatcaaggacagggatctgcggccatggccgaggccgcggagccggagggggttgccccgggtccccaggggccgccggaggtccccgcgcctctggctgagagacccggagagccaggagccgcgggcggggaggcagaagggccggaggggagcgagggcgcagaggaggcgccgaggggcgccgccgctgtgaaggaggcaggaggcggcgggccagacaggggcccggaggccgaggcgcggggcacgaggggggcgcacggcgagactgaggccgaggagggagccccggagggtgccgaggtgccccaaggaggggaggagacaagcggcgcgcagcaggtggagggggcgagcccgggacgcggcgcgcagggcgagccccgcggggaggctcagagggagcccgaggactctgcggcccccgagaggcaggaggaggcggagcagaggcctgaggtcccggaaggtagcgcgtccggggaggcgggggacagcgtagacgcggagggcccgctgggggacaacatagaagcggagggcccggcgggcgacagcgtagaggcggagggccgggtgggggacagcgtagacgcggaaggtccggcgggggacagcgtagacgcggagggcccgctgggggacaacatacaagccgagggcccggcgggggacagcgtagacgcggagggccgggtgggggacagcgtagacgcggaaggtccggcgggggacagcgtagacgcggagggccgggtgggggacagcg

SEQ ID NO: 226263 - DNA, 180 bp, Homo sapiens
  chr21:36042511-36042691
  hyper
ggcgggggacagcatggacgccgagggtccggcaggaagggcgcgccgggtctcgggtgagccgcagcaatcgggggacggcagcctctcgccccaggccgaggcaattgaggtcgcagccggggagagtgcggggcgcagccccggtgagctcgcctgggacgcagcggaggaggcgga

SEQ ID NO: 226264 - DNA, 1775 bp, Homo sapiens
  chr21:36160097-36161872
  hyper
tatggtgtatgtacttgtcaaactgtttatttgccattcacactgattgtaacactggatttacagaagaaactgtggtacaaagagaggaaggctctggtggctcctgaacagcagcagtccagctgccctgctcaggctgggcacgacgaatgctcccaggagaggggaggcggcccacccgactgtgtaccgtggactgtggacagtgcagtgcctgctctcctgtgctatctagaaacaccttggagagagggttctgggatattctctcatgtcatctggctgaagacaccagcttgacagttcccctttaagaagcattccatacgtttgtaccagggagaaagaagcccacgcacgaattttcaggatgttttgtgaccaaacccaataactgccacacaaatagaccctaggtgggggctggcttaaataggaccacatttcccgttgctttttcagtagatgtgttataccgtcatttcaatttgaaagtttatttttttccattgatttttatacatccagaataacacaaataaccaacagttctttttctttttttgcacattcatttcccctagaacaaaaaaagtgaacttaaaaaaaattggaaccatgctattagctgtttacaaaagtgaataagaagtagctcattttaaagtctaaaataaacaaagtagaaagaagcatttttttccctacagtatttagcaaacctaagaaaaagtccttagaaacacacacaaaaaaattgaaaaaaagttataggcattaacaatattttataatgaagcttaaaatctatttacatacataaatacaattaactttgttgatgcaactcttctggaaggaaaaaaagagccaaatgatcagcctcatcaatactgacctggctaaaaacaaaattcccaacaaacacacaaaaatcccaaaacaaatgtatacgctacggtaaacaaaaaggcattttgttcagatgtaaaatatgttttgtgagattattgtcaaacaaattttcatgtataaaagacccaaacatgtcattccccccaaaaataaaaaccaacaaaaataaaaatcatcaggacggaatgtcccaaagaaacaggtatttcaaggcagaaatctgcaatcctaaattgcaggacatttgagtggaaccattcatttcctttctaatcagagcatttctgtttatctgcacagaaacccaaggcagcagaaaggctgtctatttactcactgattgtgatttgcccaggaaagtttgctggtttggacagcaagcagatccaatatggttggcaatgtctctgttctgctggaagaaacccataaacaggagaaaggctgacaaaccatgttcctttatgtgaagggggaagaactggaccttcttgtgttctgaaatttggtactgggtgggggtatgtgctatctgcttaagagaacacaggaaaaggaggagggagaaagtggggtttggaagatagaggaagagagaaaaaaagggagatattggggggaagagagggagggaaatgtattttcagatagtgagaaaaagaaagaactgaaatatgtatccatgttgaaatcataaatagggacatgagtaagcagtagaaatggcttattcaatacttctcctggaccagacacatgcagttattacatgattggcttaagggtctcattgataccttaactttcctgagggcaatgaataaaaagataccttaatctacctgaagtcaatgaat

SEQ ID NO: 226265 - DNA, 3054 bp, Homo sapiens
  chr21:36161938-36164992
  hyper
ctatcgccaaaacaactacagtttgattttttttgaaacaattaaatactatatatgctggtaagagtctgtgaaactctaaatgaccaatccagtgagcctacaatagtgacaagccccctccacacatggctttgagagtaaaggttcaatgtaaaagattatctaatcagagcatgaggctggttttgagttggaatatcttcagttaacagaattaaactgaaaaacataattttttccttcatttttctccagcatttttgcaggtcagacatggtaacatgtgctgaaaaaaaacatttacgtttaatttgggggaaatgggctaatggtgcttttcagaaattaaatttttacatttgctgacattttatggtaatttagctgcaaaaatgtaatacggaataatatatgaaactgagttgtggagggaatcctgtcaaaaatgaaagtgaatatattctgagtttgtccgagatctgctatagctcttctctagataagaacgacctgacaacataagctgctttactctttaactcttaccaaagtgctactgcatgtgtgtaaaacaaataatcaatatatatataagaaaactcaaaaacaagttgttttaaataagtccagctgtttttgctgcctgcagccaaagatttgcctaatttgaatgcttaaatttataaaataaaaatcaaacactgttctgaagtcctgctttcaaatactcttcagagttgacctgaaatcgtttcaacgaattttaagaggtacgttaaataaccaccagatcatttggagcacacatgtgtcaaaatcagcagttagtatttatgagttgtacaacaactgcattctgaccaaatcctccaataaaaatagtgccataaaatttacagcgacattggatacctttgaattgtagccacggacagtagtgacatgaatctttcctgtcacactggtgcacaggtaaaagcccatataccccatagggtagggtctcagcctggtgaaagcaacacaaagatgttgttgagtgagcagcacaggacagggggtctcgcacaggtgggaccatgttttcccacttgtctccactgaggcacacagaggcaaattgactcctcgaggcctgcttctggtgggcccttaaattgctataatcgtaacccctaaattcattgatttggttcctatgtaaatgtggctcccctacacagtttactttggctgtgttctgttacacagcatctgtgaaattatcagatgaccttggggtgagcaaatccctgggcagaaatcaaatcctctccaaagatgtaattattggcacctgcctcaaccctctggaactagattgaccttctctgttttaaggaggaagttagatatgagacccttgttgagcctggcagaaaattccatacttctgatccttggagtgaccctcagtgtctaaaaatcctattaaaaacgttgctgcgtgagctactcacttgtttgattaacatgaaagggagtttaatgtaaacaatacttctggataaccaagcgatcacattactcattctttttttctagccttcttcaatgtgatacatttaactttggctactatcaagaacaaaagaaaatgtagtacttgatatttttcttaatataagtacatttaaataattaaaaaattatcaacacataaatgtctgaacatcaagatacataaatatctggggattccttgtgggaatacagtagttaaaaatgacccaaagctgtagctgtttctcaaaaaaacaaaacaaaacaaaaaaaaacaactacccaaaagtccaaaagaaaagttaaataaaacttaaagaaaagggaatcatatttctttccatggtcaaagcaagaaagaagcaagctcaatttatatatatttatataaacgtatataaaaataaaaaccacccaaatgcaaatacgcattttgcaattgataaggtgcggaaaaattaaaaataagaattagatgccaaacagggcgagttgcatccctcctctccccccaccccaaccaaaattccacactctttggaataaacaacttggttaaaaagttaagtcaagggtataaaatctttctttttattcacagcattgctaaatcagaagcattcacagtttccctccgggaatcttcctgtttgctttccagcgcgtcccctgggtgctggggccggcggacaccctcgaggtgcgtcgcctcggacacctccgcgagggccggggcgccagcagacggcggcggcgtgggcttctgggcgcaggaggctgcgcgggcctgacctacagcgagatcctggccgtcgggcgccctcggccccaggacggtggccgggcccagggcccgggatcccggcgggcttgtcgcgaacaggaggcccgcgcgcccggaggcgaaggcggcggcccgcggggcccagccgggccaggcctggcgcctcagtagggcctccacacggcctcctccaggcgcgcggagggcgccatgttggtgggggagttgctgtggctgccctcggcctccaccacgtcgctctggttcgggaggctggggttgagcagcgcggagccggtggaggcgttggtgcagggcggcaggatgcgcggcggcgagcgctcgccgcccaccatggagaactggtaggagccggccgaggcgccgtagtacaggtggtaggagggcgagctggcttggaacgggcctccctgcgcttgcgacgagccggggtagggcggcggcaggtaggtgtggtagcgcgtggccgagcccatggccgacatgccgatgccgatgcccgaggtgaccggcgtcggggagtaggtgaaggcgcctggatagtgcatgcgggggtcggagatggagggcagcgcggggaactggcgcgggtcgctgaacgctgtcaggtcgggtgccgctgcagggcgggcaagagaacggagcggaagtgagtaggaggttgcggaggccacagctcttccctctgccccagggggctaccc

SEQ ID NO: 226266 - DNA, 162 bp, Homo sapiens; identical to SEQ ID NO: 205974
  chr21:36171597-36171759
  hyper

SEQ ID NO: 226267 - DNA, 203 bp, Homo sapiens; identical to SEQ ID NO: 205975
  chr21:36206695-36206898
  hyper

SEQ ID NO: 226268 - DNA, 105 bp, Homo sapiens; identical to SEQ ID NO: 205976
  chr21:36231770-36231875
  hyper

SEQ ID NO: 226269 - DNA, 179 bp, Homo sapiens; identical to SEQ ID NO: 205977
  chr21:36252845-36253024
  hyper

SEQ ID NO: 226270 - DNA, 266 bp, Homo sapiens; identical to SEQ ID NO: 205978
  chr21:36259127-36259393
  hyper

SEQ ID NO: 226271 - DNA, 39 bp, Homo sapiens; identical to SEQ ID NO: 205980
  chr21:36265221-36265260
  hyper

SEQ ID NO: 226272 - DNA, 117 bp, Homo sapiens; identical to SEQ ID NO: 205981
  chr21:36421138-36421255
  hyper

SEQ ID NO: 226273 - DNA, 131 bp, Homo sapiens; identical to SEQ ID NO: 205982
  chr21:36421464-36421595
  hyper

SEQ ID NO: 226274 - DNA, 373 bp, Homo sapiens; identical to SEQ ID NO: 205983
  chr21:37528252-37528625
  hyper

SEQ ID NO: 226275 - DNA, 153 bp, Homo sapiens
  chr21:38362192-38362345
  hyper
tcccgcagggaagaacgccagcggcgcgcggaggccgcgctgccctgggccgcgaggtccctatggctgctccaccggaagccccgcccccttctggcagctggaggcggctttccggccgtcccggctgcagccccgaggcctcgactcagg

SEQ ID NO: 226276 - DNA, 403 bp, Homo sapiens
  chr21:38446387-38446790
  hyper
acgactctgttgccacctgttttcgtgtgaactggcagtccagtccagggcctgtccccacggaacggacccaggaggggggtaacctcgccgctcccctcgcccccgcgcctctttctgagcattctctcccacagacgctaatgggaaggggggtggacaggatcgagtctggccagctgctccgcagtgttgacgctgccagtgtggcctcttcagccagcctgttcaggagacagaatagggggatcaaagataaaaaatgaagccgagacgtaggtgaatttgggctggtaccagtgcgccgtgccttttccagtggcgccctggacgccaaaaccccctcagttgcagagacctttcaaaatatatgcactctcctactgggcgatgcggtccttag

SEQ ID NO: 226277 - DNA, 105 bp, Homo sapiens
  chr21:39288093-39288198
  hyper
tggggaaggggacgcggggacccgagagcacggaacgcctcgcccaggtggacgccagctcctcgcctgcgagcagctcagcgcaccgcttacctggctgcggac

SEQ ID NO: 226278 - DNA, 300 bp, Homo sapiens
  chr21:39288703-39289003
  hyper
ccgactggctgagccccgctggcagcgcacgaagcgacgcggctccgagataaaagcgagtgcagcgccgcgtgctggggaaaaagccgcacagcgccggcgcggtccgggaggaaggggcgggggcgagcaggacagagccacagacccagagacgcccaccccgccgcccatgccagctagcgtgtcagcgcgtcgaggaccgggcttggtgggggcgggctgggcacaaaccaacgtgcatcccccgccactggaaacgtgggtgctccatgctgggggaatcttttgggtttcggt

SEQ ID NO: 226279 - DNA, 186 bp, Homo sapiens
  chr21:39289095-39289281
  hyper
gggagcagttttgtctgctggttgtaggggttcggcttttagggttttgtgagataaggaaaaagaggctctgggcactgcctcccaccgggctgaaatccgtgagaggcagccccggcgcgggagccggagcctgcaccgcccagagggggcgcagcgagcggccgggacggaggggaggggccc

SEQ ID NO: 226280 - DNA, 623 bp, Homo sapiens
  chr21:40032286-40032909
  hyper
gccgtccctcccggcgctggacgccccacctgtcccggcgccgtcggaagagccctgcagagtgagcccctagggccaccccgctgccttcctccccgtccccgcagccgctgtagccagcgtgggagccgggcaggtcgcgtggggcgctggacttaccgagaggttagcgccgccgtcgggggagggcgtgtcccgcacgtgtgtgtccgcgcgtgtccgcgcccgcgtgtgccagcgcgcgtgccttggccgtgcgcgccgagccgggtcgcactaactccctcggcgccgacgggctcagcccatggtgtgggcgccgggttcagggaggctccggctcccgccaatcgcggagcagggcggccgccccgacgcgcgacttgcgaacccggagtgcgcgccgggggcggggcagggacgcgtgggcgggaatgcacgcgcgtggccaggtgcgcgtgggtgcgagcgcgcgggagtcttcgagtgcgcgcgtgtccgtgtgcgcgtgggtgtgggtgtgctcgcgtgtccgtgcgcgcgccctcggggccaagagcgcgggccgcgcgggcaggtttggacactacgcgccctgctcgggtttaggacgcggctggcgg

SEQ ID NO: 226281 - DNA, 180 bp, Homo sapiens
  chr21:40033073-40033253
  hyper
agaggggaggagagggggtcaggggagggaaagtgtgggagggggagccgcgggggtgcgcgctcctcctaactcggggtcgcttttagcgagaagtgatatttttccagcctcattgaaaaccgttgcaaacattgaaaatagtaaaagtgaaaacggttgcgacactaagacgtttat

SEQ ID NO: 226282 - DNA, 1120 bp, Homo sapiens
  chr21:40177485-40178605
  hyper
ctcagggccagccggcgagggacccagccgagtgacagcaggaggcggagggaaggttgggccggaaggtgtcagccccgccccgcgctccctcgccgcctccgccctcctcttctctcccctcgtgcgttccctctcctctccctccgctcccccaaccctcctgctgcccccttccctctcctcccgcttctccccatcctgcctacctcccttcccctcctcttctctctcctccccttccctcccctctctcttctctcctccctcgtttcctcccctcccctccactcggccgtccctccttcctcctccctcctccctcctcctcccgctcctgaagagcgcgccgcgtgggggacggcccggttacttcctccagagactgacgagtgcggtgtcgctccagctcagagctcccggagccgcccggccagcgtccggcctccctgatcgtctctggccggcgccctcgccctcgcccggcgcgcaccgagcagccgcgggcgccgagcagccaccgtcccgaccaagcgccggccctgcccgcagcggcagggtaagagctgggcccgcagagagcgcccggcgcgcggctccagtcccatggagggtcacccggggcctgggcgggggtcgcggggggcactgacacgcagatctcggggcgctgccgggggtgcaggtgggggtggcggctgctgcgaggactctaggggcgcgcgtctgagttccgcgccggctcgttttccggttatggagtggcctccggggctggcggggtcggccggggggttcctgcgtgctagggccgctgtcttcggggtcgcctagcggcgggcgcggccagggcgcgctggcttgtttcgctcgcttttgtttttaaaaggaaacgcaggcctggtagggggtcctgcccagtggatgtcccggcgaacatgatttcgcgaacgggagtgggggcacaggagagcgtgtccgaggtggcctggcgccccggctttgagggtgacttcctggagcggcgccgggcccggaggatctggggcgcccaagacacctgaaggctgcggcaccgcgggaacctgcggggcgcggggtgccatggtcacctgctcgc

SEQ ID NO: 226283 - DNA, 88 bp, Homo sapiens
  chr21:40751598-40751686
  hyper
gctgggattacaggcgtgagccacctcgccctgctcactttgcatacatttgagttgggattctttcgctgcaaaacctgatcttcac

SEQ ID NO: 226284 - DNA, 70 bp, Homo sapiens; identical to SEQ ID NO: 206012
  chr21:40941233-40941303
  hyper

SEQ ID NO: 226285 - DNA, 944 bp, Homo sapiens
  chr21:42539420-42540364
  hyper
cagcggacgggaaacgcctcgaaagcagccagacccggcgactgaaatgaggcggaggagcttggcgaggggaggcgcaggctcggaaaggcgcgcgaggctccaggctccttcccgatccaccgctctcctcgctgacctccgagtcacccccggaagctcccgccactgccgggcgaatagacccccgcggacccccaagcgcgcggggccggggccctagttcaggccctcgctgcccctttaagggttctcgaaactttccccccggtatcagatgagcctcgtcacatccgttggccgtggccgctggggcgctttccgaggaaattcgggactcgagtttcccggggaagaggcgcggcctgagcccggcgagggtggggagggcaggcgcaggtggaccccggcgccccccgagccccgctgtgaccttggccgcgggggaggggctgggccgctgcggggcagtcgcggccgccagagggggcagcggagaagaacttgcccaacttggcggcgcgggctggggcggctctgcgcctccgcgcccgcctccccggcctccgccttctcccctcccgcgagcctcctcccctcccgcgagcctcctcccctgggccctcctcccgtcctccccgccgccgccggtcccggtgcgcgcccatccctgcccgcagccccgcgcgccggccgagtcgctgagccgcggctgccggacgggacgggaccggctaggctgggcgcgccccccgggccccgccgtgggcatgggcgcactggcccgggcgctgctgctgcctctgctggcccagtggctcctgcgcgccgccccggagctggcccccgcgcccttcacgctgcccctccgggtggccgcggccacgaaccgcgtagttgcgcccaccccgggacccgggacccctgccgagcgccacgccgac

SEQ ID NO: 226286 - DNA, 87 bp, Homo sapiens
  chr21:43067058-43067145
  hyper
tgtcactgcatttaccgcaaatggtaaacgttcacaaacattttgcgtaagtagacatcataatcaactttccggagaaacagaaat

SEQ ID NO: 226287 - DNA, 437 bp, Homo sapiens
  chr21:43373386-43373823
  hyper
aggggctgcagcgacgcctccaggaaagacctcggcccggaccgcccgccccggcatctgccgccccccggcccgcagtcccggaaactcacccctttcctctcggcctcctcgttcagggcggtcacccaggccgcctgccactggctcctccagctgcccagcgtcaggatccaggagagcagcgcgtcggaccccgggcgcggcccctctccaggctccaccgcccgccgctggggctggggtcgcgccctggccagcgcccactgcgccaggtacaggcctaccgtggccagggccgcgacgaagagcgacaccagcgcgagccactgcgcctccccgagccacgagcccagccgggccatggccatggcgcatccccggcccgcctcgccccaacttccccggcagccccgggccggaacggcggactcagg

SEQ ID NO: 226288 - DNA, 369 bp, Homo sapiens
  chr21:43373996-43374365
  hyper
agcggaccccgcggcccgcgctcccgactcggcgtctgggaagttcctgggccgctgcgggccgcgcttcctcctgcgcgcgccgccccgggcgtcccgcccgcggcccagcggtggccggaggaggctctggccgcggggcggggcggggcgggggcggtgcccgagggagggggcgcggccgggcctgcgggggccgcagtcctcccccctgctcccaacgcggcgtgcccccgcccccctaaaggcccggccttcccggccccgccacgtgcgcgcgtcgcccgcccctccggcgcctgcccgcgggccgcgaggtgacccgggcctccggattcatcagcccaaccccggcggctgctgtgcggc

SEQ ID NO: 226289 - DNA, 480 bp, Homo sapiens
  chr21:44494898-44495378
  hyper
cgctcggcggaaagctcgccaggcgacccagacccgaacccgcgggctccccaagacaacagcgccgggcggccggatgcacgtgcgtcccgggaaggcgggttcagctggcatcgcctggccggttccgttcgctccttaaaccacaagacccccttggggtcacgacgttcccggggcacccctgcactcgcgcgccagcactcccggaggggcctggggaaggccacgcgcacggagagcgggaaactcctctaggtttccaggtgggagatccagaccctactgagacccggaaaccgccggccactccgcctccggaagcgacactttgggacaaagctggggacaagtaagcccagaagatcctcgggaagccgagaatttcgcgctccgctctcccacccacgctccgcctcccgcttgcatcctacagctcagctgcggtctcgcctggggctcagggaagtgaggtcccag

SEQ ID NO: 226290 - DNA, 594 bp, Homo sapiens
  chr21:44495431-44496025
  hyper
agcgggcacccacctcgcgtgccgcccgcgcaacgacagcgtttaccgccaccccacacggtccgccaaaaagggcgatttgcaaacagccatttcccatccacaatgcagcgaactcaatgctgggcaccgaaacgtgcatctcccccggattcccaccccgcgtccctgctccacgctccaggactcgccgccagtggggtccactccgccggcgcgggggctggggtgggagcccggggccacgtgcacggccagcccccatcttctgggcggtcaagaccgcaggcgtgggcgccggtggggcgggggtcttgggagaccctgtctcgccgcctttcggtgcagatgatgcaactctgggcggaggcgcggagagggaaaccgggacccagttgagatcctctgtccagagaggggagcgagtctcggtggggccggatctcacctggacggatacatggaaaagaggggcgagcggctgccccgactgcggcgaggcggagacggcgaccccggggtggcggcctcgcggggacccacggcgaggggagcaggcgggcggtgattggcggagaggcgggggcggaggcc

SEQ ID NO: 226291 - DNA, 614 bp, Homo sapiens
  chr21:44496297-44496911
  hyper
gccacccccacccgcggaccccggtggtgtcttctacctggtgttccgatgctgttttacttggttaacttcttgcccttcgggaatttaaggaacctttactgatgagcttgaaacgtgcgtcctggtgggtggggggccctgcgcgtcctcgaggaccgaccccgagggcgtgtgtcgcgggcccgggagggggcgccgcgccggggcgggactcgatggccgcgctctgtggccgccggacgccgtgcgcagcgccccgcgtgaccgcgcccagagccgggtccgaaccccgagccgaggcgcagaacagtcgccttgcgcggctccggtgcggcccacggccaggggctgccgggcgctctcggggacggggccgactccgcgcagggtggtagcaggggcgccccgcggggctccttcgccaggtcccggaggccgcgggcggggccgtttcccaaacatcgtgctctggactttcagaggctgaacctgatccccccgccctatggctaaatgggggatcccaggcccccgagtctccccccggacctgcagcgaaagacacggacggtgcccatcagctctgggcagaggaacgtgctgcgcctccg

SEQ ID NO: 226292 - DNA, 110 bp, Homo sapiens; identical to SEQ ID NO: 206026
  chr21:44513219-44513329
  hyper

SEQ ID NO: 226293 - DNA, 208 bp, Homo sapiens
  chr21:44514586-44514794
  hyper
cgacggcggccatacagctcccgccgcagctctctggaaatgggcttcaaatgcatgaagttgcagaagccgcctcgtgtgcattctctgtgggtgggttggaaggagacatttactacctcgtgtgcacacggccccgaactgtgctcagtcacgtcactggccactcctcactcaccccatctcatactgacggcagcaggcttct

SEQ ID NO: 226294 - DNA, 261 bp, Homo sapiens
  chr21:44847473-44847734
  hyper
ctccacgcggcctgcgttcgtccagactcagagcctcgggacgtgcgggggcccgggggcctcgcgggctcgcgcgtggggctggcggcgcggatgccctggggcgctgcagaccccgagaggccgcttgcccgcggggacgtcagccgcttttgctgttaaaatctgaaatgttcagcaagttagaaacttgaaacctaaggaagcgtgaccggccgctctggaagcccccgccgcgcggccggtcccggccccggccct

SEQ ID NO: 226295 - DNA, 179 bp, Homo sapiens
  chr21:45182012-45182191
  hyper
gcctctgcaaggttcgggggtggcttcgtttgcctggagtggccggccctgcttgtgccatgtggatgtttgtgagcctcggtcctacagcactgtgtaggctgcatctgtttcgtgctggtcctgttgacttgtatgatatccacaaataaatattttcatggcggtcgtgttgaggc

SEQ ID NO: 226296 - DNA, 108 bp, Homo sapiens
  chr21:45182717-45182825
  hyper
atgaggaccccctctggacgcccctccccatggagaacaccaggagccacagaccccagaccacagagcacacaggggagggcacggggcggccggggcagggtgtct

SEQ ID NO: 226297 - DNA, 397 bp, Homo sapiens
  chr21:45381212-45381609
  hyper
tgtctcgtgggaaacggtaagcgcgtagacactttgtctcacgtgagaaatggtgaacccacatacactttgtctcatatgggaaacggtgagcgcatagacactttgtctcatgtgggaaagggtgagcacgtagacactttgtctcatatggaaaacagtgaacgcgtagacactttgtctcgtgggaaacggtgagcgcgtatacactttgtctcatatggaaaacagtgagcgcgtagacactttgtctcgtgggaaatggtgaacccacatacactttgtctcatatgggaaacggtgagcgcgtatacgctttgtctcatgtgggaaatggtgagcgcatagatactttgtctcatgtgggaaatggtgaacccacatacactttgtctca

SEQ ID NO: 226298 - DNA, 63 bp, Homo sapiens; identical to SEQ ID NO: 206032
  chr21:45553436-45553499
  hyper

SEQ ID NO: 226299 - DNA, 144 bp, Homo sapiens
  chr21:45660255-45660399
  hyper
accgtgggcaccagctggccttggagagcgctcggccggtcacctccctccttctcccttcttctaggaaatcagcagtgccagggagtggaaggggcagcgcccgtgccccggcgtgcagggtgcgcccgccttccctccctc

SEQ ID NO: 226300 - DNA, 196 bp, Homo sapiens
  chr21:45662515-45662711
  hyper
gggcgcaggtgagccgggcgggctgcgggcagcgccacctcctcccggaggccctccctgattgaccggccgggaaccgcgcgcctctgggcctgcggctgaggtccggggctgcgccgcgccgatgagctgacgccgggccgagcgctccacccccagggccgggcgcacctgaatcccctccacccgcgggact

SEQ ID NO: 226301 - DNA, 329 bp, Homo sapiens
  chr21:45662726-45663055
  hyper
gcccccggataccgcgtgggggctttgggaggatggggaatgggtcctgggggagcagagcctcccaaattaaggcctcccaagagcgcggccggtcatccgcggcggcgaagggaaggtgccctgtcggtgcgtccggaccccgcagccccccagtgccgcccgggggcggtgggagaggggccgacaccgcagggcccgccgtgctgtggccgagggggcaggtccaggctctgcttcccgggcagacgccggagaccccagcaagccaagtgctgcgggcagccccccccccgcccccccgagagaggggacgccgcgtggaggcc

SEQ ID NO: 226302 - DNA, 227 bp, Homo sapiens
  chr21:45713546-45713773
  hyper
cacttgcgcctagacccgccgtccagccctgggtggtcccaggggagagcgcacagggctcgggttcgggttcagctacatttcccccggccccccgcgtcaccccgcgctgttgcctcccacagaacctggctcctggtgcgcgttgcggggtgtgcggagatggtacggacgtgctgcggtgtactcactgcgccgctgccttccactggcgctgccacttccca

SEQ ID NO: 226303 - DNA, 1578 bp, Homo sapiens
  chr21:46351315-46352893
  hyper
gcatcctggggcacggacaggcggaaccgggccatcagccgtccctgcgcacagaggcgcacagattggatccggcctcgcagtcccaggagccaagaggggaggcacgcgtgccggttctcggaaattcattatgggaatgtgcgcgttgtggagatgctcagaccgcgaacagtactgcgggaacccaaacgatcatttttaaccccagacgtccctgaaccaaagccaaagtctacaggtcactggggcagaggccgcccgaaaccagctgtcccctcccggcctaggcgcgccaggtccccgcccagccggggcgatcctttggtcggacagtgaggttgggagcccaccgcacccaagtgccgccgcatccacccggcgcaggcgacccccgacgggcagccgctcaccttctcctggccccgggcttcaggaaaactgcctggaggtggccggggtctccctagcggaggctgggcggcgggcttcgcgcctgcctcagtctcccaatccgtggcccgggggatggagcccgctgcgcgcagaggctgcggcaggtcccagccaggtgccctggaacgtggctcctccttccctgaggcgctcccctgggcacgaggatgggtctcgaagcaggaggaagccgccttccctcacccgctgtccggagctgctcagccggtgcgcggagcctcccccgccgcggacaccacgatccgacccccaccctgaccccgacccagacccccaccgcccgaccccggccgtattccgttgcgtttgctccctgccagctccggggccaccactgagcacgcgctgtgagtaggcgcttcctggagcttttcctgggggtcctcagaaaaacccctgccgtccccattatagagatggggaaactgaggctcaggaaggccagagcttgcccaaaacctgcggtccgcggcgggcagggattccacgctccgagcctggccgcctccctggggcgcgtgaagggagctttccttccccgggaaaggccggggccagagacccgcactcggaccaggcgggggctgcggggccagagtgggctggggagggctgggagggcgtctggggccggctcctccaggctgggggccgccagctccgggaaggcagtcctggcctgcggatggggccgcgcgtggggcccggcggggcggcctcgggaggcgtccaggctgcgggagcgggaggagcggccgtgcgggcgccagcgccgtgggtggaggtcgccgtccctcctgaggggcagccggtgcatttgggacccgggagcagagcccgcgcctccccagcggcctccccgggggtctcaccgggtctcccgagagcggaggccccggctccgcagaaacccggggcggccgcggggaagcagcgccctcaggcgtcggaggagcccccagaaggacctcgcgcctccccgccgggctccgaccgcctgggttcggtgcgggacggcccaggccgccaggacccccaagcgcagctcagtctgcggggcacgacccagaggccagcagcagaggacggggccggggccgg

SEQ ID NO: 226304 - DNA, 117 bp, Homo sapiens
  chr21:46686339-46686456
  hyper
tcagtgagctgggccgagcgcttcgcgcagctgagggcaggaggctgagagctcagtgcgaagcctccccacagcaggcttcctgggctgcggagacagcaccgccaaggtcgcagt

SEQ ID NO: 226305 - DNA, 180 bp, Homo sapiens
  chr21:46800716-46800896
  hyper
atctgtgcacacaccctcacctcgcacccagcatctgtccgtgcacacacgctcacctcacacacactcccctcgcacccagcgtccgtcggtgcacacacgctcacctcccgcacctcccgtggaggcggcatccaggcagggaagcaaggacactctgcgtccattcctctctctaaa

SEQ ID NO: 226306 - DNA, 104 bp, Homo sapiens
  chr21:46800994-46801098
  hyper
aacatgattttgtggccccaaactccttgaagcccgatgcttccacctccctcccactccactctcccccgacacatccgtccagctcccgttcctcttgggca

SEQ ID NO: 226307 - DNA, 242 bp, Homo sapiens
  chr21:46801324-46801566
  hyper
ggagagaggggtgccgctcaccactgccccctcccaagcccagcgtctaggtctggttcaccctcgcgaggtcgcctggcccatgtctggctacctgagctggccactgctgaggcaaagcccacccggctgctgttctggaagtggctctggaaagcccagctcctgtgggtacaggatcgctgagcgccaggcatgggggccacagccaaggcaggatcgctgagcgccaggcatggagg

SEQ ID NO: 226308 - DNA, 104 bp, Homo sapiens; identical to SEQ ID NO: 206041
  chr21:46950778-46950882
  hyper

SEQ ID NO: 226309 - DNA, 173 bp, Homo sapiens
  chr21:47050917-47051090
  hyper
agtcagatggcggccgaggctggaatcatccgaaagcttcttcactgggacgcggtcagatggcggccgaggctggaatcgtccgaaagcttcttcactgggatgcggtcagatggcggccgaggctggaatcgtccgaaagcttcttcactgggacgcggtcagatggtggc

SEQ ID NO: 226310 - DNA, 810 bp, Homo sapiens
  chr21:47062142-47062952
  hyper
gcatcccggtgacccggcagcccctggcgctcgcgggaggcgggcgggcgcggaccccaggctttagggcgcgattcctgcagctggctgccggcccgaggttctggggtgtctgaggtctcgggcggggcgaggacgtttctccggctcagcccccccacctcctgccctgccgccccccacacccagctccccacggacgccaagaggcgcctcccaccccggcgaggacccgcggggaaacggggcccaggcgcggcgactgcggaggacgcgcctcggccccagcgccctggtcctcggggcgtccggctgcccttgcccgaggccggggcgggcgctcagcgccgcggaagaaacgcccgggcggggacgcacagcgaggcgggctccgcgggaagtaccgggaaaacggcgcggagcggaacagcccggagccagcccagagaaagggcggcctccccctgcagcccccggggcccagcaacgccccgccccaggccacggcacgcgaacgccgggcgggcggaggggacagggcggcgggaccagcgcggggcgggcagcgtctgggcacaggctcacgagccgctcggggcccctgcccgccgggcgctgcggccccagcctccgggccggggccaggcccacagagaacgggaagcgggcgctgcagggggaccttcggggttgcggcacggctgggaattcaacggccattcccgtcccgtcgggcccacccgcccgcccgccaaatccccgcccaccgcggatccgccccgtccaccaaggtctcgctcaccaacggcc

SEQ ID NO: 226311 - DNA, 1124 bp, Homo sapiens
  chr21:47063293-47064417
  hyper
ccactactagtgaccggcccgcccgttcgaggccccgcctcctccccgcccaatgctcggccccgccccgcgcgtcattgggccaggtccccgccccgcccccagccccacccccgcccctttgactggagttggctttttccagagaactttccgggctcggattggccgcgccggttgatgttccgccctttcattggcccgcggcgcccgctttcgcgagcctgcccttgggcgggggcggggccggcggcggcgcgcggcgctagattggttagcggcgcagaggggcgggcccgcgccgcgcgcagcgctcgggctggagcgcctgaagccgcgaccgccgcctcagccgcctcagccgcggtcgccgccgcttcggctgacttaggctccgccgccgcctcctcacccgcctcgccccgaccccgcccgggcctcccggcctctccccgccggcccgcgggctcgccgtccggcgcagggcaggtgagtgagcggtggcgggcggggtcggggtcgggcgcccttgcgggttacggggacccagtccccgacggaggccgagtgacggggcgaccccgggccgcggcaaacttcgcccgagccggggcgggcgggggtcccgggctgggtcgcgccgtccccgaccgccgccggcgcctgcggcggcccggggcagcgaggggactcgcgctccctcaaggtgcggtcgccaggcctggcccgcccgcctccgccccctccccaaattcggaagttgcggcgggaagccgagaacgtctcggatgtgggtcagaaaacgtctggactacttgaggcttcagtttcaaaacggcacaaatttcatctcttgattgagaagagatctggggaacaccccggagcggccgcggcggctggagggcggcggggcggggcgcggggcctcctccccctggacggccgccgggagagcgcggcctcacccctcggtgaccctgcggagagccgcgcgcgggcggtggggcgcgcgcaggtctctcttgttgctcgctgtgttttattttaattttgggggtggttagaacgtgtttcttattgtccccacacgtgttctaattggaagtcttgtttcgtgaaag

SEQ ID NO: 226312 - DNA, 281 bp, Homo sapiens
  chr21:47649462-47649743
  hyper
ccgcgtagcttcgccggggggagtggggtaggcgcggtgaggccgtgggcccccacacctggcggaccacaggggccagaagccctggagccccgccagggaagggctgcgtcgctggccaggaccgagcgcggtagagcctcagctgctcacggggtcgctggagttgggggtggccccaggagaaattaaaggtgaaaagccttagcagcagagggaagaggaagatggaggcagagcgagtgaccgaacttggaagggacagccgggcgcaacagggc

SEQ ID NO: 226313 - DNA, 631 bp, Homo sapiens
  chr21:47717279-47717910
  hyper
caggttctggtgaaggtgcccggagccgggtcccgccttcggcctgagctagagccgcgcgggcggccggcttcccccaaaccctgtgggaggggcatcccgaggaggcgaccccagagagtggggcgcggacaccttccctggggagggccagcgcgcttccttccttccagatgttccagaaggagaaggcggtgctggacgagctgggccgacgcacggggacccggctgcagcccctgacccggggcctcttcggagggagctgagggccgcgttccttctgaaagcgggacgcgggaggggtggaggctgcggggagccggggtcgcacacgaataaataacgaatgaacgtacgaggggaacctcctcttatttccttcacgttgcatcgggtatttttcgttattgtaaataaaacggttccgagccgtggcatcgagagggcgtctggagttcagggaacgcgtggcccccgcccgggagcaccgcgcagcgctcgcctctcgcccttcaagggggtccctgcccggagcctgcgcccccggagaggaaggggctcgaggggcttgggtgccgcagcgcgtccttccgtagaaaaggcttgcgtcagtatttcctgcttttac

SEQ ID NO: 226314 - DNA, 140 bp, Homo sapiens
  chr21:47799137-47799277
  hyper
gtcatccggggctgcgtgtcgtgagctgcgcccgtcttcctgggctgcgtgtcgtgagccgcgcccgtcttcccgggccgcgtgtcgtgagccgcacccatcttcctggggctacgtgtcttgagcggcacccatatacc

SEQ ID NO: 226315 - DNA, 1077 bp, Homo sapiens
  chr21:48087126-48088203
  hyper
atgatgcagagggctctgtgcgcctggcgggctctgtttgcctgctgggctctgtgcgcctgctgggctctgtgcgcccgggaaggtgcggccaccctcacgcggaaggcggccagcggatcccggtgcgcgcagctcccagcgctggggttccagcgccccgcctcttcctatagcaaccagcgggacctgccgtcccccggggcaccccgaggggtctgcgcccgcttctttccgaaacgggaaggcgctgggggctcggcagccagagggacgggttcagggagcgtccggtgagcctaagacgcgcctttgccggggttgccgggtgtctgcctctcacttaggtattaggaaccgtggcacaaatctgtaggttttcctctgggggtgggcggaggctccaaaccggacggttttctcctggaggactgtgttcagacagatactggtttccttatccgcaggtgtgcgcggcgctcgcaagtggtcagcataacgccgggcgaattcggaaagcccgtgcgtccgtggacgacccacttggaaggagttgggagaagtccttgttcccacgcgcggacgcttccctccgtgtgtccttcgagccacaaaaagcccagaccctaacccgctcctttctcccgccgcgtccatgcagaactccgccgttcctgggaggggaagcccgcgaggcgtcgggagaggcacgtcctccgtgagcaaagagctcctccgagcgcgcggcggggacgctgggccgacaggggaccgcgggggcagggcggagaggacccgccctcgagtcggcccagccctaacactcaggaccgcctccagccggaggtctgcgcccttctgaggaccctgcctgggggagcttattgcggttcttttgcaaatacccgctgcgcttggacggaggaagcgcccacgcgtcgaccccggaaacgaaggcctccctgatgggaacgcatgcgtccaggagcctttatttactcttaattctgcccgatgcttgtacgtgtgtgaaatgcttcagatgcttttgggagcgaggtgttacataaatcatgg

SEQ ID NO: 226316 - DNA, 579 bp, Homo sapiens
  chr22:17600945-17601524
  hyper
gcgccatggtgagacggaagcccgtggtgccgaagggcgcgcgtagctcgatgaggtctaggatggacgtgcccaggatcagcaccaccttgggagtgaaggcgatggagtagataagccaggccaggtaggcgaaggcgaactcgcccgctgccgcggccgcccccaggccgccccccgcgccgccggcgcccccgcgggctccgcgtgccttggccccagcggtagcggccgagggggcgggcagatgcaggggcggcgcggcgtggtggtggtgcaggtggtggttgtgcgcgccgctggctgcgccgccccgacggccccggctgttcttggcgaagaagatggcccagcccaccaccaccaccaggtcagtggcgatccaggagcaccagtacaggtcggtgacggcgatgaggtacaggtccagcaggccgccctgcgccagcagcagcaccacggacagcgcctggtagccccagcggcacctgggactgggggcgcagccgcggcgccgacctctgcggccggggcggtctgggcagccgcagcagcagcaacacgggcagcaggaggcgc

SEQ ID NO: 226317 - DNA, 540 bp, Homo sapiens
  chr22:17850263-17850803
  hyper
gccggggcccgcgtgggattaactaggaccggggcgggagtcgaccgcggccggcggggagggctagccccgctctggcgggcgggcgcgtggcaggggctcccggaggccccgagctcccgggaggcgctccggccaacttcgggccggtggggaccgggcctgggcgcggggctctgaaggtgtggaaggaaagtttgggactccgttattcttccacagcgtccttcctcccgtaatatccagcctctttatcgcggggctcgggagcccttggagttgatctcgccaccattatccccccgggcgagcgcggaggacgggctggccattctggccaggccggaggtgttttccagcccggggctttgtgataactgggccgaaacccgagggtcctggagcgcggcgggtggcgggagcttgcggagcgcggcgcactcggcggccaggcatcggccagcccagcggcagccccctttctcctatttttatttttatttttggaaggagctgagaattagtcgattggttggcagg

SEQ ID NO: 226318 - DNA, 152 bp, Homo sapiens
  chr22:17850879-17851031
  hyper
ctgcgttggtcagtttttgttttctgttctgcggatgggttcgccgacgcagtaatcaaaattagagccactcttttggaagagcaaatcgttgttgttgcctccccagccccacggatcttactttgtgccattttcgggttgattttaac

SEQ ID NO: 226319 - DNA, 664 bp, Homo sapiens
  chr22:19706043-19706707
  hyper
gcccagtcagggggatggctcggtcggcctcgggggtcgacgatcccccgggtaggcgacgtgccctgtccaggcctcacttcccgcgtccgcaaaacggggtggacaacgcagcctaaggcagagccgcgccaaggtccctcgctgtcgccgggctctggcggcctgaccgggcctggggtccgagcgtgcccccgggcctgggggggtcgccgcgatggactcgctggcagcgccccaggaccgcctggtggagcagctgctgtcgccgcggacccaggcccagaggcggctcaaggtgcgtgtgtggagagggcggaacgtgggtctgtgaccccgcgggctccgggactcggcatggggtccccgtccccgcgcgccacggcccgccagcgcctaggctcagcccttccctccgcagcggcctcgcaggtccgcggccccacggtggggcgacgtgccctgtccaggcctcacctcacgcgactccaaaacgcggcggagaatgcggccgtgggacccctccaggggccccaagggtctgcgggggctgggcgcctgggcgcgcgggcgggggaggctcggcgccgcggtctataaataggcgctgctccgccaccgccgctgccgccgcccccgcggctggatccgggccaggtggggc

SEQ ID NO: 226320 - DNA, 823 bp, Homo sapiens
  chr22:19748301-19749124
  hyper
ctcggcccgcggcgcggggcagcgctcagcttggtggcgggggcggcggcggcggcccgcgggtcatgatctccgccgtgtccagcccgtggctcacgcagctctcgcatttctgcgacgttgcagccttcacggccagcagcctgagcagcctgggggccgcggggggcttcccgggcgccgcgtcgcccggcgccgacccgtacggcccgcgcgagcccccgccgccgccgccgcgctacgacccgtgcgccgccgccgcccccggcgccccgggcccgccgccgccgccgcacgcctacccgtttgcgccggccgccggggccgccaccagcgccgccgccgagcccgagggccccggggccagctgcgcggccgcagccaaggcgccggtgaagaagaacgcgaaggtggccggtgtgagcgtgcagctagagatgaaggcgctgtgggacgagttcaaccagctgggcaccgagatgatcgtcaccaaggccggcaggtcagggcgcccctccccacgccgcgaccctccccacgtgctgccgccagggctgcgggcctccgcctgatccgcgcgagcggggccgaaagccgggtcgggggcgcggcctggccacctgcgggcccctctgggccccgctgcctccttcgctgttcgccgtcccggctccggcgacagccgcccggcgctcccctcctaacacctatcctccgccggggcgggaggagacggcgcgggccgcacgggaacggcgaggagccccgcgggactcgcccgcccgccccgcagccccaggacgccgcgcggcccagaaaccgg

SEQ ID NO: 226321 - DNA, 676 bp, Homo sapiens
  chr22:19753298-19753974
  hyper
gccagcaatcccttcgcgaaaggcttccgggactgtgaccctgaggactggtgagtgtcctcccccgagagagtgagcgccgggcgcctggcgcaggcgccgccctgatccgcctcccgcccgcaggccccggaaccaccggcccggcgcactgccgctcatgagcgccttcgcgcgctcgcggaaccccgtggcttccccgacgcagcccagcggcacggagaaaggtagggccggggtcgtgggatccgggttccggccctgtgcgcgctctaccccgggccggcggcctcgcccgacctcgcctgcgcccccggggcgctccaggctttcgcgccggttgcacaacggccgcggcggcgggcaagcgcgcactcgcccgcccggcccgacggctgcgccccgcccgccgccgccgccgcccgcagaggggcgcgggccccggggagggctcggggcgccggcgacttggggtctcgggcacgctggcaccgactggtcggggaacaccgagggcggccaagagccttctctccgccagggcctcgcatggggcgtcggagctcctcggcggccccggccggccgcgctcactcctcggccctctccgcagacgcggctgaggcccggcgagaattccagcgcgacgcgggcgggccagcagtgctcggggacc

SEQ ID NO: 226322 - DNA, 156 bp, Homo sapiens
  chr22:20255237-20255393
  hyper
taaccccttggtggccggggcgctccgaggccgggccccgcccttccagcccacggcccccgccctcgacttggcccagcatcggggaccctcggaccgccaccctcggccctgccgaagccgtcaactttcccgggaagcggcaacttttcctgc

SEQ ID NO: 226323 - DNA, 205 bp, Homo sapiens
  chr22:20255494-20255699
  hyper
cggcagcccgggacgggccctgcggctccggggagggggcgagccgcccccctccgcgccccgccgccggccgggctcgggtgcagcgcggacactcacctccagcggacgccctcttcatcgtaggggttgggcggggcgcgtcggggactgaaagtcgtttcggggcgggcgcccgtctccccgcggccgggtccgcatccag

SEQ ID NO: 226324 - DNA, 180 bp, Homo sapiens
  chr22:20791607-20791787
  hyper
cggacaacgcgtgtcatcccctgggtgcccacggcactccatcctcccctcaggtgacttctcgtccagggttccctgggatgcactgtcgtggcccatggccgaggctgggcctggaacggagccgcgctggctagggagccgaaggggcccacacttggcgtaggaaggttccggtag

SEQ ID NO: 226325 - DNA, 180 bp, Homo sapiens
  chr22:20791892-20792072
  hyper
ccgcgagggttcagttcctgaggcgccacggtgtccggcagcatccagagcagcagcagcagcagcagcgacggcagcagcggtgacggcggccccccggctccccggcgccgcgccggcccggccccccggggccctgcgccctccatgaggcgcggggcaggcgcggggcgggcacgg

SEQ ID NO: 226326 - DNA, 288 bp, Homo sapiens
  chr22:20792309-20792597
  hyper
cttggaggaggcccgccgagcgctggtggagggagggtccgcccgaggaatccccggttcccgcgcctttccctccgctccctagacatctaccgaagcagccgcccctgcgcgcccactgcgtaggccaggcccgggacgggaaggcggatcggggacacggacgcgactccgcaagcccacccccgctcccagcgcctcggaaccggccaagggagtggggcccgcagacagcccaggtcgaggccgaaagccaactccacagcaccccaccgcgaagtccttgta

SEQ ID NO: 226327 - DNA, 104 bp, Homo sapiens
  chr22:21385911-21386015
  hyper
tggccacggcacctgtgagcacgtagagacccgagcccaccatgccacccacgcccagaagagtcaggtccagcgtggacaggcagcgccgcagtgacgtctcc

SEQ ID NO: 226328 - DNA, 397 bp, Homo sapiens
  chr22:21386501-21386898
  hyper
ccccagagtcgagccggacccggaacaggagccgcggctctgcgtcggggcgggtgtggcccaggcagccacctggccacagacagacagtggcggctacatacacccccgcccctgcacccgtggccaggctggggtatccgcgcgccaggcggaatgcaggggcgccctgggcccgcacacctccccatgtccgacacgccgctgctgctagagcctgctccgccgcgcccccgtccccggacacctgcgccttcgcctgttcttgggcctgagcccgtcccagtccccgtccccgcaggatctgctgcaacccacctgctgctgccgcagccgctgcctccgctctgagcactgagcccgcccagttcgccggcgccgagcgcagggcccgccc

SEQ ID NO: 226329 - DNA, 780 bp, Homo sapiens
  chr22:22005810-22006590
  hyper
gcaaagtggatcacaatcacgaagaaaccaaagcttacacttccgttccccatatctcccacagatccaaaagaccacggggcccaggacccggtctccatagcccagccatacccgggggttttcaggaaagcctcactcgcgtcctgccgggcgatccggggtggttgagttgggaggggggctaccccagtttgtaagcccaccacgtccaaatatcccatccaggaggcgcagagagcaacctcagcatgcataacaaagcagcccgcggccgcgttcacagcaggcttggcgggggttcgggaatttccacagggtctcggcctcccccactgtgggctcgcgcctggcgcccctcaccgggcttccaagcgctcttgtcggtgtcgctagaaaactcgcagagattggagctgagaaaaggcgggcaaagttccttttgataagttatgaatggggaaaaagtgtttgtagaactcattgttaaaaccacggagcccgagactcggccggcgccgggccaatcggaacccggaggctattttgaaatctctcccgtctcagccaacaggcatgcaggaggcgaatccccgcgccagcgccggccaatgagcgcagcgctatgctaaggagtcgggggcccggcccctccgactgtcagcgggttaaagatggagccggcaggcgaggggccgccacgaggtgcagggtcgtctggacggggacccgggggcagacgatggccgggatcctcttccgtctaaccctccgcgtcct

SEQ ID NO: 226330 - DNA, 332 bp, Homo sapiens
  chr22:22090486-22090818
  hyper
gttcctccggctcgcggggatgggccgagggcgtgcagggcccgcagctccagaggctgaggcgagcttgcgcgcagcctcctcgtccagcgccgtgcacgtaccgcccgtccgcgcggtcggccgcgttgtaggggacggacgtggaggccgaggcgagcttgtgtgcgcctgaccagggcccgccttggccggacccctccgcggccgggtccccagaatgcggtcgtccgtgctgtcccgtccccaccaccctctctgaacccaaggacctaaccccctaggaccccctcgccacggaggaccccccgggtctgcgtctggcccctcgc

SEQ ID NO: 226331 - DNA, 105 bp, Homo sapiens
  chr22:22221216-22221321
  hyper
ctgatggaattcacagttttacaatcgaaagtccaaaagaaggccatgatactagcaaattgaggggtggggacccttccgttgccttcccgagggtccagactt

SEQ ID NO: 226332 - DNA, 372 bp, Homo sapiens
  chr22:22292760-22293132
  hyper
taaggcaaggctgcgctcccagggaatgcgggcagggagccagggcggagggcagaggacgagagcgaggaggagagcgcgggcacccactgatgctggcggcctcgggtattcgctttctctctcttctcccaccttgttccttttccccggatgcacgcatgcactagtaatgccgaatttagaacaacagggaaaggaaaggaaatggcaaaggaagggaaaggaaatggccgacaggaaatggcaaggaagggaaaatccactgcaactctgctgcctgctggcctgtccagggacaactattcagctgggtgggacgttgctacccccttgtggcacccctgctgcagcctgcgattcttacgccct

SEQ ID NO: 226333 - DNA, 216 bp, Homo sapiens
  chr22:22306476-22306692
  hyper
gtcaagcgctgtgccgaaatccctgcagccggagccagttcttcctgttgtacagacaggttcaggggcttgcctgaccgaacccagcggcaatgtgcccggcctccgcgcctgaggctctggctcacagacctgtggctgaagcagctgcagcccgagcacttgtgcagctgacgctcgcttcacggacgcttgggaggccgcggagccgggggc

SEQ ID NO: 226334 - DNA, 105 bp, Homo sapiens
  chr22:22307262-22307367
  hyper
cgccgcgggcgccgcgcaggcgcagtcgggcctccaggctggcggggccggacctctgctgccccctggcggctacgtggacggtgactgcggccctttagtggt

SEQ ID NO: 226335 - DNA, 757 bp, Homo sapiens
  chr22:22862550-22863307
  hyper
gggcctacaggtctccagaactggggagggcctggggttacaaagcagttttcagatttttaaatacattgagcgccaaaagagaccccgcgggggcgatgggggaggggagcgcactgggagccaggaaaggccccttctccaggaggcccgggcccagcccgggggtgggggcgtctgcgtgagggagtggaggctgatgtaaaagtggcgcccgctgagattagggaagggggtgtgcgtgaggggatcgtgggacctggttctgccctgcactcccccacagaaagcggctgtattgcaaaggccgctccggcagcgcacggccaagcgcggtgtcgcgacccgcagggctgcggctcgccatgaaatccctcaagtctcccctcagggaacgctgaagccgcgccacgcccccgtccttaccagtccggatcagctgctgttcgcgagctgccggccacgcaccagccccggaggcgctcccggggcacagccggcggcgactacgcctcctcaggcccccggcgccgccgacgcgcacgcctccacacgcgcgcgtccagtggagacctgcgattggctgccaggtgccggcgcgagatcggcgcggctccgagctaggagcatgcgcgcgctctgacgcccctggtggcgacggctggacgcggggttaaattgagaaggaggagggcagcagcaatacccctgaggccttgaaaggatcttgggttccggatcacggttccaggcagtc

SEQ ID NO: 226336 - DNA, 199 bp, Homo sapiens
  chr22:23523110-23523309
  hyper
cgcgcagcccggcggcgcaggtaaggccggccgcgccatggtggacccggtgggcttcgcggaggcgtggaaggcgcagttcccggactcagagcccccgcgcatggagctgcgctcagtgggcgacatcgagcaggagctggagcgctgcaaggcctccattcggcgcctggagcaggaggtgaaccaggagcgcttc

SEQ ID NO: 226337 - DNA, 229 bp, Homo sapiens
  chr22:23908684-23908913
  hyper
ccgtcagcgccaagcgcggccccgcggctccgccgagagatcgataactaatttcaccgcggtagccgccccagtttttccccgataattgcgcgccggcagctgtgagcgaggcccccagcgcggcgcgaagcccctcccgcgccgatcaattgacaccgccaccgggcggcaggaaaactcatttttctttctctccccggctccgggtgggcgcgagctgagctct

SEQ ID NO: 226338 - DNA, 47 bp, Homo sapiens
  chr22:24110159-24110206
  hyper
gcggggccccgggcggggcctcaggaacacgcccccagcgggaggcg

SEQ ID NO: 226339 - DNA, 458 bp, Homo sapiens
  chr22:24110419-24110877
  hyper
gttgggggttgttgcgagccctggaggggagaggagacggggaggcgacgggatggggccagctgggaaggggacgcgaggctccaggctggactccgctctctgccccctcccggactcggctgtctgtcccctccctccagacagggtctgctgaccaccgcgtggcctgggagtctccggtggcctagggaagtgaagcgcggccctggggaaggcctggagcaacccatccccagaactcccacgagggggcgtcccaacccgtcttcgactgttggccaaaatgcgctgccaatgctggcagccttacgcagtgcccgcgggggatatgaggccccccgcgcggccctgaaccccaccggattccccgggccggcccgaccgcccccacctagtccctggccccgcgagtgcaacccccgacactaacggcctttacgcgacatccgagcagc

SEQ ID NO: 226340 - DNA, 240 bp, Homo sapiens
  chr22:24552184-24552424
  hyper
ctggcggccgccccccgcctcggcgcaccaggcgcagcaggaagcccgtgggctgtggtttccccggcgcccccgcggaggaaatcggccggcggcggggtgctgcgcccccatgcccagggcgggctggcacccggttcagcgtcaggtgggcggccaagccggcttgggcggcggcgcgcgggggcggcaggcgctggtgaagcccgcacacgcgccagcgcatccagccctaccaag

SEQ ID NO: 226341 - DNA, 380 bp, Homo sapiens
  chr22:24552731-24553111
  hyper
tgggatggggggtgggcacatagagcctacagcagagttggcggcggggctctcccatgcacttggttgtttgtcgtttctgcttttcccgggagggggaagggaggaacagcccggcagttctggggaccttagcgctccacgtcttatttggcaggagaggctggaaacgagcgggcgccagctgcaggcaaattgcaggctttcccagcccttgtctgcagagagaatcattacctgtggatggcgcggggaatcccttgccctcagtagccccgcctggagagacaggaccgcgttgtggggggtggggtgtaggagtgggcggaggccagggcgcccctggtggcctgtgtacaaccctgcggccagagaggccc

SEQ ID NO: 226342 - DNA, 646 bp, Homo sapiens
  chr22:24819901-24820547
  hyper
cgggagccggcgtgcgagcggcaggtcagccggggtgctaggtctggcgtgcggggtcctgggtgccgggtccggggtgcggggtgccgggggtccggggctggtggccgggcggcgtggggccgtcgggggtgcggggccgggaggactgggaggctggggttctgctcccctcagggttcctttcccgccgccccgagaccagttccccggcgcggggtccgagtcctgccccgcggcggctgccggcactgcctgtgaagggcccaggcacagtcacgtcccaggcgcagttgcggcgccgcgtgcgggaccctccgagctgtcccaaactgcaccggaaggcgcgcaggggtaggcggggagggaaggcaagtgcggcggccggcgcggcgcggggtgcggagccgcaggtagcgggcggggagcgtccgtccgtcagtccgtccgtccgtccatgcgccgcagaccggccccgcgcgctcgcatgaaccttcgcgagctcctccagcagggatggaccgggggcgcagaggcgcttcctgaggggtggcgggccgggccccggggcgagggagattccccaggtggaggagccgggcggagaccggttccccgggaaggtgaggcgcgggcagagataccc

SEQ ID NO: 226343 - DNA, 91 bp, Homo sapiens; identical to SEQ ID NO: 206073
  chr22:24989196-24989287
  hyper

SEQ ID NO: 226344 - DNA, 1080 bp, Homo sapiens
  chr22:25348358-25349438
  hyper
cggtggcgggggatcctggctggtgactggggaacatccagggaacgcgggagggtacccggagcaaagttcccaattggacagagcggggtcgggcctcgaggggcgggagcgcttccggcaggggtgtccaagcgagtcgtgacctctgacccgccggagaggtcccaggcccaggcgccactgcggactcgggtcctgcctgctctgctcccctccgcgcaggcgcggccggcggcagttcccatggtgacgggggcgcgtccccgctcgaggccccgcccccagcaggctaggctgcgcggggctgcgggctcccagggcaggtgccgcgggctgcgggcaggtggcggcgcggcgcgggctggcggtggctccacggtaggttgcgcagcggctgcgggcagtgggggccggctggccgcctcctgtccccggccgacgaggtagctgggggtgacggcggctggcgagggccgccaagtttctgcccggccgaggccccgggagaaaagttggcaaagttggccggggaagaggcggggagccggaggatttccccagactccgggtctgcagggagggaggatcccggtttgggagccggggaatccgtctcccgagacttgagagtggatcccgcgggaagatcccgcacagggcaaccaatggatcacgtgccacctggttggcgacttgggagtcgatccctggaggggatcgggcgctggaggcctggggtcccactggatccccagtcaggggtgacggcgaagggtgattcgagactgggagcgagaggatcaatctcctcccatgccagcctgagccttgggaatggattcagagagatcccgtggctaggagctgagggatcgctggagatctgggttactcagcctggagctgctagggtctggacatttgtgcgggttggaggccccggaggtggaagtgggaagcaagggcggcgagcgagacggaaccctggtcgaggggagcccggaggacagcgcggtggttcggggggcgtgagaggggcggcgcgcggggcccctcggacgcggaggctccggacac

SEQ ID NO: 226345 - DNA, 110 bp, Homo sapiens
  chr22:25678186-25678296
  hyper
cgaggttgggggcccggcccgctgggcgctgttcacaggtagcttggaccagagcaggggcttcatcattacctgcggggacaggtgggacacatgcatttccggggtca

SEQ ID NO: 226346 - DNA, 915 bp, Homo sapiens
  chr22:25678522-25679437
  hyper
agaagaggaggaggaggagtcccttgtggccaccccgaagggagggagggctaccgtagagacttggtcgagaggcgcgggacaagcctggccgctgggactgtgcgctgaggtgcaccgaccgtcgggccgcgagctccccgcagaccctcgcggaatgagctggggggcggcgcgcgaggcggcggagcggaaggcgcactgcgaccccggcgggctacagcctgcggcgcttgcagggcgctggtggggcgcgccgagcaggggctgccctggggctgccccagtcccaccaggtcggggctcagctggcggcggcggcggcggtggcggcagcgcgtcccatccgggtccgagtaaccgccgccgccgccaaaactcgccaacgtggcggacccggaggctgtgctggcagatgccagttacctgatggccatggagaagagcaaggcgactccggccgcccgcgccagcaagaggaccgtcctgcccgatcccaggtaccagctgccccggcccgcgctggtccccacgccgccgtccccaagcggccgtcagcgacctcctgcgtccgggagggtcgggcattgagtcgtcgctgtcctgggtgcgggtgacaccgcggaactggcgatgcggggccggcctccccgttccagtctctgaaatggggcatcggatggccggtgggggggactccgggagagagcgctccaaagtgcccagcgcggcgccctgcgcgcagcgagcgccccagggaggggctggttatgacttggctggaccagctccatccctgtcgccccctccccccggccctgtcctgtcctgtcccatccccgtggttcttcctgttgcattggtgtggtccctgtgggctcgttgcctgtcactcctttgcgctccttcttggtc

SEQ ID NO: 226347 - DNA, 638 bp, Homo sapiens
  chr22:25816915-25817553
  hyper
caaccgagctggccgctgggactctgcacccaggtgcgccaacccttgggcgcacgctccccgcagaccctcgctgaaggagcggtgggcggcgcgccgcgaccctggcgggctacagattacaccgcttgcagggcgctgctggggcgcgcagagcggggctgccccagggtggctcccccaggttggggcgcggcgggcggcggccgcgggcgcgcgtcccatccgggtcccgagtaaccgccaccgccgctgccaaagctcgccaacatggtggacctggaggccgtggtggccgatgtcagttacctgatggccatggagaagagcaaggcgaccccggccgaccacgcctgcaagaggaccgtcctgcccgaacccacgtaccacctgccccggcccgcgccggtccccgacgccgccgccccctgcggccgccagcgaccccctgcgtccgggagaatcgggagctgagccgtcgctgtcccggagcgggtgacacagcggagcgggcgatgcggggccggcctcctggctccagtctctgaaatggggcatcggagggcgggtggggggcactccgggagagagcgctccaaagtgcctggcgccgcgccctgcgcgcagctagcacccca

SEQ ID NO: 226348 - DNA, 1163 bp, Homo sapiens
  chr22:26565123-26566286
  hyper
ctggaaaatggtccgggtgctctccagcctggcctggccaggcagagctgctgggagcgtcagcagggagagaaaacgctcggctcccaggacgcaaggggaattggcgttaaactttgcagggccgacgggccggcggccagaggaggcggctggcacccccggcgccgccgcggcccctccagctcactgcccgctcgcccgccccctccctccctgcactcgctcggcacagactcggccccagccccctccctcctcccgctcgctccacgctcgttcgctcgctcgccggctcctcctcactcgcccgcccgcgcccggcgcagctcggccagagcgaccgcggggctgagcgcgcgtccgcccagggggctccggaagctgccccggcccgcggcctcctccctcgctcccgcttcccctttctcgctcaccgccgccctccttccccagctccctcgccgtccgcccgccccacagccagcggctccgcgccccctgcagccacgatgcccgcggcccggccgcccgccgcgggactccgcgggatctcgctgttcctcgctctgctcctggggagcccggcggcagcgctggagcgaggtaagcgccccgaggggcggggcgggcagggggcaaagttgccgggagagcggggcagccaggggtcggggctgaccagggcgactcaggcaccacccgccgggatgggaagcggtggtggctgtccaaaatcggggctaggaaccgcacgtccccttggcccgggctgatgggagtgtggaggcggggatgtgttgaaggactcgggcgcttccctgcttcggctgcgggctccctttcggtcttccccggctgcggggctgattctcctttgcagccaaagaggttctccttggagtggggtcgcctccaaaccccaaattcccggcgcttctctgcaaccgcacccggggctaggtgccagataattatcttcctctccgggagaggacaggaaggggggtgagaagctgacccaccctgcaactgaggactagactcaaacagtgcatttgccgctccccccgacaccacagaaacccttgactcctttggttcaggctaccccgagggtctgtgttcctggatcgatctcagccaagcgtcaggataccgga

SEQ ID NO: 226349 - DNA, 105 bp, Homo sapiens
  chr22:26825007-26825112
  hyper
cacgcccgtcgccgcctgcgcgcaacctcgggctgggcgggcgctgcgtctcggggcgcactgccaggaccctccggagcggcggcgggcgcggcctcgggtcgc

SEQ ID NO: 226350 - DNA, 180 bp, Homo sapiens
  chr22:27068859-27069039
  hyper
gaagtcagtgagaggactctttcccacacaggaagtcagctagagagccgtctcccctctctggagccgagagaggccggtttcccccaccgtaagtagacgtggggccgtgaccggaagtccttgggaaagatccgtcccattcccggaagctagagggcgttagttgtcgggttgaaa

SEQ ID NO: 226351 - DNA, 992 bp, Homo sapiens
  chr22:28196993-28197985
  hyper
cagagctgctaagggcaggggagggagacccttcaaagccgcggctggcgccgggcaccgacagagcggtccctccccccgccccccggagtccccgcgccccgcagcccgagcctccaccgagcacgatccgctcgcacaatccccgtaggctccgggcgagcggctgctgcttcttcagcgggtcggaggactggaggctccgctcggcatcgccggtgccggcccccgagccgaggacgcagaggggctgcgaggcggcaggcgccgggggctggagccgagggtcggggaaaggcgcggctcctctgctcggcagcgggtgcgctgcgttcggcgcgcagcttcgcggccacgtccgccgcctgccgcttctgttctccgccgttgggtgtctgagttcgccggagtctccgcgcaccgttgcaggcgcgggagggcagcgagacgaggggttgggtcgctccaaggctccggttccctgcctccgcgctgaggtgcttcgcgagtccctctcggacctgagggaggggggcgtacgcgggtcggggggccacgccgggcgagcaggctaaggcgttcccgctgcgctctcagagcccggaatggggggaggggggcgcgggggcagctctggggggtctgcgcacccctctcccgactagcgggggggctctgcgtggggcgttccgagggtctcggctcccctctctgtgtctgcctctcgcccagcgccgggagaagcagcaacaagttttgcatttcagcaatcaatttcagccattacatttgcaccaatcagcgccgcccaagttccgggctcggggcggggctcgctcttaaggtggtccggggtcctggctgccgaagcccccgccacgaacccgcactaccccagctctggggtcccctgcgcccgcctctcctcggggtccggcgtcagtgcgctgggggcgcgccccggcctccgggcgcatcgagctggagagggt

SEQ ID NO: 226352 - DNA, 816 bp, Homo sapiens
  chr22:29075366-29076182
  hyper
gcaggccaacacccatacacaccctcacacacccacacacatccacacacactctcgcggaaactgagccaggcaggcggcggaccaggtcccgccgcctcacggctcgcggctgggatcgaacccggactgcgagacgccttccgcctcgcaggcgctcctctgccgctgaggcccggcccggctcccaccgccggagtttcacaaagaaagtctcccggcccgagcccctcacgcactcaccggcgccgacgccggcggcgactctggctcccgccgccttcggctccttgcgggggtcggcccttgggtcggctcgggcgccggcggcggcgactgctccatccccacggggcccgggccgcgtccgcctcgagctaacggtcccgccagctaggcgcgcgcgccggttccgcgcgccatgttcccgccgtgctgcgcgccgccgcggcgcccctcactgcccccaaaccgcgcgcgcgcccccgcgggcccacacatgcaccgcgcacgcgcgcgttcgccgcgccccctccccgcgcgccccgcctcgcgccctctggagctggccgctgttcccagtgtctcgcccacccccgccgggcccgtcggactcggcgggtgagcgcgcggttcccggctccgcaccgccgcctgcctctctgcagaccaccccggacccgacccctcggccatttccccacactgccgctttcgcttcccccacgacgcggggcctgggacgacggtctgggccaagaggaacttccccgcaagaagtgtcgagttaaggacgctactaagggggcgggatcg

SEQ ID NO: 226353 - DNA, 321 bp, Homo sapiens
  chr22:29468748-29469069
  hyper
cgggccgaggccccgcccctcacctgctgatcctacccttggatgggacaaacagagggccctgctgggccggcccaggtgaggcgagagatgggcggggcctgatgcgtgagtggcaggagcagcgcgcggccggggcggggcgtgcgtgcgcagtgggctccgccccccgggcctctccgcggatccgggcgggccccaggctgcaggggcggtggcggcgctgagctgggcgggccggggcggggcggccgggcggccggggcggggctacactcgggccccgcgtcctgctcccatggccgcccccggctccccgcg

SEQ ID NO: 226354 - DNA, 240 bp, Homo sapiens
  chr22:29469129-29469369
  hyper
agccgcccgcctcgccctgctctccgccgcggcgctcacgctggcggcccggcccgcgcctagccccggcctcggccccggacccggtgagtgtgagcgaccccccgccgcccgccctgagcggagcccactcgaggggcgacaagggccggccggcctgagagccccctccctcccgcttcaggaccttccgggccccttcccctcgcccctaggcgacgcccctcaggccgggatggt

SEQ ID NO: 226355 - DNA, 148 bp, Homo sapiens
  chr22:29702352-29702500
  hyper
ttaaaaagagcccagcggggcttaaccctcccgcgtccggccggcctccgatgccccccgtcccctgttctgtgcggaactccggctttggccatctgcctacttctctgagcttcagtatcctcatctgtaaaaccggttcccctca

SEQ ID NO: 226356 - DNA, 240 bp, Homo sapiens
  chr22:29702936-29703176
  hyper
gggcggcccctttaagagcgcgcggccccgcccgccccctccgggcaggatccgaattccagggaggcggggcggagacggcggcgaggaggaggccgcggcgcgggacgcatagagctgcggctcgggcggcgcctccctgcggcggcccggcccggctccggcccccgctggggcaatgctccccggggccgcgggatgagccaggtgagcgcggagacccccagcactccctgcctg

SEQ ID NO: 226357 - DNA, 197 bp, Homo sapiens
  chr22:29876678-29876875
  hyper
gcgagctgtacgagcgcgaggtccgcgagatgcgcggcgcggtgctgcgcctgggcgcggcgcgcggtcagctacgcctggagcaggagcacctgctcgaggacatcgcgcacgtgcgccagcgcctagacgacgaggcccggcagcgagaggaggccgaggcggcggcccgcgcgctggcgcgcttcgcgcaggag

SEQ ID NO: 226358 - DNA, 447 bp, Homo sapiens
  chr22:30116686-30117133
  hyper
caccccggggcgccgcggtgggggtcgctcaggcggagagcggcccagcccctgcccgcgtggtccccagcgctgcggaaacttgccgggccccgcagcggggtcacggggccgcgcagtcggcggtgacggtgcggcaacgcggcggactggggcgggggtccgcgctgagcccccagcgccggcccggccggagcacccgcatcctgatcccctccgcggcgcccgcccgcggctctctgctcgcattgacattccgctcgtgtcgctttaaaaattcaatctgctcgggcagcagcagaaggggagagggcgactgccctgctcttgcccgctgcggggccgcccccgtccccacctgcggccgtagccccttccctgcagccctgcggggacccccagcccggcgcgccgggaaggcggcccgggaggcggtggcgacaacaa

SEQ ID NO: 226359 - DNA, 192 bp, Homo sapiens
  chr22:30723111-30723303
  hyper
ccccgccctcctccgggctgccaatcacaagaactcacctggacgagctcgggcctttccgggttggctccaagcggggcctgtcacctactgcagagcgcgagccggaggcccagggcttcctccatggattcctcatctgcctcctgagccccgctccctgcgagaccccaaggacgtggtagggattgt

SEQ ID NO: 226360 - DNA, 260 bp, Homo sapiens
  chr22:30792878-30793138
  hyper
tcaggagggcggagggggcccgtgtcagagccttccgcgccccagcgcatcgctccctactccgcctctcgggatcctttaagaggcggggcttggctgccagctccgcggcccgggcaaaaggctgggactttactccgggtggcggcgaggacgagtctgtgctccatcagctgccgcacccgccgcctcccgcccccaaaccccatccccgcggttgagccacgatgagcggcagagtcggcgatctgagccccagg

SEQ ID NO: 226361 - DNA, 105 bp, Homo sapiens; identical to SEQ ID NO: 206102
  chr22:31002803-31002908
  hyper

SEQ ID NO: 226362 - DNA, 566 bp, Homo sapiens
  chr22:31198595-31199161
  hyper
cccgcctgcgtcccgccacggagagctcgcctttatctagccctctgggcgagagaagaaggctaatcccagcctgggacaaggctggctgaggcgtgccggatcctccggggaccgatcggtggcctcgcgcggctctcatcgctctccgagcagtgctccagggggcggagggagcctcctcgggcggtggggaggaggctggaggaatgaggacgcagcacggcgcgcccttgcagcgctcaggctgacgggcgggcgggcggagcgggcgcacggctcctctaggtccggctgctctctgagctcgcgggctggacgctgtccgcggtgctgaagcggcgcccgcggcagggaggcggacccggagccgccgggcagcacacacccaatcccgggaccgccctcctcccaggctcggagaggcggtggcagccggcactgcacccagatggactgagagcgcggcggcgggaaggcggcggcggcggcggcagcagcagcagctgcaagagccctcgcagcctcggggcaggacccacgtccacacccgagagcccctccct

SEQ ID NO: 226363 - DNA, 455 bp, Homo sapiens
  chr22:32571844-32572299
  hyper
tgttccctggagcccgacttggggagggcggacggcaggaaacgcgggaggcgaaggcgaggctgctcagcggcggctcgggatgcctccagcaacggggactagccctgcgcgcccggggagggggaggcgctggcgctgtgacggccgcggggagggccaccttcccagcacacgcacacatacgcccccggccctcagccgctccggctgccgctgcccgccgacagctgacctccaggcaccgcagcgcccgggaacagccatctgggaaccgcgaccgcgcactgacacacgcagtggccgccgccgccgccgctccgccaagcgctgcctgtagcacctgcacggtggtttggaggggaaggtctgggcaggcgaacgttccacgagggcgtcccagaggcatctgcagcctccgctctcctgttctgctctggcgcccaccagcccct

SEQ ID NO: 226364 - DNA, 546 bp, Homo sapiens
  chr22:33453872-33454418
  hyper
ctaaggcaggtcctaggagccggcgcagagcagaggtccggccgctgcggttcctggtttcccgcaagctcttccccgggccgggcgctgggtggaggcagtcttaggatccacagtcttgcgcgcccccggctcccgggcccggcagacggcccccgcacgccgatctgtctgtcccagggaccggcccagggccccggcagcggcagcctggggagacaccgtggtgcgcggctccttgcctccctccctgcccctccgtgcgcccgcatcccgcggacacagagccggagctccaggggacgcagcccgacgcgagaacgcaccagcagcccccgctcgaggtggggtctcccggctgtcagaaaccccacaaagtctactttgcggcgccgcgccgcttaccgtgcgagccgccaggaactcggcgcccggtggtgcctcggcgcggcgcccgccagtcgatccgctccgggtcccgggagctcagcctctgcccctcaacgcgcgcgagcgcccccgcccggcggcccggcctccccgcgc

SEQ ID NO: 226365 - DNA, 1096 bp, Homo sapiens
  chr22:34315937-34317033
  hyper
caccacggcgcccccgcggcgactctcgcgctccggggctcttaccttggccgtgactgccgccaggcagagggagacacggaagaacagggtggcgcggcggcgccgccgcctacgaggcgcagggggtccgggtcagggtcccggcaggcgctgccctactcggagcggcggtgccaagcacagagttcgggactgcccccggctccaaatgccgcggcgagggtccgggtcccccaagctgagcactgtcccttcttcctcttcctccggggccgctgcctggagctgctcccggcccgggggactcttccgagccaggggcgccccgcatgggcaggggcctgggtcagcctcgggttgggtccagggagcgaccgccggggccgactccacctcccgcgctccaagccgattcgtcccttcagggcagggcctgcccgcgaacagcccggcgagacgagcgcggccgcgcccccagcttcgggcgcccgggctccggcgcggcggcggggcaggagcagactggccgggccgggcgccgaacgcggcggcgcggggggggctgcaaccggccgcggcgcgctctcccccagggcctgcgccgcccgcccgcggctccgcgggaaagaagcgccggaaaaggcctcgccccggcctggggcgcggggccgggggcgcggggctaggggaggcgccccgggaaggtcacgggagcggaggcgcggcgagtggatcgcggcgcggtgggtgcggggagccgaggcgggcggcccccgccgccgggagcgctcgccggccttggccgccgccgccgcctccgagatgcgccggcttcccggagcgcccggcgctcggagctgggcggccgctgcagccgccgcgggcagccgggcgccgctggccggagccggcgcgcgatccccgcctcccgcgcccggccaggagtgggccgccgcgcgggaaccggcaggggcgggcgctggggtccgggctccgggctggccccgccgcctccgcgtgcccagagcgccggactcgctcagcagctgcagtgactgtgtgtctgtgtcatgtctgtgcagccgggggggac

SEQ ID NO: 226366 - DNA, 256 bp, Homo sapiens; identical to SEQ ID NO: 206114
  chr22:35767978-35768234
  hyper

SEQ ID NO: 226367 - DNA, 191 bp, Homo sapiens; identical to SEQ ID NO: 206115
  chr22:35777069-35777260
  hyper

SEQ ID NO: 226368 - DNA, 159 bp, Homo sapiens
  chr22:36424337-36424496
  hyper
tgctcaggccgggatcggctccgtctcctcccgctccgggcaccggcagctccagctccgactcccgcttcatgccccgggcggcggcgccgggcccgagctgaggcggctgatgcggctgggcgccctccgccatccgcccgcgcccccctcgcctcc

SEQ ID NO: 226369 - DNA, 146 bp, Homo sapiens
  chr22:36425195-36425341
  hyper
tcctggaggcacagcgcggctggagtgcggggcagcgcggggggggcggggtctgtctcctttctgggcggggccgtatcctggagcaggcggggcttgagagacccgaaggccagggagtggctcctgcttgcggtactagttgt

SEQ ID NO: 226370 - DNA, 222 bp, Homo sapiens
  chr22:36462014-36462236
  hyper
atggcaggaaatcagcgttttccaagaacgcccagtggcgcgggcacgggcctgagtcccgccgcccactgctctcgagaggccggagcagcagctccgtggcgccccctggaggccgcccctgctggcgccgtcccccgggtgtcaataggccatggcgcgcctccctctcggttgagagctgtgggagcccaggacgtgcctattaaaggtatcttttga

SEQ ID NO: 226371 - DNA, 240 bp, Homo sapiens
  chr22:36902259-36902499
  hyper
tgtgaagaagctgccgggccgcggggcccgctcgaacactgcgtagtcgcgtccagcgcgctgcaggaagtaggccatctgcaggcccgcgggcccagcgcccagcacgcagtagtcccggcgcgggggcaccgacagcgctgggtgcagggcgatggccaggagcagccccgggggaccccacaacggggccgcagcggagaggcccatcctgcagcagatcagaggggtaaggcctcg

SEQ ID NO: 226372 - DNA, 479 bp, Homo sapiens; identical to SEQ ID NO: 206124
  chr22:37414885-37415364
  hyper

SEQ ID NO: 226373 - DNA, 589 bp, Homo sapiens
  chr22:37914844-37915433
  hyper
ccactctactgatgcggagaccgagccccagggcagcagagccctagcttcgcgctacacggctgtgggcgctgcgccccagggcacggccggcccaggtcgtggcccactcgggacccgcggctcaccggtgcggttgacgcggcacgggaagcggtaggtgctcagcacctcctcctcgtcctgctcgtcgatgacccggcactggcgcagatacggcgtgagcttggccgggttcagggcgcgagccagccgatgccggacgccctcgattcgctcccacagcgcgtcctcctccgcctcagaccccgagccggccccggcctcctcctcggcctcccccgcctccgcccggcccggcatggccgtgtcctcagggtctgcgggcaagaggcgcacgggggtcgaccagggctccctagggctagatgtgcggccaagcacccccggggcgtcgtccgcagacccgccgtcgggggcgcgccccgagctccccgcgactcaccccgcacgctacagtcgcctcgggctcccgggtccgcactcgggcggcggctccgccggcgcaggggggcggtgcccgtggcgc

SEQ ID NO: 226374 - DNA, 123 bp, Homo sapiens
  chr22:37915687-37915810
  hyper
caccccccgcgcgccgcgacacaccttccccgggccacgcgcatcgcctccccacgcccacagcgcgcccgcccgtgcggggctagccgctcacgcccggcgcagcccgcgggcactcaagct

SEQ ID NO: 226375 - DNA, 558 bp, Homo sapiens
  chr22:37956436-37956994
  hyper
ccccgcccccgcccccggatccagcccgcggagcccgcggccagggcggcgcagaccggcccagcgactctcccgggctgccagccgggacgcgcggccgccgccgctgcagacgacgagtccgccctcgtcccgcgcccccggggctcgcggagccaggtaacagcccgggcgcgcgggtcctcggggcggaggccgtggaggccggcgggtcccggcgcccgcggggactctgcaccctactaggctcccggggccggaacggggacgggacccgcccgggagaggcgcccccgggtgcccacaggaaggccgggcgcggccgcggagccgcgcgaggaaactccgagctttcgggcttcgtgtcccgttccaggctggtggagggggcagaggatcggacacggctgagcggccaaaatgcgcgaggagggggcgagccgaggggcagagcgggggctgtctccgcgccttcctgcgcgggggaaggaagggccggggcgggcagcgggcgacgcggcggaatgtctcccctccgccgaggcccacgcggagagc

SEQ ID NO: 226376 - DNA, 206 bp, Homo sapiens
  chr22:38577938-38578144
  hyper
gggaggcggggtccgccattttttttaactgcccaatggaaggggctcccttagccaggaggacgagctttcggcgggagccaatcctcggcggcgaggcgcggccatgtttgtgcggggcagaaggtgcccggcttcttggcagtcctgttgatgagggccaggagtcctaccctagtccgccttccgcctcctaaagcgaccag

SEQ ID NO: 226377 - DNA, 125 bp, Homo sapiens
  chr22:38966056-38966181
  hyper
acccacagtctccccgagattttcaaggtgaagcccctctgccccgcccgacctcctcagctgacaggattctaactcgggcctagaacacggagcctggagacccgcgcgccgttgaccacagg

SEQ ID NO: 226378 - DNA, 351 bp, Homo sapiens
  chr22:39239093-39239444
  hyper
aaatccccccgcctcgccagcgaggaaggcgcgatcgtccccggaacacagacgggagaccggaggctcggggaccgccggacgaccgcggccgggcggcccctcacaccacccgggcggctcccccgacggcgcgcggcgctcacctccaggcggtcgatgcggtcccgcagggcgcgcacggcgtcctccagctccagaatgagcgcaggcgagtcccagggcccgtcggccatggtgtcgcggcggggcccggcgccctggaggccgcgcggcaggccgctctcgcagcggcccagcttgccggtgagctcacggatggtgtcctggtcggcgcggatgcgcgcctcc

SEQ ID NO: 226379 - DNA, 105 bp, Homo sapiens
  chr22:39239935-39240040
  hyper
cgcgctgggccgagcggggcaggcgcgggagccggagccggagccggagccggagccggagctggagctgtcgccgcggccgctgctgccgccgctctgagcccg

SEQ ID NO: 226380 - DNA, 248 bp, Homo sapiens
  chr22:39268982-39269230
  hyper
accgcgggcaggaacgggctccccgcactccgccttgggcccacagcgggtcatcatctggtcattcggcagaaaccgccttcgcggtcatatctgtgttttccgattcccagcacccctcccggccccccgacctggccgcgtccctctccccgcccgcagctgcgcgaagcttccgccattgctctggggagcccagatcccagcttcccacttgaggaggggcgggggatcgagctggggctgtc

SEQ ID NO: 226381 - DNA, 565 bp, Homo sapiens
  chr22:39549058-39549623
  hyper
gactgggcccgaggcgcagcccctcgagttgcaggagagccgggacccaaaaggcttcccaccgtgtccggacgtcgcagggccgaggtctccctaatccggccttctccgcggcgcagtttggccagtgtctccacgtccgtccacccacccctccatccgcccttccatttgtccatccacccgaccctcggtggtcggtgcccagacgcacgggtcagacgcgggcgctgcctcgagggctcccgggccgggccctcgttcgcggcaggagcggccgcggtggagctgaggtcccccggggacggattttgccgccgcgctgccccagccttccccaaacccgcgtgtactgggcgctaggtgcttagtgggggctcaaccatttgtggcacgagacgaactcttgattccccaccccccttcctttttcgctaacgcgcctccattcctcactgggagcccggcgtcgtccctgctccttcctgtactgaccccaacttctgtcgctccggcatcccctcggggactcgggtctgcctgccctcaccgcacccacctccca

SEQ ID NO: 226382 - DNA, 47 bp, Homo sapiens; identical to SEQ ID NO: 206139
  chr22:39638593-39638640
  hyper

SEQ ID NO: 226383 - DNA, 477 bp, Homo sapiens
  chr22:39853588-39854065
  hyper
gcgccgcggcccctctatccccgcgctgcccgccctcccgcgctgcgcttggcgccccccgcccggctccgcggcccactccccgagcgtgaccttagggggcgggcgcgggcgcactggggctgggggcccggaggccgcggtgggggcgggatgccggggaagccgctcggcgcgggccccctccccctacccgccgctcctccgagctccccggtccccggagggcagagcctcagcgcccgaccccctcccacggccgggcgggggacgtccccgaggcgcggggctcgagccgtgctttgtgcgcggcaccccccagcctccggcgcggctcccccacaacctccggcgcggcgcggggctggggtgggaggcctccgcgcccgccttccccacccccgaccccagactgcggcggcggcagccgaggcccaagcgcagtcgggggctgggcgggtgcgggggctgcggccg

SEQ ID NO: 226384 - DNA, 205 bp, Homo sapiens
  chr22:40060785-40060990
  hyper
cgcagcagctggaacgtgctggatggctttcttgtcttcgtgtccatcatcgacatcgtggtgtccctggcctcagccgggggagccaagatcttgggggtcctccgagtcttgcggctcctgcgcaccctacgccccctgcggtgaggacccctcctgggcggatgggggaaagtgtcatgcactgtaccgagaagccacgggt

SEQ ID NO: 226385 - DNA, 700 bp, Homo sapiens
  chr22:40081595-40082295
  hyper
ccctgcggtgacgccgcctaagctggacgtgcggaggggagaagccctgctccgaagggagctccttggatggggtctgcctgctgcctgctgtgcgggggagggcggcgtccaggttgctggggtgggggccgacacaggcggcctccacggctcccacctccccccaggccaccgggagcgacacgtcgctggacgccagccccagcagctccgcgggcagcctgcagaccacgctcgaggacagcctgaccctgagcgacagcccccggcgtgccctggggccgcccgcgcctgctccaggaccccgggccggcctgtcccccgccgctcgccgccgcctgagcctgcgcggccggggcctcttcagcctgcgggggctgcgggcgcatcagcgcagccacagcagcgggggctccaccagcccgggctgcacccaccacgactccatggacccctcggacgaggagggccgcggtggcgcgggcggcgggggcgcgggcagcgagcactcggagaccctcagcagcctctcgctcacctccctcttctgcccgccgcccccgccgccagcccccggcctcacgcccgccaggaagttcagcagcaccagcagcctggccgcccccggccgcccccacgccgccgccctggcccacggcctggcccggagcccctcgtgggccgcggaccgcagcaa

SEQ ID NO: 226386 - DNA, 233 bp, Homo sapiens
  chr22:42229858-42230091
  hyper
gtcgccgggtgctccgcgaaactttgggcagcgactgcagaagcaagttgctgatgaagagagcagtggcggcggagtgtggacacatctctccgggatggagacccgggcgctcctgctgtcacgctgcaaggggaattgagcagaagaaattttgagttgtggcccctcgggtacgggctggggagcgggtggcctttgttccagcgccttaacagcggagtggaagagct

SEQ ID NO: 226387 - DNA, 693 bp, Homo sapiens
  chr22:42310037-42310730
  hyper
gggcctgctgggagaaccagcgcttcgagagcggcgggaaggatcagcgggcagggagagcagtccgaggagcaggcgggggtccctgggcggcgcgtgctcacctggtcactgtgcgccgcgcgcgcgggctgtgcgccctctccagtcccaggcgcgccccgatgccggccagcaccagcagcgctgcgacgccgcacacagcgtagacggccgtatggctgcgctcgcggccggggtcccggggcgctgcggtgtcgcgggcgcgggcgggcggccggcctgtctggacccaggccggcgtgtcgtagttggaacagcggctctggtcgaggcgccgcggcccgtcgtggcagcagaagcggtagccgcacgtgccgcagcagaagctgtaggctccggagctgcagttgaagggcgggtcccactggcccatcacgtcgtagtagccgcggcagcggtcgcccccctccggggctgtcgtgccgggcgccgcgggaccctgcgcctcgggggctcccgcgcggcccgacggcggccgcgccagcagcaacgcgagccgaagcgcgagcgcgagccggaggccgggaggacggcggccgccgagcagtccccgcgccccggcccgcgccatcgggcccgcgcctcccgctactgcgcccggtgcatggccgggcgccgcggctccctccg

SEQ ID NO: 226388 - DNA, 300 bp, Homo sapiens
  chr22:42310741-42311041
  hyper
ccgctcccgcagggatcgcgctggctcccggcgcacgccgcctcggccgtcggcctcctctggggaccccagccccgagtgggctgggtctggagctccgaggccgcacctccggtgggcgcgtcctccgcccgggctcacctcggacccgagctgcccggtccgcgtcctgagatcttccccgggccgggcggcgggtcctcgcctgcgcgcggcccccggcttctccccggcccggcaggtgtgcgggtcttggccctagcggaggccgcgccggggccgcgggccgcccgactgcgc

SEQ ID NO: 226389 - DNA, 105 bp, Homo sapiens
  chr22:42670075-42670180
  hyper
accaagctccagctctccttcctcttgggaggcgccgcctgctaactcagtcacaccaagagggaggcctggaattcctgctcacaagctcggggcttcatctgc

SEQ ID NO: 226390 - DNA, 327 bp, Homo sapiens
  chr22:42765054-42765381
  hyper
gctgcttacctggcccgcaccctcacgctcccgtccgggctgcgcagccgcttctctcacacattttgcgataacatcgatggcgaaagaaaatgttgtaaatcctcctgcggccacgtggctgtccccccacccccttctccctttctctggccctcaggacaaaaaggccccgcggccggccgctggccacggggctctgggcgggcgaagctggctgcagcggggcgtggtctggggaggggccggaccggggcgggcggggcgtggtcggggcaggggcggggcgcgctggttccggccgccctccccgcggaaaccgggcct

SEQ ID NO: 226391 - DNA, 248 bp, Homo sapiens
  chr22:43015553-43015801
  hyper
agtgccaggcaggacgtactctgaaggctcagccgtggcccatctgggacacagccctgctcccgaaggggctccaggggaactgctcagccaggtgattcaccagggcacgggcaggccaggctgaacccggggccccagtgtgcgatgtggggaggtgactgggtgagcgtgaacagggcgtggggtgcgcggggcgggtggccgtgtgaccgtgcccggccctcagaagacgaagcagcgctccg

SEQ ID NO: 226392 - DNA, 300 bp, Homo sapiens
  chr22:44287478-44287778
  hyper
gcacagcgccaggcaccagcgtctctgggctcgatccgctttcattaagctgtccccgccccttttcgcccccgcggtccgggactcaccgaccgacttgccgcagacgatgctgactgcgttgagcgccccagacgaggaaccgtagatgcggcgggcgccctggaggaggcgcggggctcgctggcgcaggcattcggtggcgcccacgtggtgggcgcccaggtagccggcgccggagaaggacaggttccatctgccctcctcctctaagaagcccatggcgggtggaccgggcgg

SEQ ID NO: 226393 - DNA, 180 bp, Homo sapiens
  chr22:44287840-44288020
  hyper
cggggctgggcccaaatgtgggctctggagggagccgggctggggctggtgctggtgctccctgcgccgcccccgggctgcgtcacctgcgccccagccaatgaagtccccgggtcgcgatcagcccccactccagttgtgcgccaggtgtgccccagaagtgcccgcgcgctgtgtata

SEQ ID NO: 226394 - DNA, 180 bp, Homo sapiens
  chr22:44420338-44420518
  hyper
cgcgcccgcgcccgccgacccccggggacctgcccggcggtgcccgccctcggccctagagccccacgaggccgcccccgccctcccccacgcaccccgcccggcccacgcggctgcgcgaccttcgggacaggccaggcctttgacccaggacccgtaaacaacggccgggacctggcg

SEQ ID NO: 226395 - DNA, 403 bp, Homo sapiens
  chr22:45015983-45016386
  hyper
gtgggtgtggtgtgcgtgcccacgggggtgggagaagcccaggggtgagcacagggtcagcgctgtgacggggcccaggccgctctcagtgacgcccgcaaaaccccacgtggcgggaaccaggctcagccacactggcggggtcagcagagcctgtcggtgcaggcggcgttcccggaaactaggaggccgctgtgacccccagacgtgcagacctgctgagggtccagcgctgcggctgggcggggtcgaattgtgttctgggcaatgctggtgtcacttaaagtgaaatacacaaggggcggacgggcggctcccgggctccgggtccttggcctggacctcggcctccccaaagtgaccccggatggcaccgcgagtccccgtttccgacaaccacacg

SEQ ID NO: 226396 - DNA, 917 bp, Homo sapiens
  chr22:45064150-45065067
  hyper
ctccctccccgctccgcccgcggctggaccccgatccccgggacagggactgagtctgaccgtctgatttgtcctcccggcttctagcgccccgctcaggtcggggcttggggagggggcgctctctggacgtttgcggcccgccgaggggtggggtgagggcgtcacgggccgatccgggccgccgggtgacccgggacgccccctgccccggcgggcgccgcccacagcctgcgcagtgctcaggggcggaggccgggagggggcccaagcgccagccccccagctccggcggacccgggtgggcgtgcccgcggacccgcttgccgcacttaggcgagtctcccctgcagcgccccgagtccctgggggctgcggcggctgcgggcgcccccgcgcgggcccgaggggcgggacgcggcggagcggggcggggcggggcctccgcggccccctcccccggccccgggctccggctccggctccggctctggctctgcgcggtggcagcggcggcggcggcgcggggaccgaggtgagcggcggctacgggtccggaggcccggccggagaggggaccgggtggctggggttggggggcggcacgcgcgaccctgcggaagggggggccccggggcggtgccggcggagcggcgcgcgcgtgtgtgtgcgcgcgtaggtgcgcgcgcgcgcgacgccgactgcggggccctagggtggggtaggggtcggacggaatctgcggggcaggggcggcccccttgggtgaaggtccagcctctcccaccccagcctcccgggacctcccgagctcgttctctcccagcctctctcgctcgccccccgccccgcccccttccctctatctctgagtttgtccgcgtctctgtgggtgggtctccgtccagccgccccgt

SEQ ID NO: 226397 - DNA, 420 bp, Homo sapiens
  chr22:45097962-45098382
  hyper
cctcttgcacacgccccctcgcctgaggccccgccccgcccgcgatgcccccgcccccttccccgccccgccccccggggcgccgagacccgcccctgggcccgcccccgggtccgcccccggcctccgtttgcgccgggtctgtgctggccgcgcgcctggcgctccacgctgagcctctccgtgcaatgattaacccggcggggcggccggcgcgggacccgagacggaggcgcggggccggggcgggaccccgcaggaccgctcggcttcctgctctcgccggagtttccgcgtagagggcgcatcgccggcccggggcccttggtgcggcgtggcgcagggcgcggcgtggggcgcgcgtgggcgcggcgcaggcggcccgggtcaccatgaggactctccgcaggttgaagttca

SEQ ID NO: 226398 - DNA, 2520 bp, Homo sapiens
  chr22:45403919-45406439
  hyper
gagctggcgtcaggttccaagaataaaaagtgaagctagggaagtggaaggtggtgggggggagggagcctcgaggaacgatttcaaaacgaggtttgccacggaacccagaaatcgcttccaacgagtttggtgtccaggcccccacggccgcccccctccgcccccatggccgcctcagcgcaaagcgggggactccgagccgggagaaatcgccacgttccaaaaacatgtccaccacctcaaaatggacgccgggccgcgcgctgccttttaagtgagctcctctcttcggcccccgcagggcccggctctccctgccgcctccgagaacccggctctttctttccaggaaaggggaggggtggggaactttgagaactggagacagacccctctgggagtctgagcgtgcgtcgcccaggctggcactttttagggcgccgccaaagtgcccagccaccctcccgccccatcccagggggggccgcgatcccatcgcttacttgtttgtcgctgagcgcggcgatccgcggctgcctttcgtggagctgcttcttgaggtcgccgttctgcggaaacacggaggagcgggctcaggcaggccacccggggtcaggtgcaccccagcaccgcgggccgcggcaccccccgcccggagccccacgggcggggccggccgcagcgcaccccaagtttcccgggccgcgtcctgcacgcgcggcggccgggcagtgccgcgcggggccgcttacctgtggctgccgcctcatcggggcagctcgcggggcggggcgggggccgaggccacccggcggcgcgccccgagccgtgcaagtttgcaggccggggtgcgtgtgcgagtgagtgtgagtgtgagtgtgtgccgggggaggggggaggaacaaagagccaagtaaacacggcgagtccgtgtcgagcaaagctcataaatattcaagtcgcgtcctaatctccccaacacacacacgcgcacgccgagccccgctcaggctccggccgccacgccgccgctcgccagcagcgatcgccaaaactacttctgcacaccgggcaggttcgcccggggcgcgggggcccgaggggaggccggaagggggcctattcgcactcccctccccgggaccggctcacgaaggggccccctccaggcaccctcccagtcatgcagaccctacatcgcttaagagaagactccaggctcgggtcccacgcgtcctcgatcccgcaaactgtgcaggacagcgccaggggcaggcggaggggagcccagaagggggtccgcgcgtgtgctcactccctcgccccccgcccccgggcaggctccagcctggaagacccagagacccggaagagaggatgctgggctcgggtcccccgaccccctcaccccgcaacacactccccggccccgggcccggcccccggccacctacctggtggcgcgcgagttccacggcgagcgcctcgggccggctctgcagctccatcccggcaacttgggcagcactttgcgctcactttggcccgggctcccgggaagttgcgcggctccgcgggggccagagcgggcgcgggcggacgcggcctccgggctgggttgggggggacacgagccccctcccccacggccgaaagggaagggggctggcgaaggggaagacaggcttccgggcgccgcggcgccgagccctcggctgccccaactcctcaggctgcccggcaagttgcgccgggtccccgggctgccggcgcggcccggagcatggcccccccggcgccgggagccccgcgcagccccgcgcgcgcccgcccagccgccgccgccgccgcctcctcccgcgcgagcctcccgcgggcagggactatatttcctccggcgcgcgcgcctggatctcgttgggcctcggcaaagttgtgcctcggcacgatgctaattcggcagtgcccggatggagcgggccggggcggcggggggcggtgccgggaccctcagcccgccgcgccccgcccccgccccgcccgcgcctgcgcactgccgccccgccgcggcccggcaccccgagcggagaacaaaagtggcggtggacggggacgcacggtcgccggctccggggactgctcgggccgggcgctcggagaggacgactgcggagtcatcctctccgtccccgggccaacccggggaacgcggcgcccccaccccctgcgccgtgtaacgccgggatcaggacactttccgctgggaggctgcgagtccgtgtttccatttctcctcaccctggtcctcggctccctcctttcccccctcctccgcctccctctgatattttatttaaattcttccgtcccctcctgtccataccagcgccgcgacttgggggattaaattagtcgcgtcgccacattcccccgccgcctgatggcctccgtgttgtttaaacagcaagaaaattgatctcttggctcttcctttaatgatttttttttacacgatta

SEQ ID NO: 226399 - DNA, 368 bp, Homo sapiens
  chr22:46465893-46466261
  hyper
aatgccaaggccggcggcggggggttggggggagacaggcacagacagacattgggttgggacccgggaggccttgtttctctcgggccctggccgccaaagggccgtcgcaggcgtctggggacatcagctccatgcggctctgggccagggcatgctcgggcagggggacggggtctgcgaatagtgactctgtgtccgcgtgcgtccccgagagccggaggcccaggccggcccctctgcggtttgggaaccactcaggcgcctctgtggagcgggcgggaaaagacgccgcggcctccttggcattctaacccgtgtccggaccctagaggccggccggtctcaaccaccgggagggcctggga

SEQ ID NO: 226400 - DNA, 359 bp, Homo sapiens
  chr22:46468170-46468529
  hyper
ctctgtggcgcagtcgggtcgctaagcgcagggaagccggagcccgaaggcaaggagagacgcggcgcggggccggggaagtggggcctgggccgtgcgcttcgcccgcggcagtccagagccgtcccaccctgcgaagagttgcgggaactggcaccgctctgccgtccgccgcttcgacgcgggaagagggtgagcgtttggaacccaggactcagaccgctagctgagggcctgtgcagctctgggcacgcgagcgcggcgccggcggcggccaggcacggtcctcccgcaagggcagggctgtcgacctgtgcgccccaggtcacgatcgggttcacggcgactcctgaggacgg

SEQ ID NO: 226401 - DNA, 111 bp, Homo sapiens
  chr22:46658172-46658283
  hyper
attagctgttatgttggcatcgccaagcatcaccgcctgcagggaactcctgacgatccagacatagacggcgtccgagtctttcacctcgggcatcttggggttccctgt

SEQ ID NO: 226402 - DNA, 284 bp, Homo sapiens
  chr22:46658634-46658918
  hyper
ggcctgcaacatcacgcgcgcggggccgtctgtggggcactcggtgcgggccacgaagccctgctggggccgcgggcctggcgcggcggagcgcggggagacgcgggccgcgggggaggccgggcgggcggcgccgggtccgagcagccgcaggcggaaggcccaggccaggcgcccgggcgagcgcggcagccgcacggaccacgtcagggagaggcggccgccgcgcgcggagagctgcaggtcgacgagcgcgagcgcgggcgcggccggccagggcaggc

SEQ ID NO: 226403 - DNA, 1365 bp, Homo sapiens
  chr22:48884928-48886293
  hyper
gcggtggatgggggcgcggaaggcccaagtgcgcgaacttcacctggcccggccgtcctccccgtggggggcccaggctgcgggcgcgtcaggccgtctctgtcgccatccggaggagcggcttgggcgccgcgtcccctctgccaggcccgggtcggcgggcggctggagcccccagcggtggcgggcgcgcgcctctctcgcggatgccggggcgcgcgtagccggggcgcgcagtgacgcccagagcggggccggcgtccccctggcgggccggcgcggggtcggcgggcgcgggcgcgagcgcgggcggcgcgggcgcggcgcggggcgcggtgggccggggcccgggcgcggcggcggcggcggcggaggatggcgcgcgcggggcccgcacgtggaggccggcgcgggggcgcgggcagggccggctgctgagacgcgctgctgccccccgcgcgggcgccgcggcttcaatggcgccatcgcccaggaccggcagccggcaagatgcgaccgccctgcccagcatgtcctcaactttctgggcgttcatgatcctggccagcctgctcatcgcctactgcagtgagtaccgcgcggccccggccccggcacggccctctgggccccggaccccctcctccggccccggcaggcgccccgcgggcctcccggagtcggcgcggagttacgagcgccgggcgcatggtcccccgagtcccggccggtccaacgctgcgctgggcgggcgagagggtccacccgggttccgggcgctcgagcacttcggggtcggacgccccggcccgagcctcccttccctgactccccggcagggcccgggctccaggccccgggtggcgcggcccgtccctgcccggcggtcggagcccagccagcggcttcccggccgagatgcgcgctcaggaggcagccgcaggtcgcggagggcgggcggcgctgccggggtgtctgcggagcgccctccccgtgcctcagcccgggacaaggggggaggcggcggccgagcccggagaggagctcttcaggcaggagcccagcctgggctcggaggagcagctggagcttccgctttcccgggaaacgggctcgtcaggcgccttctggaaagagaagcgaagtgagggatgggatgcccggagggggctcgccgcggccgcggacgtttctcgggtcgtgtctggggcccgagctggtgaccggcgggactggcgcgggcgcgggctggggtggtgcgggccagtgggcgcccgggcgtgagctgagggctggggtagggggtgaccgccgcgggctccctgttgcctggagtgaagggtggggggtggcctgtgcccctgc

SEQ ID NO: 226404 - DNA, 1970 bp, Homo sapiens
  chr22:48970901-48972871
  hyper
ccgctggtcgggcccggctggggcggtacctgggcctggggtttccctgtctctcctggggccttgggtgcgagggaggctgggcgccactcgaggccccgcgtccggtctcccgcgccagcagggccggctctgcagtgaggcccctgcgcacctaggtggagcccgacccgcagttttcggctgggccggccccacctgacccgccggcgcgccaggcgggggcgctgcagggcggggtccccggggtccctcgcggcccagtgcgcatccgcggctccgcggccgggaggagcgcagacggcggcgggcgcgggccggagtccgaggctgcgcgggcccggccacctgggccggcagcgactgcgccgcgctccccctcccgccgcctcccccgaggagccggcgccgagccgagcgggcgggcgcgcgcctccaggccggagcagcggcgtcccgcgggcggcgaggcgcgcagcgtcgccggccccacctgtaggcgcggcagccaccggcaccggcaccgacaccggcagcggcggcccagcgtgggcagcccaggggcgcggtgggcccggacctagtcccggccgcggcggcggaggcgcgggctgctgggagcgcagaggccggcaccgtccggtggggaccggcccgccagccccgggccgcgcaagttcgatcgccgcgggctcggccgggccgcgcggaccccggcggcggcgatggtgcggcagccccgcgcccggcgcgcagccccggccccgagcctggcccgccgcggcggcggtggcggcggcggcgcggcggccccctgagccccgggccggagcgagcgcgggcggcggaggaggcggcggcggcggaggaagaggaggaggaggaaggcgacgccgagcagcgggcggtgggggccgacaggcggaggagggggccggggccgcgccggaccccccccccccccgcgccgcccggccgttgcgcaatccgcggcccgccgtccgggccctgctggcggtgcggctccgggggcggcggcggggctgattcatggggccgcggcggccgccccccggcgccccgcagccagcgatggtggccgagtggtcggagcggcggccgccgcggcccgagactttctgctaacctccccgcccccgcccgccccctccgcggcgcccccctccccccgcccgctcccctcccccctgcccagaaagacacaaatcgcctcccggagtggcgcctccagtcgcggcggagcgcggcgttggcggcggatggagggcgcgagcgggcggccgcggaggctgcacccggcggggcgctgatgcggcgcctggaccttcgctgcgcgacttcgggggcgtcggccgagttgggactccgcgatgcagctcctgaaggcgctctgggcactggcaggggccgcgctctgctgcttcctcgtcctagtgatccacgcgcagttcctcaaagaaggtaattgtccccgggcgcgcggaccggtcctccgcgctctgcccggctcgcggcggctccggcgcccgacccggcttccagcacgttccgctgccgccgcgctcggctgaggctcgtggagcgccactgcgggcccggagcggccggcggcgcgaccctaccaggagcccgaccccccgcggatctcgctgccccgcgcccatcggggctcaccggcagggcgcggggtcggggcgcgctgcgttctcggtgcctctggcgccgccccggatccccagcccaagccgaggctgccgttcccatcccctgccccactgggctcggtggcagcggcgcccgcccgcacgccgccgggccctcggtagatggcaccagcgctccacggtggccggccgggctggggcgggagcggagctgggacccgccagggtgggcgccgggctgggacccgcggacgtcgggaaaccggcctgcgcacctgttcccca

SEQ ID NO: 226405 - DNA, 289 bp, Homo sapiens
  chr22:50118499-50118788
  hyper
cctcccaagtcgcacgcgggacccgggcatgggtggccctgctccatacagccccggccaccccacccctggccggtcccacagcctcacaccagccgctccagccatagccacggacggctgagtccggccccgatgctcatccctggagctcgtgctccctcctctggactccccgagaactgtgcccggaccgcgcgcagccgagcgtctccctgcacagcggcactcggcgctgtctgcagaatgagccggtgtgcagagacacgcgggccggccagcccctgag

SEQ ID NO: 226406 - DNA, 105 bp, Homo sapiens
  chr22:50170510-50170615
  hyper
cagcccagagcccctcggtgtgtgatgaacccttccccgggaggttggccagggtggggctccacacagggcaccatgctccctgagccggagtccagtccccag

SEQ ID NO: 226407 - DNA, 343 bp, Homo sapiens
  chr22:50246433-50246776
  hyper
ccaccgtgcccggccgatatttgaatgtcatatacttttcatatatgctaaaatactgttttaattctcccccaacctcttaaaaacgagaaaagcattcttagctcaggcaccatagaaaacccggctgcaggctggacgtggactttggaacagtcggcgtgcgggtgaaggggcacagccgcggggcaggggcgggctccgggcagaggcggccgtgataactccacgctcccgctccagccggtgaccgccacgcgggctcctctcactctcacactcaggccgagaaaatgccgaaagccgtgtcaccaacgggggacctcggggccacattcagcat

SEQ ID NO: 226408 - DNA, 349 bp, Homo sapiens
  chr22:50421921-50422270
  hyper
tccgggttcctgcgcgtggagggggcaggacgccccgcccttattcccgccgccagggggctccacggaggccgcccctcatccacagcagctgcgggtcctgcccggccctccagggcctgtaagccaagcccgagcctcgcccccgggcccgccccctcctcccgcccccgcagctgctccctctcgcctccccgggaagcgcgacgcccccgccttccctcagggccccgggcgggcggacaccagaccgagaaatccgggcgggaggtcggggcggcgtctgctccgccgggggcaggtatcggggcgagtcggagccacgaggactctccgcaaaacgcccagc

SEQ ID NO: 226409 - DNA, 407 bp, Homo sapiens
  chr22:50453234-50453641
  hyper
tccctccgcgcccgcgctgggcaccagatgggaggaaacggggtgcggagaccctgggcggcgccgagactcgtcggacgaacgcgggaaggaacgaaccagcgtccgcccgggacccgggctggagccttccccagagcggctcggagggtccggagcgggtgcgggggtgctgggcacgaggttcccaagaaaaccacggcgaggacgcgggttcaccacaacagcgctgtgttctcggcctcagctccgcgcaggtttccacggagacgcgcgtggctccgggtcgtcgtcctggtccccgcgccggtcccgactcacggggtccgcgggctgcagctccgcccgccgagccgcacgaaggacgcgccctgcaggaccgcggcgcagaacgagcggcagcgctt

SEQ ID NO: 226410 - DNA, 289 bp, Homo sapiens
  chr22:50496690-50496979
  hyper
tgggcccgtggcctcgggctgtgcagcggcggcggccccggggcgtggggctgcgcgggcggcggggggcgcgggggcgcggggagctgcggcgtgcggggggcgcgggccccgacgggcagcagtcatcagcgcttgggctgggcccgggttggggtccgggtcccgggctgctgtcggagcaggcgcggctgcggggtcggcggcgcgggacggtgcgcgccatggtgtccgccgggggagggcccgagtgtagccccgggtcacgcgctgcggccccgcgcccccc

SEQ ID NO: 226411 - DNA, 580 bp, Homo sapiens
  chr22:50623255-50623835
  hyper
aagcccagcgccagcgccaggtcagccaagaacccggggtcgtggaggaggaaggaagtcgtgggcccgggatgcgcggccggaccattgcaggagagcggggcaggcggacggcgcagcagcttgcgggcagcgagtcgtctgcatgcggcggcgaagcgcccgggcccccgtccgcgccggtgcccgcagcgcgcagcaacttggccgccgggtcccggccgccccggtagaggctgggtacagcgagggggccgggcgcccgggcaggacgggcgcggcgggtggggcctggccgtctccccctgccctcggggccgaacacgcacagcgagagtctagcgtcggcgtggctgcggccagccgggtccccctggaggcctccggacgatcggaagtgactgagcgtccgggtccgtgaggccgggggtcggcccgccctaagactcccacctggtcccggttctccgtccgctaggctggccgcggggcccctggggcccgaccttcccggggtgccccaacctgcggcaaggccgaggtcccgctgaggcatgagtcccgggtcggggaccgctct

SEQ ID NO: 226412 - DNA, 84 bp, Homo sapiens; identical to SEQ ID NO: 206187
  chr22:50745645-50745729
  hyper

SEQ ID NO: 226413 - DNA, 183 bp, Homo sapiens; identical to SEQ ID NO: 206188
  chr22:50765110-50765293
  hyper

SEQ ID NO: 226414 - DNA, 44 bp, Homo sapiens
  chr22:50766078-50766122
  hyper
ccggcgtggaagggcgagtttggggctgtcggtaacttaatgag

SEQ ID NO: 226415 - DNA, 180 bp, Homo sapiens
  chr22:50873960-50874140
  hyper
tttcttaagaacgcagtgggttaggtgggcgcaggcacagcacatgtgtggcagaggcgggcccagctgtggcctctcctccctatacccgtgtaaggtgaggaagctctggatagtcctccccgcaccccaggaccatagtgaggggactcctgggttgggctccattagcccctggcg

SEQ ID NO: 226416 - DNA, 104 bp, Homo sapiens
  chr22:50874285-50874389
  hyper
agcaggaagctgttggatcattccatacgatctccagattgtgaatccttccaggactctgacctccccggaaaaacaggcaggacacgcgcccaggcctgtag

SEQ ID NO: 226417 - DNA, 80 bp, Homo sapiens
  chr22:50920028-50920108
  hyper
gcaggacccccaacccgcccagcccgctccgccttgcgccccggacccgcggccgaccccagacccgctgcccgcttcgc

SEQ ID NO: 226418 - DNA, 639 bp, Homo sapiens; identical to SEQ ID NO: 206191
  chr22:50970392-50971031
  hyper

SEQ ID NO: 226419 - DNA, 350 bp, Homo sapiens
  chr22:51111996-51112346
  hyper
atcaccccctcccgcgttgccacgacaacgcgtaaaactaaaattcacttcccagtcgcaggtggagactagtagcgccccctcccctaggcccttccccgtaggtcgcgcccccatcccgccgtcgctaaggtgacggggagggggcgacaggcgttggatccggaccggccaggggtccttggggggaagtccggagcaaactccccaaactaggctggcgtgggggagccgcgccgaacacgccagggcgcggtcgaaagggttaattcggagggcctctcgccgaggcggtgggaagggccccgggccctccccggtctggaggtccccgtggtccgacccccagg

SEQ ID NO: 226420 - DNA, 152 bp, Homo sapiens
  chr22:51112399-51112551
  hyper
ggtggagtgggggggagaagccgccacctccggaaattaattgtttttctttccccttctcgccctaccttggtcttcgtgccccgacgcggcccccaccccagctccgggaccccttcctccgccgcacccgccccggtggtccgcggatg

SEQ ID NO: 226421 - DNA, 738 bp, Homo sapiens
  chrX:2846678-2847416
  hyper
ccggggaacacggccgtgctggaaggcatcgagctggggggttgggggcgggacggggtgcctcttaggaagtggggcgggcaaggctacgcttcgggggatggagccttggggcgggacggggcgcgtcttagtggggcagagcggggggcgcggttcggggcgggtcttagggagcctttgaaggccgaatccgggcagcggtgtagctgggcgtggaaggcggaggacccagcagggcgtgaccggcccagtttccgctccctccgggtcccggccagccttcctccgccctcccttcccttcctcctttgttctctttccctgcccttccgccttcccttcagttcggtctcctccacccgcccttcgtcccctcagtcgccccccatccctgggctctgctgtctggcgtctttcccgggcacagaacgcgcctccagctacattttggagactacaaggcgccggacacaaccacgccctttacaggggcccaggctcgcccggggcgcccctcgccgtgctcgcgaccccctccccaggcccccaccctaggccttagtatgggccgcgtcccggggtcccaggcacctggcggcgggcgcggcgcgtcccctccgcgcggcggatcgcatggccgagcgctggcccagagcgcaggaccttgccctgcgcactccgcgcccgggcgccgctagtgccaaggcttccgccctctcagctgcgggatctggg

SEQ ID NO: 226422 - DNA, 35 bp, Homo sapiens
  chrX:8698481-8698516
  hyper
ctcaactgcacactcgcgaacgcgccagcttcacc

SEQ ID NO: 226423 - DNA, 344 bp, Homo sapiens
  chrX:8698837-8699181
  hyper
tgagagaagagaaaaataagcggaggatttcagagctcgcacgctcgacagggctggtacaggcagcagctgcactcgctcgcgctgagtccggaacctgctctcgtgcgcccacccgcacccggagcctcgcgcaagtcccgcgggggtccgcgccacagggcagagtcccggcaacccgctggagccaagcgcgcggctcccggagcctcccacacaagcgcgcgcgcacacacacatactccccaccctcaggctgaaagaacctacgttcggggtttgggggacggttcccccgggactcgttgaggagtatccgaatacggccccgccaaatcccctgt

SEQ ID NO: 226424 - DNA, 115 bp, Homo sapiens
  chrX:9432816-9432931
  hyper
tcacccaccctaggcgtgggggagcggggcgggcttggtagggacgctggtcccccgaccgtgggacaggggctgggttgggacgcgggtccccactaggagccgcgggggaggg

SEQ ID NO: 226425 - DNA, 180 bp, Homo sapiens
  chrX:9433026-9433206
  hyper
cctcccacggccgtgagggaggggccggcggcgggggcggacccctggcggtcctcctggctggggtccgcgcgctcgcggcagctccccgtggaggtcactgtccgtgccagtccctcccgctgtcccgccctctcccgctgccgccgccgccgccgccgcgcccgcctcagcgccccc

SEQ ID NO: 226426 - DNA, 420 bp, Homo sapiens
  chrX:9433352-9433772
  hyper
ggcgcgcggctgctccggggcgccgggccctcttcggccgccgcacggccgggactcggaggctgccggctggagggaggttcggagcgcggccgggcgcgcggcgccgccacaagttgcgctgctcgcgacgaggtgagtgcgcagggctcggcgggccgggcgcggggtccgcaaacttctgcggggaggcgggtcccgcgctgaccctccagggtccggccggcggctcggggcgcccgaacgctccacccgcccctggaactcctgtaggtgcaggtcgccaactgtccccgcggcgctcggactggggtgcggcgcgctcccaggagcctgaacaataccccgaggtggccgctccccgaagtgccggcgcgccttgcggggagagacggaggtcggcggggggctcctttgttt

SEQ ID NO: 226427 - DNA, 44 bp, Homo sapiens; identical to SEQ ID NO: 206208
  chrX:10023769-10023813
  hyper

SEQ ID NO: 226428 - DNA, 161 bp, Homo sapiens
  chrX:11776190-11776351
  hyper
gcgccaggcgcctccgaggtcccggcagcggctcggggcgggcggaggaggggccgagggcggggcggccgcagcctccgccattcccggccccccccggccacggcgcaccgcctccccgcccccgcccgccctcccccaccgcgcgcgctccgcccgcc

SEQ ID NO: 226429 - DNA, 134 bp, Homo sapiens; identical to SEQ ID NO: 206213
  chrX:15808573-15808707
  hyper

SEQ ID NO: 226430 - DNA, 99 bp, Homo sapiens; identical to SEQ ID NO: 206214
  chrX:15809046-15809145
  hyper

SEQ ID NO: 226431 - DNA, 82 bp, Homo sapiens; identical to SEQ ID NO: 206215
  chrX:15817994-15818076
  hyper

SEQ ID NO: 226432 - DNA, 122 bp, Homo sapiens; identical to SEQ ID NO: 206216
  chrX:15821797-15821919
  hyper

SEQ ID NO: 226433 - DNA, 87 bp, Homo sapiens; identical to SEQ ID NO: 206217
  chrX:15822233-15822320
  hyper

SEQ ID NO: 226434 - DNA, 39 bp, Homo sapiens; identical to SEQ ID NO: 206218
  chrX:15826355-15826394
  hyper

SEQ ID NO: 226435 - DNA, 122 bp, Homo sapiens; identical to SEQ ID NO: 206219
  chrX:15827322-15827444
  hyper

SEQ ID NO: 226436 - DNA, 214 bp, Homo sapiens; identical to SEQ ID NO: 206220
  chrX:15833799-15834013
  hyper

SEQ ID NO: 226437 - DNA, 56 bp, Homo sapiens; identical to SEQ ID NO: 206221
  chrX:15836709-15836765
  hyper

SEQ ID NO: 226438 - DNA, 110 bp, Homo sapiens; identical to SEQ ID NO: 206222
  chrX:15838329-15838439
  hyper

SEQ ID NO: 226439 - DNA, 535 bp, Homo sapiens; identical to SEQ ID NO: 206223
  chrX:15840848-15841383
  hyper

SEQ ID NO: 226440 - DNA, 180 bp, Homo sapiens
  chrX:16730116-16730296
  hyper
ccgggagaagtggggatccgggtgcgggcgctggcgcgggcggaggcgggaagaagcgcgtcccggggacgcgcgggacaggctccaaccgcactgggcacgggccagcgttccccagtccccgcgccacacccggcagccgaggtctgcgagcgcggggctggcggccggacccgactc

SEQ ID NO: 226441 - DNA, 167 bp, Homo sapiens
  chrX:16730791-16730958
  hyper
tgggccccaggcctcgcccagcccggggaccgctcctccctcccgtggctcactttgcaaaggcacttcgagtgcgcgggtgaactccacgcttcccggggaaccccggcttcctggcaagccgagaccctcgctcgggtcctcccgtgcagatctcacccttgtaa

SEQ ID NO: 226442 - DNA, 201 bp, Homo sapiens
  chrX:23801081-23801282
  hyper
gagggcgccgctagcgaatcccacagcgcgccccgctgcccccacttttgtcctccgggttcacacgggcgcccggaagagagggtggtgcctgggagaggaaacgatgcgccccggggccgcggcctcattggatgagaggtcccacctcacggcccgaggcggggcttctttgcgcttaaaagccgagccgggccaatg

SEQ ID NO: 226443 - DNA, 70 bp, Homo sapiens; identical to SEQ ID NO: 206227
  chrX:27999798-27999868
  hyper

SEQ ID NO: 226444 - DNA, 1155 bp, Homo sapiens; identical to SEQ ID NO: 206230
  chrX:39910498-39911653
  hyper

SEQ ID NO: 226445 - DNA, 157 bp, Homo sapiens; identical to SEQ ID NO: 206231
  chrX:39913138-39913295
  hyper

SEQ ID NO: 226446 - DNA, 78 bp, Homo sapiens; identical to SEQ ID NO: 206232
  chrX:39913508-39913586
  hyper

SEQ ID NO: 226447 - DNA, 146 bp, Homo sapiens; identical to SEQ ID NO: 206233
  chrX:39914620-39914766
  hyper

SEQ ID NO: 226448 - DNA, 167 bp, Homo sapiens; identical to SEQ ID NO: 206234
  chrX:39916407-39916574
  hyper

SEQ ID NO: 226449 - DNA, 273 bp, Homo sapiens; identical to SEQ ID NO: 206235
  chrX:39921382-39921655
  hyper

SEQ ID NO: 226450 - DNA, 326 bp, Homo sapiens; identical to SEQ ID NO: 206236
  chrX:39921998-39922324
  hyper

SEQ ID NO: 226451 - DNA, 345 bp, Homo sapiens; identical to SEQ ID NO: 206237
  chrX:39922860-39923205
  hyper

SEQ ID NO: 226452 - DNA, 264 bp, Homo sapiens; identical to SEQ ID NO: 206238
  chrX:39923588-39923852
  hyper

SEQ ID NO: 226453 - DNA, 187 bp, Homo sapiens; identical to SEQ ID NO: 206239
  chrX:39930225-39930412
  hyper

SEQ ID NO: 226454 - DNA, 54 bp, Homo sapiens; identical to SEQ ID NO: 206240
  chrX:39930889-39930943
  hyper

SEQ ID NO: 226455 - DNA, 2832 bp, Homo sapiens; identical to SEQ ID NO: 206241
  chrX:39931601-39934433
  hyper

SEQ ID NO: 226456 - DNA, 79 bp, Homo sapiens; identical to SEQ ID NO: 206242
  chrX:39935706-39935785
  hyper

SEQ ID NO: 226457 - DNA, 126 bp, Homo sapiens; identical to SEQ ID NO: 206243
  chrX:39937096-39937222
  hyper

SEQ ID NO: 226458 - DNA, 420 bp, Homo sapiens
  chrX:39956383-39956803
  hyper
agagggggccgactgcagccctcagcgcgcccgcccgcccacccgtccgcggtctcccgggggaaaggtgttccgggcactgacctgaaatccccggtgggggagtaggcagggagcctgcgatccggctctttgaagttttcccccaagcggactcgaggcggcgagaaggagcggggggcggttgggtgggtggagagagatatgaggggtggggggggttggcgacgttaacgagcggagaaggagccgggccggagaagcgcggcgagcagcaaagtttgcggtccccggctgcccgcagcccgctcgcggcgccgcgctcactcgactccctcgccgtctgctggcagccggctgccctcggggtcggccccgccgaggggtgggctctgggccgggtgggggcggggcggggcg

SEQ ID NO: 226459 - DNA, 267 bp, Homo sapiens
  chrX:40015028-40015295
  hyper
aatcacccccgccaggcgcgatccatcatcgcagcgcgccgcgggcccgcgtgaggctgactcgcggctggggtggggagggggggcgcgcggagcaggaggcggtcgcccagcacacccggactctccgcgcacctcgctgcccctcctggaggcctgcacccaggcgctcataactctccaagttccccagctacagagcgaaaacccagtggctccgagttctgggcacagctcacttaggaatccgcgcgtcctccgcgccct

SEQ ID NO: 226460 - DNA, 660 bp, Homo sapiens
  chrX:40034573-40035233
  hyper
ggctggattttcgcggcccgggcccggcggccgcccagcgcccgcgcgatcctctctccttcgggttgagcaaacgtggtcgcctaattccgcccgggagacagcagctgtgcggcgagagggggagaaaaaatatcgcaacttttccaacagaaagtgtgtgcgcacacgagaggtgaaggcccaccccgattctgtgcacgtatcgacacagcatctaatcagtgtcactgccaggaatacgcttccgcggcgggcgacaccgccgccctcgccaacctgcaggagggaggggggatgcaaatggcgtctcgcgtcgtcctagactccgcgcagcacccgctaccgcgactccaagcagacgttgcagcaaactggggtgcagcgtctggggacgcgaacgcgcaggcggcccgagcggtcgcagggaagaggaactagcaccactccccgctacgagaccgttccccgcccccacctccggaagagccgcccttactcgactggggtgaggggcgggaaactttgcaagaagactgttccgcgccttccccgcgtggcacctcagaagaacgtgggtgggtttcccgtccgaggccagaccacgctaccctacttttccaggtttcggacctgaacctcgtggactacgggagggag

SEQ ID NO: 226461 - DNA, 180 bp, Homo sapiens
  chrX:40035280-40035460
  hyper
cgtcttcaagggttctggcagatggccaagtttgtgtcctttccctcccacgctagagtagcgcacgccactttggggaagcgtgagaccgttcaccaccggccacgaggccaccaatgtcttccaggtggggccgatggtttgtctgcagcactcccttccgccttgcggtcctcgcct

SEQ ID NO: 226462 - DNA, 401 bp, Homo sapiens
  chrX:40036181-40036582
  hyper
ggcgtcctctactccctgctccccaccccaccccaccccctaccttccgggtaggagaactcaaaacaactcgctgaccttcgggccgaccagctccgtcttccactgactccagcattccgttcaaacccagcagccacggcttctaagatttcactccgctctgggctgggggggagggggcgagttctccgggagggggtgtctcagatcgaaagagccacttcacgctctttctcctcctccgaggtgagtttttagactatttggaggccttggggaaacgcgagcagccgcgtgcaaaggagcccccccgccttctccccgcacatgcagccttgtctagtgtgacccgatttccagggtcagcagcagagggcctggccagcttcggaaatacc

SEQ ID NO: 226463 - DNA, 291 bp, Homo sapiens
  chrX:41112860-41113151
  hyper
cttcactagggaggcggcgctctctctgccccggttctatcacgcgcatccgttaggaactaagcggcacctgcgcgaggctaggcttgttgacatatttcttgctggcggcgtcctctcgcgtggagcacgactgcgcaaagcgccgacagtcccccgagcgaggacggcagcgagactccgaagcccccttagcaaccaagccggtgccgctgcccttgcgccgggactgcagccgggtcttccgaagtgaggatatgctgccctctagaggccgcggggtgacatggc

SEQ ID NO: 226464 - DNA, 359 bp, Homo sapiens
  chrX:73163983-73164342
  hyper
ggaaactgggggagggtccacggcaacggctgcggcacggcaacggctgcggcacggcaacggctggggcacggcaacggctggtgcatgttgccggcggaggcatttaggtagtgcacgacggctgggcgccgggcctgtttggctgtgacgcccacccccggctttcatccgcctatgccctagggctagtggaagacttaagatggcggcgtttgcacggagtgcaatcactgcgtccttacgggggttgcaaggcgtccgaagtatgagtccactaacaaaagtccagaaactcgccagttaatagtattgtggtgagtgatgagcctcacgttggctagagaagtggccgttag

SEQ ID NO: 226465 - DNA, 343 bp, Homo sapiens
  chrX:123094090-123094433
  hyper
aaccgcggctcgatcgggtccgcggcggaagcgcggccaaacgaatgagtaagtcaggcgcgggcacggcaccttgtttaccccactcggcggcgcgcccctgcgggcgcctggtttgcgggcggcgtcggagacgctgaacccgggagtcagtcggccacgattggtcggtgactgggaggaggacgctgggtgggagggctgggagccaggcgttgcagtggcaactctctgccgctagatgccgctccctcccaacgggagccgggcgcgggttcgtggccgacagatggcgcctgcgcgttccattcgcctccaagtcgccgaagagcgaacaccccaa

SEQ ID NO: 226466 - DNA, 223 bp, Homo sapiens; identical to SEQ ID NO: 206276
  chrX:123094493-123094716
  hyper

SEQ ID NO: 226467 - DNA, 124 bp, Homo sapiens; identical to SEQ ID NO: 206277
  chrX:123095161-123095285
  hyper

SEQ ID NO: 226468 - DNA, 151 bp, Homo sapiens; identical to SEQ ID NO: 206278
  chrX:123095555-123095706
  hyper

SEQ ID NO: 226469 - DNA, 65 bp, Homo sapiens; identical to SEQ ID NO: 206279
  chrX:123155216-123155281
  hyper

SEQ ID NO: 226470 - DNA, 141 bp, Homo sapiens; identical to SEQ ID NO: 206280
  chrX:123156380-123156521
  hyper

SEQ ID NO: 226471 - DNA, 79 bp, Homo sapiens; identical to SEQ ID NO: 206281
  chrX:123159689-123159768
  hyper

SEQ ID NO: 226472 - DNA, 165 bp, Homo sapiens; identical to SEQ ID NO: 206282
  chrX:123164810-123164975
  hyper

SEQ ID NO: 226473 - DNA, 97 bp, Homo sapiens; identical to SEQ ID NO: 206283
  chrX:123171376-123171473
  hyper

SEQ ID NO: 226474 - DNA, 77 bp, Homo sapiens; identical to SEQ ID NO: 206284
  chrX:123176418-123176495
  hyper

SEQ ID NO: 226475 - DNA, 205 bp, Homo sapiens; identical to SEQ ID NO: 206285
  chrX:123179013-123179218
  hyper

SEQ ID NO: 226476 - DNA, 152 bp, Homo sapiens; identical to SEQ ID NO: 206286
  chrX:123181203-123181355
  hyper

SEQ ID NO: 226477 - DNA, 74 bp, Homo sapiens; identical to SEQ ID NO: 206287
  chrX:123182854-123182928
  hyper

SEQ ID NO: 226478 - DNA, 135 bp, Homo sapiens; identical to SEQ ID NO: 206288
  chrX:123184024-123184159
  hyper

SEQ ID NO: 226479 - DNA, 278 bp, Homo sapiens; identical to SEQ ID NO: 206289
  chrX:123184966-123185244
  hyper

SEQ ID NO: 226480 - DNA, 108 bp, Homo sapiens; identical to SEQ ID NO: 206290
  chrX:123189977-123190085
  hyper

SEQ ID NO: 226481 - DNA, 112 bp, Homo sapiens; identical to SEQ ID NO: 206291
  chrX:123191715-123191827
  hyper

SEQ ID NO: 226482 - DNA, 131 bp, Homo sapiens; identical to SEQ ID NO: 206292
  chrX:123195073-123195204
  hyper

SEQ ID NO: 226483 - DNA, 104 bp, Homo sapiens; identical to SEQ ID NO: 206293
  chrX:123195620-123195724
  hyper

SEQ ID NO: 226484 - DNA, 306 bp, Homo sapiens; identical to SEQ ID NO: 206294
  chrX:123196749-123197055
  hyper

SEQ ID NO: 226485 - DNA, 213 bp, Homo sapiens; identical to SEQ ID NO: 206295
  chrX:123197688-123197901
  hyper

SEQ ID NO: 226486 - DNA, 71 bp, Homo sapiens; identical to SEQ ID NO: 206296
  chrX:123199725-123199796
  hyper

SEQ ID NO: 226487 - DNA, 262 bp, Homo sapiens; identical to SEQ ID NO: 206297
  chrX:123200024-123200286
  hyper

SEQ ID NO: 226488 - DNA, 93 bp, Homo sapiens; identical to SEQ ID NO: 206298
  chrX:123202413-123202506
  hyper

SEQ ID NO: 226489 - DNA, 175 bp, Homo sapiens; identical to SEQ ID NO: 206299
  chrX:123204998-123205173
  hyper

SEQ ID NO: 226490 - DNA, 140 bp, Homo sapiens; identical to SEQ ID NO: 206300
  chrX:123210181-123210321
  hyper

SEQ ID NO: 226491 - DNA, 102 bp, Homo sapiens; identical to SEQ ID NO: 206301
  chrX:123211806-123211908
  hyper

SEQ ID NO: 226492 - DNA, 150 bp, Homo sapiens; identical to SEQ ID NO: 206302
  chrX:123215228-123215378
  hyper

SEQ ID NO: 226493 - DNA, 133 bp, Homo sapiens; identical to SEQ ID NO: 206303
  chrX:123217270-123217403
  hyper

SEQ ID NO: 226494 - DNA, 224 bp, Homo sapiens; identical to SEQ ID NO: 206304
  chrX:123220396-123220620
  hyper

SEQ ID NO: 226495 - DNA, 390 bp, Homo sapiens; identical to SEQ ID NO: 206305
  chrX:123224424-123224814
  hyper

SEQ ID NO: 226496 - DNA, 127 bp, Homo sapiens; identical to SEQ ID NO: 206306
  chrX:123227867-123227994
  hyper

SEQ ID NO: 226497 - DNA, 78 bp, Homo sapiens; identical to SEQ ID NO: 206307
  chrX:123229221-123229299
  hyper

SEQ ID NO: 226498 - DNA, 2083 bp, Homo sapiens; identical to SEQ ID NO: 206308
  chrX:123234423-123236506
  hyper

SEQ ID NO: 226499 - DNA, 136 bp, Homo sapiens; identical to SEQ ID NO: 206309
  chrX:129139163-129139299
  hyper

SEQ ID NO: 226500 - DNA, 91 bp, Homo sapiens; identical to SEQ ID NO: 206310
  chrX:129146553-129146644
  hyper

SEQ ID NO: 226501 - DNA, 3264 bp, Homo sapiens; identical to SEQ ID NO: 206311
  chrX:129146925-129150189
  hyper

SEQ ID NO: 226502 - DNA, 177 bp, Homo sapiens; identical to SEQ ID NO: 206312
  chrX:129154948-129155125
  hyper

SEQ ID NO: 226503 - DNA, 81 bp, Homo sapiens; identical to SEQ ID NO: 206313
  chrX:129156871-129156952
  hyper

SEQ ID NO: 226504 - DNA, 392 bp, Homo sapiens; identical to SEQ ID NO: 206314
  chrX:129158962-129159354
  hyper

SEQ ID NO: 226505 - DNA, 227 bp, Homo sapiens; identical to SEQ ID NO: 206315
  chrX:129162609-129162836
  hyper

SEQ ID NO: 226506 - DNA, 222 bp, Homo sapiens; identical to SEQ ID NO: 206316
  chrX:129168429-129168651
  hyper

SEQ ID NO: 226507 - DNA, 167 bp, Homo sapiens; identical to SEQ ID NO: 206317
  chrX:129171341-129171508
  hyper

SEQ ID NO: 226508 - DNA, 148 bp, Homo sapiens; identical to SEQ ID NO: 206318
  chrX:129173111-129173259
  hyper

SEQ ID NO: 226509 - DNA, 78 bp, Homo sapiens; identical to SEQ ID NO: 206319
  chrX:129184691-129184769
  hyper

SEQ ID NO: 226510 - DNA, 157 bp, Homo sapiens; identical to SEQ ID NO: 206320
  chrX:129185834-129185991
  hyper

SEQ ID NO: 226511 - DNA, 2230 bp, Homo sapiens; identical to SEQ ID NO: 206321
  chrX:129189828-129192058
  hyper

SEQ ID NO: 226512 - DNA, 156 bp, Homo sapiens; identical to SEQ ID NO: 206323
  chrX:133507341-133507497
  hyper

SEQ ID NO: 226513 - DNA, 184 bp, Homo sapiens; identical to SEQ ID NO: 206324
  chrX:133511601-133511785
  hyper

SEQ ID NO: 226514 - DNA, 102 bp, Homo sapiens; identical to SEQ ID NO: 206325
  chrX:133512034-133512136
  hyper

SEQ ID NO: 226515 - DNA, 134 bp, Homo sapiens; identical to SEQ ID NO: 206326
  chrX:133527530-133527664
  hyper

SEQ ID NO: 226516 - DNA, 44 bp, Homo sapiens; identical to SEQ ID NO: 206327
  chrX:133527938-133527982
  hyper

SEQ ID NO: 226517 - DNA, 479 bp, Homo sapiens; identical to SEQ ID NO: 206328
  chrX:133547517-133547996
  hyper

SEQ ID NO: 226518 - DNA, 277 bp, Homo sapiens; identical to SEQ ID NO: 206329
  chrX:133549045-133549322
  hyper

SEQ ID NO: 226519 - DNA, 134 bp, Homo sapiens; identical to SEQ ID NO: 206330
  chrX:133551198-133551332
  hyper

SEQ ID NO: 226520 - DNA, 130 bp, Homo sapiens; identical to SEQ ID NO: 206331
  chrX:133559230-133559360
  hyper

SEQ ID NO: 226521 - DNA, 3132 bp, Homo sapiens; identical to SEQ ID NO: 206332
  chrX:133559690-133562822
  hyper

SEQ ID NO: 226522 - DNA, 900 bp, Homo sapiens
  chrY:16636256-16637156
  hyper
ccgcaccatcccatctcaaggctctctgctgacccgggccgatttcatctggtctcttctcccccgcttcccacctcccaattcccgcgcagctcggctccgttccctcccactcccctaggcggaactgaaagcgaagatcagccaagagcacagtcggaggcggcagagacggtggcgggtgagctaggggctgtgagacgaagcagggagagagtgaacttcagccccgtcccctccccactgccacggctggggcaacccaacccgcgcctgaagcggcttggcttgacctgcggaagcgcgggccgggatggcgtggggagagggaggtaggtgccactgggctgcagatgacgagtgggttgggggcttgctgtgggacaagaggttcaggttccggcctgcgccttccactccgcggtggcgctctctgcctgcggttttccaggaggccgatctaccccagggacactctcatccttcaggcggtctcctggacgccctttcctccccttgcctcccagcctgacctggctctttcgcccctcggagaaccggtaggttggggtccctcggcgggggtctagtgagccgagtcgcgagctttgcgcccccggtatctaggccccgtgccgcgcgcaaatccgggcccaggcgtacagttctggagcctagtcgccgccagacacagggccctttgtacccggaggagcgggagcgggagcgggggcgtcagggcaacccttgcaccccagaggcctgcctaggaccaccctgggaacaaatgtctcgctcggaaaacgaggtgaacccggaggatgtcctacgcatcatacccctccccttcttgagaaggctttttctttttttctttttttttcccggtttccttttctc

SEQ ID NO: 226523 - DNA, 7860 bp, Homo sapiens; identical to SEQ ID NO: 58444
  HPV16:0-7860
  hyper

SEQ ID NO: 226524 - DNA, 7800 bp, Homo sapiens; identical to SEQ ID NO: 58445
  HPV18:0-7800
  hyper

SEQ ID NO: 226525 - DNA, 112 bp, Homo sapiens; identical to SEQ ID NO: 206354
  NW_001838402.2_289580-297926:6069-6181
  hyper

SEQ ID NO: 226526 - DNA, 38 bp, Homo sapiens
  chr1:6137223-6137261
  hyper
tgacagagcgacactccatctcaaaaaaaaaagaaaag

SEQ ID NO: 226527 - DNA, 203 bp, Homo sapiens; identical to SEQ ID NO: 197532
  chr1:52081941-52082144
  hyper

SEQ ID NO: 226528 - DNA, 138 bp, Homo sapiens
  chr1:100437131-100437269
  hyper
ggattacaggcgtgagccaccgcacccggcccccaatatgattctttcttttttccttttattaaacaagtattacttttttccacatatcctattttttagccaaactagtcgttaattagacgtccagtttctgaa

SEQ ID NO: 226529 - DNA, 340 bp, Homo sapiens
  chr1:155161748-155162088
  hyper
cggggctggcttgttgtccggggctgaggtgacatcgtgggctggcggggtggtggagcccagggctggcctggtgactgggaccgaggtgacatcctgtccccaggtggcagctgaacctgaagctggttccgtggccggggccagagtgacatcctgtccctgagtggtggaggagcctgaaccggggctgtggctggagagtacgctgctggtcatactcacagcattcttctcagtagagctgggcactgaacttctctgggtagccgaagtctccttttctccacctggggtagagcttgcatgaccagaacccgtaacaactgttgcgggttta

SEQ ID NO: 226530 - DNA, 32 bp, Homo sapiens
  chr1:163378351-163378383
  hyper
acacccacacacacgcacgcacacacgcacac

SEQ ID NO: 226531 - DNA, 31 bp, Homo sapiens
  chr1:215744970-215745001
  hyper
actttttttttttttttttccgagacggagt

SEQ ID NO: 226532 - DNA, 141 bp, Homo sapiens; identical to SEQ ID NO: 198023
  chr1:234828214-234828355
  hyper

SEQ ID NO: 226533 - DNA, 120 bp, Homo sapiens; identical to SEQ ID NO: 198121
  chr2:25440006-25440126
  hyper

SEQ ID NO: 226534 - DNA, 142 bp, Homo sapiens; identical to SEQ ID NO: 198787
  chr2:240402418-240402560
  hyper

SEQ ID NO: 226535 - DNA, 72 bp, Homo sapiens
  chr3:73045503-73045575
  hyper
cgcctcggcctccctcccaaagtgttgggatcaccggcctgagccccctgcccggcctcgctctacgttttt

SEQ ID NO: 226536 - DNA, 87 bp, Homo sapiens
  chr3:183676018-183676105
  hyper
catgtgtatattgcatgacgctgaggtctgggttactaatgatcctctcacccaggtactaagcatagtacccggcttttccctctt

SEQ ID NO: 226537 - DNA, 179 bp, Homo sapiens
  chr4:41993656-41993835
  hyper
caggtgtggtggtgcgctcctgtagtccagctactcgggagactgaggcaggcagatcttttgagcccaatagttctaggctagccttggcaacatagtgagctgtctgtaaaaacataggtttgaaaaaacctgtaacatgttcgtgacctcctgaaagaagtcggaagttgcagtca

SEQ ID NO: 226538 - DNA, 76 bp, Homo sapiens; identical to SEQ ID NO: 200413
  chr6:34405060-34405136
  hyper

SEQ ID NO: 226539 - DNA, 39 bp, Homo sapiens; identical to SEQ ID NO: 200414
  chr6:34405256-34405295
  hyper

SEQ ID NO: 226540 - DNA, 171 bp, Homo sapiens
  chr8:8639885-8640056
  hyper
ggataagagctcaggatttgggtgcgtgggctgaagcatgcgcattaagaggcaaaaggacggcgcttgactggtataggaccttctaggaacattcaactagtaagggaagaacacctcaagtgagcatgcgcacaactccagtaatacactgcgcatgcgccccctccc

SEQ ID NO: 226541 - DNA, 37 bp, Homo sapiens
  chr8:21868744-21868781
  hyper
tggctcatgcctgtaatcccagcactttgggaggccg

SEQ ID NO: 226542 - DNA, 42 bp, Homo sapiens
  chr8:142141062-142141104
  hyper
tgtgagccaccgcacctggccgcttttaaataatttttacct

SEQ ID NO: 226543 - DNA, 83 bp, Homo sapiens
  chr9:131132510-131132593
  hyper
cctgccctgagccgccgcgcccggcctgccctgagcttttgcaacaggctccagtggtctccgtgtctctttccttattcccc

SEQ ID NO: 226544 - DNA, 38 bp, Homo sapiens
  chr10:88224575-88224613
  hyper
ggggcaagacttcgtctcaaaaaaacaaacaaacaaac

SEQ ID NO: 226545 - DNA, 40 bp, Homo sapiens
  chr10:114571159-114571199
  hyper
aaggtgagtgcagaccgggcgcggtggctcacgcctgtaa

SEQ ID NO: 226546 - DNA, 120 bp, Homo sapiens; identical to SEQ ID NO: 202625
  chr11:66897392-66897512
  hyper

SEQ ID NO: 226547 - DNA, 240 bp, Homo sapiens
  chr11:66897572-66897812
  hyper
acaggcgtccgccaccccacctggctaatttttttttttttcttgcaccaaagctttctaaagttagtgatttatttctgacaagtttgcaaaacccaagagagagcagttttctgggttgaactcatacttcgtgtttactcgagtctgagtcacggcacctgacttcctcacaggtgcacctgactgctctttaccacctggctaatttttatattgttttagtagagacagggtttc

SEQ ID NO: 226548 - DNA, 38 bp, Homo sapiens
  chr11:128563857-128563895
  hyper
agagagagagagagagagagagagagagagataggact

SEQ ID NO: 226549 - DNA, 137 bp, Homo sapiens
  chr12:22529506-22529643
  hyper
acatagagaccttcacggggatggtgacaaagacgtggggatggttgacatttgctggaatgcttactgtacaccacacactcttctgagtacctgacatatgatggctcaaactggtcctcagcatcgttgtgaga

SEQ ID NO: 226550 - DNA, 392 bp, Homo sapiens
  chr12:64782916-64783308
  hyper
acacctgtccccaacggaaaaaccaagaacacacctggagagcagctcagacaaagggagccaggcggggaaaacagtaattggagaggagaccgtgcttccagtctgttgctggtttacaaggtaaatctattcctggacgaaaggggtacaggaacagcacccgaaaaccggcgacaggctgtggcaggcccgacgtctttcaagcccagctcctagcgtcgacgcccctccttccaagacgtttcccagcaggccctgcgcccagtttggatcaagtgagccgcctgagattgccaagcgtcctgtgcgcatctcattaacgcatctgcttattcatgcatttattcttttgctggggagggggtggaggggaacggtgtctcactcat

SEQ ID NO: 226551 - DNA, 39 bp, Homo sapiens; identical to SEQ ID NO: 203092
  chr12:69241507-69241546
  hyper

SEQ ID NO: 226552 - DNA, 41 bp, Homo sapiens
  chr12:108298348-108298389
  hyper
gattacaggcgtgagccaccgcgcccggctccaatgcacct

SEQ ID NO: 226553 - DNA, 442 bp, Homo sapiens
  chr12:133443618-133444060
  hyper
caaaaaaacagaaaataaagagcactctgctgctgaggagctgggctcatccaaaggagcctctgaagaaggaaggagcggatgcaacaaggcctcaagaacatcaacgaacaggagaggtgtggctgcccgtgtgaagacagagcaacggcatacaacggagtaaaaaccacatcaacagaagtggaaacaggcccagagagcgtgagaggtttctggtttcaagaaggcacactgagtccctgcacccgatgccgctccttccccaaatcccactggaatacacagagagacataaaaacaaggagtgtcctgtagcagagcagccaggctggctcatgagacagagggagcagtcttctgggagacatggctcttgctgctgcggatcagccaacagatccatggaaagcaaaggtcccttctccggaggcttcctggt

SEQ ID NO: 226554 - DNA, 43 bp, Homo sapiens; identical to SEQ ID NO: 203633
  chr14:65005557-65005600
  hyper

SEQ ID NO: 226555 - DNA, 162 bp, Homo sapiens
  chr14:65005780-65005942
  hyper
ttcaaagtgctgaaactacaggcatgagcctccacacccgtccaggagcccatttatatgggagcctgcttctaaagattattacctggtgccagggtattttccagacctgtcctcacattcctgttaaacaggaggaagtgaatcgcgctccttttcatc

SEQ ID NO: 226556 - DNA, 39 bp, Homo sapiens
  chr14:105218314-105218353
  hyper
tgggcgccgagagcgagcgagggctgccagcacgctgtc

SEQ ID NO: 226557 - DNA, 41 bp, Homo sapiens; identical to SEQ ID NO: 204758
  chr17:65352419-65352460
  hyper

SEQ ID NO: 226558 - DNA, 54 bp, Homo sapiens
  chr18:35145806-35145860
  hyper
gctctcccccctctctctctccctccctccctctcctctctctctccctctctc

SEQ ID NO: 226559 - DNA, 36 bp, Homo sapiens
  chr19:13029431-13029467
  hyper
gtgtgttggctggagtccttcgagaaaggagaagag

SEQ ID NO: 226560 - DNA, 36 bp, Homo sapiens
  chr19:15694860-15694896
  hyper
atctgtcttatatgcgggtggctgggtgtcctgaga

SEQ ID NO: 226561 - DNA, 120 bp, Homo sapiens
  chr19:39992816-39992936
  hyper
actccgtcgcaaaaaacaaacaaaaaaaaaacaaatatctgggtcaaaatacaggagtattacggtttctatgagataactgtttattttttatttttatttttttgagagggagtcttg

SEQ ID NO: 226562 - DNA, 35 bp, Homo sapiens
  chr19:54207013-54207048
  hyper
tagccggggcatggtgcctcatgcctgtaatccca

SEQ ID NO: 226563 - DNA, 187 bp, Homo sapiens; identical to SEQ ID NO: 197232
  chr1:877475-877662
  hyper

SEQ ID NO: 226564 - DNA, 299 bp, Homo sapiens
  chr1:901741-902040
  hyper
gcagagacctgcacggctcaggtaggggccaggcctcttccagaaaggctccaccctcgcccaggccctggtgccgggcgggacgtcccggagccccgcctgcccgcgggaggcgggggcaggaggctgtggacagggacccagacttgccgacctgtacgactctggccatggggaacagccactgtgtccctcaggcccccaggaggctccgggcctccttctccagaaagccctcgctgaagggaaacaggtgagcggggcgtgggtgcggccacctgggcgcagggctcccccac

SEQ ID NO: 226565 - DNA, 302 bp, Homo sapiens
  chr1:975536-975838
  hyper
tcagctgtgctggacgctgcagcagcgcgggaaggggctcccccggctccatggggtgaatcggtgaggggctccggtgccgatgtggaaggagctcctgagcagaactggggcctggactgcttgtgcccgagttggtttcgaggcgtctctgcttttcgctggaggcccacgaggtgggtgggaagtgggtgctcgcccgtcgcagaaacagagtcgggtgccgcctgcggcagacgcccctctccgcgcctgcaggtgcggggtgggggagaaaggtcatccctggagaggcccggggc

SEQ ID NO: 226566 - DNA, 51 bp, Homo sapiens
  chr1:976153-976204
  hyper
gcctgtgtgtgggtcggacgcctccacctacagcaacgaatgcgagctgca

SEQ ID NO: 226567 - DNA, 154 bp, Homo sapiens; identical to SEQ ID NO: 197236
  chr1:999585-999739
  hyper

SEQ ID NO: 226568 - DNA, 112 bp, Homo sapiens
  chr1:1004072-1004184
  hyper
cagcaagccgcgggccgggcccatggtggtgcacttcagctgcggcggggcgggcccacgcgggctgtgcagatgcaggtgcggcggggcggggccacgcgggctgtgcagg

SEQ ID NO: 226569 - DNA, 79 bp, Homo sapiens; identical to SEQ ID NO: 197237
  chr1:1014973-1015052
  hyper

SEQ ID NO: 226570 - DNA, 156 bp, Homo sapiens; identical to SEQ ID NO: 197238
  chr1:1072536-1072692
  hyper

SEQ ID NO: 226571 - DNA, 268 bp, Homo sapiens
  chr1:1334561-1334829
  hyper
tacagcctgtccccgatcagcaccccctgcgaccctgagggtgcgcccccagatcccggggcgccggccgctgccgcgggagctgccgaccctgcagcaccagccgccgccgccgccgccgccattttgtgccgccgactccccttcggcttcttccctcagggcggctcctcgcgaagctccacggccgccaccgccccgccccgtcgcgtgccattggttcggcccgcgaccagcgcgacgccgcctagccgcaattggctacata

SEQ ID NO: 226572 - DNA, 958 bp, Homo sapiens
  chr1:1475244-1476202
  hyper
cggggtcggggcagcgcaagcggggagcgagagcgcaggccggggtgaggggagcgtaggccttggtagggggagcgcagcgggtatggggatcgcaggctggggaggggagcgcaggccggggtggggggagcgcaggcccgggaggggaccgcgggccggggagggggaagcgcaggccggggtggggggagcgtaggccggagagaggagcgtagggagtgtggggatcgcaggttggggaggggagcggaggccggggtgggggagcgcaggccggggaggggagcgcaggccggggaggggagcgcaggccggggaggggagcgcaggccgcacgggcggtaaacaaggcgcgggaggtgggccaggcggcgcgcgcgggcggggagcagggggcgcgcgcgggaagcccctccgctcaccatcacgaccgacgcccccagaatcatgaagatcatggtgttcgcgctcatggacatcgggcggggccgggccgggccggagcgccgccccccggccccggcgcccccccggccccggcccgatgctgagcccccgccgcctccgcagaggtcagcgcttccctggatcgtccgccgccgctcgctgcaaccccggcaccggccggggggaggaggcgcgggggggggggcgccggggagggacgcggggcctttctggggtctctcggcccggcccgccgcgctccgctccgccctcgggtcctccctgcgatgcgctcggctcggctcgactcggctccgctcggctccggccccctccctgcctcctcctccctcctcccccctccctccccgccgccttcctccgcctctcgggagggaccgcgcagaccgcaggccgccccgtgccagcgccgggaggagaccgccatcccccggacgccggccgggacccctccccgggagcctcggcttcgcgtcccgccccagtc

SEQ ID NO: 226573 - DNA, 190 bp, Homo sapiens
  chr1:1510423-1510613
  hyper
ggacgattttgtgcgttccctcggtccccgtggggcccatagtcctcacttctgccaccccagagtcgtcgcgcttcactagacccgctccctccactgtcccggaggcccacagacattcccgcattctgaggctcgctcccgtcccgtgccgctgttaccggcctccggccccggctcatacaagcag

SEQ ID NO: 226574 - DNA, 539 bp, Homo sapiens
  chr1:1534831-1535370
  hyper
cgtcatggccaccacgatgtcctgcatgccggccggctcggcggtgaactccacgcactcggccggctcgggggtctctggcgcggcggcggcgggcccagcgcgcagcggcagcggctgcaggcacaggcggtagaggacgctgtcgtgcacgtcgggcagcaggtagtcgcggcaggaggccccgaggagcacgcgctcgcacgggaagcgcgtgtaggcgccgcgccacgagcagttgagcgcgaaggcgcgcacgcggcgcgcggcggccggggccaggcgccactgcaggaggacgctgcggttgcgcaggacgctggcgcgcagggagcggccggccggggcgtgcagcacgcagcccggagcctggcagcggaagccgcgcgcggggctgcggaagcacaggcgcccgccgcccgcctcggggccctcgggcagcaccttgtaggggcaccagggcgcgtcgggggtcggctcccagcccggcggcgtcggggcggccgcggcgcagggcggcggcgcgcaggcggccagca

SEQ ID NO: 226575 - DNA, 76 bp, Homo sapiens; identical to SEQ ID NO: 197241
  chr1:1535610-1535686
  hyper

SEQ ID NO: 226576 - DNA, 136 bp, Homo sapiens; identical to SEQ ID NO: 197242
  chr1:1550765-1550901
  hyper

SEQ ID NO: 226577 - DNA, 392 bp, Homo sapiens
  chr1:1566262-1566654
  hyper
cggccgcggggactcgcgctctgatccaaggggcccgacactccccagggctgtggggtcccgtcccagcagggagttagttggggggcgtcccaggcagggtctgggggccgggcgcacgcaggcggggtgacgagctgggggggcggggggcggtgtcggagcaaatacggcggccaggcccagcctctcgcgctttccaagaaccgcccgcggccgccgccagctgcttggcgctgaccccgttggccgggctgccgtcaccctgggcccgacgccggcgcggaaaacggggagggacgagacagacacaggccggtctggctcggaatctcctgctcctctgcccaatcccccacccccgccccgcgggacgccggtgcccggtctcg

SEQ ID NO: 226578 - DNA, 390 bp, Homo sapiens
  chr1:1566684-1567074
  hyper
gccggccgccccgtcgaacctttgggtctccgagctccccgcccccgcccccaatcaggaccggtccagacctccaggcccggcgcttagctccgtttcccgtccctcccgtctccctctcccctttgctggggcctagccggggatttaggagccacacaccctccacctcacgcgctaccctccacggggcttcccgcagccagggcccgccccttcccggctccccgggagaccctggcaagttccctccctccgccccgcaacctggcaccctccgcggcccttgcctacccacgcaccccctccccgcctccccctccaccgccccatactcactgccacgtccccatccggccatcccctcccagctctcggggacactgtcag

SEQ ID NO: 226579 - DNA, 125 bp, Homo sapiens
  chr1:1714175-1714300
  hyper
aaactagatttctgtgcctacagtttgaaaatgattgcagttcactcagccagtgtggaattatcctcctctttccacactgccttagtcagtgccgctgtccaagtgcacgttgttggcgcccg

SEQ ID NO: 226580 - DNA, 431 bp, Homo sapiens
  chr1:1850719-1851150
  hyper
gagcaaagcccggcggcgcggctttatggggccccgcccaccacaggacacacccaccacatgacacgcccacagaacgcccgctcagagtaaaccccgcccaccgggccccgctggccgcaggccccgcccacaggcgcacacgcctactggacgccccacgcagggtaaaccccgccctccgggcaccgcccagagcaaaccgcgttcgtcgcaggcctcgcccacaggacgcctcacgcagcataaaccccgcccactgggccccgcccagtgcaagccttgttcgccgcaggccccgcccacaggagccctcgcccacgagacgcccccattcgctgggcctccactcaatgcaaaccccgcccactggccccatgcccaacgtaagcctcgcccaccataccccgctcagcgcaatcccctcccac

SEQ ID NO: 226581 - DNA, 448 bp, Homo sapiens
  chr1:1935024-1935472
  hyper
ctggcacagctttccgggaaaggcgtttcatatgggacggagttctgcctggggggcgggggtcaaacccttccagctcagccccagggtcaaacgcatccgcccccacacccacctctggctggcctgggtcccaggttctcgggctccggaggcacagacaccccgggctgctcaggcaggcggcggtccttggcgattgccctccgcggcgccggcggcgtggtttggggcgggcagctccatggcaacggaagactccatcgtggccggagggggagcctcgcccgttctgctccccggctggagcgggtggtttggtccgacccaccaccgaccgcgcgggccggggccggggcaaggaggtcgcgggccccgaggcgcggctgaagggccaggccacaggccgcggggcggggacgtctccggggtcccagacagccaggcc

SEQ ID NO: 226582 - DNA, 82 bp, Homo sapiens
  chr1:1976105-1976187
  hyper
accgcgcccggcccaatccgcagattttaagcggggacgacttaaaaacaggattgctgagctgcgacgaggggggctgcaa

SEQ ID NO: 226583 - DNA, 66 bp, Homo sapiens
  chr1:2078513-2078579
  hyper
cactgacctctccatctatccatgtatctattgtccactgacctctccatctatccatctattgtc

SEQ ID NO: 226584 - DNA, 92 bp, Homo sapiens
  chr1:2136247-2136339
  hyper
caccccacctcagacccgagctagctctccagcctggttcctctgccggaccctcctcccgggcacctcccacgccccgccctcaagccccg

SEQ ID NO: 226585 - DNA, 286 bp, Homo sapiens
  chr1:2136831-2137117
  hyper
tccccgtgagccccgcgaggggagcctgtcccagccacctcgccgcttcaatttcctccaggtccacaggcccagcccggcgcgcgccgctcgttctgcgacctccagggcgagcgcgcttccggggcggccgtgcaagaggcgtgggaagcgcgcggggggttctgagcgtgcagtcgccgcctgcggacggcgaaggggcgggtgaaacgagtttccagcgtcgagcctgcttcgtttcaaggtggacgccacatgcaagccacgagcgcgtcgccgcacggtg

SEQ ID NO: 226586 - DNA, 154 bp, Homo sapiens
  chr1:2158901-2159055
  hyper
gggaccccagaggcgtccggggcctccccgctgtgtggtgtcccaccctgggagaaccccgggtgcgtggcgtggccccccggccgcccccagctggtttgcggtcgtggcgggggcctgtgggtttctgggccccgacggcggcgagacgggc

SEQ ID NO: 226587 - DNA, 384 bp, Homo sapiens
  chr1:2165786-2166170
  hyper
tgggctgggtccctcgccttctggggcagcagggtcacggtgggggggctagtcctctctttcagcatcttgtttctcagccgtccctgcggctatttgtgcaatgtctgtctgtctgagtctccgggtgagggcagacaggatatggtgcgaggaagtctggggtaagtgtgagccgaaccccgccctggagtctctcggggttgtggggccacagccccagcttaggttaggccttcactgctgctggcagggcctccagagagaaggcggtggttccggggcctgggccctgactgtctggcaggaggtgtccacgccggcggcccggctctctgtggcaataatgtgtctctttctaaggattgcgaaagttgagggagg

SEQ ID NO: 226588 - DNA, 223 bp, Homo sapiens
  chr1:2345880-2346103
  hyper
gtaatggcacccgcgaccctcagttgcctcactcattggggcttcgaaggcctctggtgccccgagggtccttcctgagggcgacttgaatacggcggtcctatcctgggatggccggcaggtggcagcgtcagcccgtctgctctccaccgggctccccggtagagttataggggattaggcggtgagttttgccccaaagggaatcgaatctagatcagaa

SEQ ID NO: 226589 - DNA, 41 bp, Homo sapiens
  chr1:2375335-2375376
  hyper
gcccccgccgccctcgctgccctcgctgcagccgccacgga

SEQ ID NO: 226590 - DNA, 113 bp, Homo sapiens
  chr1:2375556-2375669
  hyper
aggggtgcgggcgcgggactgtgggcgggacgggcggagcggtcttgagctctccggatggcctcaggtgcggggtgagggatctgggggccgcccctcggcaaactttcctt

SEQ ID NO: 226591 - DNA, 373 bp, Homo sapiens; identical to SEQ ID NO: 197252
  chr1:2457940-2458313
  hyper

SEQ ID NO: 226592 - DNA, 766 bp, Homo sapiens
  chr1:2460598-2461364
  hyper
atatcatagaaccccgggcggccggggacttcccagaagtcacttgcttaaatgcaaacacagaacaaccccatggggtcagacacttggcagaagatgggccctgattgtcctaaaacggcagggactctgcacacacattctctgagaatggggctcctgcgggccggccagcttggggccagagccttccggagaagggcgcgtccaagcccggggcggacgacggcgggaaggcgcttccctacaggcgagaggagcaggctcgccctctggtcgtcgggccgcgcgcccgcaggtcccgccgggtcaccagggccgccagaggccgcaggcgggctggtgcgcggcggcggcggcggcggtggccttggcggagagcgcgggcgggggcgcggcgcccggcgccttgggctccttggcgggcgcggcgggcgcggccgggggccgctggaagtggtacagcagcttcatctgcgtgtcgctggcggcgtggagcgtcaggaactgcacggcctcctgcaggcaccacgagtagccttcgctgtagtcctggtgcaggctcttggggccggcggcggcgacgaaggctgcggggagacgcggcggcggtgagcgggcggcggggcgcgggggagccggggcgcggtgggaactcggggcgcggggggcccgggcgcgctcacctttgctgtgcttcaggtagctgacagccatctccaggatgtcggccttctccagcttggagttgggctggtgccgcgcg

SEQ ID NO: 226593 - DNA, 61 bp, Homo sapiens
  chr1:2461544-2461605
  hyper
cttactcggtttttctctttggggctgagcagctccacggccacagtgctgggggccatgc

SEQ ID NO: 226594 - DNA, 360 bp, Homo sapiens
  chr1:2462085-2462445
  hyper
cccactgctggctggcagaggccgtaggagcagataagggaaaaactgtagaatgaacaagtgccacggcttcctgggggatgggcaccttccctgactgggacctgctgcccctccaggggagggggacagagggggcgacgctcttaggatcagtcctacgtgcctatattacaagccccctgactgtcacctgggactcctgacttctccagacctagaaaatgggccttgtgccttcctggctgggctccgggcagctccaggaagctggggcccgtgctccacgtggagcccggcacccggcagctctccccgcggagccgggcacccggcagctctccccgcttcctgcaccct

SEQ ID NO: 226595 - DNA, 193 bp, Homo sapiens
  chr1:2472195-2472388
  hyper
gccggtgtccccccaccccccgtgcgccccggggcagggccgggtcgccgtcccaagctggttaaaaaccccgcggtgtcagagagcagctcgttcccaacctctgaaaggcagacaagccctttattgctctattataacgcggagccagatggtcttttgggagttgcccccccgcgccccccgccgccgc

SEQ ID NO: 226596 - DNA, 116 bp, Homo sapiens; identical to SEQ ID NO: 197257
  chr1:2517411-2517527
  hyper

SEQ ID NO: 226597 - DNA, 95 bp, Homo sapiens
  chr1:2560047-2560142
  hyper
gaaggtgaccaggtctacgggtgcctgggagcccctgaaccaagaggggagatcaagggaggggccggcgtgggggcggggggagtgttcccggg

SEQ ID NO: 226598 - DNA, 778 bp, Homo sapiens
  chr1:2574028-2574806
  hyper
cacgaccagaaatccgctcgcctcgctgggctcctcctccgctcaagaatctgcaggggttccccgctgcctgaggaacacgccaaggtgcaggccccgcctttctcgctggcgctgcctctcttccagcagcccggcggtcctcgacgctacctcccccggggggcgcagcgcacccaggaccccgccaggcttggccgcacggggcgaagccgaggcccacgcccggggtccgtgcagggagcgagggggtcccacggccccggctttgctgctgggctcccgcagggcacagtgtggcctcttctgccagctgtgagcggcgctgagcagggcaggggctcgaaaccccgtccctcgcctgcggtgcggcccgcgggaccgcccctctccgggcggaggcacctgaccccgacccgtagttcacggcccggggtggtagtgaagcctcggcccgcgcaggacccgcacatttgggccgggtccatggcagcaggagggcgaggccccgagcagctgtcggaccccgggagcccccaggccgccccagtggggaagggcgctcaatccgaccccagactcccctgagcccgcggctcgggccgcgcaggcgcagtgccacccggagggggccgcctgccgaggggcggggcgcaggaagcggggcgaaaccactgttggctcatttccgggtgggtccccgtctccaggcaaccatttcgcgtcctgcagattcttgcctgtgccgggagccgcctcctggcgccgcagcccagcc

SEQ ID NO: 226599 - DNA, 604 bp, Homo sapiens
  chr1:2706076-2706680
  hyper
gtggtggggccgcccgtctctgcggcctccctccggccctgcgctctggacggcccggcgcgtggagatcgctgcagcatcccacgggcctcctcccgcagcaccaccagcagcagcccccgctggttccagggcacgtaggccttggcggccagcagcgcctcctcgggccgcagcctgcaggcggtgacatagtccagcgtgcccaggaacgcgctgcccgccagcacccgcagcagtccccggccgcacagcgcgcgcacacagccccccgggtgcggcgccccctgctccactaccgtctggaagtcctccatggcgcgccgcgagtccccggcgtgcagcgcgcagaagccgcgcagagccaggagaggtgcgcggtcccctgcacggtcccccgcagggtcctcagggcgtgcgggccgcagcaggcgctcgcacatggcccgggcgcccgccgcgtcccctgccagcagcaggcactcggcgaggcgggctcccagcgcgggtcgcgccccggcaggcgccaggcgaagcaggacgcggagcgcgcgggttaccggggccagcagctcgcggcccgcatcctcgcggagctcagggt

SEQ ID NO: 226600 - DNA, 427 bp, Homo sapiens
  chr1:2780349-2780776
  hyper
gtgggacggcccctcgacagcttagttgggctctactcaggtgggcgaagcccctggggtctcttcctgaccccccacccccaactccctccgggcagggccggctctgggggcggctgactccagcctctgcttctccgaattaagacggatggcggcttctctaagaaaggaaatgtatatcaacaaacttccatcccggagatcaaaccgcttcctcccgccctccccaagcacctcccgtgctgccccccctcgccaccccaccccccagtcctgctggccttccctggccccatgtgccggctcaggggacctcaggaggggtggtgggggtgcgtgtgaggtgagctgggctggccagagcagggccaaggggccactctgcactttcaaatatcattagagtcagcgggctcccggcaag

SEQ ID NO: 226601 - DNA, 300 bp, Homo sapiens
  chr1:2984307-2984607
  hyper
gagggcaaggccaggagcctcgcggggcggcgcagagaccccgcatcgcgggcgcgacccctgcctcgggctcaggctgactctgcggcagctccaagtcccgttgccgggcaggacttcggtgctccggaagggtgcggggcagcaacctggccagggcagcgcctcggtttccttccaattcattctcgattcccagatactcagatgagaaatccgcactcaggccgtcaggctcctgggcccgggccaccctgcctgcgctcagcccggcccctccgccgcagcgcctcggagttt

SEQ ID NO: 226602 - DNA, 104 bp, Homo sapiens
  chr1:2985027-2985131
  hyper
aagcagcagccgttgggtgggggcgaaggggaggaggcgggggccgggaggcgcgaggggggcggtggggcccggagggggcttcggaggagccgggttctggc

SEQ ID NO: 226603 - DNA, 177 bp, Homo sapiens
  chr1:2985371-2985548
  hyper
gggcgggagcagcagcgcgacgcgccgcgacgcaggggcagggtggggggatagtcacctcgcctccggggccacctgggtccttttaaagtgtccggggtgcgggccccgggcgggagcgccgaacacggaatgttttcttaaagggccagttccgagctgcgctgaaaagggggg

SEQ ID NO: 226604 - DNA, 63 bp, Homo sapiens
  chr1:2985728-2985791
  hyper
gaaggtgtccaaactgacaatgctggggagatgaagatagtgtgtggctgcttctggactcaa

SEQ ID NO: 226605 - DNA, 51 bp, Homo sapiens
  chr1:2985971-2986022
  hyper
gcccccggctcggccgcgcggcccggggggctgctccgcctcccgcgctcc

SEQ ID NO: 226606 - DNA, 1377 bp, Homo sapiens
  chr1:2986307-2987684
  hyper
gtcaaatcatattccgggcttttgaaatagtgggcgctagagcaccgcctttggcgtccgccagccgggcgcagaggagggagaccccgagccggggaggggcggaggagggggcgcgggccggcgcccacccggctccgcgggcgcaggggcaggggtggcgacggcgggacagccgcagccacttggggagcaaaatggagacttttgcccgggctgggaactgtggtcgtgaagtttatccccggctgtgccccgcgtggtggagggcgctcctctgggacgccggcagcctgcgcgggccgccggggcgacagtgcctccgacaggagggacccacccggccacctcccgacccgccgctgccgccctcgggcccgcgtggacccctctgtacccgcttgcctggcacagccgggcccggcggggacagagctgccccggccaggctgcccggtcctcggtcttactttctctttcgctccgtctcggccgagccccgggctccgcgcgccccgcctgccgccagccggtccttgccgcgggccgggtgctccagccacccgcgccctcgcccgccacagcgcctccgagcagcccgcgcgcaccccgcagccccggtcgccggcgccatccgcggtgaggcgggcgggcaggtgaggacaggcggagccgcggcccggccagcgcggctcccgcagccccgccgaagccccggctgcagcgaagcggccagcgccgcgcggagcggaatcggcgccgcctgctcccgccgccccctcctctgcaggccgcccgcccgcccacccgcagaagaggcgcccgggccgctcccctcgaggtccccgcccgacccacgccgttccgtccgcgcctccggggccgggtccctccaggccggcctcgcagctcccggggccgagcccccaaacgtgagccgggtgcgcgcgggactcgcggcggttttccgaagctccgctccctcggctcggggcccgcccggctcgtcccaacagctgccccgcggccgtaggccccgcgctctgtgcaccagggaaaagcagctcccgagtttgtgccggacgctcctgcgccccgccatcggccgttcccggcccctgggtgaggcgcccccttcccgccgcgctccgctgccgggtgccctcggcctcggcctcccgtgacctctgacccctcttggtgcgaacaagaccgggcgtttcgccgccgacgcgaaggggctgtctgtgcgcggcgttgcgggccctccgcgcgtggggtgtgcgtgtgcgtgttcgggttcggttctgtgtgtgcaccgcgggcctgctcagagtcgggaccaccgggctgcgtgtgggccgccaggtcaggccc

SEQ ID NO: 226607 - DNA, 548 bp, Homo sapiens
  chr1:3087394-3087942
  hyper
atcccagcagccagggctgtcgggagcccatggccttctctgtctgcagcagccacggtggaggcaggccaccggggaaacgtgtgtttcagctcccagagctcgggctgatggcgccagcccaaacgaggctgtcctccccagcccgtcttggctagagagcccacacagcctcgctgcagtccctaagggaaggctgggataggggcacccctgtcccagcgggaccccgcacccctcagcgccccacggagacctgcaccttccagactgacagtgctcggggccctctctccctcttgcgatttttatttcggggccacgtttgtttacttgcggcgtgacttgctctggcctgtgcacggcagccacaggcccagttggtaggaactaaagagataaataagtctataaatagtttggtggcggtcggctgttacggcgcttgctcagcatttaaccccttgttcctcctcctcgctgtccgggcagagccagggaaagggaagcagagaacagaaatctccgagtgtgttttcttttctgaa

SEQ ID NO: 226608 - DNA, 882 bp, Homo sapiens
  chr1:3309949-3310831
  hyper
ctcccaccatgctgacttagcgcggtctgagcaggacccaccgcgggtctcacgaggaaaggaggattataagcagacggcaggaatgtgtagggagctgcagtcataatttatgacaagccctgcaggaaggggtctgcagtacagtaaatgcgcaatttgtgacgctctcgagccaggagccggcgcaggctgggtccgcagacgcccggttcccaccgcggccggcccggtctttgtcccgggaagtcgcctgaccccgccggccaggaacagtggcgttctcggcgcgtctggctgataaggcctttgtgacaccggggacaggctgtaaaaacgcagccagcttttgtctgcacctccgcgccgctggcaagggcggggccggcgagtgtggaaaagtttgcgcggattcccgttcacctctgacccccgaagcagttggaggcaggtcggggacccccgcccccgccccgccccgcctcgggccctgcgatcagcagtaatagcgattaattccgactgtggctccaagtcccatggccaaggcgccctcctcctgcaggtccagggccagggagggggagcccgcggcccggcgcgctagaccctcccgcggcggcggcggctccagggcagtgtccgcgccggaggggagggtcccccggcaagtctgctgccctcggagccggggtggggtcccaggagacaccgggggccctcggattgggggaagaggtgggggaaggggtttccttccgcagcgccgcggatcagaggagggaggcctggcgccctcggagctgcggtggggggcatcccaggagatctggctcggtgtgtagagaagggagtccgggcggcgtcctgggagtgtctgtg

SEQ ID NO: 226609 - DNA, 38 bp, Homo sapiens
  chr1:3371631-3371669
  hyper
ctgcttgcccccgcccgctcgctcgctgccctctcttg

SEQ ID NO: 226610 - DNA, 78 bp, Homo sapiens
  chr1:3447461-3447539
  hyper
actcctcagcgcccacggaccctgtcccagaagcaggcgcgcctgccgggcactgccccgccctgctccctccagcct

SEQ ID NO: 226611 - DNA, 53 bp, Homo sapiens
  chr1:3447719-3447772
  hyper
gcggtagtgcgtgcccgcgacgcgcgccaggccccccaggagcccaaggcacc

SEQ ID NO: 226612 - DNA, 35 bp, Homo sapiens; identical to SEQ ID NO: 197263
  chr1:3448359-3448394
  hyper

SEQ ID NO: 226613 - DNA, 184 bp, Homo sapiens
  chr1:3527613-3527797
  hyper
aagcctcggagctcggtccaccacgggcctccagaggccccggggtccctggacgaccggccgagccctcccagctcctgctactcacatgccgggctgcagcgggagcaggggccgcggcggaacgctggcgcccacgggcacggcggggagcagcagcagcaccaacgccaggaccaccgcg

SEQ ID NO: 226614 - DNA, 170 bp, Homo sapiens
  chr1:3528435-3528605
  hyper
aggaggggccgggcgccagggggccacaccccgcaaaggcagctctctgggatcccggaccccagacctcgatctcaggagacagccctcagcctccctcacttctcaagtcccacggggaagccagcctcggcttgtcctgcccgtggacgctccgtccaccttcgccc

SEQ ID NO: 226615 - DNA, 48 bp, Homo sapiens; identical to SEQ ID NO: 197265
  chr1:3540867-3540915
  hyper

SEQ ID NO: 226616 - DNA, 280 bp, Homo sapiens
  chr1:3541173-3541453
  hyper
cccgatgggcgcgcgcccccacctgcgctccagaaggccgaagggggcatcccacttgcagggcgggtcacccgctttccccgcgggccaaggggctccaagattcccagcccctccttcccagccgctccgcgacaccctggcaaccggcttcggccccgccccttctcgttgtgtaaacaggaagtgagcctgcgcgtgacggtcgcttccggcccggcgaggggcgggagcgattgtgaacggcggcggggcagagccaatcgcggaaaacggcagg

SEQ ID NO: 226617 - DNA, 97 bp, Homo sapiens
  chr1:3566687-3566784
  hyper
agcctatcagcgccgccggcttccgcgcggcattgtggggcttgtagttcttgtgccgcagggctttaaaggaaacgcccacgtttcttccgaccag

SEQ ID NO: 226618 - DNA, 746 bp, Homo sapiens
  chr1:3567687-3568433
  hyper
ctccccggccgaatggatggtggtgcgcgcgcgtcctactccggcggtgccggccttttctgttgccaaaactagacccaaacctctgcatgggattcgtctttgggtccccaccccgtgcgcccagcaaacagtgggtgagccatgaagatgtgcgagtcagccggaccctccccgtcaggcgcggacccgctgcggccagagaacccagtctgcgccagcccggctcgctcgcgaagccacgggcttcactgacgcgactttccaagacgtgggggtcaccatgggcagaggacatcggttcggagccagatcacgggccccataagcatcagaccataagcagcgccgccactgagagccgctcggaactcgcccagcatgtcgggtcccctagccagggcctggtgtacgtggtcgagggccctggaagccccgatggcctaggaggagcaggcgggcggggcggcgggtgtcgctggccggtagagagcttcggcctgacctagcgcaggtctggtgcgcgcagagaacaactccaagcgcaccgacgcccgcgagctccttccaaacaccgaacgggatccagagcccgagcccacaggcggcggccgggggagggagcagggtgctggccgccgcccgggagtgttcgcgtcctgggtgacccctggaaggacgtggggcccaaactccggctggggttgggagagcagcccccagaggctctccgcgggatcctctgc

SEQ ID NO: 226619 - DNA, 48 bp, Homo sapiens
  chr1:3663335-3663383
  hyper
cctcgacccccgaccgagggacccgtgggatctgcgctcaccgccctg

SEQ ID NO: 226620 - DNA, 179 bp, Homo sapiens
  chr1:3663743-3663922
  hyper
gtggacgggcagggccggcccgcctgggcaggcggcggggtgaaggtgtccagggcctgaggcggcaaagtgccgccgccgtcagccccgactgccacccaccaggcacccggcccatccccggctcccatctagggatccacacccgggcgccgcggcgccgcggtttaaagcctgtg

SEQ ID NO: 226621 - DNA, 173 bp, Homo sapiens
  chr1:3712496-3712669
  hyper
tgagcaggggcagcgcgccggggcgaaagagctcggcgggaaaggagtctaggcaattgccggtgaggttgaggctctgcaggcgcggggcgcagcgcgccaggtcggctggcagctcgcgcagccggttgccgctgaggttgaggctctgcagctgcggaaggcccggcggc

SEQ ID NO: 226622 - DNA, 144 bp, Homo sapiens; identical to SEQ ID NO: 197269
  chr1:3713029-3713173
  hyper

SEQ ID NO: 226623 - DNA, 179 bp, Homo sapiens
  chr1:3773152-3773331
  hyper
gaagaggaaaagccggatctgaaaacaatattccacgctaaatgggccgtcccggccggggcaggcggtcccagcacccgtgctgagctccccggcatacggcacgacggggccgcgccggctcttcggcgacagcaaggccggcatctaactccacaccgtccgcgcttgcaccgcgc

SEQ ID NO: 226624 - DNA, 159 bp, Homo sapiens
  chr1:3773814-3773973
  hyper
caggccgcgcctgcgcacaaggggagggctccgctactctggccctcagggttgtgtagtttccggggccacggcacctgggcacaccaggtggcgtcgcgcctttgctttcctgagccttctgagtaaggtaatgtggtgtccgtggggcgacgcctg

SEQ ID NO: 226625 - DNA, 191 bp, Homo sapiens
  chr1:3816433-3816624
  hyper
aggccccattctgcgggggtgggtaacctgggagcccccttctcccggggacgtgacctgtgagctccacttcttccgagggcgtggcccggagcccccttttcacaggggcgtgacctggcagccctccttctcccgggagcgtggcctggagccccccaactactgccgggggcgaggcccaagcggag

SEQ ID NO: 226626 - DNA, 225 bp, Homo sapiens
  chr1:3816828-3817053
  hyper
cgcgccgcggcggcgtccgacgtcagcacagccaatcacagtgcagcaccctcgtcatgtgattccccccccccccccccccgtgttggctctttcgtaagcggcgggcgaaggtcacaggccttgggccagtggtgggacactggagcaggaagtcggcctgtggccggccatgttcatgagggcgcgtcccttggcacccctgtagccgctatgtttcccacg

SEQ ID NO: 226627 - DNA, 92 bp, Homo sapiens
  chr1:3817790-3817882
  hyper
ggaggccagggtccggcgtcgggctgggggccggttttcgtcccccgttacgtgcaaggcgggaaatgacccctccgccgtcccgttactct

SEQ ID NO: 226628 - DNA, 319 bp, Homo sapiens
  chr1:4712666-4712985
  hyper
gcccaaggggttcctggagccgacacggtccggtccggagcccctccctgccctgctggctcctagtgtgcgaagccggccccttccaggcccactccggttgcaggaagggcctccctggtgcagcaccgcctcctcacaccgctaggtggcagcactgccggcgcctccttccccgccggccgccataggccccgctggttccaggacctccctgcctccttcgcctcttaatgggatccgctccctcacacccctcagggagaggctctaggggacgatgacccaggggcggcccggcagggaaactgctgagtca

SEQ ID NO: 226629 - DNA, 765 bp, Homo sapiens
  chr1:4713982-4714747
  hyper
gcagctgcgctgggcgatgagggaccgttgggtaattgggggcataggaccgggcttcgctgggttcggggcagaagcgccgaagctccgacccggaacgcggtgacttcatcaacgcagaagcccgcgcagccgagcagaggagtccctcgtaggcgaccctcggacagacgctcctgcgcggcccgcgtggctcagctccgccccaggaaacttttcgcgcagcccccgctccatgcgcccccacccagtccttcttcggggccgccccctccccaaagtagctctccgggtccactgggcgcccccgtaaccgggtcggaacctcgaacggcttcgcgtgccatccggttaccctggcaacaccatccggcggcgcccggcggtccaatcctagcctgcggcctctctcgagcctttcgcaaggtggggaccgggacgcgaccggggatggggaagggggctgcaggaggccccgcctgcgctgtcgcccctgctgggcacagcgccccccaccacccgcggcgaccccggcccccgcaaggtggggcggcgagcaggagccggggccaggccaggggctcgagctcccgttcgaggggcggggaaggcgggtgacgtgagccgggccgggcgggcggagttgggaccggctccgggaggcgggggcgagcgcgcggagaggcagacgcgaggagggaggcggctgagcagcgcgggcggctctgcggcgggcgcggtgggcgcgggcggcggggccccggg

SEQ ID NO: 226630 - DNA, 67 bp, Homo sapiens
  chr1:4716634-4716701
  hyper
agggaggatctagtgcgtgtcctgattttgagaaatcggaaggggactgggacgccaagtgttttct

SEQ ID NO: 226631 - DNA, 137 bp, Homo sapiens
  chr1:5907431-5907568
  hyper
acaaaggcgactctcgcctctcacccccgagctggtttgcggagaaagtccttgagaaacagtgctgggcaaggagcggagcttcggtgaaccgcagagctcctgatcagcaccatggagagcgtcgtcgcctgcag

SEQ ID NO: 226632 - DNA, 144 bp, Homo sapiens; identical to SEQ ID NO: 197272
  chr1:6052048-6052192
  hyper

SEQ ID NO: 226633 - DNA, 58 bp, Homo sapiens
  chr1:6053708-6053766
  hyper
tcctgggggctcttacagggactgtgctttgcccgcagcatcccggggtgctccaggt

SEQ ID NO: 226634 - DNA, 196 bp, Homo sapiens
  chr1:6086204-6086400
  hyper
tgtctcctgccccatctggccgctgctcatccaggaaggtcggagatgtcgggccctcccacctgggtcacgcgctaggcatgcctgagagcaaaggccacgccccgacaccccacggggccctggcgcgccaggcttctcagccctgcggcggcagtgcatagctctggcacgcgctgcaccaacttcctgttgg

SEQ ID NO: 226635 - DNA, 365 bp, Homo sapiens
  chr1:6208751-6209116
  hyper
ggtctcgagcagcgcgggcgaagctttgcgggatcggctaccgaggcggggcaggagccggcaggggcggggccttttgaggagggcaggccttcccctgggggcggggcctgttcctggggtggggcggggcgtccggcgcggggcgggcggaacactcacagtacagcgcgggcagagccattcaccgtttgggatctcgggcagcggcgggttgaggcaatgcaggtggtaggaggaggggcaggcgtcgcagcagagcagctcgcccccgtccttgcacacgcggcagaactccatgtggtcgtcctcctcctcctcgcagccgccctcctcctcttcatcgtcgtcgtccttcggctccc

SEQ ID NO: 226636 - DNA, 2217 bp, Homo sapiens
  chr1:6239341-6241558
  hyper
cgccagaaggacgccggcggcccgggtaaagtgcttgggagcggcggtcacagcgcacagaggccaggaaagaggagcaggggtccgagcccgtgcgtcccagagcggagtcctcctgggccgggagggaagccgccccatcctgggcgctcaacgcgtccccaagcaccgccggtcctcgcccctctctgggccccacccagcccgccccgcggccgacatgggccaggggccgggtcccgcctgcccgcagcgaggccagaggcgcacggcggcgggacgcgagcgcggggtgcgccgctccgggagctagcgcgattcccgcccccttcaagggcacgcgggctgaccctgacagcgccgcgccccccagcgcaggccccggcccgcggtcctctggcccgcctggcccgcgtcgccgcccggggggcccggatcgcaccccgcccttagccgccctcacgccggcccgggcgctcacccagccttcgcccttggccgcgcggcgccagcagggcgggagcgcagccccgcaacccgggtgcccctcctgcgaggcgccagcccggccgcgccgcccccgccgcccgcgctccgccctgggcccggcccgtctcggcgcccccgccgctctggccccaggcgcacccgcgccccgctcacctgacatctcgtcctcattctccatctcctcggcgaacagccgcggcagctcctcctcggtgcccactgggccccgcatgcccggcgcggggaggaggggaggtgggcgccccccctcccgccgggcgcggtgccagccttaacccgtgcgctgccggaccggcgcgcgcggcgggcgaggcggcctcggcgagaagatggcggccgcctgcccccccacccccccaaacctccacccccccgtctcgacccccctttctctcggccgccttagcctgctccccgcaaagcccgggcgctcctcccaccgcgccccgcagcccgagtcccgcagccggccgagggtggcggcggcagcgccagaggcacggcggcacggcgggggggcggcacacatgcccggattgtgacgtccagtctggttgctgtggcaaccccatcccatcgttccggcagcgcgactagttaacagcagagaacaagttgggggactagtcctgagccgccgggtgagggtggggaccggggggcgccccggcagggggagccgtcgaggcgtccgcgcgcccgcggacccgacggccgagcgggcagtcggggcttggcgagcccgggcgcagggggaggcgaggaaacaccgcccccgcgcaccccgggcagagccagccgccgccgctcgcctgcgaaggcgctgggccccgagcccccaagggcgcggaggcagggtcttcagggcagcgcgcggcccgctcccccactcggttcacaggcgccgggacccaccccgctcccggctccggcctcggcacgttcctaaccccctctccaaagaggattagaagaaaaatgtgttccacacttggggaaaagacgctctggagactgtgggtctgatttacagcagaaaaatccgcgcaggcgggctcccctcacctgcttccccgctcccaccgcccacgtgcccccttccaaaaagcccctccaggctgggtgcagctgaaacccatgcagacccctaggggtggtgcggatctgcgatgtctgtgcccaaaactcccgctcagaagcgacacctgtcgcagagcaggaaggagccgccgccaccagccctcggtcgttaaaggtgaagatggaggccaaagccctcgggagcaagactggaattttaaatgagcgcctccagtctccgcggcggcaagtcttaaagctaccttaagaacgcaaaagttccaggggctggccgaccgccagctctctaaccccagaaggcccgtgaagggagggccccctctcactgcctcgcaggggcactgggggaacccacctgagacacgcaggatcggcagcagtttcccttcttcccgttcaattttattgccagcaaaccccaaacaaaagaccctctgcattcatccctgggcaaggagaggtcggtccagccttctggaaccaaagactggggtgttgggaacccctccatctcccagatccgctttaactacgctgtagatagagaagccgggtcagcccagtgctggccgcctgcaaggggaa

SEQ ID NO: 226637 - DNA, 222 bp, Homo sapiens
  chr1:6259131-6259353
  hyper
tttcctctggggacgctaaaaagctcctcaaacccaggcctcctctccgaaagcacgccgaccaagccgcccttccgcggattcgtccccgagtcttggccgtggacttccgaatgcgcggctccccagggtagcaggtcccgttcttcttccccgccctccacccaggtaatcaggcccccggccggggtccgaggaccagtggccggcccagaccgcagt

SEQ ID NO: 226638 - DNA, 216 bp, Homo sapiens; identical to SEQ ID NO: 197276
  chr1:6265333-6265549
  hyper

SEQ ID NO: 226639 - DNA, 996 bp, Homo sapiens
  chr1:6265789-6266785
  hyper
cgtgagccaccgcgcccggcctacccttgaagaccccgcagccaaggtcctccggccccgctctgcgcggcgctctggtcttggggctccggactctgtcatgccgggcaggggccagtccgatccttgcacccttgcctggcaccgtccctggagccttggcgtcctggcctctcctccccgcgggctggaggtggagtggccgggccggaaccagtgcgcaaagcagatggcgagcgcggaggtcggttcggccccgccgcgcctcaaggcagcagccaccctggggaaggtggatgccggaagaggcgtcgcctgcgggtcacccagaggacacccggcggggaattccgagggtgggagtgaggagaggtaggagaggccacggcagagggaggccccgcgcagagtgggaaccatcgcccggtgcgggcctgaacttccagggccggctactcctcggcagagcgaccgcgcggtgtctcagagcgcggcccggagccgcactaagagcgctggacggcgggagagaggctcggaggaccggtagctcccagcaaagcggcccagcgggtaggtacaaggccccgcccctcgccagtcctcactgcctgttctccctgcgccggggagctccaggccccagccctaacctgggccctagcggctccccactccatgacctctggacgcccagtcgggtccaggcgcgatagggagggcgcgggcgcccgggcagaggggccgcgggagctcaagcggggctccgtgcgtgccccagccgcccgcttgcgctgtcgctgcagatgtcgggagctatcttcgggcccctggagggcccgagctccctggatgccccgagcatccacccgctggtgtgcccgctgtgccacgtgcagtacgagcgcccgtgtcttctggactgtttccacgacttctgtgccggctgcctgcgtggccgcgcgaccgacggccgcctcacctgcccgctgtgcc

SEQ ID NO: 226640 - DNA, 381 bp, Homo sapiens
  chr1:6301683-6302064
  hyper
accttgatcctgcgcgaccctcggccagtgtaaggcgagtagcgggccaaggaggctgtttgtgatggaggagccacgggtgggggcgtcagaaagtagggggatcattccaggtggggagaccactgaccgaaaacgggccacaggacagggggcgcggcgggcagtgtcggggttggggtcggggggcaacggaggcggaagtccattcagtggaccagggcggagcgacgcctgagaattccgcccaggccttgaggcgggcctcgcctcccgcagccaaagcagaacattgcgaattagagcattttgcggtcaattttccactgcttaagaaacactaagctatccacgtgagcgtccccccgcccccggcccgat

SEQ ID NO: 226641 - DNA, 47 bp, Homo sapiens
  chr1:6304185-6304232
  hyper
attgacatgtaaacgagggtccctataaaggcggcgctgcctcgcac

SEQ ID NO: 226642 - DNA, 831 bp, Homo sapiens
  chr1:6309259-6310090
  hyper
aacgctgaggccaacgccccctcacccctgggaggggtggcgcatgtctgcgcgcggggcggaggcgggcgtctttggtgctgcggccccggagagcggcctggcctgcctggcgtccgtggggaggcgccggcggtcctaggacgcggagcccagcgagtccgagtgcagcgtggcgtagcccgaggactcggagggggaactcaggaagctgctggtgctgccgccgccgcccgccgcgcgcagccccccgggctcgccccacgacgcgctcaggccggggcgcagagagccggcgtgcgagtgcgcagaggggcgtggccctgggctccgctgggcgctgcttgggggcgtcggggcctctccgggatctgcgccgtcgggggcggcgggcgcagcggggaagggcccgggcgggcggcgcagggcctgtggctcgcactcgaaggcggtcagggcgaaggcgtcgggcagcagcgaggccgaggcggagcgggggccgggcccggggcggcggcgcgggctgccggggggcgagtcgcgggctccccgcgggccgctatccagggccgagggccgcagcgacagcaggctctcggccgagcggcggcgcgcgcgggacggtggtgcgtcctccgcgaaggccaggaggctggcgcggcgccgctcgggcccggcaggcagcaccaggtgcgccagggcggccaggtcctcgccggagccccagcgcggcaggaaggcgggcagcgggacggcggcccacacgtccgcatcgtcgtgggagaagcgccgcgtgggcgggacctgtcaggacgcggctggcttttaccc

SEQ ID NO: 226643 - DNA, 59 bp, Homo sapiens
  chr1:6321334-6321393
  hyper
ggcccgagcctccctgggctggtggcgcctcctgacagcgccgcgcccctggctcccag

SEQ ID NO: 226644 - DNA, 236 bp, Homo sapiens
  chr1:6453981-6454217
  hyper
gcatcgcggctctcgctaagatcggccctaagagagaatggaaggctgtttcctagaaaggagcattggtggcggctgctgggaagacacggggaatggaacgggcctttgcttccgcagcacaaagcgtcacgaggtggggaggaggaaaggccggcgactatctacaccgccgcctgcagcttttactgggagcgctgagcgccagcctggaggtgcacgtgttgcagtgagga

SEQ ID NO: 226645 - DNA, 255 bp, Homo sapiens
  chr1:6474514-6474769
  hyper
cctggaccagctgccgagcccctgctccctgctgccccccaatggacctcgggtaacaagacaccacgtgtgtggggcgtgttctctagatccgttctcacgatcctgaaaccattattgagccttacagctgctttaagcgcccggggcttcatcagagcctttgaaaaccccaggtgaaactagttactcactgggaagcctcggtgtgtggctgccttctccctgatactgcatgcccgggcagctctctga

SEQ ID NO: 226646 - DNA, 769 bp, Homo sapiens
  chr1:6479023-6479792
  hyper
ggggcgggggcagacgggccactggaatccccagcgcgcccgccgtccagggtggcgctggccgctctccgccacaggtgctccagcaggcgcgcgctcacggcgggctccaggacacggcaggcgggcagcacgcgggccaggcgcgccacacaggcgctgtagccctcgcggtagctgtcgcaaggcactgcgggcggagagccgcgtgaggcgcggggtagggtgccgggtgcggggtgcagagcgcgcggcagggcagggagggctcactcacggggcgctgccgtgggccatgaggacgcaggcagctcctgcaggaagcgcacggtcatttccaggacgtctgccttctctagcttcgagcagttggagttctgcgcccggccacgaggaagagcgacagagaaccaccaagacagaactttggccggctaccgtgcgcaccctcgctctagtcgggagctgggtgtggggcgcgccgtggcctgctgggggtccgctccgacgcgcccaccccacccaggctccgcctcgggcgccgcgcggaaccccctggtgggttcctcccgcaggagcaccccgtccccctgcccccgctccgcgccccaggaccctctgccctccgcccgggcgcgctcacctcccggcccagcagcggcaggatgagccccttaagctggctcaggctctggttgatgcgcgcgcgccggcgcttctccagcagcggcttcaggctctgcggacgggcggcgcggtggttagacgg

SEQ ID NO: 226647 - DNA, 952 bp, Homo sapiens
  chr1:6479998-6480950
  hyper
gagctttaagggagcggctcgcccgccccgccccgccccgcggagtccggccgcccgctggtcccacctcctgcctttgttcctgcgcagggtggagccgggaggggagaccgcgacgcccccggggatcccgctccccgcctttgcgtcctgtctaccgcggggtggcggcccccagttttccccgagcacctgcgggagagtggtaaaggcgccatcgggggccttcgctgcgtgaccccgagggcaggagggccaggtggggccaggccttgcctgactggagctacggtccctcctctccaatgctgcccttcattcattccccaggctcgggttcagcgtcttctctgagccccgccctgggccgcagcaggggacccagcggttacgggagctcccatgagggacagcagcgggagggacttgcacccccagctgctttatcgggtgaagggctgagctggacgggaaatccgagttccggagaaaggtcgtgacttgctccagtcctcgacgctgggaacaggccgagcctggacaagggccccagtcgctggacgcccggctctaaggagcccgtagaacccttcggcggcttgcctagttaagagtcttttggttaccccactccaggctttgggtggggaaacggaatcctagagaagcagaggcagccctggagccctcggagctcgttttcattcccaccggctaggggtccgggttctcgcccgcaagacagtcagggctcatgtgacgcgcgggcaggacagttttgggtgcgggccccagtggcccgcccaggaccgccttcgcgccgcgtggccgttgctgcggcaaactggctggcgtcccccgcccatctgctccgggctcccctcccccgaccggctggcggggcaacggccacgcccgcgaaccacactgcgaactgccgggcagagagatg

SEQ ID NO: 226648 - DNA, 110 bp, Homo sapiens
  chr1:6483912-6484022
  hyper
ggtgcttcaagatcgctgataggccgcctgcactcccacagccatgtagctcccaccttctgtcagcttttcctcgcgtcctttgggcactagccgctcccacggctggt

SEQ ID NO: 226649 - DNA, 137 bp, Homo sapiens
  chr1:6484602-6484739
  hyper
gtctgtgcctggacggctctccaattcgaacccagttttgctgccctctggggtctcaactgttacgtgaggcaaattaggagagaagcccctgggcaccttgccccagtcgcacgagtgtccccgcgtcgcggcgg

SEQ ID NO: 226650 - DNA, 51 bp, Homo sapiens
  chr1:6485099-6485150
  hyper
ccctcgctgcgcgacccgctggacgcgctgcccgtgcaccacgcggcccgc

SEQ ID NO: 226651 - DNA, 311 bp, Homo sapiens
  chr1:6500745-6501056
  hyper
ttcgcggcgagccgcggccacaccaaggtgctcagctggctgctgctgcacggcggggagatctcggctgacctgtggggcgggaccccgctgcacgacgccgccgagaacggggagctagaggtcagcgcgggcccggggtgggggcgcgcgccctctgctggcaccgcgctttcagcacggccctgcccgggcgcgggggtcccagctcgcggccgcggccgggtcctcactgcgtgcccccgcagtgctgccagatcctggtagtgaacggcgcggagctggacgtccgcgaccgcgacgggtacacg

SEQ ID NO: 226652 - DNA, 552 bp, Homo sapiens
  chr1:6507053-6507605
  hyper
ggcagagggggccctggaatcgctgagttcccaacgcagactgttggccccgcccaaatccacaggacaggtggcccagccagtgccccgtctccaccgttgagcccaagtgccaggtctgcgtggtcccctcctggctgtgtgagccccctcccggctgtgtgcgtccctccgggctgtgtgcgcccctcccggctgtgtgcgcccctccccactgtgtgcgcccctcccggctatgtgcgtccatctcggccgtgtgcgtgctgggccgcaggcgccagggccggggcccggacgctccacaaagggctctttgtgtcgccgcggcgccccccgcgcgggtgcctgaccgggggcgggagcagggtcgtggcgtccgaacctccgggctgcagggggcgcggagcgggcgggctggcccagaaaacaaatcctgcggtgtcgcatttcctgcaacgtgagccaggtcgggcggggtgaagggtctgaggccaccgcagggacgcatgggctggagagtggggcagaggacagcccccacccggtcactca

SEQ ID NO: 226653 - DNA, 1234 bp, Homo sapiens
  chr1:6507845-6509079
  hyper
tcagccctctcccctctcgggcggggatgaaggtgggggctcagctcccagcttagggagaggcgcagggggcggggtcacatctggccggggacgggtgcagagccgcggccaggtgtggcaaagtagttggcgccccctgtggcatccgcgacggctgggggggttcagcctgggattggcgggccccgggtgatgtcaggccgtcggagcccataggctggctgtgcgcgggtggctgtaacctgagaggaagtatcaggtaacgcaggtgtcgggtcctgccgcccccacagccaggtgcacagcgggggccaccagcaccgtggcaggtaggagcagcccccggacgggcaaccggggtccgtggcaagccggagcctccgagagcacaggctctggagggggctccctccggccccggacccccgaaagacagggctccgcggagccctggggacccgcagtccttctgacagccgagagcggagtgcggccgagggcctagtgagggctaagctgggaggtgccccttcgccagctccccctggcgtcggggctgggccaccccgcccctgggcccgcctcttctggcctcagtgggggcccctgtgccccttggccggtgcccagaacccctccctgtaaggcgggcggagcctgcccttccaccgaggcccccatgaccctcgcccgctgcccactgtgagaaccagggggtctaggaagtcagctgctgcacccctcgacggccgctggccgcgagtccccaggaggtgaagagctgggtggggaggcgtggggggcgcctaccgggcaggtgcccgagccccaccggtcactgtcttcccgcagctgagctcctgtgacggccacgacgggctgcggaggcaggactccagccgcaagccccgcgccttcagcaagcagcccagcacgggggactactaccggcagctgggccgctgccccggcgagacgctggccgcacgcccgggcatggcgcacagcgaggaggtgcgtgcccgccagcccgcgcgcgccggctgcccgcgcctcggccctgccgcccgcggctcactcgaaggcccctccgctcccccgcaggcggcgctgcttcctgggaaccatgttcctaacggctgcgccgcggaccccaaggcgtccagggagctgccaccgccgcccccaccgccgccgccgcccctgccggaggccgcgagttcgccaccgc

SEQ ID NO: 226654 - DNA, 52 bp, Homo sapiens
  chr1:6526036-6526088
  hyper
ttggagtggagacgcgcccggggccccttccttcaccgaggctcttgggaca

SEQ ID NO: 226655 - DNA, 51 bp, Homo sapiens
  chr1:6526268-6526319
  hyper
agaagggcccgcctggcgggcggggggaggcggggccgcccgagcccaacc

SEQ ID NO: 226656 - DNA, 940 bp, Homo sapiens
  chr1:6545227-6546167
  hyper
gtagggggctcggccgccatgggccgcatccttcccctgggggccgcggggcccatagtcacgggcaccccctccctggcctcccgcacaggactgggcggctgcaggcgagaactgggcacccagccccgttcccgccccgtcccggccccgtacctggctatcaccgtcgcgggcacgacccccggcccaggagggctccgagtcccggaggggcagccccgggcccggcctggaggctgctaggcgtccggagacaccgggtcctgtccccatggcggccggaggaagccgcggtctgcgccgcccgccggacaaagcgcggagccccgcttcctgccattgtgcggccgcgcccgcccccgccgagcgcggggaccccggggagggccgggcccggaacagcccccagccccccaggaaggcggacacctccctcccgcccgggccctcgccacccagccccggggatccccgcctccccgcccgggaacccctacacccccgcctccgcctgcccgggcgaccccccgcctccccgcctctgcccagacccggggactccacacccctacctctgcccggccgggggacccccacagccccgcctccgcccagtccccgggacccccaccttcccacctctgcctggcccggggtacccccacctctgcgcctctgcgcggccccgggcccctctcttctctgactccctcctcaacaccaatgccgggctcagagggctcctcagaacttgctctttctcctggggagctccttgaatgctggaggcagggggcgctggtgacacccccccccaccttggagactgtggagcccctcccctgggtgactcgatccccgcccagccctgggggtgcccactctgctgtggtccccacctcaccctcagcgccaacacgcacggtccctcccagcc

SEQ ID NO: 226657 - DNA, 379 bp, Homo sapiens
  chr1:6546475-6546854
  hyper
ccagggacaccccctcacaccgactgctcactgcccaggtacggcagaggccgagagccaaaggccggtggcctctggaaagggccgtgggcagaaggcgggctgctctgagaggctatccttggcagcccccaggagctgggtgaggtggaggcatcaggaaaccctggcgacccacatggcacagcagcccaggtccctgcagttctaggccaggtccccaccgccagggggcactcagcaaagcctgagaggacgcaaacgcccagactctggtgctggagtcaccactacacggctgtcaaagcgcttttacactgattcccaggaaggcagggcaggcaccattagccccattcacggcgtgggggataaagtg

SEQ ID NO: 226658 - DNA, 217 bp, Homo sapiens
  chr1:6614573-6614790
  hyper
agggcctaccgcgcgagaatctcgcgagatcccgtcggtccgccccgctgccctcccagctgccgaaaagaggggcctccgagccgccggcgccctctgccggcaacctccggaagcacactaggaggttccagccgatctggtcgaggggctccacggaggactccatttacgttacgcaaattccctaccccagccggccggagagagaaagcca

SEQ ID NO: 226659 - DNA, 339 bp, Homo sapiens
  chr1:6663518-6663857
  hyper
gtttttttcttggcgcatttataagcgacccggggccggattccaggagtcggccccactcctgtgttcctgaaggagcttctgactcaatcacacaggcgttaactttagtcggcttcacgcgcagttgtagtttccgagtctgcgtcgcagctgcaggctccggggctgcccgccctaggggctcccgggcctccctgaagcagctgctcggactccacgagagggtaactgggtataaagagcgagggctcaaagtcagataggagaccgccttgaaactagatgacgccactaagcacagtcccgccgtcacttgtactgcggtggggaatggtg

SEQ ID NO: 226660 - DNA, 34 bp, Homo sapiens
  chr1:6675268-6675302
  hyper
ggcccgaggccgtcgccgccctccacttggcatt

SEQ ID NO: 226661 - DNA, 222 bp, Homo sapiens
  chr1:6845233-6845455
  hyper
tggacagttctttcgggttctggccactaggaagctttgtttaggtccggaaggcgggctttcctgggagtgggtggggagggggcgttgattcttgaccaatcctttcagtccgttgggtggtgaccagccaatgggccggatggataggacgctcctcccggagagtagtgagacccctggtgcggggcgattggcggcgggagcgatgagtggcagccg

SEQ ID NO: 226662 - DNA, 178 bp, Homo sapiens
  chr1:7022452-7022630
  hyper
ctgggcccgccctccgatttggcctcttccccgggcccaccctttctatagccccaccctttccgttttggttcctctctccctgccagccccgccccctcagaacctatcccgtttcctttatggacctgccctcgtctggtcccatccacccatcttgccccgcccacatccagcc

SEQ ID NO: 226663 - DNA, 133 bp, Homo sapiens; identical to SEQ ID NO: 197289
  chr1:7831038-7831171
  hyper

SEQ ID NO: 226664 - DNA, 44 bp, Homo sapiens
  chr1:7843509-7843553
  hyper
acgggcggtgaaaaccgtgggaacccagaaagacggccaaagca

SEQ ID NO: 226665 - DNA, 390 bp, Homo sapiens
  chr1:8002368-8002758
  hyper
ggaactgtggctggggcaggcgtgggctggggaaggacatcgagagtagcttgggccgtcctcctgccccgcggttcccagcacgagctctcccgacagaagaggaaaacgcggcgcgactcggttgggggacagcgctgagatgcggacagatgcggacgttctgccgccgcctgcaggcagagggactcggagatcaggccgcagaagcagaagaaggcagacgggaaggaggaggaaggaaaggagccttgtggcttcgtgtccgaccctcccgcccttggcccgcgtgcctggagccagccccaccgcgcccgcgtttcctcccgcgggacttcccttggccctgggtctgcagcgggtcctgccgagcttccttccctcaggcag

SEQ ID NO: 226666 - DNA, 266 bp, Homo sapiens
  chr1:8014151-8014417
  hyper
agacccacacgcgacgctctaaaggaagtgacctttaggggctgttactctcagaccaggcccagcagcacccggcgcatttacgtcggatctgacccctgcaagcaccggcgcgaccgcgctagcggctgggaacacgcgacggtcccgcccactgcgacctgactcggccaatcccgggtggcgcatgctgcggccgccggaagtggacctacgtcatgcaggtcagtcggtaggtttccggcgcccagcgccccgtgggagtt

SEQ ID NO: 226667 - DNA, 390 bp, Homo sapiens
  chr1:8021446-8021836
  hyper
cgtgcacggagcgcgaactaaggaacccctctgacaaccccagtccctcggcagttccagagaccggctcctcacggagggtggcggtagagactgttaagccccgcgggcgccggggcaggccggactgtgccattcgtggggggtaccatgtgggaccgagccgcctcacccagggctgtccagctagaaactccccggtgccacccccgcctcagtccgaggtagactcggccggacgtgacgcagcgtgaggccaaggcggcgtgagtctgcgcagtgtggggctgagggaggccggacggcgcgcgtgcgtgctggcgtgcgttcattttcagcctggtgtggggtgagtggtacccaacgggccggggcgccgcgtccgcagga

SEQ ID NO: 226668 - DNA, 509 bp, Homo sapiens
  chr1:8085555-8086064
  hyper
ggcattaccatcgtcgctgtgagattaggcagagggagcggggctgaccgccagagaaccggtaccaaccaccgcaagcaatcgccgagcctcccaccccagctttcaagacaggatttacgggtacacggtgtgaacaagacaacgcaaccccctttttacaaataaaaaaaaaatcaaacaagcccccaggcccgaagacgctcatccccgccgggcaaccccgcgagcgcaggctgcgggacgaggaccttcatgctcgccgctcccgaacccccgtccgctcctgcggtcccggtgctgcggggacgtatcccgggcgctcgggtgcatggccccggccagccgaggggccgcgcgacgaccacagccggcgtggagaaggcggcgggcgccggcacttcgcggcgtccccaggcccgggctgcgccgccggggagggtcccgctctccacacctcaatggggagaagcccgcgagcgaccggccggcctctccctccatcccag

SEQ ID NO: 226669 - DNA, 496 bp, Homo sapiens
  chr1:8086304-8086800
  hyper
tcgcgcaggcgcctcttgctggctcgcgctcccgctagcactctgcctcgcaccggaccgccgtcgccgcggctgccgccgccgcctctatatatagcataggccgccgggccgtgaggtcgccgcgtcccgccccgcctcctcccgcagccaatcagggcgcgcgccgcttaaaggggcgatgccgtggccgaggcgttgcgccgggcccaccgtggcgtatcgcggcgctgcagggagccggctttgtctcccggagaggcgtctccgggctgaccgcggccgcagctccgctcctctgcctgagccgtgcggcagccctgggagcctctcaacgccgagctttcctcagaagcccgcggcgacccgggcctcggccgctgttcctgcccgaactgagggcacatcgcgcttcgcgcgggatttcccataaattcaggctccgggcaagattgtgtgttttttcctctccgcgggccgccgctggccgtgtggg

SEQ ID NO: 226670 - DNA, 630 bp, Homo sapiens
  chr1:8277198-8277828
  hyper
gggtctgcccagctcggccggggagtgcagtaggggggcgtcctcccgactaagggcaaaggaggtgacggcggggacgcccgccccgtgacgaggagggctcggccgagccgtcccggggcgacaggaagcggccgccctttgaaggcccagcggcggcgctgggtcagccaggccagcttgtgggggagcggccgcccgcgcacggctggggccggggccagggccggagggcgccgcaggaaggggccggggccggggcggcttctctccccgcagccggcgcctccacgcggcggtcaagctcgcgcgtgggctttagcagtttcgggcgtgcacgtgcgcggaggctcctgcctctgcggagctcgcgccctcaagagacttccaggagggtttggagcccgggtttctctttcccccagccccggaacccgagtctgctccaagtgcgcatctgcgcggcggccgacggggacgcagcccggtgtccccggcaggaccccggagcaacgtctcctggagcctgtgcagaagctgggcttggcgagggagggggtgcttccggggacacccgcgcagggaaaaggaggatgctagtgacccatcctttctcgccgtgcgctttaa

SEQ ID NO: 226671 - DNA, 136 bp, Homo sapiens
  chr1:8484296-8484432
  hyper
gcctgcacttccccggccgccgcttcacaactaaatcaccgcggaagcttcccagccaataaatcacctgcccaccgggcagagggtccctcccactccctgtgtttgagacccgccaggcggattcagtgaaggg

SEQ ID NO: 226672 - DNA, 81 bp, Homo sapiens
  chr1:8878159-8878240
  hyper
gtggggggaagtccggttgatcttgctgttacccgggtcttaattggccttttcagtcattaggacgcggatccatgttgc

SEQ ID NO: 226673 - DNA, 303 bp, Homo sapiens
  chr1:9188651-9188954
  hyper
ggggtcggcctgtgtcgggggctcctggaaaagcagcgccaccgccacccacctgacgacatggaaggcccaaagcaggcgatctgtgcgaggcccgcgcgcggcgcggacgatgctgaggtacaagtagagcgcaatggccacggtccagaagaaggagctggtgttggcgaaggtggacagcgcgccctgcagcacgcagtcccacgacgggcccgcgaagttctgcagcactccgtagaagtaggaggcggccgagagcaggtcggccagcgacaggaagagcagcaggcgccgtgcccg

SEQ ID NO: 226674 - DNA, 125 bp, Homo sapiens
  chr1:9241459-9241584
  hyper
tcagtctccttccccactggcggctcacaggctggacagggctccagccagcagggggcgcgcgcgttcacctcggggccaggttggctgaaagcccctctcccgttcccctcttctagagcaaa

SEQ ID NO: 226675 - DNA, 47 bp, Homo sapiens
  chr1:9599387-9599434
  hyper
ccccgcccacatccgcgtcctaaccaatgagcgctcgaaatttgggt

SEQ ID NO: 226676 - DNA, 116 bp, Homo sapiens; identical to SEQ ID NO: 197302
  chr1:9600331-9600447
  hyper

SEQ ID NO: 226677 - DNA, 189 bp, Homo sapiens
  chr1:9689875-9690064
  hyper
aaggctgcggtgcacgggctggggagcacttctgcaccctcgctctccacttcctgtttttctccccaacgaattttgcgccattactctttcatggggtgaggggggagtgggggcggaggcggaggcctgcctgggaaggaagcccgggggtcagaggcgcccaggacaccacgaggttgggagagg

SEQ ID NO: 226678 - DNA, 179 bp, Homo sapiens
  chr1:9711639-9711818
  hyper
ggagtgtgggcggcgggggaaggcgaggccctggaggacctgttgtttttcctgttgcaagtgaaaaggaaacaaagtgggaagtggagtgtgcgggttggcggcaggcggggcgccccggcgcgccccgcctccctccctcgaggctcactcgcgcccagcgcagtcgctccgagcgg

SEQ ID NO: 226679 - DNA, 154 bp, Homo sapiens; identical to SEQ ID NO: 197304
  chr1:9747557-9747711
  hyper

SEQ ID NO: 226680 - DNA, 151 bp, Homo sapiens; identical to SEQ ID NO: 197305
  chr1:9749327-9749478
  hyper

SEQ ID NO: 226681 - DNA, 55 bp, Homo sapiens
  chr1:9970619-9970674
  hyper
ggcgggtggaacacggcgccggtagtgagtggccgagtccgcgctgagagcaaag

SEQ ID NO: 226682 - DNA, 255 bp, Homo sapiens
  chr1:10002705-10002960
  hyper
gcacagtgccgaccggtctcaaattgcacaaacctccagttcttgacgttccgagtgtcataaacttgaggaaaatgaaattattcatcaggactacaaaaggctcaaagttcaaaccacctcggggtggagatgctggaaaaaaggaaaccattaacaagtaattttatttgctatatataaacttgccctaaggcagtccagataacttccacttgagcagcctgagacatcaagggcgggggcactttcccc

SEQ ID NO: 226683 - DNA, 141 bp, Homo sapiens
  chr1:10003446-10003587
  hyper
tccgctggacgcacgcacttccggccccctggaaccaatgagagtgcgaccgagatgttccactcgctggcgtccgggccgctggtgatctccggtagcactcgggccggcggacagtgagggcgcggtaagctccccgca

SEQ ID NO: 226684 - DNA, 1005 bp, Homo sapiens
  chr1:10057109-10058114
  hyper
gggggaagctgccgcgcggtgggcagagccaggagcaccgggctgaggcggccgggagcgcagcggcttctaggggtgagtgggacccacgcggccccacctgctcctcccgcgcgcggccccacccccctgccccgccccgcctggtttataggtcccggcccgagcctccggccgcccgccgggtttgtcccgcgatccccgaccatgcccgccgacctcagcggtacttggaccctgctcagcagcgacaacttcgagggctacatgctggccctaggtaaggcggaggggaggcggcggcggcgcgaggctcgccgtgggtctcgggatcaggcgaaggcggccgggccgggcctgtaggtacgtcctctgtccgtgcctccgccctgctgcgcccaccgtcgcccagtcgcccccgagtccgctggtccttggcgcctccgtccatcgggcgcgggaccccagtccttcagtcccccagtccgtcctttcccgcgcccacccgcccccctgtccccacggccgtctctccacgccctctgttcccccggccgtcggtcccccacccgtccgtccctgagtgcccgcgtccagccccacgtccgtctctacccgcacgcggcacacctgcggagactgcagactcggggtccggccggggaggggggtccggccggggagggggcgcccgggaccgaagcctctgcccggccaccctccccgcagccgccttccgtgcaggccccggggccccgggcgcgctcccgcagcgaagtcccagcagcctcggcgcacccggagcgggtcggggatgcagaatcctggagccagcggacgacccttcaggtccgggcacccgcgggagtgcagagcctggttcggcccggggcgtgccccgaccgccgcctcccacgagggctgggtgcccgcggcgttcttgctcccgggggccccgcgctgtgcttcccgccctcatcgcggtgccaacggtgcgcggactct

SEQ ID NO: 226685 - DNA, 258 bp, Homo sapiens
  chr1:10092996-10093254
  hyper
ctgacgggggtcacgtgatccctttcaaagatggccgccctgttgttttgatgaataatacttggtggggcgagggggaaagagtaggggtggaggggtaggaggatttactcttccagcgagagctacgcgcatcccatcctccccctcccccctacccgggctccggcgtggaggcggggcgtggccggcctgctttgggaggggaggggcttcccttacagtgctgggctctgccaggacggctgtggggtcgcc

SEQ ID NO: 226686 - DNA, 78 bp, Homo sapiens
  chr1:10458989-10459067
  hyper
atggtctaacaggcgtcggggagagccaatggtgtggcttcatggctccacccccttccattcgattggccggcgccg

SEQ ID NO: 226687 - DNA, 348 bp, Homo sapiens
  chr1:10532553-10532901
  hyper
cgggaggccggagcggcggtccttctactcgacccccttccgcagcctgccgggagatgtagttcgttccgcagcaaatcacacgtgagaccagggcacgccgggaaatgtagttctagttgccgctaatcacgtgtggcgtcgaagcatgccggaaactgtagtctctgggtttaaagccgctttcgttctatcgcgcgattcagcctaggagttgtttttaacttttaggagctgcattcgcgcgttcaaatataaggccaatagagacttattttgcatgacgatgcacacgcatgtatactgtattgaatttttagagcattcctattcgcatatgagatgcat

SEQ ID NO: 226688 - DNA, 227 bp, Homo sapiens
  chr1:10535373-10535600
  hyper
cagccttgagctgcgagggcttgagaaggagaggatagatcgatcgttcccggctgtcccctccggggaggggcctgtttccattagggttcccactccctcacggcctcagcctcctggagcggctgccagcctcttcatctgtggtcacctttgcgcttctctcgtcaagttggatagtcagaaataatctagtcgagccctctcagtgcgttgataggaaaggg

SEQ ID NO: 226689 - DNA, 502 bp, Homo sapiens; identical to SEQ ID NO: 197309
  chr1:10853673-10854175
  hyper

SEQ ID NO: 226690 - DNA, 631 bp, Homo sapiens
  chr1:10854235-10854866
  hyper
gtgtgtgtgtgtgtgtgtgtgcgcgcgcgcgcgcgtcgtgggttgggcggggggacaccaagattatccggcgatctgttttccagtcccctcgtgcgctctcaccgcgcgcctgtaccagctcggagacgtcctaaatttactaactttgccccgcgactaccagggccttttccccctcgccaccccctgagtgtaccgggtgtcggcgggacaactacgcacaatgagggccgcacccccacactccactcggtcagaaacgcacactccgccccgtggcccagtgatccaggtttgggggagctccatactcaggagaggcgctactgccgcttttccggtgggcacgcacccgcacccgcaccgtagccagcgtggctggaaggaggtcctcgccgcgcccagagccggctttccaagctgaagctggggcagaggaacttgtgtggaggaagagggggtcccctgcctccctcagcgctccactagcctcccccaactccggacccgggtcggggatgacttggaagaagaatctgcgcccaccccttagagaaaaatctattattattatcttaatctacgcccccaaagtgtccctccagccgtgattgacggcgcatacacc

SEQ ID NO: 226691 - DNA, 128 bp, Homo sapiens
  chr1:10855406-10855534
  hyper
ctctgtccttcaccaggtgcctatttcagccctgtgcccttggattcagggctcctcctccccaattgttgagctccgaggtcaccctcagcccaccctgggggaacagaccccgaccgaccctctcc

SEQ ID NO: 226692 - DNA, 103 bp, Homo sapiens
  chr1:10855774-10855877
  hyper
tggggaagggagtgaggaacgccacttgccgcgcctggagcagcgcacttgagataaacttcccaggcacagatgaaaaagggggcgccgctccccccatcta

SEQ ID NO: 226693 - DNA, 570 bp, Homo sapiens
  chr1:10948510-10949080
  hyper
cttgtccctaaaaccgtcacccgggtctcccaggcgagaggggcgggaggctccagacgcccagagcccacagcttcccgcccggggcggctgagcggtcccggggagagccctggagagagacagagaaggggaggcgtggagcggggcccccacagcagaagaggggcaggagggaggcgagagggggccggagtctggcccgagacagaaggggcggaggggcgcggggtggacgcggcccgggggtcccagacggggcgcccctccccacccggcccgccctgccccaccccccggcgcgggaggcccctgctccgcagtcggcggcgcccgggggagggggcgctgtgggggctcccggccgcccgccgcctgatgcgtatcgatcgcagcccggggtcgacgcgggggcaccagctgccggcgggcggggcgaccgcacattagcgcggccgggaccactccccggaacgcgggccgggcagcccattagacgcccccgggcggccgggcgaccactgcacgggcggggcgaggctggctccaagcaggcggcccctgggcggc

SEQ ID NO: 226694 - DNA, 316 bp, Homo sapiens
  chr1:11072441-11072757
  hyper
gcggttggtcggccgaaaccatctgctacgttacgtggggggaggtcagctcctatacagccacacttttttcaatcttcagcttttcaggcctaggtcctggttttattttagctttcagagcttctctgtaggcttgaatttccaggaggcagcccgagtccctggggagagggtcatcgtggctctcgtcggtgccttccacctctggacaggcaaccggtgggagaggacgccggtgggcggggggaggaggcggccctagcgccattttgtgggagcgaagcggtggctgggctgcgcttgggtccgtcgc

SEQ ID NO: 226695 - DNA, 137 bp, Homo sapiens
  chr1:11119506-11119643
  hyper
cagggatgaggagcgatggtgacacgtggcgaggaacggcaggcgggccgccgggtggaggccggggtgggacccggggtctcctcgggctctgacgtgtcctgagggctgacacgtggagcggggcgcagactccg

SEQ ID NO: 226696 - DNA, 116 bp, Homo sapiens; identical to SEQ ID NO: 197313
  chr1:11120532-11120648
  hyper

SEQ ID NO: 226697 - DNA, 353 bp, Homo sapiens
  chr1:11159755-11160108
  hyper
ccccgaggccccgcgaactcaccttcacaaagctgtcggcgtccgggaagcctggcagcaccatctctccgtcggatttggttgcgctggtcgccgacaggaccctgggctcccgggtactgggtggcgccattttttcagcctgcacggctcgtctcgcgagagcttgtcggccgaggagacgggacgcgtgcgcaccacgcatgcgccaggtcgaagcggcgggcggggcgtctgattatagtgtggggagcctgcgattggggtggggcgcctgcgattaggttgggaagcctgcgtttagggtggggcacctgcgattaggttgggaagcctgcgattaggttgggaag

SEQ ID NO: 226698 - DNA, 397 bp, Homo sapiens
  chr1:11322517-11322914
  hyper
aggcctcagctgccgccgccagcaccggtaccgccgcttcaggccccctgccccaccgcccgccttccccgctgtcctctaagccgggagcgagggaaggagggttcccagccctgaggaccaatcgacaggtatagggagaagatggactgaaaaacaggccaatagtaatgaagaagagaagcttcaggacccggcttctccagggggcggggactgttcaaatagacaaaccacgcggccagtggcaggtgaaaacaggcttgggtccactcgggagaaccaatcggtcgtgagttcacctcagtcacttccactcacacatccggtacggcgctgctaggattcccttctgcatccgggctgtgaactcaaggagtccggtgtctgggtatct

SEQ ID NO: 226699 - DNA, 35 bp, Homo sapiens
  chr1:11538889-11538924
  hyper
gacccccaggggtcgctgcgccttgcgcttccccc

SEQ ID NO: 226700 - DNA, 58 bp, Homo sapiens
  chr1:11618432-11618490
  hyper
ctttggaggcaggcgcatagtcggaggaacttccccattgcctcgtcctctcccaccc

SEQ ID NO: 226701 - DNA, 35 bp, Homo sapiens; identical to SEQ ID NO: 197315
  chr1:11624042-11624077
  hyper

SEQ ID NO: 226702 - DNA, 258 bp, Homo sapiens
  chr1:11710537-11710795
  hyper
tacgcagaaggttgcggcgccgcttgctcaggaagtagaactgctgccagtggtcgcgctcctcctccacgccgccctcgggcaccagcccctcctgctggcacttgagcagccacagcggggcgccgtccaccagctccttccagcgcaggcacaccaggcggcaggcctgcaccagctcggcggccggcagtgcggccagcacgcgcagcagcagcggctcgggcagctcgtccaggtacgcggcggcggccgccg

SEQ ID NO: 226703 - DNA, 79 bp, Homo sapiens; identical to SEQ ID NO: 197316
  chr1:11715183-11715262
  hyper

SEQ ID NO: 226704 - DNA, 115 bp, Homo sapiens; identical to SEQ ID NO: 197317
  chr1:11740565-11740680
  hyper

SEQ ID NO: 226705 - DNA, 112 bp, Homo sapiens
  chr1:11751778-11751890
  hyper
cccgggcacatcctccggctgcccgcgcacctctccacgccggccccgttccgcggctcgccctcggctgcgctcggctcccgcgggcgctcggccccgagcccctcctccc

SEQ ID NO: 226706 - DNA, 154 bp, Homo sapiens
  chr1:11796158-11796312
  hyper
tggccgcaacgggcggggcggggcggggccgggcaagtttgttccccgagttcggagcctaggagccccccgcggctgcggcgcaggtgccctcggcctgagtcgggatggagctgcctgctgtgaacctgaaggtggcgacgggctgggggga

SEQ ID NO: 226707 - DNA, 325 bp, Homo sapiens
  chr1:11865775-11866100
  hyper
gttacactaatcccgcgaagggtgcgcaagggaggcggcagccccccccaagaagagaggcaggccggcctccagcgctccccgcccacaagcacgtccttgcccccgggaggttgtttgccggctccaggatctccctcccggcgaccccggcctcgccgtcactcaccctccagtcccgggtgactcagaacgctcggccgccggccgcaccactgtggccgctgcaggggcggggaacgcagtgaaggggcgcggcgcaggtgtcaggttgctggagaggcgggcctacagggcggaaaccaccggcgcgggtgaccggaag

SEQ ID NO: 226708 - DNA, 178 bp, Homo sapiens; identical to SEQ ID NO: 197319
  chr1:11866366-11866544
  hyper

SEQ ID NO: 226709 - DNA, 231 bp, Homo sapiens
  chr1:11994683-11994914
  hyper
cactaggcaggcgcgggggagggcgtggaggggcggggtggtgccgcccccggggcgggcccagtgcgtggcagcgggacctgcggccccgtcgcgaagtttccagccctgcgagcgccgccgggtcggccgatcgtcccccatacctcggccatgcggcccctgctgctactggccctgctgggctggctgctgctggccgaagcgaagggcgacgccaagccggagggt

SEQ ID NO: 226710 - DNA, 234 bp, Homo sapiens
  chr1:12040194-12040428
  hyper
gcccccccagctccggccgacgcccaccggaactacagcccccatgatgcagtgggagtccgagcctctgcgtcgtccgcttgggacgcgccggcggaggagtggcgcgcggaggagtggcgcgctgagacgccgctcgaagcgccgagtcgcggggcagcagaggcgtaaggagtaggcggggcgagccggctgggctcagggtccaccagctcacccgggtcgaggggcaat

SEQ ID NO: 226711 - DNA, 167 bp, Homo sapiens
  chr1:12079238-12079405
  hyper
gccccacctaccccgccgttccggactgccgcctgcgccgagcctaggccgcccagcctgactgaaactgccgctgctgaactcagcgtatccagtcccgcagctgaccaatcggagctcgcccttccggggcccgccccattccaggaatcgacctccgcaccggc

SEQ ID NO: 226712 - DNA, 43 bp, Homo sapiens
  chr1:12123869-12123912
  hyper
gctagcacccacaggtgggaggctggctgaagggctagtggtg

SEQ ID NO: 226713 - DNA, 1778 bp, Homo sapiens
  chr1:12676998-12678776
  hyper
ttacaaggtgaaaccgactagctcagcactcgtgggtggcgcggagaagtggggtggccggcgactctcagctcccgggcgcgggatcccgcagcggcagcaggtgggcttacccccgcccctgcggccccccactccctggagtcgcagtgcctggtacctttctggcgccgcgctccgcgaactcgcgggcgagctgacgcccgatgcctctcccgccgccggtgatgaggacgttctcccgcgacaggtcccgcagcttggcgggcagcaccagtccgacggctgctttcaccaccagatagatcatctgtagagggaacatcaccagcgcgcccagccgtttccacaccatcctccgcgccgcggagccgggcagggggcgaaactccccgggccgagcaatacaggaattaaaaaacaccccgaacaataaatagtaaaccgaataaggaggagagaggcgtcccacctggccactcttgaaatcacctcttcccaaatgcaaagcaccgggtgagaaaaagaaaaaaaaaaaaaaaaaaaaagataaattctcctctgggggagaaaaagcgtctcctaaggttgggacggtaaaagaggtggagggggaagccggaggtggaaagttctaacaagaagtttcttgccccagcagccgtttcggctggggaattctcaggtaatgtttacagactgacagaggagtttagggaggggaagaaaaaaaaaaaaaggcaccaaccacacgcgcgcaccctgcctcggtcccgcggtttcaaagtgcaagattaaaaaaaaaaaaaaaaaaaaaaaaaagctgattccaaattgtagcgcccccacccccaccccgtctccagaaaaaaaaaaaaaaaaaaaagtggggggaaaaagtgcttggagctcccaatttcagcccgcgaaagtctcccgactcattgctattcttgggctcaggaaattgcttaaacgcgatctgattgccagcaacgtgcaggagaagtggggggtccgggtgtcagtttctttacgtgcagcgctcgccctcgcgcgcgctcgctcgctccggctccctccctccctctctgttccagcagaggctgggagttgccgctcgatccagctccccttctctccctttttagcatttattgccttctttttgtcctttccaacttggagagggtccgggtgtggagcgcgcgtggatcggacgccttggtctgcgcggccctattcattcgctccccgggcagccgcgtcgcggagagggcggcccctttttcccccattttttcaataccccattaagtctgattgacagttaaagttgttgggaggcttcactaccgttcctctgagtggctgctgcggcctcccctccccctgcgccgtcgcggggagcgcgcataaggcgcgcactcgggctcgccgggactcgcgctctcccgggactggctcccctctctgcaagccgggacttgccgccggtgtccctgagggctcgcagctgtaactcgaacacgctggaaccgactccggcgagccggctgccttctcgagacgttcctccttgcccgggccgcccgcgggccaggtgatcaccccgagtgtggagcaggcccgggggagcttgcgtatgccttgatccaaccaggtcacccagggttttatttcaggtcatttggtcatcctcggcctccaggtaggatcaggaagccactcctcacctttgctcggacctcttctgtgttcacgtagagtggactttt

SEQ ID NO: 226714 - DNA, 304 bp, Homo sapiens; identical to SEQ ID NO: 197327
  chr1:12679083-12679387
  hyper

SEQ ID NO: 226715 - DNA, 74 bp, Homo sapiens
  chr1:13839543-13839617
  hyper
cgcagggagcgcagcgcgggcagcgcggccagggcggccacgctgaggctgcgcaggttgttgtcgttgagctc

SEQ ID NO: 226716 - DNA, 203 bp, Homo sapiens
  chr1:13839797-13840000
  hyper
ctcctccagcgagcgcagcgagttgttcctgaagtccaggtagaccaggtcgccgtagaagatgaagaagtcctcggggatccgctggatgcggttgccggccaccagcagcttgcgcacgtccagggggaaagggtctggcacgctgggcagcccgcggtcgcggcagtccacggtgtgcgggtcggtgcaggcgcagcccg

SEQ ID NO: 226717 - DNA, 389 bp, Homo sapiens
  chr1:13840300-13840689
  hyper
ggggagggaggggcgagggactcaccaaagggtttacccggacaggaaattaacccgctagaaaaatctcttgggagaggcgggagcggcaggggtggccgagtggccgtcgccaaaacgcggccccaccctggcagctgatttccgagatctggcagtaagacgccgcgcgcaccgggcgggctgcactcgacgtctaagttcagctaccaagcccaggagcggtttccctaaggcgtgtcccgggcgtgcgccctgccccctcgcgcccgcctggtgccaaagcacgctccctgcacgccaccctatgtcgccaaagggagtgggacctgggtcactctgactctgctccgggggcaatccctgcaggttctcgggtgccgcgccag

SEQ ID NO: 226718 - DNA, 918 bp, Homo sapiens
  chr1:13910117-13911035
  hyper
aagcccattttgccagggcccgcagtcctggcggcccccgcagctgcggccctgtaactttaaacctggcctgagatcatcgttttggcgccggccaaacagagcccgagggcgggcctagcgcgcccggacggagaccaccttgcggccgaccccgctcccccgcctcctcgggagagataaatgctgactccgctcggaaagttctcaactgcaaagtttgctgtccggctgcctagggtctgggaagctcgggcaccctccctctccggggctcctgctcccacccctccggcccccccaccgtcgcgctcctccaggctgggcctgtggccgcggtgctttttaattttcccccagctcagaatcttgctgctcggcccccaggagagcaacaactcaacgggaacgatgtggaaggtgtcagctctgctcttcgttttgggaagcgcgtcgctctgggtcctggcagaaggaggtaagacccagcgcaagtggcttcctgccgtcgctgatggggacgagcgagcagagacttgctggaatgcccgggcctggtattcgaggttgtccaggggagcgcgggggagctgagggtgtgtgcgtgtcaggcggctgagcgccggaggaggagaggcagcggcttagtcggtgccaggtcccaaagacgcagctgcgcgggtgtgccgggaggagccccggaatccacaggctgcgaggtgggcagcacagggggcctccctccgagtcggcagcaccagagagatcgggtggaaggttcacagtaggcagccccgcttgctggcagcagtggctggggtttccttcccatagagcggtgtgttggaggaatacgcacgcctcgggagaagctggcctcgtagaatcaggagggacgttcaggagggcttgggccaa

SEQ ID NO: 226719 - DNA, 161 bp, Homo sapiens; identical to SEQ ID NO: 197330
  chr1:14075414-14075575
  hyper

SEQ ID NO: 226720 - DNA, 31 bp, Homo sapiens
  chr1:14076277-14076308
  hyper
gcggcagaaagtgcgcggacggcgttccggg

SEQ ID NO: 226721 - DNA, 488 bp, Homo sapiens
  chr1:14219352-14219840
  hyper
ccgcaccggggtggcggcgcgggctgggggccgctgcagcaggtctcagtccctccctgctgccacgcgaggagtggggagcggcagggcctaggcgtcccgagtggaggatgagccggagacgcctgcgggtccggagctgcaccgcgcccgtgcggcccgcgccgcccgcctcccgcgctctccctttggcagcagccggacgcctggcgcgtgcaggacctggggccgcggcgctcgcgcggggacgcgggagcccagggtcggcgctgcaggcagcggggcggcgccagcaaggccagctccccggggaccctggggcagcctcgcgccctgcctgcctccctggactgagacgccgcggggcctgggcagcgctctgccggcagctggtgctggaacacagccggggctgagctgctcccggggaccctgccccttccaggtgaccccaggagaagcagccccgggccggggggcaagttcca

SEQ ID NO: 226722 - DNA, 573 bp, Homo sapiens
  chr1:14924521-14925094
  hyper
ccaatattcagcccggctaagaagcttaggagctggctaaggctgctcctccacctggatgcacacacagggctagggctgtggagaggcgggagcaccagcggcccacgccgaggaagataggcgctccctcctggggtgggcagcgcaggtctggcctgcgggtggggggtggagagtgagaggcacgcggggcaccagctcagctcccctctggggatttcgtactcgcagtttaaggaaccggtggagcacgaactccactcctgagctggcgcaagcgtctcccttccatggagatccaccccggctcccctctgaggccccctttccaagcaccctctcttccgagcacccagcacctccccaaccttagcacggctcggggcaccagttctccagggcgggggctgccccaccgctcaagggaggggacagagggccggcctcggtccaggcgacccctgcccctcgccaggggcgccaccttggccccctcccgactgccgtccgccgcctccgcccccccggggggtgtgtctccgaagtacgggggcgcgggaggccaagggt

SEQ ID NO: 226723 - DNA, 334 bp, Homo sapiens
  chr1:14926054-14926388
  hyper
ggggccttttccccaccccccgcaggggtgaatggcacagttccccccacttccttaggctccttcccagagagagctccgggctctgccgccgtggttgggatagaggattgcactgctgtgcacttttctccgcggatgccaaatcccttggctcagttgcatctggactttattttcttctcatttgaggtctctcaggcattggaatctatagatgcaacagtagatgctcagctcagcagggagtttaaatttccgcaaatataaacaccgagagcactttccagggggatactgtagacctcaaaggttgagcggtagagaaatgaag

SEQ ID NO: 226724 - DNA, 1061 bp, Homo sapiens
  chr1:15250613-15251674
  hyper
cgcgggactgagagccgttcccacgtgagaggctccgcggccgaattcctcgcgtgcagcaggcgcggaccgcccggcgtccggccggactgagagccctggtccggcgcgcgccgccggccgggcgggaggcgggggcgggctcggctgcgccccgatgcggcggcgacctccgggtctgtgagcccggcgcgcgccgtcggagcccctcgcgcagccgctggtagcgtccccccgggcacccggcatgcgggcggccgactcgggctcgtgggagcgcgtccgccagctcgcggcgcagggcgagccggcgccttcctgcggggcgggggccgggcccgcgcggcccccgggacccgcagcctgcgagcagtgcgtggacgcggcggggcccggcgatcggccccgcgccggggttccccgggtccgagcggatggcgactgcagccagcccggtaggtgcgcgcggggcggggcggggcgggcggcgcggacacaggcccaggagccgccggggccgggcgcgcgagggcgctcggagccgggatcgggaagccgctggtggcaaagttctcgcagcgcgcggagccccgagccccgggcgggtgcagcgggaggcgtgcgggacgcagagtgagttcctcggcgtggggaccggggctcgggggctgcaccggggggccaggaccgcgcttgccggagccaggcgatcccgcggcgcctggagacccagctccgggctggaccccgcgtctgctgggggaagcgtgggaaaggggccagccctgcgcgaagttggttcggccccctgggaccgcacctgtgagccatgtggcggcccccgcggagtgccgaggggagcccccttcaccgccgcccctccgaggcgaaattgatgcctcgcatttgctaggagcggagagattgctgcgtttctcatacacttgaactccgagtaatgcagaaagagaaattgcagaggtggagacacaaacgcagtgatctaattgcgtttggttggcgaatccgccccaagtggagaacagcgttttactgttaaa

SEQ ID NO: 226725 - DNA, 2382 bp, Homo sapiens
  chr1:15478882-15481264
  hyper
ctgcaggtgtacacacgtggacaccatatgtacccatgaattccgcctttggaagtgaacttgattgcagcctattttcgtctggaggcggtggattcccggtaggaggcgccttcagtcctcggctcgatcctgtgacgccagccagctgcctatcggcttctcagtgtttgaacttcaaagggctggacgctcacccaagaaggggaccccggcctgacctctctcggaattcaaaaaaatctaaggctcagagagggaatgggagctggctcttccctctgtgtttagcatccacgttttttggcggtctggctgaaaccagcccaccctagttcgggcgccagagcaacgcagttccgagggcagatctccaaggggcggaggcagagccgcgggtgagaggcttccgcgccgacttcgggtttgcactccccggagccagaactccgtggcggctccgggcctccgtggatccgagcagagactggctgcccgcctgccactcgcaggctgggaaaacgccagccggtgcctcgccgggaaagttctcggcaaagctggggatgagccctcagcagggcaggctcccggtgcagcgcgcccccatccattgcccgcgcgcaagaacccggaatgggccccacctgggccgggactcgggcgtgcgatcccgagggcgccctggggaccacgcatcgggtggggaccctggccgagggcgtgagctgactcagtttttaaaaactcgcttcctccttccctacttgtgccggtcactcacctcgctgggaaccagcccagggcagaagggggagagggaggcggtggcctccccaggaaggaggagaggtgagtatcccgccaggtaaaggcggggcggctggcggagctgtgcctcggcgtctgcgcctggtgtgggaggaaagcgggtctcccagctccacttaaacccctaaaacctgggacttctagcttgagacattccccgaccaccacccgtcacacacacgcgcgtgcgcgcacacacgcatgcacaccgattctctgggccctagggaggaggggggatcagggctctattttctcccgaccccctcttatccaactcggctggcaagggttggggagaacttaggcccagcccccggcacacgctcagcgcgctccagcggcatacgctggggagtgggtgcccgcctcgctcagctgcgatccctcgcctcgggcccgggggtggtgccgagggccgggagggagggtcggccggtgggcggtgcttctccgggctggaggccgctcctggccggcaccgccctccgcctcccgcggtccctccctcccgcacgccggcgctcccaggccgcgcttcctgcgtccccaacccggtccctgagagggcagtgcgccctctccaccactgcgttccctcggctaagaatcccccgaaccccagccccgcgatcgcggcgcccaccgaggaggccgcccgggtggggcgcgggggtcgcgaagcccgcagtcccggaccgcccagccgagacggagccggacccgccgcctcccgggtgagtctcagccgccgcgccttgcgcccgctgcttcccgcggcgcgctgtcggttccccacagggccgtgtaagggggccgaggcccgtttgggtctcctgtccgtccgtctgtccgccgagcgcttcccgcctggggtcgaccaccgggaggactccgcaccccgcaccctctgcggccgcgccccgccggcgcgggacgctcccgcctcccgggcaccgcgcctggccagctggcctcggctggggaaggcagctggccttgggggccccctgttggcgggaacaggtgctatccgcccggcgggcttcgaacccttggcttcgccagaagcgctttcagcgcgtggttaggagcagaacttcccagtaggtcccaggaaaccaccttggcgctttgctcgcgcatcccttactgtatggaagtcggggccttttagggatttagattcgtgtgtgtgtatgtgtgtgtgtcgctctacaagcaaacacgggggtaaagaatcgggcatgagcaaagtggattgaaactcgagtccttccctgagcgcgtcggtttcttcatctgtgaaactgacatgacaacgtcccagggtgcggcggggcattcatgcccagcacccagcaagcactcagcggtaagttacgttaccgggcctaggggagagcagagtacaaatcagatctcaaatcagcgcacaaacgggaggcgcttggcccggcgcgcctggtctgcattacaggataatggtctctttcccaaccagcggtgggggcgagagacctggcccctcccccacggtttccccaggga

SEQ ID NO: 226726 - DNA, 463 bp, Homo sapiens
  chr1:15573640-15574103
  hyper
cctgcacggtgccacgccccctctgccgcgcaggccacgccctcatctattaggctggaccccgcggcgcctggcggcgttgccatggcaacgcgcgtacacaggccggccgggcgggcggggtgccgggtgcgagctggagactccgcgggagcgcggccgggaggcttcgccccggagctggcccgacgcctcccgagctggcagggctctcggcggaggtcggagcgtgggcttcctcctcccgccaggtgagtgcggcgcgggaaggggtggcgggccgagaccggggaccggaaggggcggcccagcgaggactagccctggcaggaggaggggtggctccccggccccatcctcctggatccaggctccggtccccaggagcaccccagtagctaccccaacaccagcccctcctttccagatgcaggccccaccccgcccgcggaggaagcccccg

SEQ ID NO: 226727 - DNA, 290 bp, Homo sapiens
  chr1:15735866-15736156
  hyper
tcggcgcccgccacggttcaccctaaacaggggtttctgctccccaggtccgcctcggaacccctgcaaccctcattgagaacgccagtgtttaacagcgagtcgtttccatagcaaccgacagggtgtcacagacacaggattatgacttcacggcgtggggattccggagaagggggtggggcggcgccccccctcgcttccccgccccccggcaagccccgctcctcacccaagccgcgggggaggagccctcttctttcccgcccggccccggcccccagcaggac

SEQ ID NO: 226728 - DNA, 70 bp, Homo sapiens
  chr1:15736985-15737055
  hyper
ccctggcacgcggcggagactcgtatttgtgctgcctccggtacaccatagacgcgtccacagagtgggg

SEQ ID NO: 226729 - DNA, 302 bp, Homo sapiens
  chr1:15852991-15853293
  hyper
ggaccagagagtgcgtccccatcctagcaactgttgctagacgagggccatctcccggtaggagcggaaacaccttcctggatcgaggaggtccttctggtatcccatcatgcatagcgacttcgcctcgctaggaggcacgttttggcctctttggtcacgatcagccttttggctgcaaccaaagagcgcgcctcgtttctatagcaaccaccccaggtccacgcctagacggcgagtggcaagggtcaaaatagattcgcccagtagacgccctcgacctgttcggtcctcgccttcag

SEQ ID NO: 226730 - DNA, 163 bp, Homo sapiens
  chr1:16011276-16011439
  hyper
cacgtgagcgccgcggcctcggagctatttttaaagaacaaagttgaggtcagcatcctcggagcttccccaaacctggcccggggccctgccctcccggagaggggtcagcgaccctccggtcccccactggggcagcggcgcccccgggagctcctgaagg

SEQ ID NO: 226731 - DNA, 641 bp, Homo sapiens
  chr1:16085155-16085796
  hyper
cggggcgggaatcccgcgccccctccccccgagcctcaccttttatggtaaagcggcgcggggcggcggggcggagggagccgagggggcggggagggcggacgggcggaggggacgggaggcccagcggctccgggctccgctggctcgggcgtcggatcggagccgccggggcgcgggcggcccaggtaagcgggccgggtgggtgggggtcgcgtccctccgtccctgtccccggtgcacacaggtgacagcgccggcagtgctcggccggagcctgctcggtcgccagccgggacccccggcgcggcgcccctggaggggcctgcgggtggggggtgcggtcctcacgccctttgcgtcccagtctcttggtctctctccccggagtcggggagtcggcaggtccggggcgagggctcagtgaggccggcggagggccgagtcccagcccgggagcgggagccggggacccggcgcgcagggcggaagctcccgcacaaaaggccggagtcccgcacatggatcgaattaaagctccggcggcgcccagcggtgaccccggcggccgccctgctcggctgcctgcggagggtcccgcgtttccggagcccgggggcgctccaggccccttttcctag

SEQ ID NO: 226732 - DNA, 45 bp, Homo sapiens
  chr1:16174336-16174381
  hyper
gggtgtgtggtggcggcagagctgagctgcgaggcccgagagtca

SEQ ID NO: 226733 - DNA, 216 bp, Homo sapiens
  chr1:16175858-16176074
  hyper
gaaatggaagcagcggcggcggagctcctgtcttttaaatggaggatcattgattgtgttggtggttgctgttactggggcattaaaccctcgccgctggagcgcgcgtctgcgcgtgtccgcgtgtgaaaaggagccgggaatcgtggggccattcataacctgcttgagctgtcctcggcaggccggggggaggtgcgcgcttccagggactct

SEQ ID NO: 226734 - DNA, 233 bp, Homo sapiens
  chr1:16302447-16302680
  hyper
ccccggccccgggcgattgttgacactcacctgccatgtcccggaccccaccgcagagggaggtgcatcacggccgcgagaaggccggggacggcactccagagcagacaaagggcgccgccatgttagagtcgggcggaaccgacctcgcaggcttcccggctgcaacttccggcgcatgcgcagcgtcctcgctaggagagcgcccatagacagacgcatgcgcctagcta

SEQ ID NO: 226735 - DNA, 212 bp, Homo sapiens
  chr1:16399670-16399882
  hyper
cttcgtgtcacctgcggggctgcaaactggggcggggatgcggtgacctctgcacgtgcgctctctgcgctgcccccgccccctaccgtccctagctctgtccccctcaggacgccgcgtccccaggggtgcggcggggccgtgaagggcgggtcgccagccccatcccccaggtctccgagcggcgaggggactgcgcgggtccccggcac

SEQ ID NO: 226736 - DNA, 801 bp, Homo sapiens
  chr1:16481258-16482059
  hyper
aaaaaaaaaaaaaaaaagaaggaaacttctcaccggcccaagtttcctcccggcttcccccttgtggagcctgcggaaacctcgctctgcccaggcaggaggggaagccttgccctcactgttggaaattgaagctggcctgggctgggtggacaggaaggtcttcggccagggcaggagcccccatcctcgccctgaccctagcggagggacaacacccccaccacgcacccgctgcgccatgagcaaagtctgcggcccctcactcggcgcggctccgggaacactggggcgggggtgggtgattcagtcccccacccccgggtgtcctgactccctggtggccctgggctgacagctccacaccttgggaggccgcacccccacctgccgcatttcctcgttctgagtcacccttgctcagaacgcttgactttgggacttcctgtccgcactcgcggcccctaacctgccccgggagcccgggagtgcggcttgggaaggagggaaaggagtgtgtgagcagggattggcccgaacctatctccacgctctcccccgggactggaggtgaaggggggcgtggagaaaatctcagggaacaggggcttcgacagggggctcccgcccgcccgagccccctccccaaaatgcgaggcctgcacagtatgccttctccgcaaaacctcggcaagcgggttagtgaattcaggtcactaagaagctgagcccgcggaaagctgcccaaacacccccttctctaggggactccccacgccccccgccgggacgcgttcccga

SEQ ID NO: 226737 - DNA, 68 bp, Homo sapiens; identical to SEQ ID NO: 197344
  chr1:16514366-16514434
  hyper

SEQ ID NO: 226738 - DNA, 91 bp, Homo sapiens
  chr1:16542925-16543016
  hyper
tggtcattatgttgcgggtggggccggggtccgcctgccttgctgactgaaacagcgtctcccggttgtctgccaccgcctgcttggccag

SEQ ID NO: 226739 - DNA, 193 bp, Homo sapiens; identical to SEQ ID NO: 102633
  chr1:16553469-16553662
  hyper

SEQ ID NO: 226740 - DNA, 304 bp, Homo sapiens
  chr1:16563566-16563870
  hyper
ccgacctgggtgccgaaggcccctttaaacgcccacccgcactcccgccgccccagcccgccgggcccacttccgccccgcctgcgtccgccttctgcgcgtgctggcagctccggcgcaggtgcgcgcggcgcatgtgcggaggttgttgccatggagacgccggaggttgggttgggcgggttccgggaggcgttcgtccctcctacaacgtccgcagcctgcgccgcgcggtggctctggactaggccttttcctctgggttgtggatcctcttctctatgactccgtccgatccctagtc

SEQ ID NO: 226741 - DNA, 63 bp, Homo sapiens
  chr1:16679106-16679169
  hyper
ggtggaatgcgctcgggggagctaggcctccgcacccgccttcgccgcgtctctagcgtcgac

SEQ ID NO: 226742 - DNA, 145 bp, Homo sapiens
  chr1:16693549-16693694
  hyper
gatggcatctttccgccttctctgcccccttccaagatggctgccctaatgtacacttgggaccttgcctggcgcctcttccgggcttggcagcgggcggggtccattgagtaaagccttgcgtgcctgcgcccgcgacggaggc

SEQ ID NO: 226743 - DNA, 43 bp, Homo sapiens
  chr1:16766996-16767039
  hyper
ggcgggcgcagggcgctttctttgcgtcggagggtgtctggag

SEQ ID NO: 226744 - DNA, 45 bp, Homo sapiens
  chr1:16861589-16861634
  hyper
gcggatgacggacacggagacaaataggaacggtgtgtcgtgaga

SEQ ID NO: 226745 - DNA, 794 bp, Homo sapiens
  chr1:17445314-17446108
  hyper
cctgccccagtccccggcaagtctccgcggaagctccgctgaactgggagtgggaagcaggagaggggctgggttgaggtgggtccgaggggaagtgaggtgcggaggggaagtgaaaggggagaggacggcagggaagctgaaggggtgtgaggtcccccgggaggagaactggagagggccagacggagggttacgggtgaaagggagggtctgtgagggagctggggctgaggctgtgttagggggtctgggagagtctcagggtttctggaaggtggacacaaggttcgggggttgtcaggtttctggatgagattcttaggatttctgggctcgggggctcgggatgagggacaactcgggctggacaaaggctgtccacgtccccgagtctgagcgcgtctcaggatttctgggctcgagatctcggcccgggcatcacggtgggccggctcacctgtagacatcggtccagaggtaggtgcccagcacgtacaccgcctccacgcggctcccgtactgcagccgcacggtccgctcgcgcagcatcctccccgccgcagtgcccgcgctcgctggtccggggcggccgggagcacctgcagcaggtgcgccttctccagcagcctgcgccccacggccccgcgcgcagccttatccagcggccggtgggcggggcggcccgccccagtcctctcgcagtgggctgcgggcctgtccgtcaagcgtggtcccgcccctaactcgtcccgccccgctgaggtcgtggcgaagtcatcagggaccagttt

SEQ ID NO: 226746 - DNA, 322 bp, Homo sapiens
  chr1:17766205-17766527
  hyper
agaaacacatgtgcggccgcgcggcaagcgagcgcgcggcggggcgggaggcgcggggcgcggggcgcgcgcgccccctgccggccggcggacccgttgccggcgcccccgccccgcccggcctggccctgccctgcccacccgagcctgcgccgcgcgccgcgcgcctcgccgcccgcctcggctccgctgctcctgcgcctttcgcgggcccgcgagcgcgctttgggccttccacgcagtgcggcctgcgcgtcagggacttctttgcggcttaggaggatgttggattgtttttcctgggcacgtctagacaggtcac

SEQ ID NO: 226747 - DNA, 45 bp, Homo sapiens
  chr1:17865914-17865959
  hyper
gggaagtggggaccccggggtaggtgaaggagcgaggaggtcgcc

SEQ ID NO: 226748 - DNA, 502 bp, Homo sapiens
  chr1:17866199-17866701
  hyper
gcacggcggcggcggcgggaccaggcctcggagcgcggcgggcgcgggcgcagtcccggcgggcccggacctcgcgggcgggcgggcggcgcggccattggctcgggtggcggcggctgcggcggtgggggcgccgtcccggccatgggcgcccgcggcggcctgcggagctggaggcgcggcgccggccgccaggcgcctttgtgagcggcgcggacgacaaaggcgcgggcccgggcagccgaggtgggtgagtgagcgcgggggccctgcctccgcgggatcctcgcgtgtgccggagtctgcgagtgcgcgggaggcgctccaggcgccagggtcctccgggtgtcctgggcgtgtcgccgtgggcgggcgggggccgtgtccgccgctgtgtccctgtgtctgggtgtgagagccccgagcccgcgtctcccctctgtgtgggtctctccttgtgtcactggagttctggtgttactagggcgagtggcctttgtgc

SEQ ID NO: 226749 - DNA, 102 bp, Homo sapiens
  chr1:18434092-18434194
  hyper
ccctgcaataaatcggcttagcggacgagagccgaacagcccagaaaggattaaagaaaagtctgtataatacgcggagagcgcggcgaggggagggcaagg

SEQ ID NO: 226750 - DNA, 308 bp, Homo sapiens; identical to SEQ ID NO: 197351
  chr1:18435565-18435873
  hyper

SEQ ID NO: 226751 - DNA, 335 bp, Homo sapiens
  chr1:18436451-18436786
  hyper
ttgttgggaaaccctggctccgtcaggaccccaccctgcgagctctccctggaacccgggagcagggttcttctggctgcccggctgcagagagctgacccggcatcctgacgcctcaaatccctttgcccgcctctgcgggctgcgggaggcgggggttggcgtgcctgagggtgagcgcatctgggccggtgcagccagcgcggcctcggagctccgctgctcaggatgaaggaagagcgcagacgcggatcgcgaatgggaaactttccgcgtctggggcgcagagggagatccgaggcagccgggagccctctcttctccgcagaggagag

SEQ ID NO: 226752 - DNA, 114 bp, Homo sapiens
  chr1:18437206-18437320
  hyper
cccacatttctcgggactcctgggcgtgtcctggggcgttttcaactcctccagcccccgtgaaccgtgcctgggcacttctgggaagtcctgcactggagcctgtgcagtggc

SEQ ID NO: 226753 - DNA, 71 bp, Homo sapiens
  chr1:18437680-18437751
  hyper
ttcttctccagccccaactgggggagttaagggccctaatcccttgcaggctgcctcgcccatgcccctcc

SEQ ID NO: 226754 - DNA, 121 bp, Homo sapiens
  chr1:18956212-18956333
  hyper
tattttgcctccagcgtggggccagagacgctctttcccccgggagacaaaaggcctgcagttgtggcgtcctgccccgctgggagggcgtttcgcccccaggactcggtgtcccgaggtt

SEQ ID NO: 226755 - DNA, 1192 bp, Homo sapiens
  chr1:18956603-18957795
  hyper
gaggaggacggcggcggctggagacgtctgcacggggcggaactggaaggggaggaagaaacctgtgcctagcacttggcagacccactttgccaagcctcggaaccagatacggttactgggggcttctcagagcggcaggaaggtagagtaagaaccggacaccggggctctgacattacacagaaaaggtcagaattcctcccttcaagtcaccctaggccggttcccggggagcctcactggaggaatttcagagggtgtaagacgagggagaagatgagaaatagggcggactctggccctcggaggccagagaaaaggcgagactccagagaggcgccggacccgaggcagacattcccatacagccgggactccgagagcagccgtgggcgacctgggggccggggactcggcggatccggcccattcatcaaaggaaggcactgggacaaagttggccccctccccttctcccccagcccccaactcgccgggatcggctccctctcttttcacggcggttcaaattctcccccaaaacgaggtcgagccggggattagaaaagagggaaaaaaatattcgttggcgatttcttttcgttattggtcctccgctcccttgcgccctggcccccttccctcctcatgaataaaagaaaagtccgaacctatcagatcgcgctcactgcctcctcctcctcctcctcctcctcctcctcgtacttcggtgaacacttttgcacaacttacccagctgatcactcgcgccccctcgcttttccatttctctttccccaaccccgtcaccccctgtctcctccgtccagccctgaaacccgaggaggctccttcttccgtctgtccccgggtctcctaggggacggggctgtgaaagctggtgtggagggagaagcgagtgtggtccggagaaagaaggcgtggagaagagggagggagcgagagcgagagaataaatatataaataaatacgagaacgaaatccactccgcagtctccgggctcggaaactttggccccgagcgccagagcgccagagcgcgagagcgcggcgctcgccactctgaggctggcggcctcgattccggccgcgttcccccggcccccctccgccgcggggcctggtctccgggttctgccaggcgcatcagcccgcacaacttctggc

SEQ ID NO: 226756 - DNA, 930 bp, Homo sapiens
  chr1:18958034-18958964
  hyper
gtgaagggagcggacgggaagcgatttttgccgactttggattcgtccccggcgtgcgcaagaatggcggcccttcccggcacggtaccgagaatgatgcggccggctccggggcagaactacccccgcacgggattccctttggaaggtaagaacgcccaggctggcctcgccgcgactccgccgcccggaactcggggtccttggagaggctgcggtctccaggggacggtggcggcgccggcgatagcagagggatcccgttctcttctgggtcccagtccgggcgcggaacccagggagtttctgggacccatacttgtccgcttctgcgtgggtttcactgcccggcggccttcgtttcgcaggtcgctagctgccggtctttacccgcagggctgaaattctggtagatttggactcctagtaaatatcaggtcctggtgaatttcagctctttccactatttccagacacttcttccctgacagtttctcggctctcctggctcgctggctgccagctttctactcttgttttgaattattttttccacccccgggattggtcttccagtcctttatttcgaaccacctaccatgggtgatactttatatgcctcaactaccacggctatccatttcttccgaagccacagtcaaacactcctgcttttccgcctggaaacaaactaattggaaataataattagtaatgattttccccctaaaactttttactcgggcttccgcactctggaaatctcccgggagagaacctctaaacggcgaggtttagagaacctctaaacggcgagaggggcacggcaatgtccaaacgagaagaaagagctgattttgtaaagcgtccttcctaaacatccagcgcccgcccggggagacccgataggacgggcggcggcgaaccggg

SEQ ID NO: 226757 - DNA, 652 bp, Homo sapiens
  chr1:18959254-18959906
  hyper
ttgggcagcgagacggcgccgggtccctgaattagacagaggcgaagagagcggctccgtgatcaagtgcgcgccggcagccacgcaggcgggagagcgcgcaaacccggggatttgcagtggcactctcctgtagcgaatgcaagtaaaacaggcggctgaggacgcgcggcggattagaacaatatttgcccaacatgacgcagaatactgaggagagccgagtgccggtcgctaaagaggctcttgaatataaagttgggcgctcgagagctcttgagcgctaatggcatatcccgccacggagaccgagtgactccgactttgcgacgcacgatttctgattaaatccgagagtggcttcagacaccgacttttacaaagagaggtggggggaccgggagagcgagggagggggcggtaggaacggcccagcagcggagcctcttctcgcctcctccctttcaattacagtcagctccctccactcccgcggctgtgaaatcgttctaatcttccagatctccgcagccgctgagtccccaaattggggggatcgaggccggattagtgcgctgggtgtccccccaatcttctgtgaggaaattgtgtagactttgcattaaggcaaccaggcgttctcccctcccca

SEQ ID NO: 226758 - DNA, 151 bp, Homo sapiens
  chr1:18960804-18960955
  hyper
ccgcttggccaaggccgggtcaatcagctgggaggggtcttcatcaatgggcgacccctgcctaaccacatccgccacaagatagtggagatggcccaccatggcatccggccctgtgtcatctcccgacagctgcgtgtctcccacggct

SEQ ID NO: 226759 - DNA, 1709 bp, Homo sapiens
  chr1:18962782-18964491
  hyper
ggaggaggatgaagcggacaagaaggaggacgacggcgaaaagaaggccaaacacagcatcgacggcatcctgggcgacaaaggtagggaacttccctgggctgcgaggccccagcccgggttttcccacgctccggtgtgcgggccagtggttcgctcccgccgccggagcaggcgaccagaactccagcggagaaactctcatgctgcggggcagctgggagccgctcaggctttgccgacagcgccccctcggtgcgcaccccggatgccggctagatgcgaagcccgcgccttctttgcgctatggaggccgggcacggacggcctgtgagtcccgggagagcccggctgcggggctgcgcgcctggtctaccccaatactgcggggagtgcgtcctcccgggctggcgttttggctgctactctcggcgtcgatcaattatttataggaaacttgggcaagggggcgggggacgggagggagggagagaggaaggaggagccggcccgcggctccctaaatgaatttgttaaccagacccccacacgctctctaaacggtcccttgaaaccccgcctgacagttgactgaccgctgcaatcaataaaaattagccagggccgccgcctgactcagccccgcgttgccagggcggactgggggacagagagtgccttcctctgtggcgtgcgccggcagggctgggagtggaggccaagttcccagatgcccagggtcggaggatcgcagtgggggagagacccaggctccacacaccctctccccattcttagcacggcttccgcgggcaggctggagtctgagtcctgcgccatgctttttctcaggatcagctaaggagggcgtttagttttcaagcgcccggaagcccgggaaaggggattgtgcttttgtttcttgacgggaggaagtttcgagagaaggaagggaaagtttttcctcattaccccctccccttcctcattgccctcataattcccctcctaagtctctttgagacttggtaagtgcacgttaaggggcgacagggagagaaacagaaatggaagacccagagtcacaaagactgacagttaaagaaaaggccccaaacacatacgcggagaggcggcaggctgagggaatcggaaagacagtggccatgggaacccgcagactgatggctttggaaaaagtggcgagtgccctggaacctgaaagcttgcaaaaagccagtgttgtttcagtctcccttcagaggtttctcccagcacccctctcctcacgacccaagcactcctagcccaggtctctctccagttctcagaagaccctcccaaccttgaagatgaacttcacagacaaagccggcttactaagacaactcccatctacgcccagcccccacaggcgtggtccgaggaggaaggatgggtggccgggcagccccgtgtgacagcggcctggagcgaagggaaggggcggccattgacagacagggcccctagtgatgccgcagtcccgcccgggacaaaagggcgagggaagaaagggagccagctgtgccgggcgccccgctgtgcccggcctgccgaggggccacgggtctgcggcgggaggcagccctgcactgccaagcggtccttggctaggccagtcggcccagagccctgggacacctgccgggggacccagtccttatttc

SEQ ID NO: 226760 - DNA, 138 bp, Homo sapiens
  chr1:18965006-18965144
  hyper
gcctggtctccagaaagtcccgcagtttttgcgtgacagtgggtgtgctgggtgcgctgattgtgctttgaatggctgtgtaagcgcaagcatctcttagtgtgactgtttacccacgggccttctgatctgaatgct

SEQ ID NO: 226761 - DNA, 384 bp, Homo sapiens
  chr1:18966651-18967035
  hyper
aggtgtggagtgggaaatgacggggaaggatcggaaaggaggggagagcccggagtgtcggttttagacacttgtaaaaggaggtgggaaacaatttaatttggcagcagcgatagctgctaatgcggttttcggtcgtttgctacactggaggaagctgttttgattgtgtgtacaaggacctgccaaatttaattaggctccgggggagcgagtgaataggggaaggggggcacggctcccctcagcccacaccattttttcggcttcacacctggaagggacattgtttacgggatcttcgaaaaccaggaaggggcgggggcggagagggacaggagccttggaagcgggggcgagggaggggacgaggatagtccattt

SEQ ID NO: 226762 - DNA, 62 bp, Homo sapiens
  chr1:18967250-18967312
  hyper
ccggctttaggcagcgctcggcggtggatatccagtgcgaccagagggagagagggaggggg

SEQ ID NO: 226763 - DNA, 180 bp, Homo sapiens
  chr1:18967672-18967852
  hyper
gaagagacagaaggagataaggttggagggggatgaatgagcataatctaatagaagacatttagaaaacaaactttaaacaagggagaacaggcgagcggagggcaattatccgccccagagagcgggggaagccgtcggaggtctgggaaggggtggaagggaggggactgggagctg

SEQ ID NO: 226764 - DNA, 350 bp, Homo sapiens
  chr1:18968092-18968442
  hyper
taaaagactagtgtgcacggcgcagcggttaaaggaattagatatttaccagtttgaaataagcctggctaagaagaagagagaagagagacattgaaaagacgaggctgggggaagacttcaaacgaattcatcatttggaatggtggaggggagatttaccagacagtattgggaagttatttagatattaataacacattttcctgaggcgcgaccacagcagccatctgcgctgctctcggagctatttggctgggtaaaatatgggcgtctcaaatgttgggaagagataacgcaatcaggctaaccctggtcctgagactgcatcgcagcgttaaacccggatt

SEQ ID NO: 226765 - DNA, 65 bp, Homo sapiens
  chr1:18969252-18969317
  hyper
cgccttcccaaatcgaatcaaggcagaacggtgacctaagggggaaacttcgccattagtagata

SEQ ID NO: 226766 - DNA, 1203 bp, Homo sapiens
  chr1:18969556-18970759
  hyper
ggtcgctacagcctcgggaggggtgaagggaagttgtgtgcgccccaagtccagctcaaaagaggccccgagggcattctagggcgccttgggcacgcgtgccaggcccccggtttggcagccgagctgagcgagggtggattgcgaggggcactggggccgccgcggagctctgcgtgtcggctgccagtgaattggccgatttccccagtctgagggtcagcgaacggacctttccatggcttggtcgccctggtcctggaggtgcgctgggcccgagctccggtggagaccaagggaggggtggggagaggcagcggagacagagagccacagaggaggagagagctagaaaattcagagtgagaaagtctgagcgcagcagaagagaatcttgcgcacagtttgaggacgctggaaaatgcggaggcgccgagggaggcgccgagcagcaggaagaaagacaaagagatgcagaatcaccgagagactggccctgggacaggcggatcaggagagccagcgggacctagagacagcccgcgggagagcacgggccgagagggcgagtgctcaaagccgggcagcggctaggggaagataggaggcgggcgagccgcggccgcccttttgatccttcgtggcttcgccttatcagaagcgctttcggtgacatccgcacaaaggcagttcatcatattacagcacgtcccggcggctcgctgcgatcctgccgcttaattagaggcgagcgagctgggccggcagggcgggagggaggccgaccccgaggcgggaggccgggttctgcgctccaacccggggcgctgggcaggggccagcccgcgtgcctggcggtgttgggacgtggagagagggagaggccgggaactgcattcagagcgttgctaaattaacaggccggcccgggcttcactgcccggagagtgaagctcgccgccttccaatttagccgccgccccttctaagttcttgggaagggatggcgctccggccactttcccctcttccaggctgcgaacgctgcggactggagggcgagtaatggggaggcaacccagggcgagctgaaggcttagtgcaactccgggtccaggtcgcacccaccagccccccgcggctgtgttccatcccctcctccgaccgccttgctctccatccgaacccaggtgtgccaggctg

SEQ ID NO: 226767 - DNA, 491 bp, Homo sapiens
  chr1:18971626-18972117
  hyper
tgtgtgtgcgcgcgcgcgcgtgcgtgcgcacgacagcagagtgtgtttgcggggctggggctgaatttggcagccagcccccaagctgacctctggagtggcccgcgtcggcgggctgggccttgcttcgccacgggttcgagggagaggcggagggaggagcggctgggctgcggagcctcttgccttcactgcactctttgtctgacaccacgaaaagaccgaagatcaaagaggcccccgagcgggacagaaaaaggggtggggcggcgggcgcgataagtagctcggaaaactccaccctaaacttttctgggtcctttccatgggacccagaccctacagaacctcacccaagtgggcgagtgggcggccggccgtgggttctctacagtcccaagcctccgcgagggcgacaggtggagagggacagctacggctgcgggctccaattcaggccgaggtctttcggtgactggagaaggtggaga

SEQ ID NO: 226768 - DNA, 31 bp, Homo sapiens; identical to SEQ ID NO: 197359
  chr1:18972422-18972453
  hyper

SEQ ID NO: 226769 - DNA, 496 bp, Homo sapiens
  chr1:18972901-18973397
  hyper
ggtcttttccgtctcggcggtacctgagcctcagtttccctatctgattagtgaggataagagccgctcctggcctccccaggcagcaggaaattagggccgggaaagcggtttggaaactggtcagcgggtgcaggcgggcagagggtgggaggcgtcaggagttcgtcctcctccccggggcgccccctccccgccgccctctcggcacagtccccgctcgcgcctcaatggccactttagaaatacaaacaactttagaaataaagtaaccaaacccccgaaagcggctttgaagaggcgaatgcctggtggcgctttactatggtgtgggccgaggccccggcctaatcccgctttcatttccaccgacggccgcgggggaagcgctcccggcctcccggcccctcaggaggctgattaggccacaaagagcccccattatcccgagaagaaaaccggggggcggcgcggggcggcgcggcgcggggggagc

SEQ ID NO: 226770 - DNA, 86 bp, Homo sapiens
  chr1:18978535-18978621
  hyper
cccatcaaggctcaccggccccctggcaggaggcagcaagagaatcccgggcagcagcggaaaggctgggccggctgggcccacag

SEQ ID NO: 226771 - DNA, 488 bp, Homo sapiens
  chr1:19043069-19043557
  hyper
cgccccatttcccttcgccccctgtgccaccacccccttgctcaccgtctccctgatcgcgtcataaccctgagaatacctccagcctgggtcctctctccacccactccattctctcaaaccctcatttccctctttgcctgcctcctcccatagctggcctcgcctctacccattctcttccccctaatctctctcattctcctctcctctctcattccgcacccaacaaacacctcttccccctccatcttcagcccctgcgcgccccccttgcccttgccctctcccccacccccgtgtcccctttccgaattcctccgctgctggtgggctccgaggcagggaccgggcgcgggctcccgaggccgggcggacccaagtccagggcgggggttggggcggcggccggagcggggatcgggtctggggggatccgcgcggccgcccctccccgcgctccgccgccgccgccgtcgccgccgcgc

SEQ ID NO: 226772 - DNA, 223 bp, Homo sapiens
  chr1:19229114-19229337
  hyper
aaacggatcaccccggctgtcctccgagctcgggatcagccaaagtcccactatatttagcttcggctaataaaaaatatttctagtgccataacgggggcattacacaacacaggacaagggaacccgaaagcgaagtcctgaaatgcatgcgttttcccctcctctctttatggtatgacccgggagagagggcgtgaactctgtcgaccagtcagagtga

SEQ ID NO: 226773 - DNA, 224 bp, Homo sapiens
  chr1:19229565-19229789
  hyper
cgctaccagactcctcgaccccgcagggccacagcgcggccagccccctgcttcttcccgggggctgcggcccctggaatgagcctgccttccagcttcttggccaggacccagccgctctccacctaccctccaggcgcggggccggccagcttcttagcttccttgcagattacgatcaatgcaagataaaacctgagctggccaacgcttagcttttcatt

SEQ ID NO: 226774 - DNA, 307 bp, Homo sapiens
  chr1:19283562-19283869
  hyper
ctcctctcccacgtcgcctgccgagagggctccgtttctctgtcctctctgcccgcaatgcccctggccccaaattccttcggatgtgcgcgaccgcggctggaagggctgggggaccacagtatccgaaggtgcatcggcaccccacccccactctagcctggggaggcccagatcgacctttcggggataagagggcgcccgtgccccacgctgcggacccgggggtgggctcctcgaatgctagctgcgggccttgtcctctcgagatcggcccgggcacagctaagcccgctggttcccccgc

SEQ ID NO: 226775 - DNA, 114 bp, Homo sapiens
  chr1:19536946-19537060
  hyper
gaaggtagcgcagcggggaaaggcgggagagcgttaacttctgagcctgcgcggtgggagttgctcaagcaggtggtagcgacttggcttccgggcagcgggtaaaggtgagtc

SEQ ID NO: 226776 - DNA, 125 bp, Homo sapiens
  chr1:19577871-19577996
  hyper
gccacttatctctcgaatatgttccacacgtacgcaccaatcaaacttgcccacttggtcttcgtagaccgcggccgcaggaatcagcagcgtagcccaaagccagaaacgagaagcccactcag

SEQ ID NO: 226777 - DNA, 222 bp, Homo sapiens
  chr1:19578598-19578820
  hyper
aggccaactgggtcgggaggcagctcctgaacaccgcccccggctatgcctgctgccgtttcggcccacttttcccaacttcggccctttctcatcttcctgcgctcccgccaccctggctgcctttcccttctttcagcacaggtttgttcccgtgtctggcgttgtgtgtctgcggttgtttctgcctggcatgcttacatcttcgtatggtttgcgcct

SEQ ID NO: 226778 - DNA, 101 bp, Homo sapiens
  chr1:19600653-19600754
  hyper
tttagggactggctcgggccgcgcccaccggtggtggagcggagggcgcggccaaaggtgcccaacgccgcccacgcgctggactccgctctcaaccacga

SEQ ID NO: 226779 - DNA, 241 bp, Homo sapiens
  chr1:19812417-19812658
  hyper
gaccggccctccgcgccccaccccgtgcacgcgctcactcctgcggcgcacccggaactgccgccgagcgcggaccggcccggcccagcccaacccagcccaacccagcactgggggagcgcgccgggagcggggcaggagcccagcgctgccgctcgctacggcaggatctggagcgccgcgctgcacctgagcccgggcacgaattgaggagcctcgggctgacgccatttattcagca

SEQ ID NO: 226780 - DNA, 411 bp, Homo sapiens
  chr1:19923094-19923505
  hyper
ttagtggttcaggcgggaattccaatgcaagaaaccagtgaacgaatgagagagtgagtagggaaagtgaaggtgagtacgttaatgaatgaataaatcaagtctgtaccctctcttgcccgggggatttccagggccaatgtcgcactttggtgaggaggaaaggcctggtcacggcttggggtgacgcctaggaaactgtcagcctcgcaaacccataggcgcagccccaaggtcagggtcacctcgagcctccagacaactcgtcaccttgacgaccaactgaaaaaaccggaagggatggaagcagcggatcatctcgcgatatctggagcgtctgcgcctgccttcctgacctgggacttgtttccagctctcgcgagactttcaggggtcggagcgcgggggccg

SEQ ID NO: 226781 - DNA, 32 bp, Homo sapiens
  chr1:19970320-19970352
  hyper
tggtgccgggacgcggcgggctggggcgcccc

SEQ ID NO: 226782 - DNA, 167 bp, Homo sapiens; identical to SEQ ID NO: 197363
  chr1:20002971-20003138
  hyper

SEQ ID NO: 226783 - DNA, 634 bp, Homo sapiens
  chr1:20512380-20513014
  hyper
ggagagaaggaggccgcgggtccctgtcgcctccaggccaggcaatccactccaggctcgcaatccaccgacctggagttcacggcctccgccctcctggcccagcggcccccacccgaccccacccgaccccacccgacccaggccggttccggtcacgccggaagcacgtggccccccaccctgcggcgttgcccgggagaccagggttgtttaccagcaggacagagcccgggcgcaggcggcggatggagcggaacggctaggtgagagcggctgcccgatcccgcggcctgcccttggcctccgccaggcctggaaggggccgggggaggccagtccccgagaccccagcacatcacccgggagggcctccccagacccagcccgggggacgcaaaccccgggagacaggcgaggagcctggagaaaagtctgctcccgaggcaaagcaagcctggccagagctcacctttaccaaaatagggtgactcccgggctctgcagaaaccgagggacctatgcaaccgctgggccatgccctccaggctgggatgtagcgacggggacacagacccagggagagaaaaggatgtcccagtctccggcagggcagagacgagaaccagagggc

SEQ ID NO: 226784 - DNA, 350 bp, Homo sapiens
  chr1:20618135-20618485
  hyper
gctctgcagggtgcccaccccggcagccgggctcatgcctgctgcccttcggatgccccgcagcttgtgaccatccccagagccaccggccaagggcacaccctttcctgagccccgtgtctcctgcaaggtaagaggggaaggagaaaaggtcctcgggcagaaggaggcggctagtggagaggaactcagcagcgggtgcagtgtggcgcctgctaacgcatcaagcctccgctggaagttccaccataacgtctgcggcagccccaacagttccaccccatgctcccgccgccggcaccacagcagcagaaggaggcctgtggggcgggggccagaacctttccctc

SEQ ID NO: 226785 - DNA, 225 bp, Homo sapiens
  chr1:20669765-20669990
  hyper
ccggagcggggcggcgcgcaggatgccgacctatggagcgagaccttccaccacctggcggcccgcgccatcatccgcgacttcgagcagctggcggagcgcgagggcgagatcgagcagggtgagcgccacggaactgcgcccctcccgcggacggcctccggaggacagccccgctccacagccgctcccccttccccacccgcccccggtgatcctctcagc

SEQ ID NO: 226786 - DNA, 231 bp, Homo sapiens
  chr1:20692798-20693029
  hyper
cactagacccaagcgccgcccgtcggtccccactcccgacgggcctcgcattcctggtcctccaccttctgccaagaccctgcccacgcttcccgcaccagccttaggtcccgaggtccccaactttggcgaagatcccgcctgggctccccgcatcttcccttggtcccaaggtccccaacttgtcgccaagaccccgcctgggctcccagcaccgcccctcgcgctcgg

SEQ ID NO: 226787 - DNA, 1988 bp, Homo sapiens
  chr1:20810324-20812312
  hyper
cagggctcactgcgcggtgaaacagctccatcctccgtccctgccaggggtcccttccctgctttcctctgaaccacccaccaccctctatcctccagcctgcgtcccagctccattctgagaaaaggaaacagagggcgccaacccagccgctcctgctgcagccagggcgcgcactggcccgcgtcctccccgcaccaggcgcactaatttagacagaaatgtctggagctgggataggagagggagccaaagtctttgggtctcgggaccccaggtaagtcccgagcgcagctccggtgggcaaggctaggtgcggagatgagcggaaccaggaggggacgccaaaaccggttcccacgacgcgcagcgggtgggggttagggcctggcctgggcgggcgccccctcctgcgcgccctctcccagccgctggccgactgactcggccgccccgcgctccccgctgccgcagaggtcagagcctcccttcgctgcctgccagggacacatgccgtaacctcggcctctcttaccgtctcgacttagcctcgcctttctcagtccctccatcgtccctcggcgcgacggccggcagccgatcgaggtctctgtctctccctgtctaaggtgtcggtcgcccttattgtttcggcggcttctgcgtcctccccaaacgcgcgtcctcggctctgtctctcccgcttcagctcccctctcgggagctttgtctcggtctctgccaccctcggtctcccgcgtaccccctcccctccatccctgcgtctcagtctctctctgcagccgtcggtccccctcattgtccccgcgtctctggagctcctctcggagcctctctgcgtctccgcctctctggggcttttccagctctcgcgcggatcgcccaggcctggcaaaccccctcccaagccaagtaacaatgaaaagcccgtgcgacccgaacaccctagccttccccgcaggaatgggatcctccccacgcaggtccccacgccgtcccctgggggtccctgggaccccctccccacagggttatggagcgagtgcagctgtgactacactgcgcaaaaggcgggggtggggggcgcaaatcaaaaagcaaactttgccgcgcgggtggagacccccagctgctgctagaagccgccacgcccccagggtgacccagccggggatccggcttagggggacgcgttcctgcgacccgcttcagccggacccgcagtgcgggatcccccaattctgcaagaagggattccgtcaggtctgaacgggctccagcgggtgggagacctccgcaacccttgttcaggccgcggcgcgggaaaaagggggtgtcagacaagggggccgcgaactcaccccgcttgctccggccgatctggcccagcttgggcggccgcttgttctgcccggcgccgaagaagttgttggtgtcctgcaggcggcaggagaagatctggcccacgtcgccgccgtcgccgtaggggctcagcttctcgtcgccgtagggcagcacctccgacatggtcgcgtccgggggctccgccgcggcgcctcctccgcccgcgtccccgcccgcggcggacagggtcagcggcgctggggccgggggcggccggccggggacggcccgcgggctgctgcggcggtggcgccggcgagaggccgggggacgccgctagggcaagagcgcggcactcgcgcgagcggcccggagagcgcccgcggctgcgctgcgctgcgctccggctccgcgcgcgagtggctgctgctccgccagaggcgagcaggactcacatcctcggcgcgctggggctctgggcgggggccgggccgggcggggccgcgagccgggagggaggagacgtccctgcgagcccggagggcgcgggaccgaggagggcgcaccccgggagccgggcgggccggtcctgcggcgagtgcgggcggcggcgccggttcggg

SEQ ID NO: 226788 - DNA, 393 bp, Homo sapiens
  chr1:20813050-20813443
  hyper
gcggggcaaagatcggagggctccagggcgacccgcggacatagcctcccccgccatctgcaaaccggggagcccttcctccccaccacacttgctccccaattcagaccctgagggcccagccactggggcctcacactctcctcccgccccggctcagtccgacctggaaggcctcactcccccacgcccccgcccaactgcgctggactccggctcccgcagggcctccaggagggggagggggagagggaaggggcagccccgcctcccgcaggagaagggagcgcctcattacgccgggctcgcccgggatgcctggctcccggcgtccgctgcctccgctggggacgtcccgggtctgccgccctctgccctcgggggtctcccttc

SEQ ID NO: 226789 - DNA, 64 bp, Homo sapiens
  chr1:20878727-20878791
  hyper
caggaatcgtggggcgcgggggttcccgaatgcgccaaggggagcttggagaccagtagcgagg

SEQ ID NO: 226790 - DNA, 179 bp, Homo sapiens
  chr1:20879271-20879450
  hyper
gcccggctgggcaccgggcatctgcgaagctagccctgcctggcactgggcatctccaggcaacgactgtccccggccctgcccagcttctcgcgactccagggcggtggacttctgcgcgccttccctcccccggtctcccgacaggacgccggtgagctccctgcgcccccagcccc

SEQ ID NO: 226791 - DNA, 244 bp, Homo sapiens
  chr1:20880470-20880714
  hyper
gactcgcagccccaggcccgacccgccagactcacagcctccaaccccggccctgcccgcttcggctgccccggcccccggcccgtgtctcccccgtggtctccgtgttgtccgccccgccgcctcattttggctcagggtgatgcctgatacgcccttggttattggggggtgttcctctctccccacacccggagtttcccgggcctgccattgtggacccgccccctatgctttacaccta

SEQ ID NO: 226792 - DNA, 540 bp, Homo sapiens
  chr1:20915863-20916403
  hyper
ggcagtggcaagagcgcggctctgtcccttcttcccccagtctccgctggaatgttcctaccctgccgactgccccagaccgcgctcaaatgtggcttaaatccagggtctttcaatgcttagaggactgggatgaggaaggaagttggatgggaggcaggaaggggaggccataaatcaaaaacatcaacagtcctggggtgcaggcagggagagcgttcgtgctttcccagcctcggatatgtctggcaccttactgaggcttccacaacactaagtccacacctcctgcccactgacctaagtgttaatgctcgtctttagatgaaactacggaggtctcgagaggtgacatgacttgcccaaggtcacacggggcgctggtggtgaaaccctgggctggaggttccccaaagccctgctctcttccttccacccactgtgctcagtgctggccagggtggtgacgtgtttgtcgggggtggtcggtggagaatcttggaggagaaaagccagctgggctttcggagtccagcagtg

SEQ ID NO: 226793 - DNA, 408 bp, Homo sapiens; identical to SEQ ID NO: 197377
  chr1:20987844-20988252
  hyper

SEQ ID NO: 226794 - DNA, 205 bp, Homo sapiens
  chr1:21044017-21044222
  hyper
tccacgtggtaggcgccgtcgaaggtgaactgcttgggcggctcgtcggcggcgcccgggttctggatgcagcactgggcgcgcgcgcagtccacagtcaccacgggctggcagcgcagctctcgctcccgctggttcatgggacggcagcgcacgacaaccttcaccgcctcggaggccatggcgccgcgcccaggaccaacgg

SEQ ID NO: 226795 - DNA, 179 bp, Homo sapiens
  chr1:21044550-21044729
  hyper
ttgctgggcaacgcccgtggcgtcacaagagcggccccgggaacgccccgcctggcccgcgagcttcgcccgagtgatccccgcagccacgcgcggccgcttgcgggaagcgccagccctggctgggctcctttcgcgtccgctgccttctcgaatccgcacagtcccagttcagagat

SEQ ID NO: 226796 - DNA, 77 bp, Homo sapiens
  chr1:21058207-21058284
  hyper
gaggcccctgaggggcgggcgcgggggtgcgaagcgctccagagtgggctgccggtcccgctgcgctacctcgctcg

SEQ ID NO: 226797 - DNA, 825 bp, Homo sapiens
  chr1:21058524-21059349
  hyper
cggcccgcgacccccgcgtctcccgccgccgcagccccgcgcctgggtgcccgcttcccgccgcccccgaccccggtccccgcgcccccacacgtggccgcgggaaccgacccccggatcacctggcggcggcgacccgcctcactcaccaatcggcgcccgcggagccgctccgctcggccgcaccacccaatcagcggccgcgaggggccctggcactgcccacgcccggcgctccgcctggaagggcgggaggggctcgcccggagctcagaaggcacctcctcccgggctgggggcgctgaatcccccgcgcctcactcacgggtccctcctcctggagggcctctgcccctcccctctctggctggctcctccgcgtcatccgagccgcggctaccgcaccgcctcctccgggaagccttccacgaccaccactcacgcttcattctctgcagagcccttgtgactccgttgctcgcctgtcatccctctcctcttactcgaggacaagtgacactggaccggagtgtctccgttcccagtgtgaaggatcgagcctggctcggaggaggcgctcagggtggttcgggcccggcccttgtgagtggagggtcgttgcgcatcctcctcctcactttcttcctgccgggacgttctcagccgggaactgacagatcctgcttagcccggggcccagcactgagaaatctgggaaggaacgttgctcaccgcacatgggccgtggccccatccttcgggccctttaggtggggaatcgggctagcagctccagccacggcactgggacggggagcgctatcg

SEQ ID NO: 226798 - DNA, 265 bp, Homo sapiens
  chr1:21503350-21503615
  hyper
atggcgctgtggccgcctccagcagtccggcaggacggctgctcggaaaacttcggactttttcggaatggctcgggaaaccgagggtgggaagcctcttcggctctttccggagactgctaggggtcgggattcttcggagacgctcgggtgcgtcctcggccgccgttcgggagggctcaggggctaactcgcttcctcggcaaagatcggcgagggaggcttcgctggcttacagcggcgcgggtgcggggcggagggaaag

SEQ ID NO: 226799 - DNA, 94 bp, Homo sapiens
  chr1:21672239-21672333
  hyper
ttgccgagaccggcgttgggagctagcagaaccgggaagaggctcgattgtgtccggtggggccgccgggagcctcggcgacctttgtctcctg

SEQ ID NO: 226800 - DNA, 804 bp, Homo sapiens
  chr1:21835553-21836357
  hyper
aaggaagatgccgacggtaaagacaaaacaggagacgcgcgcaaggagcaggtcagagcccaggctcgctgagagaggaagggctgggctggggcagcccggaggcagagagaccgagagtgcggggcgggcgagggacgccagggccgcgtcaccccagcccgttcctagctccgctcccggcagggggcgccctggcctcgtggcacgaccggcccgcggggcgcggggctcgggccgggggcggggccggggccgggctggggaggggttggggccgggggcgggggagggggcgggctgcccgggcctcactcgggccccgcggccgcctttataaggcggcgggggtggtggcccgggccgcgttgcgctcccgccactccgcgcccgctatcctggctccgtgctcccacgcgcttgtgcctggacggaccctcgccagtgctctgcgcaggtaaggattcgacgctgccccgcgccctggttccccagggccccagcggacgtggtccatccccttctgcatcctccgctggccccgtggttgaactttaatggcagggccggggtctccagcgccacgccgcccacagcagcccattcgggacgccctgcaattggtcctgcccctgtcctcccgcgcatcccaagctcccggcgcgcgctctgggcgggacaggagattggacgtggcgcccgcggagccggcgaactcaggggaccgcgctcgggaccgccctgcagtcccagggtctcctacctcccgagccgctgcctgggaccctgcgctctgtctgggca

SEQ ID NO: 226801 - DNA, 90 bp, Homo sapiens
  chr1:21996301-21996391
  hyper
ctggcagaggccacgcggttgaccctcgccagcccattcgcggctcttggactttgtctctggactgggcagctcgcccccgccccagcc

SEQ ID NO: 226802 - DNA, 491 bp, Homo sapiens
  chr1:22140693-22141184
  hyper
agatttgaattaaattaaattaaatcatttaatccttacaatcattctgagattgattaatcatccccattttaccgatgaggaaaatgaggctcagagagggcgagtaactcgcttgggatcacacagcgggcaggggacagagtagagttcggggtcgcgccgcgcggctccagtttccgtgccttccgctgcagccgacctggcggaactgtgcgggcagacgtggcagggggacgggctgctgctgcgctcgcacgccgcatcgcgcaggttctacttcgtggctccggacaccgactgcgggctctgggtgcaggcggcagcccccggcgaccggatccgcttccagttccgcttcttcctggtctacagcctgacccccgcgcccccggcgctcaacacctcctccccggccccggccgacccgtgcgcccccggctcctacctgcagttctacgagggcccgccgggggcgccccggcccctgg

SEQ ID NO: 226803 - DNA, 50 bp, Homo sapiens; identical to SEQ ID NO: 197380
  chr1:22263555-22263605
  hyper

SEQ ID NO: 226804 - DNA, 101 bp, Homo sapiens
  chr1:22350998-22351099
  hyper
ttcagggttaagatcggggctgcagtggttagcatctctgcttcctctagccggctgtgtcattgaacctgtgtgatcagacgcaaaccagatcagtatga

SEQ ID NO: 226805 - DNA, 220 bp, Homo sapiens
  chr1:22351399-22351619
  hyper
aaagcttcagttcttaaccatcaggcgacagtgcgtagtctggtagcaactggaaaagtcctgctgagatttagcctcccatacacacagagtcccaccccggacaggctgtatcaaccccccacggccatatgcccactgctgtttgcgtacaatgaggcgggacctatagactgtatccactgactcatctggagtgattccgcggggcgccaataca

SEQ ID NO: 226806 - DNA, 45 bp, Homo sapiens
  chr1:22469043-22469088
  hyper
cgctcgcacccctggcgccctcgagagccccgagccgcctaccgg

SEQ ID NO: 226807 - DNA, 168 bp, Homo sapiens
  chr1:22746912-22747080
  hyper
ttagtaagccgatacgagcactgatagagagcgagagaaaaacacagatgggtcggaaaaggaaagctgaacaatggctgggaaatggggaaggaagctctggggggtccagtaaagggaccggcagtccaggcttctctgggcccctcctcacgtcccagcctttgc

SEQ ID NO: 226808 - DNA, 88 bp, Homo sapiens
  chr1:22889707-22889795
  hyper
ctggtcctggtgtcgccgggacgtcccgatggtggcttcgcgcactggggccctgagccctgagtccaagtgcgcagcgcggggcgcg

SEQ ID NO: 226809 - DNA, 234 bp, Homo sapiens
  chr1:23036966-23037200
  hyper
cagccgcgccagacgctctccggctttgcagcattcaataaaaattgagaaacatttgggctgaaatcgctgctttatctggaggagccacagcgccgggagagaccactgctgcgcggggggagcccggggtctcagtggcccgggcacgcggggtcgccgcgctccagcgcccgcgctgcccccgggtgaccctacgggcgcggtgtggggacccgggctcgcggcggcgcg

SEQ ID NO: 226810 - DNA, 78 bp, Homo sapiens
  chr1:23038280-23038358
  hyper
ggaccagatgctcttgccatgtgttggccttggccagggtcgcgggccctctccccgtggcctcgtgtattggtacca

SEQ ID NO: 226811 - DNA, 135 bp, Homo sapiens; identical to SEQ ID NO: 197383
  chr1:23345695-23345830
  hyper

SEQ ID NO: 226812 - DNA, 76 bp, Homo sapiens
  chr1:23346189-23346265
  hyper
ggtctgaggtggccgcgcagcccgcgggcctgtcgggcccagccgaggtcgggccgggggcggtgggggagcgcac

SEQ ID NO: 226813 - DNA, 167 bp, Homo sapiens; identical to SEQ ID NO: 197385
  chr1:23495361-23495528
  hyper

SEQ ID NO: 226814 - DNA, 104 bp, Homo sapiens
  chr1:23543788-23543892
  hyper
gcccggcgggcaggtgcgcacacccggcgtacccgcccgatccacttcctcgcgcggcgtctccccgtcgcggccgccttgtctccgccgcgacccccgccgaa

SEQ ID NO: 226815 - DNA, 145 bp, Homo sapiens
  chr1:23670873-23671018
  hyper
ggcaatcgcttggcgaggcggcctgacaggcagctcagacgaccagtagtatccaggcaaaacggaccacgccggacgactcgagagccaatcgatgaagctgccggctgaaccaatgagggtgctcagcgcccctggctggggc

SEQ ID NO: 226816 - DNA, 257 bp, Homo sapiens
  chr1:23694766-23695023
  hyper
gctgggtccctcccgcgccgggggttagaccgctgctgtctcagggaggaggtgctcagctcagcccagggaacgcctccgctctgccatctcgaggccgggtcctttccggcagctgcctcagccaatcagcgagcgaagttcgtgaaccactctgccaatcagaggcggaacactatgcccgcctcccacagcctggccaagagcctctagtgcgcctgtgcctgcccccatggcctgccgggagttggagttcc

SEQ ID NO: 226817 - DNA, 212 bp, Homo sapiens
  chr1:23695333-23695545
  hyper
gagactcggaggccgcgctggaactttgagccccgcccacgcactacatctcccaacagcgcctgcggcggcgcggctctgtacgcaatacaactcccgagaggccccgcgccgccccgcgccggggcgactcgggagtgcggtcggcagtagagcctggcggtgtcttggcttcggcgctttaaccctgtaggggcgtgcgactgcgtcct

SEQ ID NO: 226818 - DNA, 233 bp, Homo sapiens
  chr1:23696195-23696428
  hyper
gaacgggaggactcgcagctctccctttccccagccaggatgagggaattagacaatggaagtcgagcactggggaaagcaggcattctgcgtggggaagagctcccagctcgctgtagccttggagagggaagtgatggaaaaagaatatagcagcttattagggactcccaccctcttcaagttataaatatccccagaaccttggctacgtgcccggaagcctgttgtct

SEQ ID NO: 226819 - DNA, 257 bp, Homo sapiens
  chr1:23748954-23749211
  hyper
gagacttcagcaaccggcagtaaaccccgggcctgagctgcaacgtggaggatccgtcttattacaggaagtatgtcctcctctgcctaaccactgctgggcgggtccactttcactcccagagcaggccccacctttctcggccagacgcccagagctccatgcccacccagacactgccgagagcccaggcgcagacgtggctgtaaactggctccatgctgcagggaccctgcggccagacttgcatcttttca

SEQ ID NO: 226820 - DNA, 62 bp, Homo sapiens
  chr1:23857274-23857336
  hyper
ccttgcagcatagcgagtaaggcgccccctacccaaaagggcttggcgcgcccgcggacacc

SEQ ID NO: 226821 - DNA, 92 bp, Homo sapiens
  chr1:23857958-23858050
  hyper
agttagcagccggcgagacggagacagagggtggttccgggattcacagtgcagaggcggccagagcagtgcacagcgccccgagaaatggg

SEQ ID NO: 226822 - DNA, 718 bp, Homo sapiens
  chr1:23884855-23885573
  hyper
gcaggagaggttcccggggtcccaggcagaacgggcgccagcacctgcgttctgggcgggggaggaaagaagaccaaggagcagtcagtttccgccgagcgtgccgaggcgggggccgtccgcagactggccggcgccagggaggaaacttggtctgtacctccagctgataactccgcgccccacgctgcccccacccagttggcgccaaagaccacaggcggagcttgcgctacccctcctacttggaattgacactagctgggagggggctgccgaagacagctccctatacaacatggaacagaaagacttgtatttagtcggacccatgtctactttgccagaccctcggccactgcgggagggcagggcccaggcgcatttaaggcttaaatgcacatcacatggaaactgactctgccattcatttgatgcaaccatgggcaagtcacttgtccctctctggcctcagtttccctaaaccgagtgagtggcaatttttcaaaacgtctgccaactccaggacttgccgtttaaacctccctctccaagagaggagatactcacctggaggtgtcaggacacggccgagtcagtggcaaaagctccttttgtcgttggagatgacaagttccggagtgagctcggctgtctgattagaggaaaagagggaagagttacgcgaggcaatcgggagctccgagggtcccgcagc

SEQ ID NO: 226823 - DNA, 70 bp, Homo sapiens
  chr1:23889004-23889074
  hyper
cctcgggcagtcaccggccggcgactgcctcccccaccaatgagcgccggacacccgagaaaggggcggg

SEQ ID NO: 226824 - DNA, 82 bp, Homo sapiens
  chr1:24018073-24018155
  hyper
ggacgtgctgattcgggagctttcaaaaactatttttggaaaacccagatcccggtcttcagccagcgtcgcctgcagtggc

SEQ ID NO: 226825 - DNA, 203 bp, Homo sapiens
  chr1:24069635-24069838
  hyper
ggtggcctcattccgtcttgaagtagaccctggagaggtcttccaggcttgggctcagcacgcgagcacagggagcgggggtgccggcggcggaggcgcgtacggcccgagcagcccccagcccccagcgcgcacacttgggccaggggcgcgaggagtgcgcggccgccgggtgggcgctggggagcgggccctgggggcgg

SEQ ID NO: 226826 - DNA, 95 bp, Homo sapiens
  chr1:24117384-24117479
  hyper
atgcctctccttccggtcggccctcctccaggaggcgcatgggtggtggtagcaagtgggagtcttgggtgccctgtctcgaatctacaaggtgg

SEQ ID NO: 226827 - DNA, 275 bp, Homo sapiens
  chr1:24126329-24126604
  hyper
ggacttggccaggtgcgcacctccaccctgaacaaactctgcgggtagtacggggaggaagccccagacactgaggcctttcattcccagcgaccgggcccgctgccgccttcctccacgctgcctctatccccttctgggctcacgcagctccaacccacttgaccaagagccctctgcgtgccaggctccgtaccaggcacttttgcatgattttcctgaattcccccagcatctcggtgagacaggtgttatcactggcactttacagatac

SEQ ID NO: 226828 - DNA, 31 bp, Homo sapiens
  chr1:24127246-24127277
  hyper
cctacgcccgagccgcgggccctttaagtgc

SEQ ID NO: 226829 - DNA, 238 bp, Homo sapiens
  chr1:24194293-24194531
  hyper
accggcagctgcgcgccccagctggccgcccagccccacctcctgtttgccgcccgagccgggaaggggcgccgctccccgggaccacactcacttggcgcccgcggcctggaagaggtcggcccactcctccgggtggaagaagcgcgcagtgaactgcggtccgaagtcggcgtagctgaagccgggcgggtagttgtcgcgcatgaagcgctggtactgcggccgcccctcgccc

SEQ ID NO: 226830 - DNA, 206 bp, Homo sapiens
  chr1:24477069-24477275
  hyper
ggttccctgagctcggttcgggtaagaccgcgcccagccgccctgacataccaccaccgtccaggaggtggcagcagacaggttcggagaagctcaagggcggcgacccagcagtaggaggaggaggagggcgggcgggtcacctggagaggacgtccttccctgtttcctggaaaggaccagatacccgaagctggccacaagcg

SEQ ID NO: 226831 - DNA, 228 bp, Homo sapiens
  chr1:24513459-24513687
  hyper
aggaaactggattcgtttcctgcgggagaggaatatcaaagacccggttctgttcagtcctgggaagaagcaaactgggggcgcgtaggcagggccgattcgcacccggctcgggtggctgcggaccccgtgcctgtcccaggagctccgggtccgagggtaggcgcggcccggcccggggagccctcttccccctccctcccgcggccccgcgcccttacctggagc

SEQ ID NO: 226832 - DNA, 827 bp, Homo sapiens
  chr1:24648324-24649151
  hyper
cgccgggcctttcatgtggtcgcagcgctctgggtgcctggagcccgcagccctgggcagccccgggctaccgcagggcgcaagggatcctgggctgcggccgagggcgccggaagtcgccgccgaccgcctgggtctcgcaggaaaacagccggcgcccgcgagctgcccagcgtcgggttttcctgaaggtgcgtcggggcccccggggagctggagccgcaggcgacctccccggtgacctgttgttcccctctggagggccggccggcgctccaggcaggccccgttgacagcccaggaagggagagtttcgccgcaaaggggcttggcacacagtaggtctaaggcaccgaggcaggagcgtcccccgcggcctcgctccctgctctctgggccccaccgctgccgcctggagtctcccctcagcctcgcagagacgcgactcggttgggggaaggggactagaaccgtcgcagtcctgaccgcggccgccgccgccgttctatctgatctccaggagcgccggctccagactgcctggagcgctgaaagagttaatcaggaacgcctccccgctgtggttttgtggtcgaaaccatgattgccaggagcaaatttttgtcgtgcacgaggtgtgttattaaaagtcggagctacgctgctgctgaatgaaaagttaaaagccctctttgagttcgggctgtaaaactggcggactgggccgagaggcttgagccaaccctaacggcggcggcccgggcggcgcgggggtcctgcggctccgccagctgctgggagcgggcaggctgcgcagtcccagcagt

SEQ ID NO: 226833 - DNA, 58 bp, Homo sapiens
  chr1:24739844-24739902
  hyper
ctcccaacttttgcgcactcgcggagcctgagccagaagggtcggacgcccacgcccc

SEQ ID NO: 226834 - DNA, 260 bp, Homo sapiens
  chr1:24742004-24742264
  hyper
ctctctgggacagcgggagagggggcaggggagtcgccgcaccattcttcctgtggccgctagggggtccccgctccaggtgagcgccaagctctagccccaggtcgctcccttatgcttcaagcaagctttgcagcgcagccaattgccaggggctgtcccgcctactccccgtcctcgcagccacttgcctgcgcgaaatgcctgccaacttctgactggcaggcagtctggcaaatcaaatcgcgacctttgaaagc

SEQ ID NO: 226835 - DNA, 824 bp, Homo sapiens
  chr1:24882101-24882925
  hyper
tacagctggaatctcgacagcctggggaggaaggagcctttgatcctacagcggcaagagttcttgacacttgccggctgccaagcctgtttcctcccggtctaacgttctgtggttgtctgaatctccagctgcccctcaaaaccttcaatcagattagcgccgtgctcctttaaagaccctactcaaagtgcctggagctcacctgggtgtgtttgtgaggccctttccctctctttaccccgcggaggagtccgacctggaagcctcctgctggacttctctactggactgagtgcccgggagtgccagagccagtcccaaaaaggacccaggagcggggacaccacggggaggcgccgccactccagtgtgcgggaccctggcacccccggcgcgttctccggcctccccaggatcacctgcacggggcggggccgggggcgggacgccccgggcgggggcgggatcccagggtggcagcgccgggcggcggcggggaccctggctgggagcgcggcggtgccggcgggaggccgagcggggctcgacagagcaggtaggaggcgcctggtcgccggggttgcccggggctgcggggagcgaggagcggtccggcccaggtgcggtggcttcctgtccacctgccggccgcgctgggcgaaggagggcccgggggtggggacgaggggtccccagtctcacccccacatctgttggaggaagtgcctggggtctgcgcgggagggcgttggtccggggtggtgggagggaggctgatcatctccagtgggtcttggagacgaggtcgtttccttgtcccc

SEQ ID NO: 226836 - DNA, 94 bp, Homo sapiens
  chr1:24969452-24969546
  hyper
gaaggatgggtcacgtcacattgcgcgaacaaggatggtcacgcgccacaaaaggacttgcagggcggggcgactcgacggccttcccttttgc

SEQ ID NO: 226837 - DNA, 172 bp, Homo sapiens
  chr1:24969956-24970128
  hyper
ctcctagagccggcgcaccccccccccccccgtgcgctgcggcggagaccggtgcgcccctgcgcagtctcctcctccggaatggtcccccctacgcggcggcgacggtggccggaaaatggcggcgggaatgggccgggatggtacctcgctgcccgcctgcctggcgggg

SEQ ID NO: 226838 - DNA, 338 bp, Homo sapiens
  chr1:25071297-25071635
  hyper
ggtgttccccaggcgatgaaaactttccagtaagttgtcttggaaaaggcaactccgcgtaatagagggacttggggaggtagccgctgcgggaaagggcgatgagtcctggggtgctgcagcgggggagtgggtaggaggcgcctcctagcttccccagggcggccgaggcatgaggtcacctggcacagcaacagcagcagctgcggaggacgcgcaggcgctgcggcgggaggcagtgtcaggctcgggcccctggggaattcctcccctcctttcccccccgcaccagtcccctagagaggcgtacccgggtcccgcccgccagagcctgagct

SEQ ID NO: 226839 - DNA, 61 bp, Homo sapiens
  chr1:25255382-25255443
  hyper
taggggaaaaccgaggcgttttcgtttcatctcgctgcccccttaaaaaaatgaaaatgaa

SEQ ID NO: 226840 - DNA, 238 bp, Homo sapiens
  chr1:25258918-25259156
  hyper
ccctgccagccgcggaggtgcgggcccggccgggctacagatgcgcgccagctgcggccccgggtgcaggcgcggcgaccgcccccgaggagctgccctttccttgccatccatgcggccaggtctcagacaaaccgatggctttgtgtcaaaccaaggccgccttcctcacctctgataagatggacgccttctgtcttcgcgttttcaggcacccggggaagacccacagaacagg

SEQ ID NO: 226841 - DNA, 267 bp, Homo sapiens
  chr1:25559010-25559277
  hyper
accttcagacaaacgggccgatacgtacgaatgggctaccataagccccgccccttccgggaggtctccggaagttgggacccttttagctatgaaatattttggattgcgtagggtcttgcgcagccgcgaaaagtagcgtgggccaggacagcgggaggtaagtcgccaagaaaagggttgggaagagctcagaatcggacggctaggaagaaatgaccaaaaggagcctgatagccccctattctgcacgctgttcctggaaac

SEQ ID NO: 226842 - DNA, 247 bp, Homo sapiens
  chr1:25757172-25757419
  hyper
tgataggctcagccggggacccagacactataatgattggcgcattcttccgtccttcaaaggggcgggttctagagtcagttttgcctcagcgggccctgggattggccgacagcggtttaccggtggcttctattggcctcccgggccgtccgtcggagccgaggaggcggggcaggcggctggctggtgctgggcgggcgggccccggaattgtcatttctttgtttccgaaggcggaggaggc

SEQ ID NO: 226843 - DNA, 383 bp, Homo sapiens
  chr1:25869923-25870306
  hyper
cttctggcgccttcgggcggcctcggaaactcttggtgcctggacctggagcctggacagggaccgggcggggcgagaccggccgtcgggggcgcggcccgtctgggggcggggcctgtcctctctcgccccgccccgtcggacgccgcggcggagctggcgctgggaggggaggagcgcgcagcccgcgcgccgcagggccgggcggaaagtttttcctgacggagttttggctgcggcagcggcggcggcggccggagcgggccatggacgcgctcaagtcggcggggcgggcgctgatccggagccccagcttggccaagcagagctgggggggcggtggccggcaccgcagtgagtgtgcgcgcgtcagccgggccggg

SEQ ID NO: 226844 - DNA, 51 bp, Homo sapiens
  chr1:26147238-26147289
  hyper
gttccccttcattcgtttagttcagcgcgttgaagcgctcactgtgtccta

SEQ ID NO: 226845 - DNA, 288 bp, Homo sapiens
  chr1:26185983-26186271
  hyper
gccagccccgccccggcaaggccctggcccccttcgctgtgccccgcccacgcactaactttcgcggccggtcccttgagtgcgtgcggcatatttccctgcgcggaggagtgcgtgttctttctgatccgctctttcaagagcggattcggaagctgctgtgtgaacggttctcgacagcctcagaaatgtacattttctttttgctgtattgaaaatttcttacagtatttcccgggcttaggaatttgttcgtgtcatcgctgaatcttcgcgatcacccccaga

SEQ ID NO: 226846 - DNA, 162 bp, Homo sapiens
  chr1:26202123-26202285
  hyper
aggcgacgccgagcgccccgcaccccgcccgccgcgcacaagcagctctgccccgccaggcccacgtgttgcacgcgcgggagaggggtcggccgcgcagaggtggcgtctcaggacttcctgtggcgtcacacagatgggaagaccgaggcccgggagtgg

SEQ ID NO: 226847 - DNA, 194 bp, Homo sapiens; identical to SEQ ID NO: 197397
  chr1:26232692-26232886
  hyper

SEQ ID NO: 226848 - DNA, 883 bp, Homo sapiens
  chr1:26248952-26249835
  hyper
tgaaattaaacatggtgattatcccaccatcagtggaagttatccagcagcagtggacatgactgcgaatcctccagaaaatggcttcgctgcgctccacggatctgctctcccaccccacctgcggcttgcacagcgacacacaagcgttgtgattggctcttccttggctgagacaagggtggggaccgaaatggcgtctctaacagctgatttttcagggcagcagctctgtgctaggagaagagaaggccgggctcactggcggtgcggagcccgccagggccaatccgcatccgggcggaggtgcaagcccgaccgcagtactgacacgtgccgcgacgtcccctcccggcagctcgcggggacctgggagcgggtggggtctctggctggcggggagccagggctgcgggaaaccgcacgaggtcgcgttcgcgagtggcggagaagcccagacccccgggcgcacgcggccgcgcccacccaggtcgctgggaggtgcccgcccgggaggcgccgcggccagtgcctgccgttagcttcaggaagaactaggattgagtaagaaacgactagggatggaagcacttggcactccgggtctcggagcaggctggggacgcccgcggcaggaacctggtcctccactccgggtgcggaccaaagtctgctagggcttccccgaagtggattcagtgactcgggagaggacccagcccctaggccccatccccggttaagggccagtcttggtctgggtgtttctctccgggagctggtcgcaggtttccgttttcctcttcaaggaaggaaagaccagcgagagaattcgagggaaagaacaaaagccgccggcaccgcccagcccaatttttggagc

SEQ ID NO: 226849 - DNA, 404 bp, Homo sapiens
  chr1:26324434-26324838
  hyper
cgaggccccaaaccgggccagaatacaaaagtctgcaggaagctcaattgagatataggtgttttctccaatcaaacttacccagtcaagctgattcctcagaagcagccccagacgtttaactcgacggaaatgagaaacgacccatgaacccgtggccctttggtcgtcgtagtttccaaggctcaaaatggacgcttggaagcacttctcgttcctcaatctagaactacaattcccgatgtacagtgcgcgagattgcgcattacaactctaaaactacacctcccagagttctacgcgaccgtccagccccgcgtggtcgtgcgaaaccgcccaaggcctgggatgcggtgtgattcctccccctggtggcctgaagaggtgccgccgcgatttctgct

SEQ ID NO: 226850 - DNA, 1036 bp, Homo sapiens
  chr1:26372113-26373149
  hyper
ggccccaggccccccgcgggcaggggtcagaatctgggctgcgccccaagggagagacggtccttgggccacagcccattatcttcgttccctcacctcaccccacccctcctgcatggtcccagctcaagccgcagccaaaaccaaccactgctaggatggcaaatgcggaggtgcgtcggctgccgccaaaattcccgcccgtccccaggctctcgccttaccggattgccggcctggcgtccaacagatgctgcttctccttggcctccatgcagtcccgcgccgagtcccggcagccgcgcagccgccccgccgagtgcgccctgaaagttgcgcgcgggactccgggtggcgctcacccacctgccccgagggccccgcgaggtgcgctcactccggcccggctcctgcggcccctgagctcccccggctcccgctgcggctgcagctccggctctggctccgcgtgccaagcgctcccgtgtctcgggtcagccgctgcgccccgcggccgccggctttatccggccctcgccaacccgtgtgaagctgccgtcggcgcgtcgtgtgcaaaagcccgcggggaagggggggcggtcgccggctgcaaaaggcccggctgtggccccgcacacctgtgcctgcgcccatggggcccgcggagcccacctgccggccgcgagaagtttgccagccttcgcccggcgcggcgccgggtgttgctgagtgaggacggggtgacgcctgcgccccctctcccgcgcggggtgcgccgcctcgccgccgaaaagttctcgactttagtttgtagaaatccgctttggtggtcccgacggcaggaatgtggctccttgcctcggaagagggtctccagaggctactggggccgcgtctgccccctccgactggcggctgccctgggcttgatcatgttcccctctcaggccggagaccccccgaggtcggcttgcgttcctgtcctcctgctaggagggtcctggggtggggtgggctgcgccgccctcaggctggg

SEQ ID NO: 226851 - DNA, 588 bp, Homo sapiens
  chr1:26551673-26552261
  hyper
cgcttctcgaccagcgatacactgtacctgcacggccgagtgaccctgtgtgacacgcgggcaagacgcccatgccaaccagtgagtgggcagccccgggacctcctgcgcagccgccgcagccttgcctgcaaagcagttcctgccgggcaggctgggtagccggactcccagctgcgccgtcttcacggaagcggtgctgatgcgggacctgggggactgcggtgctggggactggccagtcctaccgggggcggggcttgtggaagactgggcgggattttgaagacctaggtcttgtggatggtgaactcacttggggcggggagggaggtggggctaccctggggtcttgggcaaagtcctcgcctggccggcttcgctacccttgtgcttgcgttgcccacaagcttgtagtcagaagaactcgcctgggagggatcgctcctgggagatccgaacgcgggagggcctggagcgcggcggcagctggatagcattcgggcccatccgaataagcggtaaatggatcatttctggggcctccctgactcctcttccagagcctcctaccgacctgctctgtcc

SEQ ID NO: 226852 - DNA, 91 bp, Homo sapiens; identical to SEQ ID NO: 197400
  chr1:26560289-26560380
  hyper

SEQ ID NO: 226853 - DNA, 216 bp, Homo sapiens
  chr1:26633064-26633280
  hyper
gtcttaagccagactcaccacgcagggccgctagccgtcccgcagcgccgccatcttgttgtcacgcggtttcctaggcgaccaggacccgtgcacttctcattggctagtttgagggaggcctgagcaacctgcagacagcgaaggtggatacagtcgcctgtgctcggattctattggcccacagagtcggtattcttcgcgggcgaatcccag

SEQ ID NO: 226854 - DNA, 537 bp, Homo sapiens
  chr1:26662518-26663055
  hyper
agactctcctcctgcagccccgcctctgccccagcgcccccagccctccgcccctccacgttctcacctgccgccgtggacccggcaggactgaggtcggaaggaggcgggcagagcggcctggtcatcttcgaaagagaagtggtcgcccagaaagtcggggcgggagaaaagctgaatctggaggcagagaggggagatgaggggaaggaggacgatggagtggggccgagaacagcggggaggggaaaggtccgaaatgaggggagagacgtgagcccagcggctccctgcggagtccctgccttacctttgagacgaagtgcagatcgtgctccccgacctgaaggtagggaccgaatcgagaattagggagggtgccggcccctagccttgtcttctctaggtttcagtaccgtccaccccgcggccgcgccctcggccccgcccccttctaaggccccgccccaagcgcccaggcaggtcctccagcccgctacctctgcgtgggggcggggcgcacccgaactccaggtc

SEQ ID NO: 226855 - DNA, 760 bp, Homo sapiens
  chr1:26735268-26736028
  hyper
cgcatcacttgagaacccacctagagaagccagagcgttcaactcccctttccctcccttttcttcagccagacctcagccacttgctcctgagtcttaggaacagaggtacacggagcgaatatattttaagggcgccactaacagcgggagataagacttttgggagaggagaattatgtaaataaaaatggctttggctgatgtactaggagaactcttgataattctaaattagagtcctcagatgggagtggggcactgctaataatatttgttaacgatatgtattttttaggcggagcagcaaagggccactcttgtcctttttaccccacgaagtcccacctcccattccttacgctcaagttttcatttcttggagagcaccccgtacgagagaaagggaaataacttctgcagtctcttgctttcctccccatcttccccttccctacccccactcatccggtctctctgaaatacacatgtgcccacatccgcacgtgcacacacacacacacacaaacacacacacagagccacagcgtgagaattccaaaaggttctgcacactcggtggagaagattgaattcagagcaagcggatgcccccgaaagcaggctctgtccctttaaatgggttgtagtggtgggggaggggaactggccggagctggcattgtccagtttgaactgaacaccggaagtgaaggggcagggccagggccgtgcactgagccccgggccattgtccatc

SEQ ID NO: 226856 - DNA, 127 bp, Homo sapiens
  chr1:26737102-26737229
  hyper
aggtgtcagagaccggagttgtgggggagggccggagctggagccggagggaaagggaggggaaaggagagggaggggaggggagggggctgcccgcggggggttgggtcattgtcttttagaattt

SEQ ID NO: 226857 - DNA, 89 bp, Homo sapiens
  chr1:26737529-26737618
  hyper
ccttctgcttcatagggccgtctctggggccaggaaccttggtgtcccagtggcgtgcgcgccagactacgtgggtggatggagaggag

SEQ ID NO: 226858 - DNA, 413 bp, Homo sapiens
  chr1:26758410-26758823
  hyper
tgctctaatgaagcccggttctgcggcattccaaggtaaggacgctgccttacccagtctctcagcagtcctaagctgccttcgacggccgagaagcgcctcgattcttgcccctggctcatttccctggcgcgttttccagacgcctccgctcccaacgctgggctcaaccctgtcttccccagctggtctcccagcacgtggcctggagcccagcctcccgccccgctcggtcacgtgagcctggctctcacccgcgccggcttccacaccccgcgggactgagaaccgccctcccactagctcgcaggcgcaggcgcagggcagggtcccctcagtttgggtgacggaaggggcgtgtcgcagcgcccaaagatgacgtgttctgccagcgccacgtcatgaggaagtgc

SEQ ID NO: 226859 - DNA, 253 bp, Homo sapiens
  chr1:26798709-26798962
  hyper
tcttggcgggagccggaacccggagcccgccgactcgcgcacccctcctcatttactgccttcgacgcgcgccaccccgactgcgcccccaccccctcggcgcgccgccgtctccgcgcactaccccccccacacacccccctcctcactccctccagaggaggtgagtttaaaccccgcccacgtgaccccagctgggccaatgaacggcggcgggaggtgaaatccggttctaaccggtccggggctccca

SEQ ID NO: 226860 - DNA, 152 bp, Homo sapiens
  chr1:26947306-26947458
  hyper
agttaggtctgagcgcccacttccattcctggagaaggatgtgtgggggaggcggaacgagttccggcggagggctcgggcgcgcccggtggagtgaagcgccgcgcggtcgaagggctcacagagttgaagtgggcgggaaaacccggagc

SEQ ID NO: 226861 - DNA, 705 bp, Homo sapiens
  chr1:27113546-27114251
  hyper
ccagaggctaacccggcccctggcttcgtttggagggcagataactgaaaccacataaggctttggaatcctgagaaacaagaaatccaccaacggagaaggatttatcatctgtttcctttaaggagggtgcaaagttgttctaacagtttccgttacaagggtacaaactggccgctccccccaatagacggttttgttgagttcgcctctttttttttcttctttttttggccccacttcctatgagagaaactgcttgggtgagggaggtgaaaggagccctggagggtgttctctgaggttttcttcaccatcctcattagccacctgaggtggggctgaggactaaagtaggacagaaggtctctggtagatagaggaggggaaaatcagggggatcccccactttcttcacacccaggacgcagggtgccgctgccggccacagaaaccccaagaatgtttttctttggctattcagaggacatctattgtgtgtcaggccctgtgctgagctgttgttgcctgacagcaggaagagcgcggctctggtttctgtgaagaggctgcgggtcagcctccgactacaagagcctcggcccacaccgggaactcagtgaacgtcagcgggagctggggcaagagcactgactctgagacagcagcctccgctcactatttgaaggcggggtggcggggggc

SEQ ID NO: 226862 - DNA, 99 bp, Homo sapiens
  chr1:27114661-27114760
  hyper
ctttccagcctcccgccctcgtctgcttccggccctgtggcctggtggggctctgcaggctccctcgggagtggtccttgggccgtggcccctctgggg

SEQ ID NO: 226863 - DNA, 57 bp, Homo sapiens
  chr1:27226966-27227023
  hyper
ctcgcgagaacaccgcgagcaacgttccagcccctgcgttgcgagattgtgaaaatt

SEQ ID NO: 226864 - DNA, 143 bp, Homo sapiens
  chr1:27247998-27248141
  hyper
ctagaagtctccacggcatcgggtgaccatagcaactcatgccaaactctcgggcccacggctccgcctaccgcttcgtggacgcgcttgttgattggctccgaatgtcgaccaatggtcggcgaagcgggttgcttgccgca

SEQ ID NO: 226865 - DNA, 33 bp, Homo sapiens; identical to SEQ ID NO: 197409
  chr1:27320114-27320147
  hyper

SEQ ID NO: 226866 - DNA, 120 bp, Homo sapiens
  chr1:27321040-27321160
  hyper
gaaggactacggatccgcaggaagaggcagttgggggccaggggcccagtagaggaggctgaggtgcggtcttagcggctggtgcgttcgagggtcggtcatggcgtgtggggggctggt

SEQ ID NO: 226867 - DNA, 164 bp, Homo sapiens
  chr1:27560696-27560860
  hyper
ttcagtgggcgagcgtgtgggcgggtgtcccagaagcggtgtgaggagcgttttacccggtggtggggtgggaggtgcgtccgggtaactaatggcaaccgggcggggtgagcccgctctgcaggaactcctcgacggcgaaaaactacgactcccagggtgcc

SEQ ID NO: 226868 - DNA, 44 bp, Homo sapiens
  chr1:27684152-27684196
  hyper
tgtcctgaccctttgcgaccaccagggggcgctagagtgggccg

SEQ ID NO: 226869 - DNA, 218 bp, Homo sapiens
  chr1:27718844-27719062
  hyper
cactcttccaccacgttccctgcagcctctctgagacttcaaggctctcgcaccggcgcctctgaaacccccggcccgcagagggcgccgcgtcaaggacagcgcgggcagactcgggagggggcggggccgcagccacggtcgctttttatgaatgggggagcgggcggtgcgaggccttattactatgccgcgcaacgcgcgctgcgccccagcgc

SEQ ID NO: 226870 - DNA, 556 bp, Homo sapiens
  chr1:27816286-27816842
  hyper
ccgaaggggacttcgggtcactccctccctccctgagggggtggggtggactaagacgccaccccgcgctgaccgctcgcccggcctctgccagtccgcagtaggagtcccggcacccagtcccccgagaccctgcacggctcgggaagagcggcccggccggggcccgcgcctcccagcggggtctacccaaggggacttgttgctcacctggcctcccgcagtcgccgtcagcgacaggaagggtcggccggccgcccagtctccgcacagagtgtgctcccgcggaccgcctcgcgggctgccaaacggccggaccccctcagcgcgctacgcccccagccgcgctcgccctgcctgtgtccgccattacgcgattccccgccctgggcggcagccacaccccgccaatggccctgattggctcactgccccacccacccggggcttcggggcattccattggcctgagtaaaacgccagttaaataactacgcaaaagacgtactcacgggtaccctccccagagctccacccgggcgacttccgcaatcgg

SEQ ID NO: 226871 - DNA, 89 bp, Homo sapiens
  chr1:27929078-27929167
  hyper
cgccctcaagcagcgagcagagattcagcaattcaccccagctccctgcctagggggctgacagctgtcactcagcaccccaccccctg

SEQ ID NO: 226872 - DNA, 460 bp, Homo sapiens
  chr1:27960572-27961032
  hyper
tcgcctcctacctcggtcgggaagcccaccccccacccaccagaccgaggattccaaaagggggcgaaggcggagagcaaagggggctgcgcccacccggagccccgcggcggcccagcgcggcccgccctctcgttgccttggaggcagcccctgcgggcactcgcggtcaaaggcaggatttccgtcggggcggcagcaattcccggatccagcggggagcgcgggccgagaccgccgcgggcgcggagggggcgcccggagaggcctgtccctgccgagggcggggacttccccaggaagcggggacccacgcctcgcgcgcccggcaggagtcccctgcagcccggaacctaccgcaagggcgggccgagagggtcgcggggccgcggtcgcggccgctaacgttaccctgcgggctgtgggcttcaccccgacttcggccggctcggaagagggg

SEQ ID NO: 226873 - DNA, 363 bp, Homo sapiens
  chr1:27961554-27961917
  hyper
ccacccgacgctgtcgcttacctggagcccaattctgcccggccccggggtgagccagccggggctccagcagccgcgagtgccggcgtgcggggagaactggggtgctgcccgcctctgaccgccgcccctgctgggcagggaggaggaagccgcctcggacttctcttattgcagtcacggccggcgggcggtgatggtggcagggagacagtcacgccctagccccaagccagctccccgcagcgaggaggcgcccccagatcctaggcccacccgcccccaccttcctcctccctggtttacgggaggtcggctctgtcaccctccagacctgagtccccagcccggccttcccaaaag

SEQ ID NO: 226874 - DNA, 183 bp, Homo sapiens; identical to SEQ ID NO: 197418
  chr1:27986361-27986544
  hyper

SEQ ID NO: 226875 - DNA, 49 bp, Homo sapiens
  chr1:28099536-28099585
  hyper
gacgtcatctccccgccctgcatccccaagcctcggggagtcctgtctc

SEQ ID NO: 226876 - DNA, 97 bp, Homo sapiens
  chr1:28157658-28157755
  hyper
ccagtcgccggagcgcttcgaggccttggcccgaacttacgcccaactcttgactgagtgcctggtgctctcgtggagcatcgcatctggccccttc

SEQ ID NO: 226877 - DNA, 591 bp, Homo sapiens
  chr1:28198912-28199503
  hyper
gtactgcagggggcggggggcggggcttcggcggggcggggctgcagggctcccgcgggctggcggggcggcttcggcgtgcggggcggggcatcggcggggcggggctgcagggctcccggggaccgcccgcccgcccctcagtctgagcccagagagccgcggggaccatggagccggtgccgctgcaggacttcgtgcgcgccttggaccccgcctccctcccgcgcgtgctgcgggtctgctcgggggtctacttcgagggtgagcgggggctggaacccctccgagcactcccttggtgtggggcgggggcagagacccggagaagacgttagcaatccggggaaactgcccctgggttcaaatcccgacactgccactggccaagctgtgtgatttggggccgcactcaacctctttggacctcggcttttgctttcgtggaacggggaccgctgacctgccccgcagggtagtgatgaaaagtcagtgggttgaggcgcgggaggtggatgcagccgggccactcctaggtggccccgcggtgcgcatgggacagagctccgaccgcgccgggacgcagcatta

SEQ ID NO: 226878 - DNA, 296 bp, Homo sapiens
  chr1:28241265-28241561
  hyper
ggggctggcagagcggtatcgcaagaaatcaaccaatcagaacaatactaccgcgacgcagcgccgtgtgatcccaccctcgtcaagtgcgcgacttctgccgtcacttcctttgttcggcgtgctcaggttcgcgccaaactatcaccaatcagacgacgccttcatctaaagggctgtagcggagttttggcttcggtgtttcccacccacggtcgtgcgggaattgcgcacctcagggactcgcagcactagcctcacagcaccgcgtggagttgcttgttcttttacatagg

SEQ ID NO: 226879 - DNA, 183 bp, Homo sapiens
  chr1:28261538-28261721
  hyper
cagaggatccagacgccttggaggacttggaacacctgtaacaggacaaggagttctgctcaggcacgtggccacagaaaactacttaggaagcctgtggtgagaacaacaacagtgcctgagaatcccacggctctggggaagtgagccccgaggatgaggctgctcgcctggctgattttc

SEQ ID NO: 226880 - DNA, 766 bp, Homo sapiens
  chr1:28286170-28286936
  hyper
caggtgtgagggatcgcagccctggtccaggctctagtctccccgccctctcgctttcttgggcctccgggcgcctcaaaggtaaaactaggccatttgaagcctgcgaagcgaagggcagtcggtcttcaggcctagcgggcttggctgggctgggtcggtggacccctgggctggcggcgggagcagagcatcgagcggcttttagctggggttcgggcggaggacctgggacaaccgcgggcctcgctcctccccggacggggcgggacggggaagtcccgcccaccaggcccaggccccgggccgccccgagggctgcgcccacctccttcctgcctcggcaaccccgggccctgagggcaggccccaaccgcggaggagcaggagagggcggaggccggcgggccatgccctggtcgtcccgcggcgccctccttcgggacctggtcctgggcgtgctgggcaccgccgccttcctgctcgacctgggcaccgacctgtgggccgccgtccagtatgcgctcggcggccgctacctgtgggcggcgctggtgctggcgctgctgggcctggcctccgtggcgctgcagctcttcagctggctctggctgcgcgctgaccctgccggcctgcacgggtcgcagcccccgcgccgctgcctggcgctgctgcatctcctgcagctgggttacctgtacaggtgagtgcttcgccccgggaggggaggagtgtcggagcccagcacctccgtcagctgggtcac

SEQ ID NO: 226881 - DNA, 143 bp, Homo sapiens; identical to SEQ ID NO: 197421
  chr1:28414990-28415133
  hyper

SEQ ID NO: 226882 - DNA, 242 bp, Homo sapiens
  chr1:28562656-28562898
  hyper
gctgcggcagagacgccagaggtgcagctccagcagcaatggcagtgacggcgttggcggcgcggacgtggcttggcgtgtggggcgtgaggaccatgcaagcccgaggcttcggctcggatcaggtacgctgcggcagtgtccgctgctccagccccgcgggcggatcccatctttgcttccgtacctttaccagtgtccctgtctctctgcagtccgagaatgtcgaccggggcgcgggc

SEQ ID NO: 226883 - DNA, 156 bp, Homo sapiens
  chr1:28586719-28586875
  hyper
tcctcggctccctcggactcctggccaatgagggagaagccttctggaggctctccgagctttgggctcctgagcgtcttcaagtccaggcaaatcccggccggagcggccagaccactcctcctccccgcccccttccgcggagtcccttcctct

SEQ ID NO: 226884 - DNA, 273 bp, Homo sapiens
  chr1:28833050-28833323
  hyper
actctaaagtacgcgttagacgggcctgggccagaagtgggccatggagacctcgggacccgcagggctgccgcccgacccagcgagcctctgaaggtgcaccgccacccccactgtttatcttactgcctcatagtaggcacattgtcgttctcaatataattgcacacagttttattctggatcctcatttgcctttaagaattttctcaatttttctttttatttgatcgcaccactgcaacctccgcctgctgggctcaagcaattctc

SEQ ID NO: 226885 - DNA, 130 bp, Homo sapiens
  chr1:28844465-28844595
  hyper
tatcttttttctccgtacagaccctaccgcacaagattttcctaaacagaccgaactcaaggagtctttctggttgttagtccacgtgtcccgatttggggtttccaaaatacacgcccactggaaccgg

SEQ ID NO: 226886 - DNA, 164 bp, Homo sapiens
  chr1:28879232-28879396
  hyper
tgtaattatatgtgtctgtgtgtgtgtggttttgttttctatataaagtcagacgagtgtgtgtgtgtagttttgtttgttttctaaatatataaagtcagaaataaacccaagtaacccagccgcctgggccaggtggtatctggcccgccccattccagcct

SEQ ID NO: 226887 - DNA, 175 bp, Homo sapiens
  chr1:28879651-28879826
  hyper
gagtgagggcagccgtccggggtctgaagacaaggaagcatctcggtttcgcgagagaggaaggatctgagtgggaggggacttgggatcccagaaaggggagacgtgtgacgggggttctttttggtgacacagaagcgggttccagcatctaagtgaagaggctgagtccgtg

SEQ ID NO: 226888 - DNA, 397 bp, Homo sapiens
  chr1:28908623-28909020
  hyper
ccacgcaggaagccgacccgccttggcctctggagttgtctctgggatgtctttcagtctggaaatgaaccctgtgtgctgggaaagggctcgggctccgctccgagctcagtgggcgtgcgagcgagcagcgcctgagtgggtttcggggagggggtcatactccccgaaaggcgatttattcaaggcttgtctcttccactaatatgtaattttactgagcgcgtgctattttaactgtgtctgattatctgatctagttttcataaaaaccctgtgtacgctctgtggacaaataaggaaacttaggaatggatcacacagctatcgcaagcgaggagaggactggaatttggagcccaccccaggcaccacacatagcgcaatgttttgccca

SEQ ID NO: 226889 - DNA, 356 bp, Homo sapiens
  chr1:28969540-28969896
  hyper
tgccccagtgaagcgttcgtctcagcagccggtccgactgcgcggccctccccgactacttccggcaccgctccccgcctccaacccggaaacgcgcggctcttccggccggcgggcgcgcgcctcgcttgcgcaggcgcagactgccctccgacacgtggtggcgatattgagctgtgtgtaggtacaccctgcagcttgcgcttttaactgcttgtggttgagtggcagcatgagcgagctctgcgtattccaacccggcgttaagaatccttcactagcttttcttcccgacgctgcttatttatctatcggtagcatgacgggtaattgacgccctcggatggctttgaggt

SEQ ID NO: 226890 - DNA, 300 bp, Homo sapiens
  chr1:28974716-28975016
  hyper
agccgctgagagccggtattccaacgccatgagacgccttctgtcgtgagcagttgacaagaaagacccagcacttactgcaaccggaaggagcggttcctccctcgctcgcgcagccgctcttccccgccactccctcggtgcccgccagcacattcccagcaagccctgagtatatttgcatatcaactcactacatttttttcttctaactaaaaaatcgaaaggacaaattccagattctccttgtgaagtcttcctttcagttcagaagaaatggaattcgctcttcaacttcag

SEQ ID NO: 226891 - DNA, 237 bp, Homo sapiens
  chr1:28994973-28995210
  hyper
cctccagaggagtcgagaaagctagcttggccctcaattgtggttgaggtgattctttcatttagggcctattttcctcatctatgagtgcgggaaggagagttactggggtctctagcgacctttccaacactgattttcaagggcgaaagaattctgcttaggtaaggcccaaatcccttggctaaggttaatcctcggtgggaccggcaatagggacgcgtcccctttaaggcg

SEQ ID NO: 226892 - DNA, 47 bp, Homo sapiens
  chr1:29063453-29063500
  hyper
agcgtcgccgagtcggagccggagcctgagccgcgcgctgtgtctcc

SEQ ID NO: 226893 - DNA, 173 bp, Homo sapiens
  chr1:29213652-29213825
  hyper
acctcttaaagggcgagagcggcgcggagccagaacgcggtcggcccggtccccgccgcacccagcccaggtgagcctggaccacctggggggcgaccctcggtccccgggagggacggggttagggacagaagaacctacccccaagggctcggaccgtcccgggagaggcg

SEQ ID NO: 226894 - DNA, 328 bp, Homo sapiens
  chr1:29241582-29241910
  hyper
cgtcaatcacggtgcggtgtgcaggagcctcgggaggaaaccaaatgcggagaatcgcaggtttcagacggtgaaggtgttgcgtgcagccgcggagcgatttcttcctggcgagggagctgggctgtctgcagaagtcaggcggaatctgaggactgcagggagccctggcaagacttcgcaggccttcccgccaccgacgcctgcatcattgaaaaacatgttcccccttagtcttctgggttcccagcgagcagagggttaaatctattctctcagcgtcgtgacctcctttttcagttcgcgcatctgtcggcttggaaatctt

SEQ ID NO: 226895 - DNA, 162 bp, Homo sapiens
  chr1:29448271-29448433
  hyper
caagcgagagacgcggccctcggggctcctccgcacctccccgcattcttcggggctcccggccgtcatctcgccgtcgtctgggcgctctgcggagagaagatgggaggcaaggactggaccgacgggcctctagcttcagggcgccaggttcggggcgca

SEQ ID NO: 226896 - DNA, 165 bp, Homo sapiens
  chr1:29448793-29448958
  hyper
atggggcgggggcgctcgggcctcccaggtccgcaggggtcgctcgccgggccccacctcccccctactgtgctttacataccgcagcgcgggaggagggggcgtcaccggctccagcctctccctgcccgccccctccttccagacctcctccgcccgcagcga

SEQ ID NO: 226897 - DNA, 239 bp, Homo sapiens
  chr1:29449138-29449377
  hyper
gccgggcgctgggccccgccggacggatgccctcccggctcccccgtcggcccgggcaaggctgttcccaggttgcgacgtttccaattcgggctcctccggatgaatcatccccctttcccgccgcctggcctcctttcccgcctcctccgcccgaggcctccgtggcccgtggcccggtcagagcagcaccgcccctgcgcctcgggatccgggccgcacagcttaagccctcccga

SEQ ID NO: 226898 - DNA, 425 bp, Homo sapiens
  chr1:29557216-29557641
  hyper
tccccggcttcggcgccgtctcttactcgacgaccttggctggatccccgtggtgcccatagacaagcgcccggacccgggcaggctcggcggatgcggagtaggaggaggcggcaggtccgtgacagccagaagctgggagcagcccccgccactgccgggcgggggttcgcacccgccacagggtactgcagacccacatgctcgctccaaccaacacagagcctgacgccccggctacgtcatcttccagcgaccgcgcgcctgcgccccgcccctgccccgccgggtgaccactcccccttggtccctttgaagggcgtttccttccttcgctgcccaagtggtggcgcctggctagactgcgtgtgggccccggagggatccgggggtgcggagcttgcgaggccgccaaagctgttgtc

SEQ ID NO: 226899 - DNA, 32 bp, Homo sapiens
  chr1:29563130-29563162
  hyper
ccgggacgggcggcgacgctccaaccatggcc

SEQ ID NO: 226900 - DNA, 514 bp, Homo sapiens
  chr1:29564623-29565137
  hyper
ctgctgtgtggtcgcgttctccgggtgtgtttcggagtctggtgtctttggtgtgcgtgcgcgtgtgtgtgtgcgcgcagctgaatgtatgtatacggagcctgtgtttgtgtgtccgtgtgctcgtcggagtgtggacggtgtgtcggatgtgtgtgcgtgcgcgtgttccacatcccaccctgaggcctgggatcctagaccgcggccccttcccgcggagtttcggggccctgctccgggtgacctcccccgccctcgccaccggcggggctgctccgcgggctccgggtagccgggagacgcccggggcgggatccgagccgagacacgtgctggagcggagccgcttcctcacggtcgccagccgcagacaactgacctccccggcatcgcgttcgcggccctgctgctggctccggtgtctcgggccggaactcctgtggctccagcgttcgcgccggccactggccagcgcttgggcctcgccctgcagctccggggccatagggca

SEQ ID NO: 226901 - DNA, 861 bp, Homo sapiens
  chr1:29585832-29586693
  hyper
ctgcttctcagctacccctgcggtgagtcccagcccactgggggcgcaggggtaaggggtgtgggcggccgcggctcctgcctgcagggggtgcaggcccagctcacgatgcagctctaaccccgcagcaaaggccccacacttctcccgcctgggcgacgtggaggtcaacgcgggccagaacgcgtcgttccagtgcatggccgcgggcagagcggccgaggccgaacgcttcctcttgcaagtgagcgggagcggtgatcttggctgggggcggggtgggagggggttggtggctgcttctggccctgactccccccagattgctgagtccctgcttcatactccagcactgcgcacagcgtcccggccctcccctagctctgctctgcgctttcttgggtcccccattcccccaggttagagcgcggctccaggaacctatgtccgcgcggtgtagtagggacggctaaatggggcccgggtcagagcgagatcgggacccctcgctccgaggcgcccctgaccccctcactctcttccctgcagcggcagagcggggcgctggtgccggcggcgggcgtgcggcacatcagccaccggcgcttcctggccactttcccgctggctgccgtgagccgcgccgagcaggacctgtaccgctgtgtgtcccaggccccgcgcggcgcgggcgtctctaacttcgcggagctcatcgtcaagggtcagctggtggacgccggggagcgccgggacctcaccctcgaggggcggggccggcgacgggggcgggctctgcccgggggcgtggccgtggggggtggggccggcagggtgtcgctggggcgctatctgaagatg

SEQ ID NO: 226902 - DNA, 560 bp, Homo sapiens
  chr1:29804771-29805331
  hyper
ccatcgcagtccgccggccccctcccagcgtctctcgaccccttccccccttccctgtactccagccgcggctgattcctgctgtctgggtggggtccctgtaaggctcaggcggctgactggggaggcgatcccaggaggcacagtggggaggggatagcagggcggaaagaggctgaatcacaaggaggcgggggcggcggctcggtcccagggccatctcagggaccgtgtcggggggtgctgactctgcccatcaaggggagccggacatttatccgccaaagcccgtccctcgcggtgagggtcgctcctgggtgtgggacccctggcttcccgcgctgccctgcccggggctggtctcgtcccaggaccctggagagcggccccaggaggcgtggaggaggggagagagccgagggaagtggtcatggagcaggtgaacgcacaggggcttcggctggagcgccctcctgggaagagcccctcctctgcaaggacctgccgcagcttaaccagcctgcgctgctgtcgccagcgccagttttaaatagccaaac

SEQ ID NO: 226903 - DNA, 359 bp, Homo sapiens
  chr1:30558994-30559353
  hyper
gtgccggtgcggggcgccccaccaggaggaggtggcggaggtcccgggggccgccccgcctcgcagcctgggctctgcctgctctgcgtccacgccagcataagccccagccggctccgtctcccctaacgactctaattaccagccaagctcggctccccaaggcccaggcgccagaactgatgactttaataacagaatcccttccctttcacggcctgctccgggggccgctggcctgaggatgcagcgatctctgctgtcctgggagggcggggtcccacgggggttctacaccctcttacacatggggagggggggctcagccagggcagtgaggggagaatcgcttagggtgg

SEQ ID NO: 226904 - DNA, 58 bp, Homo sapiens
  chr1:30559447-30559505
  hyper
gacatcaccctgaacttaacgggtcctgggaccagacacccagagatgaaaagacagt

SEQ ID NO: 226905 - DNA, 373 bp, Homo sapiens
  chr1:30815403-30815776
  hyper
ttggttatttaaaacgggcgctggcgacagcagcgcaggctggttaagctgcggcaggtccttgcagaggaggggctcttcccaggagggcgctccagccgaggcccctctgccttcacctgcgccatgaccacttccctcggccctctcccctcctccacgcctcctggggccgctctccagggtcctgggacgagaccagccccgggcagggcagcgcggggagccaggggtcccacacccaggagggcccctcaccgcaagggacgggcttaggcggataaatgtccggctcccctcgaggggcagagtcagcaccccccacacggtccctgagatggccctgggaccgagccgccgcccccgacttgtg

SEQ ID NO: 226906 - DNA, 548 bp, Homo sapiens
  chr1:31157913-31158461
  hyper
cggtgggcgcctcccgggcccagcagcctcttggctgggaaagagacagacgggggcccccttccccgggaactgactttccagtgggaacaaggacgaccgtcgaggaacccgacaaatgaattaaaccagcaccagcgtgatgagcaaagcggagaaggaaagagggcgctgtgaggagagcgaggctcctccgggaaagctccttctgctccaggtgacagcggagagagatgccaccgcgcggcgaccggcagggccgcgtcccctctgcgtcctagcacagcgacgccccgcccgccacccgccctacgtcacccacagcccccgacaccgccccctcccccggccctgggcttccagtccctgacagtccctgggacgccgccccacaacgcccgccctctctggaccctaggacggccccgggcacctgcatatgatgtgtggccacgcccccgccacagctaattggaccggggtggacacctgaacccagtcggaccaatcaactcctgggttgccccgagacccggaccgggccctgt

SEQ ID NO: 226907 - DNA, 480 bp, Homo sapiens
  chr1:31191732-31192212
  hyper
gctggcccgggcccgcgcagacacgtcctgcacgctgtcctggggcctcccgtctgtcaccacgatgaccacctgcgacacgcggggcggtgtgacaccgggctcccggaagcccacgggactgtccaggagaggaggctgaggcccggagaggcgggaggactgccgggtcgcacagccaggcggcacccgggggaagaggacccggctggccgaagaggagacccgtttcctctgactgagagacgtggctggggggctttccatctgcttcgcctccctcgggcaggcagctctgagatgcccggagggatgtgatgccccatcgccaaattggggtctctaaggtcagggccatgccttcccctcagactgaggcggctgagggcagggtcctcaggctgatggctgtgggagtcgtgccacgcccctcgtgcccccgggaggcccggccggggctgggtggggggatccggtggt

SEQ ID NO: 226908 - DNA, 152 bp, Homo sapiens
  chr1:31380839-31380991
  hyper
ccagccgggacggcgacccccagcccgccgccgggtccttctcgcgcctcccaggccagcgcaggggtcccgcttcgtccccggggagacagttcccggagccactgggaggtgggggaacagggctgaggacccgcgatcgggttccctcc

SEQ ID NO: 226909 - DNA, 246 bp, Homo sapiens
  chr1:31538418-31538664
  hyper
gggtccggagcagcgtttggggccggtggggtgcggatactcacgggcggagcggtaggatgaagatggatttcagccccccgatcttctctctctggcgctctcgctcccccttacctttcactccgacaacatggcggcccactggggactgggttggcgcggtgcatcctgggataggctccggccccggccccggcggtggcagcggcatgtgcggagaaggctggcggctctggaacaggt

SEQ ID NO: 226910 - DNA, 35 bp, Homo sapiens
  chr1:31538917-31538952
  hyper
agctagcagggttcgcggacggccacccgcactgc

SEQ ID NO: 226911 - DNA, 155 bp, Homo sapiens; identical to SEQ ID NO: 197429
  chr1:31769777-31769932
  hyper

SEQ ID NO: 226912 - DNA, 229 bp, Homo sapiens
  chr1:32083723-32083952
  hyper
tggggtatgaaggcgtcccctccccttccccaggggtctccagggatccgcaaccctccggcacctggccggggtcgtcctagcccagccgggggaaggaggggctgagtgcgggaggaggggaggggcggggagctgggctggctggatttatgaatggagagcgacccgcgcgccggaacagcggctcctggcggccgtcggggagcgtcgcggccctggggaccca

SEQ ID NO: 226913 - DNA, 128 bp, Homo sapiens; identical to SEQ ID NO: 197431
  chr1:32110847-32110975
  hyper

SEQ ID NO: 226914 - DNA, 1438 bp, Homo sapiens
  chr1:32180093-32181531
  hyper
ggagagaagagcaatgcagacgtgactgtcctgccaggcgggggcgccgccgccagacgcacgaaaacaaccaaataaatcaggcccaggaactcctaatccttcccggctgtggctgctaccgcttgccccgccggcaccgccctgccaagggcgcagagtcgggccagcagagccggagtgatgccgggccatcgaggcgtcctcagcccccgaggtgggaggtggtgggggggcggggaggagaagaagaaggctctcccgacacggtgactcaggcctccttgacccgctcctgggtgggcacgttcctgcgccccggtctatttttagagccggctctgggcctgagcgcagactgaagggaaggggggcctcgtggggggcgcaggcgcctgaccagctcctccagctcggggctcaagccccaggccctccagctgtctacttggaaaagggtggaagcacatggagggtgggtgtcagggtgtgcggcgcaggcccagagaatgcgccccccttccccacaaggcctggcagttccagagaactgggcgcggcctcccaaataacgacctctgttaagtgggaccaggagcctcccgatggtcgctgtgtctgcccattggaccaggggccagggcgggcggggctttgggcgacagaactggctagggtgggagaggagaggaagctgccaggttctggggatcccgaccccaccccgccgacagccacgcctccagcccactctggccacgccactggtctgcctttggaccacactcatggccgggtgccttccctgactccgccctaggccctgcctcctatctggctccgcccagccctggccaaccttagaacctgtcccaaggtccagagaggcctagatgaggggtagcctgcctctgagaggcatggagccctcctcccgcgtggggtcagggaatagaagggcgtcgagggtggcgggtgagggaacgttcctggcgccgcgaacgggaagcctccaggctgcaggacgtagctgcggggacccggcagtctgcgaggctggagtggccgaggccgccccgagcatagaaacagccctgtatacgtgggcacagaaaggcccagggaggcgcctgggcagaagtgtctaggacgatgcctctgccacggagccctggagtgggggcagctgatggctcaagacacatgagctctggtggcgagtacagggacgcggggtttggggaggcccaagtcaaggtccatccttctgggatgaggggcggaggatgggaggcggagcccggtctccagggcaccagccctccacctagcgggaagcttgggaatcgcggagtgcagaggtggggtgcggaaagggttccaccgcgcctgggctcctttttctccttggaggtcccactggcgcctacccaccacc

SEQ ID NO: 226915 - DNA, 380 bp, Homo sapiens
  chr1:32226158-32226538
  hyper
cccaggatgactcccattcacgctgggtggcgggggaggggcgggccgggggaaggggcgcggcgacgcgcacatccgtcgcgtttatccacctggcagctccaattcgcccgcccgtcactcaccctccgcctccccggcgctcgccgcccgacctgcccaggccgccacgcaggcggtgacccccactcggtggctttgggtcctctgccagcgctcggacccaaggacagggtcctcaggagccgctctcctagagctctgtcgccctgggggacgcacaccctccatcctgcctccggagctggggactgggccgaggggagggagcgaccccctctgtgcagtcctcccgctccgactgccagagagggtcgctc

SEQ ID NO: 226916 - DNA, 1036 bp, Homo sapiens
  chr1:32237627-32238663
  hyper
tgagcccgtggcggcggcggcggcgcgggtgtggggccgcgcggccgggagcgggcggaagagagcgcgaatttgaatttcaaaggcatctggaacccaagtgcttctgcgttgcccgattgtgtgtgtggcgcttttgtgtgtccgcgaatgcgcgcgtgcgtgtgtggcgtgtgtctgggtgttttatgactgtcctccgtgaggccgtgtgtgagcccttgcgtgggccgtgagtgcggcagggagcgcggtgtccgggggccgcctgtcggtgtgtctgtgcgtgcttgtgcgctagcctttgcctctgcgagtgcgtatttttaggaccgagtctgtctatatgagcctgtgtctgtgtgtgtgcgctcccggccctgcgtgtgtctgtgagcgtctgccggggcgcgtgtgtgctcggaaccccgcggtggtgtgcgggtgtgtccgtgtgtctgtgcacgtgcaggcgagcgttcccatctgtgtgtgtgcatctgagtctgggctatgtgtgactcagggaccagtctatgagcctgcctgtgcctttgagccgatacctgtgtgtgactcagggacgagtctatgagccgatacctgtgtgtgcttgggtgtctgtgtcgtggtgtgtccctgcaagcgtttgtgcctgcaggtgctggagtgtgtagctgtgggaatgagtgcgtgtgagtgtgcggaaggggcaccgcgcgagggagcgccggtgcggaaggctaagcgagcccgcgccctccacggacggtgccgccaccccctccctccgccccgcgctatgtgcccctgtgtgcccgcgccgccggggccgtctctgggctccgggagggggctgagcgagcggccctttcctcccagggaccccgggcccgccgccagccctgggcacacccgccccttcctccagcggccccgctcgctgacccacgggcactcgatgggcactcgggaggcaatggccggagaggatgggcagttagcgggagggactgagtggcgccggcttcacgct

SEQ ID NO: 226917 - DNA, 511 bp, Homo sapiens
  chr1:32410105-32410616
  hyper
cggagggggcagggcgctggctccagctgtttgcatgaatcccccgcccctggcctctctgcctgtgcaggaagccctggtgtcgtaccccgagccgctgcagttcgcactctgcggcctcctcaggcactagagcttcccctgcgtccgcctttgggggaggggagggagtgaagctgtgaattccgggagaagtcaagggtcgctcggggcgtgggtccgcgcgcggaggggctcgctgtcccggtgccagcgggagctggaaagcttcggctggggcctgagtggacgggaaggcggcggcctccgcgggatccttcccggggccgatccacagtcaggatccccagctccaccgccatcaagtgggactggagttcggccagagaagaaaacgacttcgggaactggcaacgagggagagggaaaagttgagaaacgtgactcagcctctttagttcatctttcacgtggggcagcggaggcctggcggggacggggagccgctcgg

SEQ ID NO: 226918 - DNA, 73 bp, Homo sapiens
  chr1:32480181-32480254
  hyper
gaaggcgactttgcgatcccctagcgctaatgtcttgatggatagtgctgagctccccgcccctttcccgact

SEQ ID NO: 226919 - DNA, 66 bp, Homo sapiens
  chr1:32573589-32573655
  hyper
caataaagcgtttcgtcctggagttaactggtttgtccctttcgggctgccgtcctacagatccgc

SEQ ID NO: 226920 - DNA, 174 bp, Homo sapiens; identical to SEQ ID NO: 197435
  chr1:32574075-32574249
  hyper

SEQ ID NO: 226921 - DNA, 71 bp, Homo sapiens
  chr1:32671079-32671150
  hyper
ggagtgccccttgcggctgtgggaggggcagtcgggggctggggggacgcaggtacgcctgtcgccaggac

SEQ ID NO: 226922 - DNA, 413 bp, Homo sapiens
  chr1:32687709-32688122
  hyper
cccacttccctccttcgctctcttcgcctcggctgcgactggcggctaaggcaggcccagggaagctagggagatgaatccaggagtccggcctctggggttgtagcaggggtcggggttagagggtggatgtggagcaggaaatgaattcgaggcgagggtcgggaaatccatggaagggcggggccggctacctacccagagacgccgccatggcaacgccgctgtcttctacttccgggaacgaaggggcggagacccataatccggaagtgacctcgaaaccttttccggtcttactcacgttgcggccttcctcgcgtcacagccgggatggtgagtttcagagttaggggtattgcagtgggggtcctgggctgaggctggggcccaattccgagcactgacgttac

SEQ ID NO: 226923 - DNA, 162 bp, Homo sapiens
  chr1:32757388-32757550
  hyper
gaaagttggcctccgatctccaagcacgcttttcacgacgaagtgggactgttaagtttacagagctgctttcctcccccgggactgatggtacggtccccgggcggctccccacccatctgtcgcagaccttggtacaggcccagggggccctcggcggcc

SEQ ID NO: 226924 - DNA, 164 bp, Homo sapiens
  chr1:32758019-32758183
  hyper
cgcgtgggggaagcgtgaggtaatcttgatgggaagattctgaggaagtctgatgtggagagtttgagtgggactcctagaggggagggtgcgtcggagcggggaggctgaatctgatggagacggctgcaaggatacattttcttgccgagaacccaaagctc

SEQ ID NO: 226925 - DNA, 391 bp, Homo sapiens
  chr1:32827342-32827733
  hyper
tgctccgtcgctaccgcctccgggctgtcctgggactcgggggcggcggcaaggccacgggagtctccggcctcaatggggaatctccgaccctgcgggggctcctgggcgctcatgtccaagccccggggcgctctgcgcggggagtggcggtcaggcctctcccgggtcgccgggcgccgccgcctcgcgcccgccccctgggccgtcgctcacctcccggcggttgagaccggtcccaggctagaagcagctgccggagccctggccgcgggagaacgctccggtccaggcggagccgggcaggtctctgtggcgtgcccgggcccgggcgtcgaggagggcagcattgtgacccgggccgcggcgcgctgacctcacagagcacgtt

SEQ ID NO: 226926 - DNA, 1041 bp, Homo sapiens
  chr1:32930153-32931194
  hyper
agtgaaagaaaccgcgggtatgcaataaaaacctgttgaatcgattaaaccatttcccttatttccagatttttgcggaaagcgccagtaggtgaaatatgtgcggactgatgagtcaaagctcttattccctggactgcattaatacccacgacgtgcttttcgctctccagacaaagagaccggtacttggcaggtccctcaagtgggactcaaaagaccgaaccgagctgcagcctttcgctagcactggtcctcgccccttttggcatcttggtacttgtagttttgtccactctatctttacccgaaaagccagcgctgagaccacaactcccatcaccctgcgagcaccagcgccttcagagcgcatcctccgaggggcaccagcgccattgaccaccctgctggccgaagggcccgccttcccgaggccaggcgctcccgcgattggccagccgccccgcctctcatcggagggcgccaggtgaatgaaaggggggcgtgtcggtgcgcggtgctccgtggctgcgctgctggaacccgctggaaggtgagcgcgaagaagcgggttggcgctgccgctttcgttggtttggggaggattcctagcacccgggaggctggctggagattggggttagcgggcagggttgcccccactcagtcatcctccttcggaccgcttggccctggcaactcctgggacctccgccccgcgagcccttctagcgtggggaggggcaggcgcggccgtggggccccagcttccctgtcattgggtgtcctccgcgtcgtccagccgggggtcgcggcgccgactacttccacggtgaatggtgcccaggcgtggggggctcggccacactggagaagtgccagcggcagcgatggccactttgtccgcgggaggccatgggaggggctaggccttggggtcccaccctcgggggccgtgccctgtagctggttctggtggcctctctgcaggtcgtctgatgctggacgggggagggtctgtcttgcgagcagtttagatgc

SEQ ID NO: 226927 - DNA, 242 bp, Homo sapiens
  chr1:33116489-33116731
  hyper
actctgaaagggtcgtaagcttaatagccttcaagaaaatggctgccctcttgccgcgggagtgtgcggaccaaacctctctcacgtgaccctgaccgggcgcagtcccgtcaacgccggcgcgcgcaatcgctggaagtcggctcggggaggcgtggggggaggggcggagcgcgcgcctcggtccccgcggaaagctactccgcgcgtctggattggtcgcgaacgcggcttccccgccc

SEQ ID NO: 226928 - DNA, 223 bp, Homo sapiens
  chr1:33168524-33168747
  hyper
ctcccagccccctcgtcttcccgaaccttctctccacccttcctttcgtgaggtcccgttgcagggggagtcagaaggggggtctgaagccccagggagcaccttccctgtccagcctgggagggtggaggcagggttgggcgggctgctcaaagggagccagcacccctctcccgcgagtgtttgggggtgtccgctgccgctcagcgccctctggtcccca

SEQ ID NO: 226929 - DNA, 188 bp, Homo sapiens
  chr1:33207682-33207870
  hyper
gcaagcggcgcaagaagaaggcggcgggggccgagggcgccgaaccggccgccccccgggccaagaaggcggaggacaaggccaagagggccaagggcaaaggccgaggtaaggcggtcggcacctgggctgagcgcgggggggcgtcgagggtgcggccgagggggctctgccgggggtccgcgcgc

SEQ ID NO: 226930 - DNA, 531 bp, Homo sapiens
  chr1:33219374-33219905
  hyper
agagagtgggcaacccgcctgccccacctggactggccaggccttcccctgtgcgccctaggctgggcggctcagccggtctcccaggtcccgggaggggcggagccgacgggatgcgcgccaggccccgcccctcctccgggcccgcccccggcctggccattggccgcagagctcgggggcgtggtcgagctggggctgggggcgcccgcggtgcccgcccgcgagtctcgctgcctccctcccggggctgcgggcccggcggccgggctggctgggccgcgcttgggttcccgcgccggctcccgcacccgcaatggggaactcacaccacaagaggaaggcccccagcggtccccgggtccgcagcttctggcggttcgggcggtcggcgaagcggccggcaggtaggggccggggtgggggcggggcaggcagggaggagggtccctactgcggtcgtcgccaccgctgctgccccctcccggggcttggagggtgtgagtgtgggggggtcgggaatccccgcgc

SEQ ID NO: 226931 - DNA, 254 bp, Homo sapiens
  chr1:33282729-33282983
  hyper
aatcactgaacctcgggctcctaatccccaacggcgcatttccaacccccaggcctgacctgcaggttccgggtgataaggtgcagtttctcttcagggctgggagcgtcccccatggctccgctacccctgcttcccccgctcagcccggcaccagagccccttcctgggtcaccgtcgccgccgcgtgccgggaactgtcacgcgagtccagccaggttgcatcagctgggctcggcgctccgcttactcgg

SEQ ID NO: 226932 - DNA, 126 bp, Homo sapiens; identical to SEQ ID NO: 197448
  chr1:33283881-33284007
  hyper

SEQ ID NO: 226933 - DNA, 621 bp, Homo sapiens
  chr1:33358606-33359227
  hyper
ctgcctctggccctccagcccgcgccgcgccccctgccggcagcagacggccccgcagcgcagtgccgcccccttggcccggcgccccctttcgaccaccgagcgcgggccgccctgggcccgggtgccagcccggtacttacccccgacgcgcgtgccccggggcacgcgctcctgagcccgccgctccaggccctccactgtcgggccccggtgtcctccaacatctctcctgacccctgcgcccgctcggagcttccacctgcggcgcctttgctcctttcccacccagccctccaagggagcgcggcagggcccgcccgatagccctctcttctgggaggccttcccggacacgccttcccgaagccctcggctccccacgcctccgtgattccccactccaccttgcccaggcgggggcagcaaacgtcagagagcccgggggcgcctctgaatcttgcgggtgggggctcgggcaggctcctctcactccccgcctcccctcccgcccccaggccatttacaagatggtttcgtccgtgatgaagatgccggaggacgagtcgaccccggaaaagaggactgagaaaatcttccgccaaatggacacaaacaacg

SEQ ID NO: 226934 - DNA, 422 bp, Homo sapiens
  chr1:33430300-33430722
  hyper
gaggagccaggggcgcccagcgccgccacagctcccgcctcagcgcccctcagccagcgcccggccgccgccgacgccgccaccaccgcctcaaccgccctcccggcgatagaagccgagcggcaacgacgaagtgattataaagcctccgccccgcgcgccgctgccctgcgcaggcgcttcgctcaaacacctcacaacccttgcgccccggtctaggagtgcgctgggcagggccgagcggggtggggccgagcgagctggggcggagctccgcctcctgccggtcaggtggttccagggccgccatgttgcggagactctcagagatcctagcccgctgctctccctggtctccgcctccaattccatcaccatgacacccaaggtggactttttggtttgccgttcctcacaggttg

SEQ ID NO: 226935 - DNA, 153 bp, Homo sapiens
  chr1:33438840-33438993
  hyper
ctgccgcagctcccgcagtgttttctgtcaaggtcaagcatacccactctttgacaaggctgcctccgaaatccctcccttgcagtcctcccagccgttcccaccgcctttgccactcatccggcggcagccgtcctcggaccactgcccctg

SEQ ID NO: 226936 - DNA, 272 bp, Homo sapiens
  chr1:33502498-33502770
  hyper
cgcacgccacgcacgtcccactcgccgctcacactggcccatagccgcgtccgtcagcccgttccgcccgcccctgagcacgacggactcttcaccttaccaactgcacggcgatactgaggaactttgcttttgattggacagaattggtgcgggataaggaaggggcgggccagcatgtactaagggtggcgggtgtgcggagtgggcgggaaaacgcgaaggaggacaggaggtcaggccggaaggtatacttcggcatttgacagttg

SEQ ID NO: 226937 - DNA, 649 bp, Homo sapiens
  chr1:33592695-33593344
  hyper
agtcgtatgggaagcgcgcttgtctgaggagtttttcgctgtgtaaatatgagaagctccttcctccaaaagcctccgttttctcatctgagcatatgagactctcagaagtggaaacgattgcctggcggaaccatgactgctcagcttccagccaccggaacccccagctcacggcccccatcccttgaagccacggtcttccggtagcgtaaagtcacttccgtattcgagagccttctaggcttcgagccacgcgatgtcgcgccctctggcggctgggaggagggaccgactttaccaaacggtgagaaggaacagggaagtccattggttgaaagacggagaggcgcagctcagtcttccaacctcaaccaatgttaaaccgaaccttcgccgagggcggggctctcacgggaaaggggtcaacccgggactgaggcggcgtgggaagcgggcgaccttatctctgctcagctggaaaaaggcccagggtaacaccggaagtgggcttatttgcgcatcagctactttcgcttctacttaaaaacggaggatctgggtaaaagaaccgaaaggctgtacgaacctaagacttgtctccgatgtccttctcaaccatcaatttcatatgcgagggaaaacacct

SEQ ID NO: 226938 - DNA, 376 bp, Homo sapiens
  chr1:33772344-33772720
  hyper
gggccgggaaccggcggcggcgctagttccgcagcagccggtaccccttgggcgcccacagcagtcgcgggcggcggatctcggcccgcgggccgatgtccgggctccagcagaactcgggcgacagcaccttggcgggcttgtgcagccagaagaacttgttgaggtggctctcgtcgtgccagcgcgcctccaggccgcgcgcgcggtcccagtccaggccccccgcacagtgcgccgtcagcccgcgcagcgccgccacgctgcccccgaacaccgccgcgtggttatagaagtcgccctggccccacgccatcgcggcggccgaatgcgcgtcgcgttcgaagggcagcagccacgacggccagtggtagtg

SEQ ID NO: 226939 - DNA, 434 bp, Homo sapiens
  chr1:33896039-33896473
  hyper
gcgctgtcacgccgcggctggggagcgggcgccccggtcaggcccgacgcccgggtctcaccgcactctgcgggacaagcggagcaggcgcaggccgcgcaagaccacgggctgccgcggcgcgggcctctccgcaggaggggggtcggtccccggagaaagcgagtcactgacgggaccttggcccgttcccgttccggttcccgttcccggcaagcctcggccccaggctctccgcagccctcctcgctgcgcgttcccggcccgggggcgccgcgctctgccggtcgccggccgggactgcgggctcccagcgcgggccccacgccgcggaccaggggtcaggccgcctgccgcccgcctgtccgtgcccatggcaatgccccgccccgcgcggcccgtcccggccgagcgctccggcccgaccgtgacag

SEQ ID NO: 226940 - DNA, 188 bp, Homo sapiens
  chr1:33896713-33896901
  hyper
ttaccatatattagcataccagcgcgcgtcacgtggccgctccagccaatggtcaccctagaagggcggggattgggcggaacacgccttagtgctgctcccagcctgaaccggtggccatggcaacgggcgggtgggcgggggagtggggaggtgccggagcccggtgcccccgggagcatctcctc

SEQ ID NO: 226941 - DNA, 422 bp, Homo sapiens; identical to SEQ ID NO: 197452
  chr1:33937919-33938341
  hyper

SEQ ID NO: 226942 - DNA, 759 bp, Homo sapiens
  chr1:34628644-34629403
  hyper
ctgagcggtgcaagcgccggtgagtcggcctttttctctcccctaggggcaggatatgcccaaggggcagggacaaatctagccagaaaaacaattcagtccgatgccgagacattctccaatcagctaagccagagaccggcctcgcctcaacgtacgtccgggaggcctggcgggaggtagcagcgattcccccaccgcccatgtggcaagtctgggtgaccagcagcgtcggtatgcacagcctcccagtgggtgtgggtgtgcgagaggccagagctcccaggcgcgcgcaccgcgggcgcccctctctgggtgtcggtggctatgactcttagcagaacctaagaaagtcccgtcagctaggaatgagagagccagagctggctcggggcgccctccctgaccaagaaccccaacatgccgcggttaagcggtgggcgacacggtctgcgaggacagactcacaagacgctgaaggccagagtgggccagagagctcgccactcactgacctgccagaggagaggcgcactttcccaagaaggggaactggggtggtccaggccaagccttcagaggttcaatcggtggtttcaaaacaaaacaaaacaaaacaaaaacaaaaacaaaaaagaaaacacggctccaggtcgaaggtgccctaggtctaggcctggccagcaggtgtttcggtttctcccccagtgggtgtcagcctcgcgggctaaatgaaaatgcggttccaggcatcccggt

SEQ ID NO: 226943 - DNA, 46 bp, Homo sapiens
  chr1:34629763-34629809
  hyper
gcgaagcctggcggcggcactccctcccccgcctcgggctacaacc

SEQ ID NO: 226944 - DNA, 186 bp, Homo sapiens
  chr1:34629989-34630175
  hyper
gagggggcaccggtttcaattggagaaaatgggcgggggcagggaagggcagaccttgcagacgcagaaatggggagggggcgcacggttcctctccagcccccaggaccagcgtgcctggcagaatcaggagccgggggagtagggctcccggaaagtttatcgggaaaaagcctagcaccgtgg

SEQ ID NO: 226945 - DNA, 44 bp, Homo sapiens
  chr1:34630355-34630399
  hyper
gcagggatgagaatgagagtaggcaactgggagggtgggagatt

SEQ ID NO: 226946 - DNA, 32 bp, Homo sapiens
  chr1:34632571-34632603
  hyper
ccgcccctcccgacgccgccttgctgggtgcc

SEQ ID NO: 226947 - DNA, 495 bp, Homo sapiens
  chr1:34642419-34642914
  hyper
ctgatcccccgaagcgctctggggtcctttgggccccacccccacccaccccaccggcgggtcttgggctccgaacccagggcgccccgcgcaccgagccgttgcgtttgaaacccacagaaagaattcccccgctcgacgacggcgagggtgtgggagctactggcaggcaaattggtgggagccgcccggcccagcctgccttgccgagtcagcgcgctcttgagccgctgggcccttcccggtgcccgcctggcagcgcggcgcggctggggcaggggtctgctgggggccggggactaagggctgtgggcccatccacacacgcctcatcccttctttccgggggcagcagagcagcagcgggagaccgggagcaggaggggtagggcgagagaaaagcaggacctgggccgggggtgggagtcgggccgttgacgctcgctctgcgaggggctccctgggaacgcccaggcgagcgcctcctgcggggcc

SEQ ID NO: 226948 - DNA, 592 bp, Homo sapiens
  chr1:35246933-35247525
  hyper
gggtgccccacgcacggtcaaggtcccgcgccaagcggggaccgggctgggccggaagcgggcacggtactcgcggcaaactagcgtgggcgagtcctgattgcagtcggacctgccgccgcggcacttaacagtttgcagagtgcttcccgcccctgatctcattggagccttcggacagcccagcccatggccaccgatgcccccatttcacgcctgaggaagcggaggctcagacgggccaccagcccctccggaggctggcccgggagcgcctggcagcgtcgggtctaggagccggctccctcctgctccctcctccgcgccgcccggggtgtgcccgccgtctgtgtgcaccactgctgagcccagctccggcgccctcgcctctgctgtgggccccggggacgcggggtcaggccaccgcgttggccaggccgctgcaggtaagtgctggacggggcggggcgaggctgggcgggaccctcaggggcgccaagcgctcctggcgaccccctgcggcagggctggggcttgagcctgccagtgcgctgggatggggcgcgaagcgggggtgcggggagcccgccac

SEQ ID NO: 226949 - DNA, 89 bp, Homo sapiens
  chr1:35258520-35258609
  hyper
gccgccctccccgtcgcgtttcctgcccccaccccgcccctctgcgctatttaaggcgcccccgccgctcgtgcggtccagcagggctc

SEQ ID NO: 226950 - DNA, 857 bp, Homo sapiens
  chr1:35351017-35351874
  hyper
cctcaccccagccccgaccgaccagggtcagagccctcgtgggcgcctccccgttccatacctgcaccccaatggacggccgccacttccgctgccgcgccaggctccgcagctcctccctgccagggatggtcttgatgatgagtgtggggggcttggggctggcccggggcggcaccggcgccaactccagtgtgcgcgcacccatggcggggccgtccagcccgtcggcggagctgcagcgccgggcggggccctcggccgccgtgaagctctcgtgcgcggagtcggtgctgctctgggcggtgatggagatgcggggcggggcctggcttcccggcgggatggggggcggggcctttctgaagttgaaggctgtggccggcgagcgcagagacgcagtgggtgaggctcgcggccctgcctgggtcctgggcccgcgcccgactcccaccctcaagaggccctacgggaccctgcagcggcgcgcactccacatgctgctgcacacacgccaacggacgctctccccgtcatccgaccccgggagcgagcgatctgcgcgggtcacagcacagtcgagggggaggccagaacccggacccagggcgctctcctgcctagggccgggccaggggcaggaaggtgtactcacaggagccgggcctccctgagacagcggcaggggtagcgaggaggggcaggcagtcgtcgtcttgagagcagccggcctggatggcccggaggtagctgtggctccgcatgcggaaacagccgggcaggtccagggcgtccacggcctgggactccagctccccaaacaccgacccgcacacggcctccagctgctggttcaa

SEQ ID NO: 226951 - DNA, 120 bp, Homo sapiens
  chr1:35390547-35390667
  hyper
ccatcgggaccgaacgaagcctcattcagcactcgggacagctccgaaggagcaaatccccgccgaatcccactcagcacccgggacagttcccagcgacattgccggccccggtagcca

SEQ ID NO: 226952 - DNA, 829 bp, Homo sapiens
  chr1:35395426-35396255
  hyper
ggcggccgccggggtcccggaggagcgcccacctcgctgagcgacggtgctgggggcgcccagcgtaggggcaggaatgagatccccctccccggggacccaggaacaggcacccgaagtgtcacggccacgcacagccgacctgggtacagggacccaagcccggcggcgggcgggcggtcggggaccagctcagcctcacggaccgggtctcgccccccgccgaggggcagtcacgccctgaatgtcacacacagcccccaggcccgtccgcttaggagactctccttcgggctttcccggtcggccgcctgacctcagctcctggcttggggtcagggagcccccctcttcggccccagcccctgccaggatggggcgctgtgcccggcctcggagccgctggcaggcgtcccccacccacagtccgcacagccgaggcatccccagtgtggagggagagccccgctgtacctgccgcctgtgctgggcccccgcccgtgcccactgtgcccgcccgcctctgggccctgagcctgggattgtgccatggcggggtcggggtggggggaaagggactgtccgaagcacagctggaggctgcggagcccggacacaggctgcgggagccgagaggcggagagcggactgcagcagtcccctggcttgaatccgtcttggcgcccagagcgatgctgtaatgggggggagggggccacggtggggaagccgcagggggaggggctgaagacgtgggggaaggggtggctccggattccggctttccagggtaggtgtgaggaaacactgcctccggcgctgaaagttg

SEQ ID NO: 226953 - DNA, 181 bp, Homo sapiens
  chr1:35497271-35497452
  hyper
gtgaatgtcaacgcgtccctaaggcgatatccgcagccgccccagccgcgtagcccacctggcaccgcccccgccgcaacgcctcgtcacgtggtgtggcctccgccccgccgtcccgcccactaccactgcggccgcacccaccttctgtcgcctccctgctaccggaggagcactggaa

SEQ ID NO: 226954 - DNA, 236 bp, Homo sapiens; identical to SEQ ID NO: 197457
  chr1:35544793-35545029
  hyper

SEQ ID NO: 226955 - DNA, 83 bp, Homo sapiens
  chr1:36023211-36023294
  hyper
tgcctccttcgctcgagccccagcccccagactcgggcaatacccacaagcaagatggcggcaacggcggcaccccctactgc

SEQ ID NO: 226956 - DNA, 1210 bp, Homo sapiens
  chr1:36042459-36043669
  hyper
gggacgcggccgcgcggactcacgtgcacaaccgcgcgggacggggccacgcggactcacgtgcacaaccgcgggaccccagcgccagcgggaccccagcgccagcgggaccccagcgccagcgggaccccagcgccagcgggaccccagcgccagcgggaccccagcgccagcgggaccccagcgccagcgggtctgtggcccagtggagcgagtggagcgctggcgacctgagcggagactgcgccctggacgccccagcctagacgtcaagttacagcccgcgcagcagcagcaaaggggaaggggcaggagccgggcacagttggatccggaggtcgtgacccaggggaaagcgtgggcggtcgacccagggcagctgcggcggcgaggcaggtgggctccttgctccctggagccgcccctccccacacctgccctcggcgcccccagcagttttcaccttggccctccgcggtcactgcgggattcggcgttgccgccagcccagtggggagtgaattagcgccctccttcgtcctcggcccttccgacggcacgaggaactcctgtcctgccccacagaccttcggcctccgccgagtgcggtactggagcctgccccgccagggccctggaatcagagaaagtcgctctttggccacctgaagcgtcggatccctacagtgcctcccagcctgggcgggagcggcggctgcgtcgctgaaggttggggtccttggtgcgaaagggaggcagctgcagcctcagccccaccccagaagcggccttcgcatcgctgcggtgggcgttctcgggcttcgacttcgccagcgccgcggggcagaggcacctggagctcgcagggcccagacctgggttggaaaagcttcgctgactgcaggcaagcgtccgggaggggcggccaggcgaagccccggcgctttaccacacacttccgggtcccatgccagttgcatccgcggtattgggcaggaaatggcagggctgaggccgaccctaggagtataagggagccctccatttcctgcccacatttgtcacctccagttttgcaacctatcccagacacacagaaagcaagcaggactggtggggagacggagcttaacaggaatattttccagcagtgagcaggggctgtatgggacgcgggaggagctcagaggaggcgcggagagtgcccgag

SEQ ID NO: 226957 - DNA, 85 bp, Homo sapiens; identical to SEQ ID NO: 197459
  chr1:36235729-36235814
  hyper

SEQ ID NO: 226958 - DNA, 173 bp, Homo sapiens; identical to SEQ ID NO: 197460
  chr1:36615012-36615185
  hyper

SEQ ID NO: 226959 - DNA, 77 bp, Homo sapiens
  chr1:36690054-36690131
  hyper
gggctggttgttccgttgcgagctgcagctgcgatctctgtggtaggcccaggtgagtgagcgcctctgatggaagt

SEQ ID NO: 226960 - DNA, 40 bp, Homo sapiens
  chr1:36789376-36789416
  hyper
gccggggaggccgcggcagggacccgcccccaggccacta

SEQ ID NO: 226961 - DNA, 173 bp, Homo sapiens; identical to SEQ ID NO: 197461
  chr1:36863407-36863580
  hyper

SEQ ID NO: 226962 - DNA, 347 bp, Homo sapiens
  chr1:36915997-36916344
  hyper
agagccccggggttcggtagccagtggcctgaaggccaggccgcagcgtcccaatagtccggttgctggggcaacgccgtgacgggaagagcgagccaatcagaaggcggtttggtgggaggtgccctgaagacgggagctaattggtctgggtggtggaccgtcccggggggattggtccgagccagaggccggcgcggcgttgggcgcggctggggagctgtgcttctgagagtaggtttccctcgaaagggcgagggccgggccagggctgggggtggtctcgacacagccagcccggcgcttgggaccccggccgctggcgcggggcctcaggttcctataac

SEQ ID NO: 226963 - DNA, 1023 bp, Homo sapiens
  chr1:37498398-37499421
  hyper
ggaggagacccacccgctgggtttctgaccgcctcctaggaaaatctcaagtacggaaaccaagcccgacaccggttccggcacctctttcacgccgctggcagcccaaggtccgccctgaagaagagctgtagaggaggaaggtggccctggctcggcggagtccggctcgcctggtgccaggcgctggtgctggcgccgagtgaacccaggcggcccaggtgtccggcctggtggcgggcgcagggcctgcggtgatggaggctccgtcttagcccggccaggcccagccctgccggtcgtcggcccgggacatgcgcggcgctcaggcctgcagggtgccttgggcggccacaacaaagttaaagaccggagtaagagtctccggcgagaagagacgcggagaagccggagccccggaaagccgcgcgcagccccgccagccgccgccagctgcggaggaattcgggctaactttaaaaaccgctggcgtccctgggccgcctgcccgggccgcactgggcggcctccatcgtcccttccctctacctgcactgccccaggcgggagagaggccttggccccgagggaccagctgcagcgggcagcggggtcctgctcccccaacccccgccccatggcacggggctgaaccggtaccaccgaggccaagggcgaccaccaggagagaagaccggctgccctcgtcatgcgaatctgtgccctgcgacctcgctgcggctgctcgagctatgccagaggtggggacgaagggcccgcggggagtgaggtgggcagaggagagaagttggcgccttccccagggtccccactctgcggagaagcccgatcgcagaactcggtcggctgcggttcatgctggcagtcaccgcgaaatgcgccctcgactcgggatcgcactggaaaccttcgccacactgtgccaggtctgacctcccaggagcgcgccaagggcccctcgcccactgcggcccggcggcctcctccccaataagtaaggcc

SEQ ID NO: 226964 - DNA, 738 bp, Homo sapiens
  chr1:37500441-37501179
  hyper
gcgagagctggcaccgcgagctgggagacggcggcagcccagcggccggaccagctggaggagacgcgcccgccgggagcagcgagaccgggagcccgccgtctgcggagcctggcctcgcggctcccacgcggcgggcgctggctggacggcggtggcagcgggagactgacccgggaaccggcttccctccccaaccccattcctcctggcagcagagttggggctgggggttcggagaggcagaattcaaagcgaattgtctacgctgggccaggggagctgagggagttggtagaggtgggagagcccaagtcagaccccctgctgtgggaagctggacttgaccgcgcacaggtcctggggctgcggaggaggaagaccgctcacgccttagatgtaggggggcgtgggcgccgggcccgctccctctcagccctctcccgtaactgtgcaggaagggctggtgccccctccctcattctcctgagaaagaataaagagaaactgtaatttgtcgtgggatggagtaggatccgtgggggagcaagctaaaggggttaaaaagaaaaacaacgttgtttattagcaataataattttttttcaagtggcgctgggtgtgagggaagggaaaggctgtggagcgaggctggagcaggaggctgcgaattactcagttaggcgagtttaatgacctttttgacagagacaaagcggtgccgatacagtagataaa

SEQ ID NO: 226965 - DNA, 295 bp, Homo sapiens
  chr1:37501688-37501983
  hyper
tggaaaatgttgcccgagggatcggagggaaggacacgcagaccaaagctagggaagcagcagctgccacctcttgataaaaagtaagggctccagtgggcgccagtaaggaggaagtgcaggagagggcagcagagggcgcggcctcccggatatagctgggggagccccttccttggggacgcacacccctccccatcgcctgcctatcagcttccgcaacaggtttggttgccccaaggaaccaaaaggcctagctgttctctaaggaagaaaatttcggtgcgctgataga

SEQ ID NO: 226966 - DNA, 164 bp, Homo sapiens
  chr1:37721108-37721272
  hyper
aaaggagccattttcgggcgaagccaggggcccacgtgggagggagctccaggagagatcagtctctgctggcgtggagggggcggggagggggctgtccgtggtgctgaacccaagctatcctaggattgccaggcagtacgaatgaacgctggttaatggaa

SEQ ID NO: 226967 - DNA, 73 bp, Homo sapiens
  chr1:37940474-37940547
  hyper
gcgggtctcgggccgggacagcctcggcgtcaccagctcccggcagccaaccaaagttttccagcaacttttc

SEQ ID NO: 226968 - DNA, 82 bp, Homo sapiens
  chr1:37940787-37940869
  hyper
tccagtcttagttcagactaagttccgatcttcgagccaccagctaacagctggatgaccttgagcacgtttttaatgtctg

SEQ ID NO: 226969 - DNA, 160 bp, Homo sapiens
  chr1:37980346-37980506
  hyper
tgttgggctgaggcgggcggcggcggcgcgaggttgggggcggtccctgcgccgccagggggcgcccccccgctctgcgcctgcgcgcgcggcttccggagacgcgtgcagcgccgtgccgagcttcgctaaggccggggctctcgaaggtccttctcgg

SEQ ID NO: 226970 - DNA, 105 bp, Homo sapiens; identical to SEQ ID NO: 197468
  chr1:38019907-38020012
  hyper

SEQ ID NO: 226971 - DNA, 135 bp, Homo sapiens; identical to SEQ ID NO: 197469
  chr1:38061487-38061622
  hyper

SEQ ID NO: 226972 - DNA, 516 bp, Homo sapiens
  chr1:38100075-38100591
  hyper
cctgtcctgatcgccgaccggagagcgatcagactccccttcctttctgtctccccccacgcacccagctagaaccagccccgacgggagggcccgccgcgccccagctcccggggaagggggcgctggggagaaggatggggcagctacgaggggactcaccttcgtgctgccagtcgcgacgggggcaggcccgggaggggcgagggcgcggcccgctcacccgcccgctgcgggactgtcctgggcgcccggctcgcctgcgctccgcccgcccgttcccaagttgctcaatctgcggacggctcacgccctcggggccagcgccccacccggcgcatcggtcctccggggcggctcggagctgccctcgttctccgcagcacccgagcggatgccctactctggccggtcgctccgggctctctgccctgcgctggtgctctccgtcgcgcctccgctcggccggagctcccagcccggagaggggccagtcctctgcgagcaccagggagg

SEQ ID NO: 226973 - DNA, 256 bp, Homo sapiens
  chr1:38157954-38158210
  hyper
gccagggcggagccgggtgggttggtggggagggcggggaaacaagcctggaccacaactcccaggagtacccgcgacggcggcggcctcgctgtcgcactcaggctatagggggcgcattgggcggaagaccctgggccggcaggaacttgcttgtgattggatgttgtgggacggcggcttctcattcgtcagcctgtgactgtggagtttgaattgggtggcggttgactgtagagccgctctctctcactgg

SEQ ID NO: 226974 - DNA, 443 bp, Homo sapiens
  chr1:38219544-38219987
  hyper
gatggtgcgaaggtcgggagcccccctttcggctggagggtaggcagggtgaggagagggcagcggaggggcgctctcctcagtgatctgccaggcatcctaaccccatcctccgtctggactctcgcagttgtcctggttcttctcatcaaaggccccggcccccagggcgcgtccaggctccgctcccccgtacgccgccttccggggcgctggcccccatatccgcccacgtgcgccccagtgcggagaccctgccctcaccaccacctggatcaggccttccttcttggccactcccaccccccaccctccgcagtgcagcctggaggggggactcacgggtgcaggaagccgagggcgggtcggtgggtgagcgcgcatagctgtcctggcacacgcagaaggtggaggcgttttccagggcccggctgtgctctggg

SEQ ID NO: 226975 - DNA, 998 bp, Homo sapiens
  chr1:38229929-38230927
  hyper
tccagggcccagaccaaccccgcggtcaacgcctcagattccagctcctccggattctgcacctagatatgacgcctctggattcaactgagcgtatagctcccctaaatgcacaatcagaggcaagacgcgggctccagtatcgccgacagcctcaaacccggcaacgcggagcgcgcccggcagactacgctcagaattcagcactgcggacagttccatgatcagcacgtcgggcagcgcccggatccagccccctcgaccagcattccaccttctgttggccacactgtggtctcctagcccctgtagtccgggctccatcccgtctccccatattccgagctcacctccgcatctccctgtctccactcttcatctccccgcccccgcacctcccacctccaatcactcagcttgtccgtctcaccggccgctggaccgccgcctctggctcccgcggttcctggcctctttctttcccaacctcccgggtctccagcccccaagctcctcagcgcccctctcttcgctactgcttgatcacatttttctctgtctctccagttctttgctgcctgcttgcttcaagccccaatacagactctagtctctccaatgactccttcccccagaacccccatcgccagccccctatcttttggtatgccacgctccgagcagagctcaccagtcttctcaccttcctcggcggtcccaggccgccagggtcccaaaagcagcgcgagacagagctgcatccggcagaggaagaggcgcagcgggtgtggaccggcgcaggtctccatggtccgcagaccgagctgtcagtccggcggcggctcaagccgcgccagcctagcaccgctgagcaatgcccccagaccccagagccagcggggggcggagtctcaccgctcaccatcatccatgggaaccaatcactaggcaccgccgcgggatgccaaccaatccccgccagcagagggtgggaaggt

SEQ ID NO: 226976 - DNA, 71 bp, Homo sapiens
  chr1:38273328-38273399
  hyper
atatttccagttccggattccttggtgagcctggacaagcccctcccgctctctgcgcctcagtctcccaa

SEQ ID NO: 226977 - DNA, 136 bp, Homo sapiens
  chr1:38412697-38412833
  hyper
ctgccccaggttccgggacagtgactacatttcccaacagcccctgcgccacatggtggtcagtcagcctgcaagtcccagcatgcccgagtcaatcgtggggtggggagtctctccatccgtgttaaccccttag

SEQ ID NO: 226978 - DNA, 473 bp, Homo sapiens
  chr1:38510053-38510526
  hyper
tctctaacttttccaagtttcgtttggtgtggccaggagggcagggccccgcggggagcaggggccgcgctatgcggcggtcggtctgcagcagggcagaagccccttcccgtctgggtgtgtgggagcgcagacccctccggcgtggccgggaaccaagccggggctcggatgaaacgaaacgaaaaatgaacactcgaattttttttgttagttttttttttttttttttgcttttttttggggggagggtagggtagggaaatataaggggaaaaataaattaggctagattaaagctttggctatttcctgcttttatacacagacgcggctctcgcgacctcccctccggggccccgataaatacagtatactgcgatttaaattaagggcgcgggcggagttagaaggaccccaggagccgagaggctccacgaataaataaaaaccgtaaaaaaccaagcccggag

SEQ ID NO: 226979 - DNA, 42 bp, Homo sapiens
  chr1:38512397-38512439
  hyper
ctgcgcggtggtggccatgccgccccgcgccctgcgccgcgc

SEQ ID NO: 226980 - DNA, 290 bp, Homo sapiens
  chr1:38513055-38513345
  hyper
cgcgactgctcaccgcgcccgcctcgcctcccgcggctgccagcgtgcactgggcgctcctcggcgcgtctgcccggcccgtctcggctttccttctccttcctctagtcccagcgtcacaactccgccgacctcctctgccctgagagcgcgtccggtgcgggcggagtcggacggactctggcttcacgcctcgcgcgggcacaccttctcccgggcactgaggcccaggtgagtaccgcgcgggcagctggggctgggacggcgggcggcagcggttctacagtcct

SEQ ID NO: 226981 - DNA, 56 bp, Homo sapiens
  chr1:39270107-39270163
  hyper
gtagctgccctggttttagaaagagctgcgggctgcgggcccggctgtccccgaga

SEQ ID NO: 226982 - DNA, 205 bp, Homo sapiens; identical to SEQ ID NO: 197474
  chr1:39338990-39339195
  hyper

SEQ ID NO: 226983 - DNA, 127 bp, Homo sapiens
  chr1:39492081-39492208
  hyper
ctgcttatgtccgcgcggcagcttagcttaaggaccttccttccgaggtctctttaacagatttcctcttggcttgctgtgtgtccccttctcccagacctgaactcagggcgtgttccctgccctc

SEQ ID NO: 226984 - DNA, 95 bp, Homo sapiens
  chr1:39864297-39864392
  hyper
taaatagttccactcgctgggggtgcttctgtggttttcctctccttttaagaaaattagttaagaaatagtgttgcttccgggagtgacttaca

SEQ ID NO: 226985 - DNA, 42 bp, Homo sapiens; identical to SEQ ID NO: 197475
  chr1:39874199-39874241
  hyper

SEQ ID NO: 226986 - DNA, 230 bp, Homo sapiens
  chr1:39874757-39874987
  hyper
gagctagcgagctagcgggtcgcgctgcgcgggggaggaggactcgccccccgcccgaccctagcggagccttttgttcccagccagaagtttgcatgccgggaccgtgacagctgcgggcggggaggacggcggggccgcggggccagcggcgtggtggagaatagaggcggctgcttgtcatgcagcccacggcgtggcggctgcgggccggggactggcggcggcgg

SEQ ID NO: 226987 - DNA, 112 bp, Homo sapiens
  chr1:39956620-39956732
  hyper
gcccagctggaggcaggaggcggagcctcctccgcaaagctggatcagtaccggggacgcagggcgcacagctagggctggcgggggcggcccgactggggcgctgcctggg

SEQ ID NO: 226988 - DNA, 64 bp, Homo sapiens
  chr1:39956912-39956976
  hyper
ttggctggcaccgcccggctctccagacggggctacggccgcgtgtcgggcccggtggcgacca

SEQ ID NO: 226989 - DNA, 53 bp, Homo sapiens
  chr1:39957156-39957209
  hyper
ggtcgccccacccgcaacacctgccgccgcccggggctcctagcgggcgcggc

SEQ ID NO: 226990 - DNA, 45 bp, Homo sapiens
  chr1:40042402-40042447
  hyper
tttcctcaggctgcgaagcccgaaagcggcggaggcggcagcgac

SEQ ID NO: 226991 - DNA, 100 bp, Homo sapiens
  chr1:40105586-40105686
  hyper
gccctgggaggccccgcggggaagccaggagtccccgtctgtccctgggtcgcctgggcgctgctggcctgtagaggcgccgcttcgatgcccgggattc

SEQ ID NO: 226992 - DNA, 183 bp, Homo sapiens
  chr1:40157111-40157294
  hyper
tgcctcccgaaggcgacactatttgcataagccccgccccatcccgggcaggttgcacggctattggctcctctggagcggagtggcaggcggggtttcaggtggggaccgggtggccggcgaggcccggccgcaggagcgcgccccgcctgcccgcgctgaccttcccggagtcgccgggaa

SEQ ID NO: 226993 - DNA, 661 bp, Homo sapiens
  chr1:40157668-40158329
  hyper
gggtgctggttgcgcgcggagagcgcggtatgggtggcgaagtcccagcctctacctagccccgcgctagtcgtgggttccctccagccacccctctggcccttcattccggtccctccccagacgggccctcctcctttctcatggacccccaagaggcctctcgcgttctcccccgaaggacccctatgcctagccatggatcctccattccccaccctcccgttttcccgtcccgcagacggagccggtccccagccgccgccagtctccggcctcggatgttgacacaaacccgaggcggtttacactgagcgggtctggaagctttcagggccccggcaacacctcctccccgcacttgggggtctccccacagcccgggccggccgcctgggctgcactggcgtctgagagctcctgacacaaggctgtgggaaggaacccttttaagccaaactgggggcaaaaggggagccagacatccccgggctgggccacgtgcggggcagggacttctaaggatctgtcgaaagtcggggcggacggctggggattggcctaatcggagcgcggacgctgaagagcagcggtgagaggcggggcttctgtccgcgcggcgaaggtagaggtgggctgggcggggcgatggaggatgggg

SEQ ID NO: 226994 - DNA, 120 bp, Homo sapiens
  chr1:40254568-40254688
  hyper
gcccccaccccgggactgaccaatgggggggcgggggcggggcctgggagcgggggccacgcctgcgagggggcccggggctgcggccggtgtcgcgggtggggagaccccgaggtgcta

SEQ ID NO: 226995 - DNA, 77 bp, Homo sapiens
  chr1:40367951-40368028
  hyper
tccttgcccactccgagctggggaattagggctactccccgccccaccctgcgcgcctactttccccggcgcacccc

SEQ ID NO: 226996 - DNA, 53 bp, Homo sapiens
  chr1:40723946-40723999
  hyper
gggatgtgggcatcgctggacgctttgtgggagatgccggccgagaagcgtat

SEQ ID NO: 226997 - DNA, 880 bp, Homo sapiens
  chr1:40781096-40781976
  hyper
tgcagaacaaacggcgtccttgtggtgcgggccggcgccgcctattggcgacgaggggcactacatctccgggcaccccgaagtccccacccccaccacagcgctcacaaagttctcctttgtctgccgcctccctcccgccctggtctcaggttagagacttacgtcgatgccgtcggatccaggcactcccggcggtcccgggggacccggggggccccgctctcccggtggacctctctgaaaaacacacacggggtggggcagtcctcagacagtgcaggaagctgggcgtccccggggctgcaagcgaccctgggagcggggtcctaggggcgcagctcttccgcgaactcccacgtattgagaatcttctgtatagcaggcactgtgtgccattacatgcattcattatcttacagaatactcagaaccgggaggcgggcgctattacgggccccagtttgcagtcgaagaaactggctcagaacgtgaagggtccatggtcactgagagtgggcggcggcgccaggagtccgccctggatctgcccgactccttccactgtgccagtttgcccttgcgcggtcgcggtggggaatagatggagacgtggacagctcaaataaatcacagatggaatgtaaggttgtgcctagcaggctgccggccctcagtgagcggtggctcgggttgttgttcttacgtgaacgacaggcagagacagcgcctcctcctctccccatggtgcgggaaaacccgacgggaaagtgggggaggcgcagagaaaggaggtgtagggaggtgaagcgggtactatcttcccactcggagcgccccttcggcagcacagctgcccggtcctccctctgctaagccc

SEQ ID NO: 226998 - DNA, 646 bp, Homo sapiens
  chr1:40782311-40782957
  hyper
ctctgccctacccgcgcgcccgcagcccccggcggccctcggaagggagacgtgggtaggcgggcagggccgagaggccgcctcggggcgacagcggcgtctggttggagccggcgccccctgggaggcggcgggggcggaggctgcgcagcgggtgaatgagcaccattgtatgccccgccacctgggctccccgggctgccaggaccgggcgccagctcctgccccacgctgcctgtcccgggccgggccgcgcgtctggggacgggtcccgtttgactctccggctcagccacctccattcacggtgccgcgatgggcaccatgtatgcacccaccgaggggacctgcccgcggcgctgtcctcaggtggcctctcgggctaggggtgtcagtaggcgcgggacacaggcagagctcctccatcccggactccagaccccgcaccctggaccctggcagcggaggggctgcgaaacttacaatctgcgccagagcgagcactaccacctggaggagaacaaggaggctgcggggggaggccgtagcggcggccatggctggcggcgagaccaagggggacgggtgcgtgtccgcgcacgcaccgacggcagagtctcccggcgctcctccagcgctggctgtt

SEQ ID NO: 226999 - DNA, 46 bp, Homo sapiens
  chr1:41131456-41131502
  hyper
gcctaggggaatccggggagtttggcttgccgggttgtggttgggg

SEQ ID NO: 227000 - DNA, 388 bp, Homo sapiens
  chr1:41267899-41268287
  hyper
ggtgctgtgaggtggaagggcgaggccgaggcggcggtggcgtcgcgtcccccctctccgcccctggcctcggggacgcggcggcaccttcacactttccgcttggcccgctgctcgcctttcaggccgccgcgttttcaattgttaatttggaaacggaaaaagtagccggccgggcgggggaggccgcggggaggtaatcggagccgcagcaccgccccggcccctcccgctctcggggcctggcattggcaaagccccgcccctcccagggacgcaagagccccgcccaccattccccgcccccggcatgccccgcccatttccgtaagccccgccctcgccgaggcgggctgggggcacctgggagtgccgagcagtggcgccc

SEQ ID NO: 227001 - DNA, 701 bp, Homo sapiens
  chr1:41284001-41284702
  hyper
aggagccagggtgacgcctttactcccaatcccgactctgaccctggagacccgcacagattcagcggaccctccccctccctccccagtcccctgccacatccccagaagtccccgcctccgggtccgtgcgcggggtaggctggctgtgatctcgccgcccccgcccctgcagacttcatcgtgttcgtggcctcggtggccgtcatcgccgcgggtacccagggcaacatcttcgccacgtccgcgctgcgcagcatgcgcttcctgcagatcctgcgcatggtgcgcatggaccgccgcggcggcacctggaagctgctgggctcagtggtctacgcgcatagcaaggtgaggcctgcaagccgcgcgcggagacccgagggcgtgtctggggcacgaccagagcgggcagggcggagagggcgaggtcagaggggctgtctccgtgctgggaaggggtgtggcctgcgggggttggagccctagcaggaggcgaggtctaagcgggtggggcgaagtggattctgaattaggtaggggcgggcctaggagtccggaccggatcagggggcggggccggagaggcggggcttgagggtttcccctggatgcttctgggtttgaagggaccactcgtaccacaaagtgggcagctgaggtgggacttgagggtggggctggagcggggctagggtggg

SEQ ID NO: 227002 - DNA, 483 bp, Homo sapiens
  chr1:41327810-41328293
  hyper
ggctgcctgcggggacagcgcgcggtggtcagcgccggctcccccggcccgggccagcggctgctctgcggcgggagacccgggcaccgtgcggtccctgcagctcggccgggcggagcaaaaccaaacccgactggtgccccggcccagcccactactgcgcaccttgcggccgcagcctggggtcacaaaggcccgcaacctgtagtgctccgaaacctccgcgtcgcgtagctgggctcggcgtattcttatacccagaggcggggcttccccgccctcggacgctcattggctgggcgagacgcttctgggcgggccgcgcacgcctgcatctaggtcttggccccgcccctcccactggaaccccgccccttgggactccggccacgccccaggctctgagcaccgccctggggcggggtatttggcactttcggagggattcggtctggccctcagggcttcggaatcggacttggc

SEQ ID NO: 227003 - DNA, 160 bp, Homo sapiens
  chr1:41444960-41445120
  hyper
gaccctccgcacttccgtcttggaggccagggtggcgctgccgccgtccctcgcccggaggcagagatgcgctggcgcatcaccgccaggagcccacagtgaaagaccatcggatggaaggcgacgcccagaactccaggagaccgctgtgggaggacgc

SEQ ID NO: 227004 - DNA, 35 bp, Homo sapiens; identical to SEQ ID NO: 197482
  chr1:41446124-41446159
  hyper

SEQ ID NO: 227005 - DNA, 63 bp, Homo sapiens
  chr1:41832018-41832081
  hyper
ttgctggcacgcccggcagactcccacgaccacctgctcacacccacccacgagcgctggcgc

SEQ ID NO: 227006 - DNA, 172 bp, Homo sapiens
  chr1:41832321-41832493
  hyper
ggtgagggccccgcctgccacctggcgccgctccagcgggacgatggcgggcagcgccgtgccaggcggtaattgcagacagactaatttaaagagatgagacggttatttttaactcgcgttaaggtaatgaacggcgcggggggtttgcgggttcgaaagttcagcgccc

SEQ ID NO: 227007 - DNA, 1993 bp, Homo sapiens
  chr1:41847289-41849282
  hyper
ctccatccggcacaacctgtcgctgcacacccgtttcatccgcgtgcagaacgagggcaccggcaagagttcgtggtggatgctgaaccccgagggcggaaagacagggaagaccccgcggcgcagggccgtgtccatggacaacggggccaagttcctgcgcatcaagggcaaggcgagcaagaagaagcagctgcaggcgcccgagcgaagcccggacgacagctccccgagtgcgcccgccccggggccggtgcctgccgcagccaagtgggccgccagccccgcctcgcacgccagcgacgactacgaggcttgggccgacttccgcggcggcgggagacccctgctcggggaggcggccgagctggaggacgacgaggccctggaggccctggcgccatcatcgccgctcatgtacccaagccccgccagcgcgctgtcgccggcgctgggctcgcgctgtccgggtgagctgccccgcctggccgagctgggaggcccgctgggcctgcacggcggcggcggcgcggggctgcccgagggcctgctggacggcgcgcaggacgcgtacgggccgcgggcccgcgcccaggcccggcccggtgctgggtgcgccgggggagctggcgctggcgggcgcagccgccgcctaccccggcaaaggggcggccccgtacgcgccgcccgcgccctcgcgcagtgccttagcccaccccatcagccttatgacgctgcccggcgaggcgggcgccgcgggcctggcaccgccgggccacgccgccgccttcgggggcccgcccggcggcctcctgctggacgctctgccggggccctacgctgccgccgccgccgggccgctgggcgccgcgcccgaccgcttcccggccgacctggacctcgacatgttcagcgggagcctcgagtgcgacgtggagtccatcatcctcaacgacttcatggacagcgacgaaatggacttcaacttcgattcggccctgcctccgccgccgccgggcctggccggggccccgccccccaaccagagctgggtgccgggctgagggccgcctcccgcctccgggcgccccgtcccgtccccagggggcctctgtcttcccatcctgattcccgggtccctgcccccgactctagctccccaggaggcggccccagcccagctagggacccctctcggaggccggccgccggggaaggggagggaggggccggggcaccccactgctcctgcccacactcctgagatccacccccttctcctgggcaggaagcctgggagaggaggctgaattccaggctggctgggagtagggaggagcggggtgggccgcctggtgtggacggtggtcggggaagccaactaggagatgggccagggagcgtttacaaatcttcagtttcatttgcggaggcctagccgtgaccccgcgcccaccccaaacacggatctgattcccacttgacacactttcccactggtcttagtctcacccacccgaagccagcaaccctctgcggaaaactcacacctacctatatccatccaccctgagcagccctccacccccaaatcgccctccgacgaccgccacccccacagttcagtctccccctcccatccctgccggccctcgcttctcccctcccccgtcggagtcagtccctctcttcaaccgcccccaccccctagtactggtctcagcttctgcagcgggcctcagccccgtccacccccaaccccgacgcccctttctccgcgccagttctggcccttctcccatatttataagtgtccggccgggacgggcggtgggcgcggcgtccccggcgcgtatcgtaggcagtgtaccgtggccgtgccgtcagagtgtgcgtgtgcgtgtgtgccgtgtcgaggctgtgtagagtgcattgtacagcatattttcatgaataaaattgttttaaatatttcccgcgccttgggctagag

SEQ ID NO: 227008 - DNA, 71 bp, Homo sapiens
  chr1:41982090-41982161
  hyper
actccatccttcagtctcttgggccgtaatccttggagtcctccatggctccttttcgttcttccccctct

SEQ ID NO: 227009 - DNA, 163 bp, Homo sapiens
  chr1:42127233-42127396
  hyper
aggaggggctcctcggaggatccagagcaatgctagtttaactcactcccaatgagccccgaggagccccaggctggtgggctctgacagactgaaactgcatggccttgggggaagctagggctgccaaacccattcagcagctcccgccgggtgtgccgtg

SEQ ID NO: 227010 - DNA, 130 bp, Homo sapiens
  chr1:42128197-42128327
  hyper
cactgctggccaccccgggatgccttcgcggccggggtcgcagatgggcccgggcgcggctggcggctgccaggggagggtctcctcgcccggggaatccctggctgccggcggccgcggggagggtctg

SEQ ID NO: 227011 - DNA, 48 bp, Homo sapiens
  chr1:42800266-42800314
  hyper
gtgaggtacagcccgccctgccggcagaaaagcgcccccaagcttaaa

SEQ ID NO: 227012 - DNA, 456 bp, Homo sapiens; identical to SEQ ID NO: 197489
  chr1:42928782-42929238
  hyper

SEQ ID NO: 227013 - DNA, 111 bp, Homo sapiens
  chr1:43147843-43147954
  hyper
actctatggttttcgtggccgactactctaattctagttccggtctctatggcggccggcggaggcaggaacggttgtaggtcgactgaattagccgccaaaggtccaatg

SEQ ID NO: 227014 - DNA, 534 bp, Homo sapiens
  chr1:43232839-43233373
  hyper
ggagccccgcctccgagctcaggccttgctcagtcgaactgacgcccagtagacaagaaagacggaagctccgcccacgcgcctttatgcgcaggctcttcctactcgcacagcccagggagtggggaggataaggcgctgtcatggaggacgccgccgcgccggggcggaccgagggggtccttgaaaggcaaggagcgccgccagctgcaggccagggaggtatgcggggcgggagtcagcagggggaagtcagctcccgcgaggcagccggtctcggggctccgcgggaggccgacggcgggagctcacggcttgtgttcctgggtgtgtgtcgcaggagccctggtggagctcaccccgacccccggcggcctggccctggtgagcccctaccacacccaccgggccggggaccccttagacctcgtggcgctcgcagagcaggtgcagaaggtgaggaggcgcggccggggcagcgaataaccatcttcgttcacgttgtactctgcgtctttcggctcagacctcact

SEQ ID NO: 227015 - DNA, 79 bp, Homo sapiens
  chr1:43282586-43282665
  hyper
cccagcgcggaaccgtcctaatgggacgctgagacccagagggcgcccagggttttcccactgcggccggcctaactcc

SEQ ID NO: 227016 - DNA, 910 bp, Homo sapiens; identical to SEQ ID NO: 197491
  chr1:43389629-43390539
  hyper

SEQ ID NO: 227017 - DNA, 62 bp, Homo sapiens
  chr1:43424613-43424675
  hyper
gtgggcaggacctcggggcggggcctggggcccagcctgtcctgggcggcgctctgcgggga

SEQ ID NO: 227018 - DNA, 506 bp, Homo sapiens
  chr1:43613349-43613855
  hyper
ttctagtaaccagccgggcctgaggagctggggcaagtgagtacagtgccagaatagggcggggcgcgaaataagatcccgaccggcgggcgcggggcggggcgatgcaggcagggtaaggggctggcagagtgagacccgccccgaccgggcagcactacccgagcgctgttgcctggagaccacgggacgccgttgcctggagacagcggggacgcgttgcctggagactgtggaaggcccaggcaagagggcgcgtggcagcccaaggccatggcgggacacccaaaagagaaggtgattccagatgaggtccatcagaaccagatcttgcgggaactgtacctcaaggagctacgaacccagaaactctacacgcagtatcacgtgaatcccctccgcaagagtgagaggcacggcggggtgggggaagggcgagagcgggagggcgccggggaaggaggagccctccgggttgcggggtgggaacgcggtcccagcaaaaa

SEQ ID NO: 227019 - DNA, 531 bp, Homo sapiens
  chr1:43637578-43638109
  hyper
ggcccctctagcacgacattgaggcctggcttcagaagccctcgggaaaacgcatcctgcaactgcaggacacaatcacggtcactcccaggggtgtaaggccccctctcccacgcccagccccacgagctcggctgacacctacctctctgtctgtgacaagggattcatcggattccgactccgaatccgagagcgggggagtgtccatctcgccgcacgcacgtcccacacctacaggaagaaacggggtatcccgagacccaagcggctagcagagggcggccctggccgctgctgcctgccttcagccccctactcccacgccgtggctccacgtgccaccgaatcgctccagcgccagcaactcacagctactgctcaacttttgattgggacttccgcttccggcggcaaaccatacttccggtttgtcgttgctataggaaccgctacggcgtttgaaagtgtccgggttgcttaggatccctacaggtagcgcctctggatacatgcgtggtctgctgaccc

SEQ ID NO: 227020 - DNA, 154 bp, Homo sapiens; identical to SEQ ID NO: 197496
  chr1:43832812-43832966
  hyper

SEQ ID NO: 227021 - DNA, 45 bp, Homo sapiens
  chr1:43834166-43834211
  hyper
ttaggatctgctgcgagggctgcctggaacggaggtgagaggata

SEQ ID NO: 227022 - DNA, 211 bp, Homo sapiens
  chr1:43855424-43855635
  hyper
ctcacctgcattgcggcggccgaggcggctgccacgatttcacttccggttttccagtcagcaaacgcctacgagaaggcttcgtccaccaatcagaaaactggaactcggccctcccaccaacttccggttcctgctgggtgccgaggtagcgaggtcaggggtcaagagtggaacaccctcactggcccgggccggcgcgggagggctg

SEQ ID NO: 227023 - DNA, 281 bp, Homo sapiens
  chr1:43919241-43919522
  hyper
cagccctcccggcccgcgacgcacccgggggcgtgttgatcagtacaagccgcagccccgcttctcgcgcggcgcgcgccagcgcctcaggcgtctccgcgtacggccaggccacctcgacggcctcgaagcccgagctgcccgcggcccgcacccgcgcggggaggccggagagctcggggaatagccaggacagattggcggagaagcgcagcggcgccatgcctggggaggccgggccgggcggagtccgcgggatccaaaggcggcgggcggcgggc

SEQ ID NO: 227024 - DNA, 34 bp, Homo sapiens
  chr1:43996430-43996464
  hyper
ggctccgcggctctacgagcgagagtgcacgagg

SEQ ID NO: 227025 - DNA, 217 bp, Homo sapiens
  chr1:43997371-43997588
  hyper
tggggaggggccgaacgggctgtacccgcccccaaccgggtgcaacgccctggaggccctggagcgacctgtcccgtgaggacgtggccactcggaccctctccgaaagttcactcagtggccgccccgcgtcccgtcccgtcccgtcccggctccccatcgccgtgccggcgtctctgtctcggctgctttctgttttcctcggcgtctctgcctc

SEQ ID NO: 227026 - DNA, 345 bp, Homo sapiens
  chr1:44015775-44016120
  hyper
cctgtctggtcccccgggctgccttgggccagcttggcctagtctgttgggtgggcgggcagggtgcaggctcctctccagcctccaagggaggggagttgttctgcctcctcgatagccccaggccttgggcacagcccagcctcccacggctcttgggccctcctccttccaggccgccggtgacccacacctggctctcctccccggcgtctcctctccgcttctttgtttggagcggaggccccgccccaccccgcccccaggcgcactcgcccggccattccggttcagccggttccagcccccagtttctgccgctgcaggtcccggcaggagctggag

SEQ ID NO: 227027 - DNA, 355 bp, Homo sapiens
  chr1:44115473-44115828
  hyper
tggcctatcctttcgttagcgacatcctatagtaacctcaccgcccttacccatctaccggaccggcccacttccaggtactagcttctttcaaccctgattagttatgggtgaccaggagcccgcctatgattggccagcttcgcgatccagctagaggctcactggccgcggtccctagtggtacagcgtttcctcccggcaacagcccgagccggcgctcataggctgagcacactgaggtcgggactgggaggtggctgcggcgcgtgctcattggctggtgtatggcttgcagccacccttgaattggttgactctgtacggctgcgcagatgccgactttagaggaggc

SEQ ID NO: 227028 - DNA, 58 bp, Homo sapiens
  chr1:44411960-44412018
  hyper
tattgggtggtcccgagagccttccttttttccttcctgaggcgtgccaagtcccctc

SEQ ID NO: 227029 - DNA, 270 bp, Homo sapiens
  chr1:44412317-44412587
  hyper
ccttccggctaggcgcaacacggactacatttcccagggtgaacagcggcggggcctagactcggccgcggcctggggcggcgagccgctccaccgcctgctcaggggagtgcgagctggcgcgaggacagggctaaggacccggaatgagtttccgcgcagttccgctgggccgtgccggcctgtaccgggccgtgccgagccagaactggcaggagtgggggcctgagttggaggtgccggggacaggcgctcggggcagcccgcgcc

SEQ ID NO: 227030 - DNA, 98 bp, Homo sapiens
  chr1:44435544-44435642
  hyper
ttggttctctgtgcggggcggtggcggggattggagggcgggagctgtgctgacttaggattggcaaaatcgctatcagccacgcctctaaaacccgg

SEQ ID NO: 227031 - DNA, 197 bp, Homo sapiens
  chr1:44441185-44441382
  hyper
gatctggctggagcgcttgctccctcggtcccgcctcggattcgggcttgcgggtggcgaccctgcctgcgcaggtgcttggtctgggaggtggttttagcgagggaatggcagaaaatggaggcctaagcagaggaatctgtctacacagctgtactgtcacctgggggcagcctgaggacgccccttcagggagg

SEQ ID NO: 227032 - DNA, 44 bp, Homo sapiens
  chr1:44445510-44445554
  hyper
cacccggtctgtgcggcctgcccgtccgcgggtgccacgtgttc

SEQ ID NO: 227033 - DNA, 224 bp, Homo sapiens
  chr1:44457110-44457334
  hyper
aggtgcccagggccgagcccaaagtgcttgggtcagggctcggtggagcgccgaggtgagtctgaactcccagccggcacgcgccgcccgccggaccaaacacgggagggggcggggccctagagtcgcggcgtggtttcccgggtgatggccacgcggaagaggtggggctagggccctggttcccactgcctggtttctgggcccccggcatccgagtcggc

SEQ ID NO: 227034 - DNA, 696 bp, Homo sapiens
  chr1:44870925-44871621
  hyper
cattcactgattagatccagcgctgagaggcagcactgctccttctctcacgccaactgagtctcttgatctgtacatgcaatcccaggcagctcgcgaacacaaacccggggccagccgcctactgctgctgctgctgctgccgctgccgccgccgccgccgccgctgcctccgccggctctgcgaacccgggacttttcatgcaccacactctccgcctgcttccctccgtgtcctgaaaagtgcgaccgttctcccaaggaatttccacggcaagtatggagatcagaaaggggtgtggacgtgtgtgcgtacccaagaggggtgggtgcgagggcggccggcttgttcaggaacctggctaactttccgggtccgtttcctagggattcgggcggttccctctggacgggggcagggactgggactcggactggcgcgtcttggatcatcgcgacggagcctctcggcatcggcgccctgcgcgctccgtgcgctgcctcgctcaaactttccgtcttgagttttccttaatgtgttttatttggggagggggggaggtgcaagggggagggaccagacgcgggaattggacaagttgggagggtgagggcactgcaagggaagggagcaggacttcttttctccgtctcttaataagccccattcccactttgttcgggtcgatatcgaga

SEQ ID NO: 227035 - DNA, 1035 bp, Homo sapiens
  chr1:44872033-44873068
  hyper
agagtagcccgacacgtgggatctcccgggattttcggggtcgggaccccctctcccagcggttctactgagcaaggcgggaggacgatcgtggagacgagggctacttgactactctacttgtagttttatttttatcttagacctgccttaaactgagtaacaatttctcttctgacttaagaacaaaacttttcagtgagcacgccggtcgctgcggtcctgcggccactgccgccgcgcttgtcagcccgggccgagcgaccttctctgcccggaacccagccccgccaccgcactccggagcctccggcctcccccaccccacccccgccccccaacccggggcttttcagggctcggcctgggcgtttcgcctttgtgctttgtaagagaaagccttttcttccagggcacaacaaacttgggcggagagcttccgtgtggccccccgggcgaggccgcccacggtggtgaggccatccgaggggatgcccggttcatcccccagtccaggagcctctccgagagctcgcggcccaggtcgaccccagctggcgagggcgcgcaggagtcccgaagtagcggggactagggcagccaggaggcagggggaaagctctcgcttcccgttaagcacaccctgcattctcgggtcgtggatgcagctccagcggagagcccgtgttccggccctgagccaggcgcgcgtcgcactgggtgggtgcatggggcccgggccataggtgtgggggcacagccctacctggccggcccgggtcgtctggggtctgcgccggcccactggcccgggagccgccgagggggagagcaccgcactcgctgcccacgacgcccagcagccacatcttgcctctcgcctccgctccggactcggcttgaggggcaaaggggagagaaaggaaaaataaagaaaaaaaagggcggcagtgaggaagcagcgaggggactggggggagcagagtgggcaggggggctttgccttgcctggcctcctctttccgtctcgcgggc

SEQ ID NO: 227036 - DNA, 182 bp, Homo sapiens
  chr1:44874561-44874743
  hyper
atgccgatcccgggcgcaggtcaggaagcccagaccttggactgggatgggagattacctactctctgagactttctcttgggctttcggtttttctgtgcgaaagtggctagttcgctccgcagagcgcggagcgctgcgcatcagcccagcctcagacattttcacgttccaaacgcgga

SEQ ID NO: 227037 - DNA, 370 bp, Homo sapiens
  chr1:44883883-44884253
  hyper
cgtggggatggccactgcgcggggagggttctgcctggagaaggagggatgggaggaggttgggggagcagggcgcgtggaggagggaggttggacgtgtgtacagcgcctggggacctcgctggccccttggtgcccccaggactctgaggcttctcctttcggcttgaaatgtttttcccttcctgcttttcaaatctgtaaaaatgttccggggaatgtttccgaagtccagggctccgtccttcggcgggattgctggcattcgggcaaggcgagtcgcggtggcctctgaggctcgcagccagcacagcggggctcgttaaagtctgggcaatttctggaactcttcccacgggaagttttccgg

SEQ ID NO: 227038 - DNA, 42 bp, Homo sapiens; identical to SEQ ID NO: 197503
  chr1:45097400-45097442
  hyper

SEQ ID NO: 227039 - DNA, 86 bp, Homo sapiens; identical to SEQ ID NO: 197504
  chr1:45097718-45097804
  hyper

SEQ ID NO: 227040 - DNA, 218 bp, Homo sapiens
  chr1:45098109-45098327
  hyper
tccctcactgcctgccgctcctggcttgcctgggtctcttcgactctggggcccgttggcttcttcgcagtcacggcgcctgagtatgtgcaaaccaaagctgccgctctcagtttccccgtctgtctaatggaggtatggcgcccagctcttgcccaaacctctctaaaggccctgaagaaccctgggggggcaataagtgccggagaatgaggaac

SEQ ID NO: 227041 - DNA, 80 bp, Homo sapiens; identical to SEQ ID NO: 197507
  chr1:45139911-45139991
  hyper

SEQ ID NO: 227042 - DNA, 118 bp, Homo sapiens
  chr1:45140252-45140370
  hyper
caccccactagctcggccctagcaaccatgccccgcccctattactgacccgcagccattggctaattcgcttgatctggatcaggtattggtcagccggggcgccggtcaggaagag

SEQ ID NO: 227043 - DNA, 231 bp, Homo sapiens
  chr1:45252005-45252236
  hyper
actcgcggttccgcgttcctgtcgcagtccagacccttccctggaggcccctgctcccaggactctcccaggcgccacctgcatccggctgtgggccggacccccagaggctcccggcgggcggcgcacctgcgtccaccacgtgctccatggtggggaagcgcttaagcacgcgggtgctgaccgagcgcagcaccagcacggacgccaggttcgcgtagcggatgaggg

SEQ ID NO: 227044 - DNA, 331 bp, Homo sapiens
  chr1:45284955-45285286
  hyper
gagccacaccaaaccgctaacagctactgtctctgggaatagaacaaggagtttggttggcgcgatataccgcccctgaacctctagccacaataaggcttaattaatgaccggacgacttgaaagcgccttccactgtttatctcttaaatctgcaacgaaatgcaacaaaaacgcaagaaataaacaatagaagccagtcttactgcacactgcagaagccaataaaccccaaatgtagctcaaaacaaggtgtcacgcaaacttctgatttttttttgttttacactgaatctctgtcactctgactagagggcagtggcgcgatctc

SEQ ID NO: 227045 - DNA, 811 bp, Homo sapiens
  chr1:45285406-45286217
  hyper
caagagactctcccgccccagcttctccaataggtgggattgcaaacaggcaccaccacgcccgaataagtttgtgaacatttggtacaaataacaaatgaccaagttccttggttgtagttgcctaacttttaatacttaaaaatgtagcctcaggaaataagaggcctcaaaaaattgaataaaaactcacaactttctctccacggaaatctttagtaaaaggcgaaagatttatgcgctttgaagagaaacccgagtatattcgtgacttccgcttcgaacctcgcagggagaactaacacttaacacacttatggttgttggatgcctgcgtggtacgcactccctatatgtagtttatgcacacagatgcgtgtaagaggcatcatgctctaaaacagtgcagaaatgcgcgcacagagggagtgcaagcatcttgagggtatcttttcgtggtgcaccatgggtatgcaaatcacaggcggctccgggctgttccgcgccaccggggaagccatgggtcactgatctcctttgctctcctatgctcctctctgctggtcctcctgggacccgcaccccgtgggcggcgccgggtgcggagtcctttgcggagctggtgttcgtcccaggggttaaggtcctgtcccgccgtccttacccgcagtaagcctccgggcttagagagagggacggggaaacagacgggcacagacactcaggggcactgggacctcacaggaggcacgaccccacccctcctggaggagatggcatccgatccaattcacctcgaagggtgatatgg

SEQ ID NO: 227046 - DNA, 227 bp, Homo sapiens
  chr1:45477622-45477849
  hyper
tgcgccaagcctccggatacccagactgtcagatgagaacaaattcctcatgtcaccgtaagatacatttacagcggagttttcttttgggcctttgttgttgcgtcgctacagcaaactttacggtgaaaaaaggtaggggtcctacgggcagcagccagggcagccctggagctgtcgctggagtccgatcatgtgatcttcaacatggcgacgctcttggttcc

SEQ ID NO: 227047 - DNA, 35 bp, Homo sapiens
  chr1:45671645-45671680
  hyper
gcagcgccggcgccggggccgccccggtactggaa

SEQ ID NO: 227048 - DNA, 294 bp, Homo sapiens
  chr1:45792559-45792853
  hyper
ggttctcacaaccagcagctcggctcactgagacccggtggtccagacgctgctcctggctggggtggcgctgcagggagaaccgcgagctctcaggggtcggcgggtgacttctttccggaagaaagcgaggaacgcgctctgcggggtgagccggactccccaactccggacgatcagcccaggactgagagccccgaagtccccaaccacaagtaagcggccccagaaggacaagtctaggtcgccgtccagagcgccatggccgcgcccgcccttcgtttgtgccacatc

SEQ ID NO: 227049 - DNA, 166 bp, Homo sapiens
  chr1:45805831-45805997
  hyper
cccgccccatccccgactgcctgaaccgcgccaggagacggaccgcaagtccagcgtacccacagacgactcaggcgggagacgagcggtgtcatggccgccgacagtgacgatggcgcagtttcagctcccgcagcttccgacggtgagcggcttcccagaggta

SEQ ID NO: 227050 - DNA, 426 bp, Homo sapiens
  chr1:45956918-45957344
  hyper
gtagccagtcaaccgtcaactcctgataaacgaggtagtggaattgcccaattagcgctaggaatgccacgtggtatgagggtgggcacaatgggcgtccagaaaagccaatcaacagccgtaggtgccaactccggaggacgaagggaaccaataggaaggaagtcgaggtaaaaacagaagaagcagtgtgtgggaaaggcggaaccgaggaggagggaatacacctgggggaaacccaagtccaggagcctcttagagggcggggcagtaaacacaagatggaccaataaaaatgttaaacacagaaatgattggtaattgataaagccaatagaaaatggactagactggcgcggctttcgggttggtcaaggtatagctgagtaaggaaaagcggtaagaatgctgcgtcctgcaggattt

SEQ ID NO: 227051 - DNA, 147 bp, Homo sapiens
  chr1:45965665-45965812
  hyper
ttggactggctgccgcagcgccacctgggaaactgaggtcgcctcttgcgaacacaaccggcgatggaggcggtggaactacctttctctagaagagacacgtacatgcacacccccaccgtgtagcttgccgggaaactgagtctt

SEQ ID NO: 227052 - DNA, 977 bp, Homo sapiens
  chr1:45986970-45987947
  hyper
cagcagagagagtgcttcagcggggacatttgggctcatcgctaactccattccacgtacaggaaaataaagacggggaaagggtacccgaagctccgcagctagtcaaggctcaggacccggaacagccaaatacatagaggctgtcttctacagccacgagtctggatacaggtccattccagaagcttcccgaacccaccccgtccggcaggaggctagtctcggagacccccaccaccagcccgcccagacgccgcgccacgtgctcgagttgccgggggaagactcgactcgagtccacgcttgccttggggttcaaccaggttcccgcacctacgtggggggcccacgagaggggtgtgcgcagcgctcaagcagtctcggactccgggcctcccccggctgcctcacgcatcacagcacccccacccgagcgcgggcgggccccggacaggaggaggaagaggcaacaggcaagaagggcgcgccgcgcctcactccgcaggggccgcactgcccacactcaccagtcccaacacaagtcgcagaaactaaccaccgacaccaggcaagaacaagacgcgcaagagctctccggggcgctgcctttatagccagtagggatctcgcgagagtcggaacggacgggggtgccggaggaggagagagaggagggggatgtggcccgagccccgcccggcgcgccccgccggaatgactcggcgctttccctcgttggggcgggtgcggaaaaatactaataccccaccctgttgcggatggctgaggttggagtgaggcgcccttgtggccgctcccgaacccgaacgcttaggttaatcctagatctctgcggaaaaccaggattctctttacttccaggaccactacgcactgtgccctcaatgcccaaactggagtaagcgtcttagctgctgcccacggaggaccacgtctaaccacaccaagccatg

SEQ ID NO: 227053 - DNA, 95 bp, Homo sapiens
  chr1:46152354-46152449
  hyper
cgccagttccctacgctgccaacgttcggcctccagaacggcggttatgccctgccccgcccccggctcccttcttcgccgcttgaggcggcgca

SEQ ID NO: 227054 - DNA, 185 bp, Homo sapiens
  chr1:46153751-46153936
  hyper
ccaaacagaaagccgggcctaggaaccaattagcgcaggtcaagtccctacccggactcattttttttcagccctcaggaagtaggggcctctctgaatccacttgccggaagtgcctttccagtggacctgggctgttgttgcggttgttttccttctctccgtgcaacgctggcaagtctcaa

SEQ ID NO: 227055 - DNA, 216 bp, Homo sapiens
  chr1:46216408-46216624
  hyper
aggcgaagccgggcggtgggaagggacttcggacgcttcgcgggccctgggttttcactgcgcgtgcgcgaggttcttccgctcgcgggagactgggccgctggcgcctctcagtgcccactgatggggcccagggcttgggcttgcttccccaaggatcaacagcttagctgcaagcctctgcttctgcctgctggggccggctggctcgccctt

SEQ ID NO: 227056 - DNA, 32 bp, Homo sapiens
  chr1:46269380-46269412
  hyper
gcagaggaggtcgcggcgccggaggccccaga

SEQ ID NO: 227057 - DNA, 105 bp, Homo sapiens
  chr1:46598366-46598471
  hyper
ccacccgctgaggcgccacccaaccgcgccgggaggggggacagcaggcatcaccaccgccccttccacgccgtcccgcctcgatgtaccgggattctgtcaagt

SEQ ID NO: 227058 - DNA, 112 bp, Homo sapiens
  chr1:46632677-46632789
  hyper
ttttcctgactccgcgcccggcgcggttaattatagccccaccccgcgactacctgcttcgctcccacccgcgcgcccaggaccctagctgcgggactctagcggggaaggc

SEQ ID NO: 227059 - DNA, 129 bp, Homo sapiens
  chr1:46712818-46712947
  hyper
cccagaaatgtgccgcctttcataatccccagctgtccactacaggtggtaactcccctgctgctcaatgtggcgtaaatcttcccttccatagctgcgggaccacagctcaccgacctgggacaaaca

SEQ ID NO: 227060 - DNA, 1885 bp, Homo sapiens
  chr1:46767964-46769849
  hyper
ccttcccgcctgtccgtcattcgagcctccctcgcttgtttaagccgctccgggcccccctccactcgctctccggtccctcctcgccgctcgagccgatccgagtggcctccggcgctccctgtcctgcgggtcgcacggtcgctcggtcgcttagtcagtttggcacccgagaccccggttgtcggttcgctcccgtcagccctgggccgtcagacaggccgcggcgccccgaccctttcgttcggcctctccccctgccccattccctcgctctccaatctgctgtcctcccctccgcccatcggcttggcctccggaatctcgacccccgtggcgtgtcaggcagatgctggagccccggggccatcagtcaggttcggtggccccgggcctggcctggccttgccttaggccgggcctcctaacctcggcccctgccctagggcagccgggccatcgctgcccaccggttcgacatccgagactctcctgcccggcccagccgagtgtcagttcgcgcggcccacagccgcaatccagcctcagtcgcccgggcccagcctgcttcgctccagaccgggcctcctggcctcgccccccgcgcccccgagccaggccgcggtgcgggtcagcctgcccatttaggtctccgtctttactctgtccagccctgtcagtcacaaaattcattctccgatcctacgagctggctttcagcgccccaggctgggccttgccccgggcctcccggcctcgccccccgcgccccccggccgctgggccgccccttgctcttagccagaggtagcccctcaccccgcgacttaccccacaccccgctctccagaacccccatatgggcgctcaccgcccgcccgcacagctcgaacagggcggggggagcgttggggcccgaggccgagctcttcgctggcgccgcctcccgggacgtggcctccatggtcgttgccgccgctacctcacagaaccagcaactccgggcgcgccaggcctcgggcgccgccatcttggggaggtgcgcgagcccgagagtgtcgcccgcggaccgccatcttgaaaaggtcagcagttaggacggctccataagcgatatggggaagaatgtgaattattctaaagaaatttcgaagaaattagcacactttccaagtctcttaggagctactattttagataaactcctagatcaattatacttgggtgtggtatgactaaggggatgtttcttagcaaagcctcctcgggtgcaaacatcagctacccctaacctctgcctgcggctggtagtacatgccaatctgagcatgtgttcgcgaccacgatgagtgtgccgcacttccggccagatcgccggatttccgctgagtgacccttacaagtccttcttgatcctgaactgggttaggtgccgctgttgctgctcgtgttgaatctagaaccgtagccagacatgggactggaggacgagcaaaagatgcttaccgaatccggagatcctgaggaggtaaggcaaggcgatccactcggccctcttctctgccctgaagcccaggacctagcccgccaaaacacgcacggggccctcttagcccccagtttaccctctagggtttgcatagtcgggagctctagttccctcgacctttccccagaattcgtccggtgactttggacagatagatgactagtttttctctgggcctcggcttctgcattctgtgaatgtagtgaaggtttgagagcgaaaatgttttgtggactaaagtcttgtaaaaatatgacctatgtttgcagtcagtcagatgttctgaagcccgcgtttcacagatttggggagcaaacagaccgccttgccccagct

SEQ ID NO: 227061 - DNA, 31 bp, Homo sapiens
  chr1:46806341-46806372
  hyper
gagtctgtagaggcgcgcggagtcctgggag

SEQ ID NO: 227062 - DNA, 490 bp, Homo sapiens
  chr1:46859840-46860330
  hyper
ggggcgatgccaggcgggccgcctctgatagcctctaggctctggcgcgcttccccgcccctcccgcgcaggcgggcgtgggatcccggctgatccagtccgggttttgcggcggagcgggcgggctgcgcgtgcggcggcttcaactgtcgcggtaggcagcagcaggctgaagggatcatggtgcagtacgagctgtgggccgcgctgcctggcgcctccggggtcgccctggcctgctgcttcgtggcggcggccgtggccctgcgctggtccgggcgccggacggcgcggggcgcggtggtccgggcgcgacagaggcagcgagcgggcctggagaacatggacagggcggcgcagcgcttccggctccaggtgactgccggagcgtagtgggatgggcgcggcctgagggtactcgcagcggcactttcagccgccggacccgccgagggacaggggatggggcgggcagagcagatgtgtaact

SEQ ID NO: 227063 - DNA, 363 bp, Homo sapiens
  chr1:46908436-46908799
  hyper
caaattggctagtccgagcccagagcgctgaagttcccagaaggaccgggagggggcgcccacccacattcttccccacctgagtctgcgctgacgatttcctgggcttatctggatcttcctgcagaaagtcagtcttatgtgaccctgtacaacctcctggactttcccgcgggcgtggtgcctgtcactatcgtgacactacaggacgaggaggaactggccttctacaaggggtgctacggagatagttctgacaaaaatttctcagaggtcagtttccttctccgagcctctcccggagcggggacaaaccagggctggttctctccgggttggggcccctgacggtagtggtggaga

SEQ ID NO: 227064 - DNA, 42 bp, Homo sapiens
  chr1:46932180-46932222
  hyper
ccgccccgccccgccctcctcgggccccgctccttcccaggc

SEQ ID NO: 227065 - DNA, 482 bp, Homo sapiens
  chr1:46951190-46951672
  hyper
aggggagtagccgtcggagggcggggacagagcggtagctgccttgcgctgggattgggggtgggggtgggagtggggagggctctttaagcggcggccgcgctaataacctgtccaggagatggctcgtggcaaattgctttgttagtcttgtcagcgcggccggggccgccgtcagcgcgcgccatggatcaagatgatgaatcgctgcggacggcgcagatgcgggcggcccgcggccgggcccccgggtaggggtgggaggtggagggggccgcggggggcccggccgccgccattaactccggaattaggtctaagccgcccaccacccagccactgccccggggagcgccagccgttggggcgggagcgggcccaggatggggactgagacccgcgtcccccacccgaacctggacctagcctcctctgaacgcagagggcagtgggccgcccggaaggggcggggaggggccccg

SEQ ID NO: 227066 - DNA, 639 bp, Homo sapiens
  chr1:46954656-46955295
  hyper
acacacaccttttgggaagccgagcctctgcctgattgagagccggccccagaacgtcctcttcctatgagccggttcccgcctggagggagcagagcgctggtaagagcaggaccatctcaggcccaggattttcccgaagtggaccggtcgccgagtgtgtttgttcccccagtcccggcgacaggtgcctgtgctgtgtgtgaagccgcgagttccagcccgcggcctcccggcccagaggccaacatccaggtgctagacaggtgagcggctgctaggagcgcaaaccagcgcacccgcggggtgtgtgggcggcgagttcagagtactggctgtggcgctgcatggtggcgcgggggtggcagtgttgttgcaggtggtgtggaactgatgggaagaggtatgtgtgcgcgcgtgtgtgtgcgcacaaccttgaagggacagtggggacgggagtccgtcggggctcccccaggtcacctctacggactccagctgccaagcgtcggggtgggaccggcgagggggaggtttctcaagacctttcaacaccccagggatcggcctgcggcttccgcggacccaagagaggcagagatccctggaccgggagccagagctcgaggagcagagatt

SEQ ID NO: 227067 - DNA, 1464 bp, Homo sapiens
  chr1:46955976-46957440
  hyper
aacgcttcggatccgtcacggttttgcctcatttggaagatattacttcgcccctgaaaaaaaaaatacaaaaaaggtttggatattaagcggagacaaatccttctcagtttggaagggggcggcgcggggagggaggtggccggcgtaatgcggaccagatgcggcctggggagttgcggagccctgggcgggggctggggagggggcgcggccggcagcccagttcccagcctgcggagcgcagaggccgcccacgccctcccagcttcctggtccacgcgaaccccgcagtgctccgggcattgcccgggtctggctttggtctcgcccgcgcagatcccgttcaaactcagctgccaccaagtgcgccttttctctctggattgcgattctgcacgaattttccagttgagggtggttcggcgctcagccagcctctgccctcgaagacgcggccttggtctaggaaccttcaggtgggtgtttggggcgcagtggccctagttccctagaattcgttttgcctcccgcggcctcagccggcgtgggtcaggcgagctccggcgaggaacggcaggctggggccagtccccggagcggctctcggggcgcttctaggggagcagtcaaagggttgcgaggactgccagggtctttcctccctaggcttcccacactggatggccgtaactcagtcgttgacggcgacaggccaggggccctgatggactgtgcagggtcccgggcaccaccggctgaactttctggcggtcacaaattcccggaacctgcgcaggggcttcgttggcactggtggttcacttaaggagcttgagggaaacctcctcttccccaaattcgcaccaaatctggggccccgacttttcctggattccagccacactcggtttgggaggcagtgggctcctcaggcttgtgatttgcggcaggaaggagtcccggaatggaagaacggggaggacgagatccgaggccttttcaccctctttgcaagcatgcagttcaccaaagccgagaacccaccgggcctggagcgcagcctcagcgctggttccgacccgggccccagaaggtctttttcgtttgagaaaagtcctcggaggccggggcagggtgcgccgatattggtttactaagggcgcctccagtttgagggcgttggggaaagaggagggctttattgacttgatggaccttggaggaaaggggctgtctgtaccgcaagggttgtgtgctccacagccgaggaaattgtgcaagttcctacctggctgtggcgatggcagggcgaccagagtcctttcccctctctagtgctagggattctgtgcgctgcaggcgggtcagctctgtccaacccctttctagaaagttctatggtctgttagttttaggtgggtgtagtgggggttgttttcaatttttcggggatttgtgttt

SEQ ID NO: 227068 - DNA, 72 bp, Homo sapiens; identical to SEQ ID NO: 197513
  chr1:46957804-46957876
  hyper

SEQ ID NO: 227069 - DNA, 200 bp, Homo sapiens
  chr1:46958670-46958870
  hyper
ctctctccaggcctcgaagttactcctcctcctccggccagtcccagttcctcaaggagccagtcttcacctcccccacccctgccttcccatttcgccccccaccccacccctttctcacagtcccgctcggccgccccgcagtgcccatgtaaatgacagcaataaatatctaatcaaggccccgggcgacgccactg

SEQ ID NO: 227070 - DNA, 94 bp, Homo sapiens
  chr1:46998612-46998706
  hyper
tgaaggaaggggaatgaacccggacagcggagtcacggcggggccctggtccgctagggggcggcgcgcgcccggggtgggttgagctggactc

SEQ ID NO: 227071 - DNA, 334 bp, Homo sapiens
  chr1:46998935-46999269
  hyper
gaggccccggcggctacacacgcagcaggccgcgaagaagccgagcgccagcaccagcagcgccagccccacgacgagcagcgcgttgtgctcgggcaagaaggaggcgaaggcgcctgccagcgtcacgttcacgcccgccagcagcgcgcacagaccgcaggcgcagcacagcgccggcgacggcaggccgggcacccggccccgggcgcgttccgcgggcgccgggaccggtggcccctcgctcttttctgccggcggcatcggcctgcgcacgccaggcacgcatcaagctccctcctgccgccggcccggaacagcccaactgccagga

SEQ ID NO: 227072 - DNA, 553 bp, Homo sapiens
  chr1:47009561-47010114
  hyper
ggaaggaaagaccccgagagcgcaggaccaccaagagaggccgggccacctcctccgccgtccgctgacttctaggggctgggccggcgcacagcaagggggttggaggtggggtcgccctctcccacgcggctgggtttccaggcggtgtcctgggccgagccgcttggagatcctagatcagcatgtgggtgggaaagggcgccccgtcctgggcccccccgcccctgcgcgcagagcagagacgcgcagacccgctcccactccgcttggctcccttggagcagccccggcggcggcagcgatgggctgggaggggccggcacgctggcctgcgcgggtccccagccgcctcccgccacccggaacccctctccttcaagcgttgaccgccgacccacagctccccttcaacccggggcgagcggggttcttaccatacacctcccctctccgctcggttccatccttctcccgttctcctctaggcttcacggtttgcaagcacccttgcaaataactcctagcccacccacaccgtctcgtccgcact

SEQ ID NO: 227073 - DNA, 168 bp, Homo sapiens
  chr1:47069639-47069807
  hyper
cggacaccggccacgccccgaccccaggcacagaggtcgcagacagctcgggacagtcctgaaaagcgtccccttaggctgtccctccgcagctgaatcgcgtcgtgacctcgggcagccgtgaaggccctgactgcccccttccgggcacacgagctcactcacaga

SEQ ID NO: 227074 - DNA, 31 bp, Homo sapiens; identical to SEQ ID NO: 197514
  chr1:47070162-47070193
  hyper

SEQ ID NO: 227075 - DNA, 148 bp, Homo sapiens
  chr1:47691969-47692117
  hyper
aacaaattccggatcgtgctctttggttttagcggggaatctgtcaggcaggggttcgttgctttaggaacctcccttggcctctcagcaatattcccagcccacctacaggcacacacccagaaacccggtgcggatggaagtaggg

SEQ ID NO: 227076 - DNA, 549 bp, Homo sapiens
  chr1:47694941-47695490
  hyper
agaggatgcacacccgggtctttgctttccccctttttcgctgagaggcctgcagttacgctgcggtgtggtcctgggcgatctgccgcgcccaaagcgagtttccaggaaagataggggtggagagaaagaggcagggcaagagggagggagagagagaaatgggggtcaatggctgggaattacctcctgtccccgaccaaccagtccagggaatcgcaaacagctttccgcccccaacctgcaggtgtttggagcctttcctctaccccctcctccccccacccgccttaaaaaaccctatacatgaccaatcaggaatagctatttagtccaacagcaacaacaacccctcccgacaggctgtctggaacattttcgaaccctccaactgggatcggtctggttcagtgtttgttttctaagcagggaggtgtctacgcggttgcctcctcagccaggtctccggctgccgctacaccgcgaagggatagtcccgggcctggatgggcggaggtccgtgttgggaaaggcgaatagtcttcagac

SEQ ID NO: 227077 - DNA, 2191 bp, Homo sapiens
  chr1:47696003-47698194
  hyper
ttatgatcacacatcgaagtcttggattaactgcgaaggcctccttctatttgccgcggctttggtggacatataggaataattcttccctggattgcaatacaatgcggaagattttctttctcctcttctaatccaaaagaggggaggggaggaaagaagaggggaatccatccattcccggcgtgttcgcggggggttaatgttgcgtgttcgctgggggttaatgtttgccttatgaccaagtctctgtgtccgtgcctctctccattttctcttcctacctcaaacccagcaacttagaaaacggctgtagcggaaaaaaacccgctgctttgttctcccgccaaaggagccaaaagggacaaactgctgcgctctgggatgattattttaattaaaatagatgttaatgatgacgattgtgatggtgatggcattagcaattacaataattgacaaaacaaaattctttcaacccgagctagggccccactaacccggtccctcccagagcccggattcggcctcggtctcggatgcgacgggtatcagacccaagcggcaacgtcgctcacccgaagagggggcgggaaaatcttcccaggaggtgatcccgaatgtccccacccgaggctcgaggcctggtgaatgtgcccattgtcctttcggggcctctcccttggagcccggcggccgcacccacgaaactgaccagaaatggatgaagccggagtgcagcgggaaccgaagcccgcagctaccggctcgaaggcgccggcctcggcgagcgctgctcagcttcaagcctggaggagcctcccactcaccaacgaacccctcaaacacctaggcacaggcgggcctccgggcagagcagccgccgaccgggcgctgtccgcccacccaagccaacaactggctcccgaatacatcataatttggaataaaatgtgaaatcccgctccccgcccccatgccgccgcccccaccagcgcctcgatctctcgctcgccctccccccactcccgcccccagcgatttgcaaacgcacctctaaaggacacaggcacacaggcatacaactcagtgcggacaggaccacacagggtccagccccacagaagggcagcaaacaaacaccacctagcactgccccagaagccgacttggtcagccccgcacactgcccaacaggacacaacgaaatcagtcaaacgcagcggctcacggacacacaatccagcacagtcgggatcacacacgcccgacataacgacgacaccacccaaacacagtcgcaggggccacacacccccacacacagaatcagatccctgctgagaacaccaacggagcacaatcgtacgcaacgaagaaaacgcagaagggcctcgaagggtccacatctacacaccccaaccgcgcaggcacaccacactcggacacagagcctgtcgccaagaagaccacacttagaagcagccaacgccgcccacagttctcatgaacgcactctcacaatcccaccgcatgcacacaaccacgaagaagaaatgaaaaccaaccacagcctcgcgcatttctgtatattgcgtaaggaaaagggggaaggaaggaagagagtctccgaggcgggaggggcggcggcagccggggcgggggcgtccgtggaaaatgcccccccaccgccccccccggccatcgaaaggaaccgagggaaagggagcgaagacctcttttgcggacgtggggaaaaagaggaggaaattgatgaagaattcggtgggaggccgcgggttgcttttcccctagaaaaaggccagaatgctcacgtttttccgctacgggggtacgcgtgtggccattttgaggcccggtcctgagcggcggcggcccggcccctcccgcggcccccgctcccccgcccgccccgcgcccgcccggcccctccaccgacgcgctgtaatcccactcacgttccaggcctcgttagcatgggccgaggcgcgccggggccgtgtgcgccgcagagataaggcactgccgcgggtccgcccgcccccgataagcgcctcggccattatgggccaaatgattcattttaatttggcaatttcaccggagggagtggggactggttgagcggcgctaggaccggctccggaacgcgctgcggggagcgttggac

SEQ ID NO: 227078 - DNA, 86 bp, Homo sapiens
  chr1:47882251-47882337
  hyper
ggccgccgcctcacgctggccgccatctaccgcttcatcaccgaacgctttgccttctaccgcgacagcccgcgcaagtggcagaa

SEQ ID NO: 227079 - DNA, 120 bp, Homo sapiens
  chr1:47904009-47904129
  hyper
ccgaggacgaggaggagtctggtggctgctcggacggcgagccccgcgctctggcgtcccggggggcggcggccgcagcggggagcccggggccaggcgccgcggcggcccgcggcgcag

SEQ ID NO: 227080 - DNA, 580 bp, Homo sapiens
  chr1:47909580-47910160
  hyper
cttgccacagcgggcgcgtcttcgtggttacaaagcgctttttccctgatgacttttttccccttttcaaaaacacttctttctccccccttcaactagcaaccctccccaggcccacccctcctccctctccgctccggtttatttaaacttcgcctcctccagcgccgccgcagcgcgcacttaatgaagttgaaggctcggtgagcccgggtgaagagggtttggaatctgttgaaaggggcgttttgtgacactgattggggcgggggcgggggcagtcgcggaccagacaatgaccgaccaggcgggttttcctgcgcacagggtcaggcgaataaaggcgccgacgctgtttaaacgaaggaccttgtaagagaaagggagaaaagattttgtgtgtggagcgtgcctcgtaaggtttcgtgcttaggagaagttgggaggaggcagctcgcctagagtctttacggaccgaattcggagtttatttcgaacactatgcatcaagccaaagaaaagcggggccagtttgggtttgcgcctaacttaattccgatacgcgcgtcaaaatgttgtg

SEQ ID NO: 227081 - DNA, 192 bp, Homo sapiens
  chr1:47910467-47910659
  hyper
cgggctagtgggcgcggcgcggcgcagggcggagcgggcaccgcctccttccgtagcggagcgagagctgccgctcgaggctgaggccgctccggaggcctggaggcttcggactgctggactagtggggaaggaaggcggtttcctccgcagcgccccggtgctgcactccgcaccgtcaccttctgggtt

SEQ ID NO: 227082 - DNA, 171 bp, Homo sapiens
  chr1:47910839-47911010
  hyper
cgtcgtcccggagtcggtaaccgagtcccaggctttactgccactccactccctgctgggttatttaagagatacgcggcttccgaggggttttcatcagaccccgcaagtgcgctcggctgggaaggatgcgctccgatgccgctacaggggttccgcgcgtttcaccgc

SEQ ID NO: 227083 - DNA, 177 bp, Homo sapiens
  chr1:47911348-47911525
  hyper
ggaccctcgattcgcgaccccctcccccagcaggtgtctgtgcagttcggactcctgggcttagatgccccatcccgttcagatgcaaatgtgctgggttcgggttgagtgtgaggaatccacctccccacccccaccccggcccacgccttccttccccgacgccccttctgggcc

SEQ ID NO: 227084 - DNA, 597 bp, Homo sapiens
  chr1:47973696-47974293
  hyper
agctcagtggaagcgccgcgggcgtccttcgcctggccggttccggcgctcttatctggcgggaaagccagctcctctaccgtgtcccctgtgcgcccgcggtcctctgaggacgcccgccccgtaccaacccgtcctggcttccactcggccccggagacagggcgggcgggtggcaccttcgggccccgcggggcgcccgccgcggcgtggggcgtggagagggtggcgacagagcgcgggcggggacagcgcgtgggccgcggggggcggggcgcggtggcgaaatggcttttccagattaggggcccagcccgcactgttgacacagtcataagttttaatgagaaattttgagtatttgtgtgggagacgcagcctctgtgcacagatgctgcgggcgggcggcgcggggggccgtccctccctggggccgccgcggccgcaggcccggcacggattcctttcaggcagaggggaaacatttaaactcgctcacctttgaactgccagggacgctgtttaccttggctgcccgagtggcagttttacagatattaaataccgacccgaggctgagccggggctccttcgctc

SEQ ID NO: 227085 - DNA, 499 bp, Homo sapiens
  chr1:48058814-48059313
  hyper
ggaaggtctcccagcggtcttgcgcggaaggcgttatcagccccgcttattagatgaggcggcgcctgcagtagagggggccgtctccgcagggtctgcagcgccggggcccgcacctcctgctccgcggcccgccgccgccagcccggggctgacctctcagagcagggcggaggattttcacagcacagcttcccgagagagcgggattaagggggaactgctcgggtgggccagagccaggggctagggggaggccgggcggaaacccaaaacctccgcagctgtttccagtttgccgccctggctggaccgcggtggctgcgtgcagagcgagcaaggctgcgcgggcctggagcgcccacggggcgcgggacctctctctgtctccccccgccccgcggggctctctctcgtcctctctgtcttggtggggctcagtctgtctctcgttttctctccctgtttctaagatctcgtggaatcaaagacattttgg

SEQ ID NO: 227086 - DNA, 860 bp, Homo sapiens
  chr1:48173821-48174681
  hyper
gctgtcatttggaacgtatttgcagacacatggcttgtttttaagttaatgctttttaattcactgtttcccagttgtcgttttttattgcaaaggcggattctgcccgtgtgtgttcctttgcgggggcgggggatgggggtagcttcgcgggcaaagatccgatgagagagaggcagagaaaatgagaggcagagacagaggcaaaggcacagcgagacaccggggaaacggggaagcaggtcagagaggaagagagagacaggccggaagagactgtgcccaggagcctggacaagggatgccgtgcccagcagcctggacaagggatgccgtgcccaggagcctggacaagggatgccgtgcccaggagcctggacaagggatgccgtgcccaggagcctggacaagggatgccgtgcccaggagcctggacaagggatgccgtgcccaggagcctggacaagggatgccgtgcccagggaggggaaggccaggggccgctctagcggcgaggggcggagggtgtgctgagaaacccggctccggggacctaggctgacgcccccatctccgcctaaggcccctggggctgagcttgcttccccctggctctctggttcctttccgagtggaggagggtgaactggcccttgggagagggctggagggacgcggcgggaacgggctgagtacgcagcacccgggtcggcaagggctggggttctgagatcagagagaaaagaggacctgggagtcggaggcgatctccctggccccagccgaccctctgagctctagcgagcctgaatccggctctgggggtggcgccccccgcctgctgcggctcccggggccag

SEQ ID NO: 227087 - DNA, 578 bp, Homo sapiens
  chr1:48175232-48175810
  hyper
agccgggagctggcgagctgaaagcccgggataattagcgctaattacatgtgtgcaaacagccgcggcagagggcgcgggctaggccgcggggccgcccctcccccggcctgaccctggcagtcccaccgcagtggaggggctctgctggcgcagctcgagccgaccgctaggggagagcgcgcaggagcacccacgagacccgggaatcggggtgcgccgtcagtgcccagagccaccgagccccgaccacacacgcgggcgcgcgttgcggcccggcaatctcgggatggcgggttacagtcgggccagaggctgagcccagaactgggggccgaacacccgctgcccttcgctgcccttcagcggggaccgggcggggtggggctgagcattctggcccctaggcttctccgactgttttggcctccggagcaacccggtgtctgcggaagattggaagcgactctccagcaccccgccgccgaggcccgctctcccaggccatgccggctggcgccgaggccgcgggacctggaagggtcggagtctggtgctggtgccggaaggccagccag

SEQ ID NO: 227088 - DNA, 317 bp, Homo sapiens
  chr1:48176216-48176533
  hyper
cccctggaaccccacgcacctccaggccctgagcgaagcctggaagctgcggggcgaagcggagcgcgagagaggttgcgctctgcgggtcgggcagccggggctcgctgcaggcccatggcgccctcttgcgttcgtggccggaggcgcaggcggctgctgggctgacccgtgtcccgcggtcctgctggacttggacgcggcatctgactcctctctctcaatgattgcgcaggcgaggatcgattagctgcggagagggtgacctgagaccacacgaggatgcattttgtataccgtacgctttgtatgctgta

SEQ ID NO: 227089 - DNA, 252 bp, Homo sapiens
  chr1:48190988-48191240
  hyper
tccgtgcaaaatggtgtttaccaaagtcaatattggccgcggcgcccgcccggggcacccgggagcccctctggcctcccccagcccaaggctggatctgggccaccagagcctcatcttggtgtcccaactagccccggccctgacaaggagtcttttgagggctagacacaggcgggtctcgcccagggtctcccaggacccgacctggagtctcaggcctccttcctgtctcggcgctgtactccctgg

SEQ ID NO: 227090 - DNA, 846 bp, Homo sapiens
  chr1:48462221-48463067
  hyper
ggcgcccgaggctgcgcccggggggtggaggtggagcgggcgggctaaggtgggtgcggaagcaggacccaaaccatggtcccacgggactagaatacccaggcaggcgggagagtggccgggcaggcgctcgctcaccgatccgggcggccggcactgtcctccgtccgggggctgcgggcgggcgcgagcggtggcgaggagggcggcgagcagcggccccgccagggcggcgtgcatcctgccagggcccgcggggcgcgggggaccctcctgggcggcgcccctcagcggggcggggagcccccagttgggcacggagtttcctctggagcacggggctccagccgcaggatgctgggcgccctctggggcgtggctgactgtccctgtcggacctgggggtttctctggggccgggctccgtctgttggaagagggagaccctctagggctgggcccctcccccgggcgctcaacctcgctggccgagcccccgggtgctgagggcgtgttggggtccgggggcgcgcggggtcccggagctgcgtcgcggtccaggggcgcgcggggttcctggggcagaaccgagaacccggggtgcgcaagggtcccggggttatgctgggcacccggggcacgcaagggtcccaggggtgcgcggcgctccaggaggcgcgcagtgggacaagtgcggcggaaggcgcggcaggggtggggggcggctctggggcgaccggctgcccccgagcccggctcagaggggcggcgggcggccgcgcggccgctgcccgggctccgccatgctgctccgcggccgggagggagggagagaggagggcggga

SEQ ID NO: 227091 - DNA, 141 bp, Homo sapiens
  chr1:48559546-48559687
  hyper
tgctgcatcggaaacgcaggtgcggcagctgcacaactggttctacgggtggatctgagcaccgggctcacctgggagatttctaataatacaaatccccaggctccgcccctgagattttgacgccgtgggtttggtgtg

SEQ ID NO: 227092 - DNA, 862 bp, Homo sapiens
  chr1:48937290-48938152
  hyper
gaatgaaaagcccccgcgccgcgcacatacactctctctcactggaaagttaggagcgaggaaagaactctgaagtgatttgggaacgatctgaaagcgcgcaagttggaagtcgggttgaagccagcatagcggagcaggggtcaggcctctgcgtggccggagtgggagagcgcttctgagaacaagatggggcaggaccgaaggggcgtgaggtcgacgctccctagggatgattcggagggtgaaggaggtttgggggtggttccgggctctcggaggtgactgagggagtccctgagccaatgcccgggggtgggaggcgctaccggtactcactgagctgatctccagcgccagggcgcactgcagcgccttcaccttcggcatccgtgcggggaggggcggcggggagtgaccccggccacgggcccgagtgaggcggggagacctggggctgggcggggacggggaggagacgaggtggcggcggcggtggcagcagtggcccccaggccggggcccgcggtccagcctgggttccgccggagaagcagctgagcgcggggcgcagactcgttgtcatggcagccaggaggggcggggccggaagagaggccgcgcggggcactccagggctacccgcgctgggacgagcgctggaggcggagcttgacgaacgccgagcgaggcggagtcgggcagggggcggggcttccgaaggggcggggtgaggcaaggcagctcttctgtgacgtcaaactgcgcccaaagccggacgaaagggagctgctgtttgtataatgggacggtgctctgttcagggagttggagttcctgtaaggccgtcggagggaacccc

SEQ ID NO: 227093 - DNA, 245 bp, Homo sapiens
  chr1:49242176-49242421
  hyper
agcagtggctccccccggtcccctccgcccgggcccccggcccctcccggggtcccagcccccgcccgggtcccaccgtccctccccgcccgcttgctcacctgccagcgccaggatctgggccttgtggagcaacagcgcgccccagtcgcggggggcgcgcggggggctctcgggcccggcgcccaattcctccgggccccggtacacggcgtacaccttctggttgtcaaaatccagccgcg

SEQ ID NO: 227094 - DNA, 460 bp, Homo sapiens
  chr1:49242661-49243121
  hyper
gcaccgttctgccaatcggctgctttcgcctgggcgcggaaaagggagggagggggggaaagggggacgaggggcggatgaggggggtttggaagcgcactgccacttgcaaagtcagacccgagcaatcacagccggagcgcgattcgaatggggagggaaaagggttcagagattcagttgcaataaaaataataacaagagcattgcaggaaaaaaatgcattgattaaaaggtgcgctgcgtgcaggattatattgcttcaacaatcgcgctgccaaattgcattgcaacaaaactgcattgccaagtagagaagtgtatgagtgagtgaatgcgggataggggtgggggcaatcttgattgaatctcaaagtgtaaacttggaagccagcagaagtttggagtgttttaaatgtagccaccctacccgcgcccccagccccgcaccctccccgcg

SEQ ID NO: 227095 - DNA, 275 bp, Homo sapiens
  chr1:50489508-50489783
  hyper
ggggcagtagggagcgggtggtgggatcagtgggctgacaggagctacctcaggaagacgcggcacgacggttgcctgggcaacgggcggcaggcgcgcgggtggccggcgcgcggctgagggcgggagggacgcctgggaggagcgtgcgtccaaggccccgcccccgcggcgcgagcccgggcctgagctgggacttgggccccggggcgctgctcctccgcaaccgatccaccgcatcctggcaactgagcaggctccgccacccctagagc

SEQ ID NO: 227096 - DNA, 559 bp, Homo sapiens
  chr1:50513656-50514215
  hyper
cctccgtctctacgcgaagcgccccctcgaggtgggcagggggtggcggcggcgacggtggcggagccgcagagcgagctagagagcgagagcggtgagactctgcggacgtcttcccgcccgccgcgctccgccccacccagcctccgcagcctcgggccggatcgcccggcggggaagatgcgcctcaagaaccaggtagaagcgcctcggcgcaggccccgcacccccgactctgcccgccctctgttacggacacccgctgggccacgtggtcgcgactggcttctcccagcggccagcctggccaccccgactcccagggagggggagagggcccttgcaagaggatcctgcccccgcgctgcccagacctgagggctcctggcgaccccacccgcagcccatctggcggctctggccccgcaggtcagggtcacacccctgccggcctcctgagacttcccggccccaggggagagagctgaaacttgggttgacgcgcgccccctccccagcgacaggcgaccccgcagcagccccgcgccactcctctctg

SEQ ID NO: 227097 - DNA, 99 bp, Homo sapiens
  chr1:50717512-50717611
  hyper
ccacccacccccatgcctgtcgagtgcccagttcatattcctgctgcgactgtatctaaatttgcaaatcgtcaccccgtgccccaccatcatgtgtca

SEQ ID NO: 227098 - DNA, 446 bp, Homo sapiens
  chr1:50799152-50799598
  hyper
gaaccttgcaggggcccaaaccacctgggttctagagctccttgaactggcctcttgggctttagggaagagctggggacgagggaatggggtggggccacaccacattagcacggacccttgggtgacttgggcggaagacggggcgtcagggccgcctgcgcgcgcgtgacctccaagggtccttctggcgctcctccggcgctgcgtgcggcgctgggctgcggctcacccgacacaccggcggcagccgcggctgccccctactggcggaaggaagagtcgccgctccggggcccttggcggccgccgctcttcgcgcctccttggcctggctgccacccttccaccctcgggggagaccccgcgctctgtgctcactcggggaagagaggctcaatcacggcctggaccagcactagggacctaaacgctcttctcagtgt

SEQ ID NO: 227099 - DNA, 1728 bp, Homo sapiens
  chr1:50880917-50882645
  hyper
ggagctacccgcggcggcccgggttcgcatcctcccactgctcagaccgagtcggctccagcttgctttgggaagcattcaggaataaacgtggacagtagcggtcaggaaggagattcccgtttccccttctcccaggaggaaaagaggtaacgctgccgccactgccctctctttccagggtgggaacgccgcccgagaccggggtaccccacactcctccctagcgctgatcccagcggagctcaggccgcagtcccctcctgccggctgcggaagctcccagaagcggagactcaatcgcccccctgcccctgctaccaggccagagtctggagtacagatactggctccctggggcctgggtgtgcgaccccaggccggtcattgcaggtctctgcgcctccctgttcctgactgtgcaatgggcagcgggtcaggggcgcaccgtgggcgcagtacgttcccaggcgccaagggctgtgactgaccgacctgggcttccaccgcggggcctgggccatggagacgctccgggcccaggaacgggggacctcgggtgccccactacctcactcctagaacgcccaccgctcacgaagccttcctgagctctacccgaaggtgctgacagcctggagctgaggccaaggcgcttgggggcacgctgcttctccctgggcctcctatgttcacggaaggagagtttccgcaaacctctcactctcggccagcagaccccgcttcatgagaggaggagacccactaggggcggtggagaggcgaagtgatccagggtcccggaaagttggacaattccctggaccagatggctctcagtttcctcctctgtaaaatggggccggtaataagcaactctctggattcaccccggtttgctgcgaggatgaactaatataatagtctttaagtctgtgacgctccagatgttcttgggaatgagtaacgcgggtccacaggccgccccctcgggtccggccagagcatcggcaggaaccgaggagcctcgggggacccagcgtaggtccttcccgaaaccaacaccttgggtgcggtggggcagaggacggggatgaggcggccggaaccgccctacgaggagaggctgggaggctccgaaaacctggggtagggggagcgcaccggggctttagagggcgcagcggccaagggcaagaaagtttacactcccagaagcttccgcacgctttctcccgcctgcctcttttctttctaactcttccctctcctgtctcctctcgccctcttttttctccttttttatccccttttcgtccatcgctcttgccggcatctttcttctctgggtccttctcccccactttcatctcatcgcgctcgcacttcatcaccagacagccaaaccccctttccaattaaagtggaattaggcaactcaatcaaattagttccccattaaagcccttctttattaaaccgttttcttgtcctgctattaagtttcactgcctggcggaactcgagccggccccagaagtttaccttgggatgtcgccggacccagccgaggggaggagtcattcttttcctggagcgggggagtcaccctgcggggagcgggagggactggaggttgaaggagagggtcggcccaggagcggctaatttgctcagctcggcgtgaggagggaaggtgaaaagggtgagagacgaggtctggctcga

SEQ ID NO: 227100 - DNA, 706 bp, Homo sapiens
  chr1:50882896-50883602
  hyper
tgaagactggggccgacgatccaaaaactaagagccggggcaaggtgacccctccgcaagggtgcccaagctggggtacacactgtgttccctctgctcagcggtcgcgggtccttcgggagttgtgagccccgcgccactctggtgggataggtcttccgagtaccacaggaagtctcctctcccagtagccccgagggtcggagatcccacgggacctcggacaagcgtctccttagcgccgcggcctgagtgggaaatcacgaccttccccagcgccccacccccaccccctatttctcgaggagcgggacgggattcggcattgttttcttagaaaataacatttatttctagctcatatctatgcaaaggaaagcacaaagtgctgctctgcagcagcgttttccgctgcgggcccttcagtcagggcgtttggcgagtcccgggaggcgaggatgggcccgcgagcgggcggttctggctcagtcacacgtcgctctgttcctgcttcagtgcgcaccttgacggctccttagggacagaccagccgcaggcaagaggggcaggtgggcaggattcatcccgagtttccaatatatttaatctctaaacctgataagtacaatgcgcgcatagtctaatttttttccattttgtccctttttttgcttgttttgaatgtttttcacgttaataccgaggt

SEQ ID NO: 227101 - DNA, 1454 bp, Homo sapiens
  chr1:50883997-50885451
  hyper
gccgcaggagcctgcgctgctgtcgcagcctctgaattctcatgaattcccagccttttggaaagggggccgggtgaggctggaagagggatccggaggtaggagatgaggacccaggccgcgcaccccctccgagaacacctgcacctgtctgtagctgctccccctttgctcagccttccccacccaccctcctaaacaaaacccaaaaaccaccttagagtgagaagacgcccagccagggcgcagagagagcgctgggcgaagaggggtcgatggcccgcgggaacagggctggggttcctgtttggggaccggccggctgccaggcccctcgccctactgcttctccggagcgccgttgaccataggcccgtacaggccgccgccgtaggtcggctccttgtgcaccgccgcagcagcggcggccgagcggtcacgcatgagatcgctaaaggcgtagtccatgggtgggcggaagccgagcgtgggcaccaagccggcagtggagtagggcgccatgaaggccagaccgcggctgtgcgccgccgccgcggagtaggccaggcgcagggggctgaggccgagcggcgcgcccagcgggtaggcgcccgcgtcggcaccgaagtgactggcgttgggctgcagcggcgagaaggccgagcggctgctcagcgagcccagcgccccaggcgccatggcgccggccagcaagggtctgtggtgcggaggtgcggcgggccccgcctgcagcggcgcaggcagcccaggccccccggcggcggcggcggcggcggcggcggcgtcgacgcggctgggccacgcgtcgtctgcagctgctgcagcacccacggcggccttatctgggggcgccgcagggcccaggccggccgccaggcccccacggtggtggttcagcacctgctcgatggcctgcaccacgtcgccgccgcagccctgcaacaccagctccaggacgcctcgccggtggcctgggaacacgcgtgtcaagatatccagcggcgtccgctgccgtggacccgagcctccgcccagccctggcgccggcgcggcctcaccctcttctttgtcagcctctgaaccggattcagagcccagagggctagcggagcccgggctgtcctcctcgccgccgccgccagggccagcgctgcctgggcagctgccacctgcctctttggaggcccgagctaggggcgaaccagaaaaggactcgccatcgccgttctccgagcctgagccgggccgcacctctggggacgacgtcccgggccccgagtctgcgccgtcgggtgataagggcttcaccggcggcggcagcgggctgcccgggcggcctgcctgcagcagcgtcttaggaaacaggtcaaacttctgcaacttggcctctgggaggggagaaaacgtgtcgtgaggagcggttagctagaaga

SEQ ID NO: 227102 - DNA, 1286 bp, Homo sapiens
  chr1:50886011-50887297
  hyper
cccacaaaaagccacgggggtccagaaaaagagggtggtgctaggcaggcagtaggaagcgaagaggaaaagacataggaaagcagacctgagaaaccagggagggtgcggaagaaactagaaggagggagggcgcagcaagcggttgtccagagggcgttaggaacgcgagaaggggaaaagaaactagggcgtctcagaacctagggcgtctcaaaacctagggtgtcagttaaagggggggggattccttaagggagttgggaaggagcagagggaaagggcctgtggagaagcgcagagcgaacgaagatgcgcaggtttccacctggggagaagacgaagcaaagaagcagggacctgcctgcgtttgggtagaggcgagtaaaaaaattaaagcgtgtacatttcggcccgatgcaggagaaaggggtaaagtgcaaatgctccagaagcgggagaaaggagagtttctgtacccacgctccatacccgaggctgggcgagcggtgaaccctagcagtcgcggcgactggacacgggggttctactctttctgaaccgagacaagcccctgggccccgtgccccagagctacgatcctgctgcccctacctgcggcctggccgcgctctcacctgagccccctgcgccagctgctccgcctccggtccccgcgggcgctcccgctccaggtcccccgccgtcggcggcgcacactgaaccgaagacctcgtaggcgggcctcggggggatgatgccgttggcggcggccagcgccagcccctcggcagtgccgtagagcagctgcagctcgcgcgcctcgttctcctcctgcgcctgctgcctgcgcagcgccacctgcgccgccatgacacgctggcgctccgcgatgagcgtgcacttggcgcacaggcagtccttccagcgacagtagcgtttgtggcccttgagggccgacaccacgccatggttgcgacagcgcgcgcacttgggggtccgcgggtacttctcggctgcccgcagcaacagtggcggcccccgcagcaagccgcctgccacgctcaccggtagcgatgcagcggccgccgcggctgccgccaccgacgccaccgacgccacaggcggccccgtcgctgttgccgccgccgccgtcgccgcgccgggcacgctgggcagctccgagcgcagctccatgacaggacctgacgggaaagaaggtgggagaggggagagacctggtgaggagcacaccgcgcgctaggccaaagcgccgccttgaggaa

SEQ ID NO: 227103 - DNA, 2096 bp, Homo sapiens
  chr1:50888261-50890357
  hyper
gcgaaaagttaggcatttcgggagggggatctttctcgaagaccacctcacactgccctcccctcccctccgggtttagggacagagtcgtcagacacgccctccccgtcttggggtcccaggggacccctctcgagcgcaggctcctgcgttctgatctcagagttggggtcctaggacacggatggcccagcaggccgcaccaagccaggggagtcgccttcgcaactggccataaacggacaccagagtccctcccacgccgcagccccataaggcccaagcaggcccagctccccgcttctgccgcggtctcctctgcttcccgcgttccccgtccctgccagagcccgcgacagagtccttgtgtctccgtccgagagtcccagacctcctctctatgagcgttgcctcctctcccagacccttcgggcgtccctaaggcccacggggcccaggcctcctcaacaggggccgcagaccaggtctccacccactgctctccctgcggccctcaactacctgccttgggctccgggatcctcctcctccgctggcgctgcacgcgcctcccggctccactggcgacgctggagctcttggccgcttccctttgcccccggccccttatctgaccacgtcaccctccttcagtcaccatgtccgaacttccggacccctcagaacgcagcgcagtccaaccctcccttcagaaatccgggtcggaggctcgtctgcgggccgcgtggttggaacccgcgacctgactctcgccgtgccgggtcccctcgcggtgcgcgccggacgctgcgcgcagccggggcccagttgcccggcgctgccagactctcaatgagccgctcgcccgctctattgttggtccttagggctccattagacagaattggacaacaatgtggcgcctgccattggccaggggaggcagacggcgctctgattggccgggcccgcgcccggggagccccgcattctgcagtgtccgaaagattcgaaactccaaaagctccactgcgtgcctctgggaggggagggggcgcgccaggaaaggagtggaaaaaagtgggcgaggaggagcgttgaaaatttcctgacaagtagtttccgtgcgcccgagagcgtgtgaattgctcctaattaccgtgtccggtgcgcctctctgcgtagacttgtgtaacctctcggcttctggggcgccggctcggctgcaccgctcttactggcctggggcgcttggcaaagccgagcttcccaagtggctctggagccctgaggcgggatggggggcaggtgacaattcaattactgcggtcggggtaggggcgggacaagggtgcgggggtggggaagggagggtgttcaaggcataaatgccaggacgatttttcctgccttcttcctgctatgtttcggcgcgctcccaaatccgacgagtttggggtagttgggggctgctttggttttttcctcctgtctccttaaagctcagttactttattttaaaagtcctgatacgatagtcatcctggagggtaagtgtggtttatgaagattttcgtgtttaaagagaagctcagcgaagagaaatgagattgcacttcctgtcggtgcccgccacgtccctcgcgccctgagcctttcctctccccgcccctcttttcgcgtccctcagccccttttgagctctcttttcctcacttttcagcatctcgatttcttttccgtggtggtgggattctttttgtcgttattgcaaatgaacaaatagcccccccccctttttttttcttttctaaacgaaagtaaaaagtggcctctgtgtctccgcagattctcttaaactcaggacgcgcatcggtctgtccgaccttcccggcaagagacaaagtcactgctgggaggccccctcggacagttttcagttttaactttcgccttattctcgtcttgtcttgatgtcacggccctgaggaacagctcgttctgcagaagaggtaacaggtttcagattttgtttcctttttgaaaggctgttgcctttcaaacatctggaattaatgccgcggccctcgggcgag

SEQ ID NO: 227104 - DNA, 867 bp, Homo sapiens
  chr1:50890617-50891484
  hyper
cgggaatctgggcgcgcagactcggcccgggtcgtcgcggcctcaggacgcagcccattccgcctggcacgactactgggccgcgtcttgtcagtctatcagcttctgagcccaggaatgggggtgggggaaggacggtgcgactaacgggcccccacccgaagaccgcagaacctggcgccccggaagagccctggaagatgcccaccgggaggctgaggctggagggaggagtgggtgggggtgattcgctggaggaccgggcggagagcttccagaaagttcaccaggccccggcgcgagggcgctccgacacggacaaggtctatgatagcgataaaaagctggttactcgctcccagaaaatgccacttgctggagtctgtgaatgggtttaggagagagaagggtgtcagcccccgcgagggtctcccgcgtgaagtgaggataagggagtgcttcagggataatatgtcctctaggagcgcaggacccagaccccaccttccaacacctggaggttccgaggccaagtatgtctagccccggctgcacctgggtaggtgagccatggggtcgggggaagagcgccgacaaccgccggattccgcgcaggggccgccaggcgcctgctcccagagctcctttggacaaagttttcgggaaattctattaaaccgaaaacgaaataaactatacaaatctgcctagcttttgagggggcggtggcccaggtatccttctcgcttgaggccaggtcaccgtgagatttccccactccggaccggggatcccgcagaagccaagggtgtagccacgaggactcgggaacccgaggcggcccagcagatgcgtgaggaacttcat

SEQ ID NO: 227105 - DNA, 1766 bp, Homo sapiens
  chr1:50892246-50894012
  hyper
ctacagttgggccccgggcagaaaaagccaaaaccctccgggacaaatgaggcggctgagagcagagggtcttcctcacacatccacacgcgtactcttagctcagaatcatttgctgacgcctctgctgtgccaggggctgggggcccgggtgagagggcccagccaagaaaatccaccccatccctattcgcccccggccccatcccccacgcccacgcccaggaactggtggcgtccaaagggactgcgttggggtgaggccggggttgagggcctagggcgcagagccggctggagacgcggcgtggggaagggggccgagggtgagtagtgtagctctgagtaaaagagccaggggcgccgatgggggacccgggaggcattgacttttgcgctgtttgcccgcggcctcggagcaagcagacgccatctgtttgccggctgcgacgcgtcccgtttaattaccctcccggcagcctaatagagatgatattaaactaaatctttctgacattaaaagtaattatccccaaaccggtggctccgggacggaatggcccctcccgcacccaccccttccctggccgcgccggattccgttagtttggctgatactctccgcccgggaatggggcgcagaggaaagggggaaagtgcctttgggagaaggaatctccacgggttgccctacacgcgttttcccgcacaaccacagactctcctgttcctatgtgaacacacgcacgtgtacacacagacacgtagcgacattttcctccagatcaactcatgagtcatgctgatgaagaccctcagccgcgcacaccctctgtggacagggagacgcgcagcttggtttcctgtccccgtcctctgacaccgctaaaatggtcattttccgtggtcatagccacggatctatgccacgacctgggaccgggcataatttcggagccagaaagtactcctgtggtggcgccgggtttctcaggcgctcttccagctaagggccaggagcccagcgatttccctacagttgcttactgaagtcgcaccattctctgcgaggcaggtccgattattccacttgtcaggtgagaaaacagactcggagaggtgagatgacttgttccacattatcacaattagtgagtaacagtgcaaaaatcaaacccgggagtaccctcatccaaagccaggtctgtctgcacagtgcaggcgcagcgggcgctgcgaatcggctcctggcccaatgcacccctccacacccgttggccgggaacccgctggtgctcagcttctatccggaccccggacctaaaggccgggcagaacaaccaactgaaggtggaggagcgagggcactggtgctgattgagcggcaggagcccccgaggcggagtcccagcggctgcagccctcctttggatcaagccctcgcgtcttccgggcaggcggaagggaggcgtctgcccagtgtcgccaggcttctcacgattttctggttgggagcatctaagcctgagacaaacgcatggagagcggtgttcaccgccccactatttgtttctatttgtgagcgtctactgagtacagccactctgataaacactcggtgtgtgctctcttgcttggcacgcagtccttgggggaagatgcgatgttccacatttcagacacgaggtagccaaagttcaacaaggcgacataacttgcctggggccagagtgctgccgaacttcgaaaaagacagaaatccagat

SEQ ID NO: 227106 - DNA, 300 bp, Homo sapiens
  chr1:50896094-50896394
  hyper
gtgtgcaccggctacgtggtcttctttgggccatccttctcctggtttccatctcccaagaggaccccttgaaatagcgattccgagaatcggctccggggctgatgagccatccagatacggagcttccgccgcactgtgtgaccgtgagcgagtcgccagccctctctgggctcgcctcccggctaccccggagtcagactgcctggaggataggcagccaggccactacttgtggagaaaggagactgtagagaggaggggcattcgggctggttcctgggccgggtcagcctgggt

SEQ ID NO: 227107 - DNA, 81 bp, Homo sapiens
  chr1:50896802-50896883
  hyper
ggtggaggagctggcgcacaagtagacagcctgctgcgatgggaggtagggactccaggcttgctgcggcactgacgcaca

SEQ ID NO: 227108 - DNA, 62 bp, Homo sapiens; identical to SEQ ID NO: 197530
  chr1:51425638-51425700
  hyper

SEQ ID NO: 227109 - DNA, 70 bp, Homo sapiens
  chr1:51426055-51426125
  hyper
atctctgcgctggcggcagagactgcaacctgcagctgcggaagcttcaagtctcgcaacaggttattcc

SEQ ID NO: 227110 - DNA, 144 bp, Homo sapiens
  chr1:51434359-51434503
  hyper
gctgcaactctgccgagcctccttaaaactctgccgttaaaatgggggcgggtttttcaactcaaaaagcgctcaatttttttcttttcaaaaaaagctgatgaggtcggaaaaaagggagaagaaaccggcaccctctctgag

SEQ ID NO: 227111 - DNA, 383 bp, Homo sapiens
  chr1:51442594-51442977
  hyper
taagtattctgtcccgagaaagcaatatgatgtatttcccttatcgtattgatcaaaagaacgttgtggatggagtccgtggcccaggactggtttcgaaatctcagttcccaaaaaggtgctttcggcttttgccgggggtagaagtaaatagtccataggcgccgggcagtcacagtgctggagcaagaaaaggtcgtgctcacagccttcctggctgccctaagcaaccttcatcaaaaggctacgggggaaagtccctgtctcggtctctggagactgttctgcttttatatggcagtcccatgaaaacagctccacgcaggaacctagtgagaggcaggaaacaaatttcccacctgagaccccgggtaaagctctgc

SEQ ID NO: 227112 - DNA, 138 bp, Homo sapiens
  chr1:51985092-51985230
  hyper
ccggccgcggcgccgcccaaaccctggcgccggagtctcggccaccggaccagagcctgcccccggggccgccttggaaaacccggcgcggacataaaattaaagcggacgggctgcggaggcgactgcagattgacc

SEQ ID NO: 227113 - DNA, 261 bp, Homo sapiens
  chr1:52082578-52082839
  hyper
tgcattctcgcatccgtggcatggagtcctacacacaataggcgccctaagaaagcgtgtttgacttgatcgctggagcatctgccggcaccgcccaggacccgcccaggacccgccccgccccctgcggccccgccccccgcatgctgaatgccatataggcgagtgacgtcaggccgtttgttgtcattggcggctcccaagatggcgtccatcatggaagggccgctgagcaaatggactaacgtgatgaagggctgg

SEQ ID NO: 227114 - DNA, 160 bp, Homo sapiens
  chr1:52194844-52195004
  hyper
ccacgatgtctcaccggattaataaaaatataggcgctcacgcttttgtttaccgatatagtatctcctcctcccctcactccatcaacccccacgcgacacaactttccggaagtaagcaaaatccgttatcaaggtgaaactccggggaccaggctcc

SEQ ID NO: 227115 - DNA, 836 bp, Homo sapiens
  chr1:52195304-52196140
  hyper
gagctgccagctccctcggcctctccacccaaaactggcccaaccgccaatcgtctgcctctcacctcctacagcaggtgacccatggccaatcgccaggggtctctttgccaggagccgccagggccagccaatcggggcgacccctccgccggggaggggacgggaaaggggtggggggtgaagggggtgaagggggtgtcccgggggacgggctgaacctcagtcaggaccgcctgcaccgcagtccggggatcgggtcgaggggagaagaaaaaggggtgctcgggagcagcccccggctacctcccctggaggcacagagggcgggggccttggcgaatggctttcttgctggccacttgcggagtgagtagaccccgagggtctgggagaggggccggcccctacccctgagtccccggggtcccggccgccaggccggagcgcgaatgtcgtgctcaccctgcctccttcccgccgccccctggggtgagtaggacgacgtggctgcccgggcccctcttccttgggagttctcagttcctcagcctagatggggtggaggctgaggtcagggcctccagttccaccgagagggcattcgcccccaaatgagactttggaggaggtctctttttttctattcatttttgtggaactctgttttccttttgaaagctgtctcagaatatgattttaagcagaaaagttaagctttctcttatgtgaaagcttaattttgaccagttgcccattaatagaatctccagttgcaggccaagtgttttttggtggtggtttatttttggcacggtgttcgtgcctggccctgt

SEQ ID NO: 227116 - DNA, 247 bp, Homo sapiens
  chr1:52344233-52344480
  hyper
acacaacttcctccgggtggcacagactgcagcaacagtgactctcctcagcattcaccaccaagctggagcgatggacatcccgcttcccaggacccacctcctccgcgttctagaggcggtggcggccggccctggtgctgccgcagccgcggggaacaggcctgaacccctcccccaacccagtctccctctcgccgacttccctcgtccctccgccctcccggccgccgatgacgctactgat

SEQ ID NO: 227117 - DNA, 192 bp, Homo sapiens
  chr1:52521176-52521368
  hyper
caaattattgattcgtgaggtcagtcgctcccaacagtgggcggattgcccactggcctcggattctccttacccctccacaaatcaagactggacaactggatttcattgttaggttcctgcgagggtctctgaggagacctggcaagcctgttctgcggtgcgtgggctcgtgccgtgcagacatgcact

SEQ ID NO: 227118 - DNA, 161 bp, Homo sapiens
  chr1:52832014-52832175
  hyper
ggcgtccaccggccggctccaatgaggtcgctgcgcccagccctcgcccacttgcagcctctccaccgaacctcctccctcactcagcccgaggcgctgggcgctcgctcgctcgctggacctaccccgcctccagccctcgccccgccccaccgagcaag

SEQ ID NO: 227119 - DNA, 968 bp, Homo sapiens
  chr1:53017722-53018690
  hyper
aaaatgaagaagcagatatacggtatctaagatctcacgcaaaattcatctaagacttcgaaatcttctgaaaagaaaatgtgtaatcaacgttgttaatacaacagtaattcatcccattcaagtacgactagaaatcccgctgatgtgcttctttcaggtctaaacatctcattctttcgcaatccagataccaacaggagtctgaaacccttcgcagaggcgtgcaacacactaggagagcgctatctgtttacaaatacgaatctcagttacccacgtcaaaaccgcgcattaccacctttcgactggggggcgggggagagagaaggcgggcgagcaagaaacaaaatccacacagacacctctgccttctccctacaaggacgagcccggggaaacattcagtatgtattatatgcgtgtatacatttatatacattatgtagtcacctatgtctaagcaagggtgaaagaaaaaggtacacatgacagggaatcgtaactggacccaacagaaatgttcaaaccaatcccgttaactcaaaatccgccccgctggtctacaacaggtttcggtccgggaccgggagccccagccacagtgtggagttcgtccccaaagcgccccaatgccctcctcaggccgcccaggccgccgtccccacctcccttatctcagccttcccctgggacacccgaagcccgttccaggaaagaaagaagtgtcaggcccccagggggcggctgagacgctctcaggccaggcccccgacacctgcgaagcgcggcacctggggagggcgaaccgggggccgcccggccttcccgagcacaccccctcggtacccgacgctgccccgcggccggaacctcgtacctgcgaggcccgcgagctacaggcgcgcgcgacgcctcctcatctcagtggctcctgctctccctccgcctcctgctgccgccgccgt

SEQ ID NO: 227120 - DNA, 197 bp, Homo sapiens
  chr1:53019302-53019499
  hyper
tgggggtggcgggcgccccagtgctgccccagtctggttcctagtctctgccgaggcccccgagctggaagccgagcccgagggccgcctcggcgcctcgctcccaaggctgctccccctggggaggaaggccggcctggaatgggtaccctctggcctggcactcggactgggcgtggcccgagcctcggcggacc

SEQ ID NO: 227121 - DNA, 122 bp, Homo sapiens
  chr1:53098868-53098990
  hyper
cagctccccgcgtccgctccggctcctgccgcgttccagcagccgtcactcccgccgccggcccccgccgcccgccccgcctgcccctacccctccgcgcgggccgggcacctggccgccgc

SEQ ID NO: 227122 - DNA, 518 bp, Homo sapiens
  chr1:53168677-53169195
  hyper
cccaaagggttacacgttggtaaaggagccgccccgtgagagagaccggaccaatcacgtttgctgtgaggtcactttggaggcctgagattggtgctcgtgtctaaacggacccgatctttctgagtggctggtgcagctgagggaggttccaggtggcttgctcgggggctgcccagctcgccgtcctctgcagatcccctcgggactctcagcattttgtgggttagccgtggagacgccctgcccttcctgctttggccagtcaaccccctcaagcccgtgcccgtagagcctgcagcccttcctcacctcatcactccccatccccccaagatatagaaaggccgtgacagctgccagccctgcacatgctcttgtttcaacagcggcgattgcacatcacgtagtccccacgtgacctgtcgggcctagggcaagcgcaaagctttcggaaacccgaattattgcaaccttgacttcctgcctgtctctgaggctcccgggctgtgctttaa

SEQ ID NO: 227123 - DNA, 499 bp, Homo sapiens
  chr1:53308783-53309282
  hyper
ccccttccaggcgcaggcgtcgctgcggaggtgcgttgtcgggggaggcggcctgggcgccgcggagcggggggtgcttttctgcgcccggcgaagcgcgtggaacttgcgccctgaggcagcgcggcgagagcccagtcccagagaccggggcgagcctcctcaggattcctcgccccagtgcgggctgctgtgagcttagacgtaggtgcagggcatggcactcggcttggcccgtagtggacggtgtttttgcagtcatgaacccaaacgccgcaaaccttgaccgtttccccacccgtgttgtggacgcagcgccccgcggaggcggtgaccctttggccgttaccacctgaggcctttgggcccggggccgggcgagtagcttagtccggctgggggaactggaacccgaagtctgagattctttcagttccgcgcgtccgcccccgtccccgtcccgtccccagcctttgccgaatgcctgttactcttagct

SEQ ID NO: 227124 - DNA, 306 bp, Homo sapiens
  chr1:53387231-53387537
  hyper
cggacccgccagggcgcgcacttggatctctgagcccccggccgccccgtcggaagcgcagccgcgggcccgaaggggcctccaggggcgcaggaggcacagaacgcgcagcatcggggcgcaggctgggagtgaaggtgcttctccggccctgcaccgtctcggctcccgctgagagctcgcagttccggcgtcgggcgaagccttcgccaattgctccacctatgggccaagcgtctgttgcctccttccgcacctcccggggacagggagacttgagcggaggaggtcgggggaagcccagct

SEQ ID NO: 227125 - DNA, 1130 bp, Homo sapiens
  chr1:53527562-53528692
  hyper
aactaggaagcgtcgcggaccagacagcccgccttcccggtctcccgggtgggggttcggggggcgtggtgcggcggccggggctgagaggggtcggtgcggcggctctgcctccccgggaagtgggaaccggccaagtcccgagcggggaggggcaggctttctcctgcccgcgcctggggggaccctacgcctgtgtccgaaggaggccggcgtccagcagatgctcccggggcgggtggggagtgggggaagggggcgggagagaggcggggaggagaaaacccacaacaaaacttgcgtcgcggagagcgcccagcttgacttgaatggaaggagcccgagcccgcggagcgcagctgagactgggggagcgcgttcggcctgtggggcgccgctcggcgccggggcgcagcaggtacagggcgctggcagccggggtgggccgaggggccgggggctgagcccgggcagcgcactcagacgtccccgcctctccggatggctccagcagctgcctggggcgggcccgccgcatctcaccccctctgtaggaccctgcacccagggcacggccggagatctcctcctctggagtgcgacccctgcgcagtcaggacccaggcaggggccttctcctctctgagcagaggctggtccccgtccccaggcccctcccgctgcgcacatctggaaagaatctgagggcggttgggggcgggggctggagtgggaggacgccggcgggcgacagggaatgtggggggcaggtggaactgcgtaggggcggggacccctgtcatgagagcctgggcccgaagtatccccgcgtctttccacgtcaactcatcaggccccctagcgactccaacctccacctctttatagatagagaaactgaggcccagagaggggcagaggtctggccccagggcgcgtcggacgccgggtgggtcccctccggggctcggcttccccggccactgtgccgccccagcttagtgccaaccactagttgagctaaaggtctcagctggcggtctggagtccgtctatctgtctacgcggctgcttcccagccgggacagctggagggaggaaggggtgggggtccgcgaagcgcgaggagc

SEQ ID NO: 227126 - DNA, 209 bp, Homo sapiens
  chr1:53662229-53662438
  hyper
cagattccaatcacgtttcttagcttttcttttttttttccaactccagtttctgtcttgctccaaaaaaggggaaggagcggctgcggcgctcggtttcccgcctcctagggaagggaagggagacgagcagcgcggaggctggggcccccttccgggcggggcctactagtgggcggggcctgtcagtgagcggcccctgcccggaa

SEQ ID NO: 227127 - DNA, 53 bp, Homo sapiens
  chr1:53662694-53662747
  hyper
ccggctccgggcccggccagtacctgcagcgcagcatcgtgcccaccatgcac

SEQ ID NO: 227128 - DNA, 55 bp, Homo sapiens; identical to SEQ ID NO: 197539
  chr1:53686483-53686538
  hyper

SEQ ID NO: 227129 - DNA, 456 bp, Homo sapiens
  chr1:54203443-54203899
  hyper
ggagccgccaggcacgttggcagggccgaactcacccttcccggcggcggcggccttggatggaccgtagtctcggggactgcggggccggaggaggtcgtgggcgcgcggtggcggcgcaggcggccgggctagcaggtcccgcgggcccctgtccccgcagccgccgccactcacggtgaccctgaaggccatgtgcgcgccgaggctggcggggccgcggtcggggccgggcgcaccaggggcctccttaggcctcttgtccgagtgtgcctcagccacctcgcaatgcatggcgccggggcggggcgcacggctgggggtcgcgccgggctcctggggaggggagacagcacagccagttagaatgcggaaagcggcccccgtattgtcccggggccgagtttgagcaggtcactgccccttcggtggattgcgcgtctttaacataggtta

SEQ ID NO: 227130 - DNA, 345 bp, Homo sapiens
  chr1:54204979-54205324
  hyper
gcgcgagggcggggcatccccccctgggggtctgggcggggcccgacgcggggctgagcagagggtttgacaggcggcggccggctggatccccgcgctgcccgctgttctcagacggccgagccgggcaggacggcggggcggcgccgcggcgagagaggctgggctcgggggtcggcggagtgcgctgggcgtgaggagtgccgggctgaacccggctccctgcccgcctctccactagccccgggcaggatcctcccttctcccggtcggttttcccctccgtcagatgggaacgacgctgtctgctaacgcgaagcggacagatgcgaaagtgcttgaaaa

SEQ ID NO: 227131 - DNA, 438 bp, Homo sapiens
  chr1:54303838-54304276
  hyper
gaccctggcagtgcgtgccacagtgcacgccgcactcacgcgccacagtatgtcccgcgacctgccggcgcagggccggctcacggccgtggccatggagatggcggcccctagtctagggcgtacaggagaccgtgcgcccgcccgccaccgcagttcaaaggcaggaaggccccaggaggaccctgctgggtctgcctcaaacgctgcctgagcgaagcccggcccaggctccaacccatccctgcgaggcttcgtctggacaagctcaacaggccaggactgccgcgcagacacgtcccgcaaacgcggctgtaactccaggaaccgccctctggcgaccaaacggtcccttcgaagcagggtccagcggggcgccagaagcaggtggcggcgctgcatgctgggaactgtagtctcgacggccccctgagagga

SEQ ID NO: 227132 - DNA, 174 bp, Homo sapiens
  chr1:54355496-54355670
  hyper
tctccgcctcctccgggaagagccccgcctccttaaagagacagcagctcccagagaaacctgcgtgctgcggcgcgcagagcccgctcccgcccgcccttctcccgaggctgagcctcgagttcttaaagagacaggcgagggcggagtggtggggtcgctgagtgtgactac

SEQ ID NO: 227133 - DNA, 345 bp, Homo sapiens
  chr1:54665607-54665952
  hyper
tgaagtcctggagcgattctccacccaccacgaccactcacctactcgcctgcgcttcacctcacgtgaggattttccaggttcctcccagtctctgggtaggcggggagcgcttagcaggtatcacctataagaaaatgagaatgggttgggggccggtgcaagacaagaatatcctgactgtgattggttgaattggctgccattcccaaaacgagctttggcgcccggtctcattcgttcccagcaggccctgcgcgcggcaacatggcggggtccaggtggaggtcttgaggctatcagatcggtatggcattggcgtccgggcccgcaaggcgggcgcta

SEQ ID NO: 227134 - DNA, 148 bp, Homo sapiens; identical to SEQ ID NO: 197541
  chr1:54965082-54965230
  hyper

SEQ ID NO: 227135 - DNA, 53 bp, Homo sapiens
  chr1:55230330-55230383
  hyper
tgtagccaaagagcgagtacccggctttccccaagatcgttgattggccaggg

SEQ ID NO: 227136 - DNA, 458 bp, Homo sapiens
  chr1:55266563-55267021
  hyper
ctcgaggaagcactcgcgggcctcgtccagctcctccaggtagaatgcgaaagcgcccaggaggtgacgcacagcggggcgctgcggggcggccgccagctggagctcctgccgcagaccctcccgctgcagcttcaggtcccgggcgcgctgtggggccggcgagcgcggctcgaagttcaactgcatctccaggtgaaagtggcccgggaggtagtccaggtcgtcgatgagggcgtctagatcgtcggccacagcctccagctccgccatgactgctccctctgctcccctggcctcacccttgtccctgaggctgtggagggcagtggatgggggcgttccccgagcgagctccgtgcgggaggcgaggggcagccggcagaggccccgggcgctgcggcctctcggtctcagggcgcctcccgcaggtgggtgggcccgaggagtgccctgta

SEQ ID NO: 227137 - DNA, 193 bp, Homo sapiens; identical to SEQ ID NO: 197544
  chr1:55353149-55353342
  hyper

SEQ ID NO: 227138 - DNA, 494 bp, Homo sapiens
  chr1:55446120-55446614
  hyper
cgccctggagcgctcgcgggggcgtgacggcccccaggacccaaggttccgatccgcgccaaggcgttccggtcagcagcagccccgcggctcctcgggccccgccgcgctggcaagccccagtccccgccagcccaatcgtgctggcgctttaaggacgggcggggcgggctgggcgacagcgctggacacctggagctgcccgaggacgcggaggagaggtggggcgggcgtcaccaccggagtggagggcgaggcccgggtcccgcgctcccctgggcgccccacggcagcctcagagccccgcggggagcgcgcagccctcggggcgggcgccggggtgaggcctggctcggtccctgcgcaccgggtgcgggcggcggagagggcgcggctggtgagccctgggagggcccaggagccagacctcggttttgcgggctggggagcagggctcgggggcagcggccaggcccctccgcccctaacacccg

SEQ ID NO: 227139 - DNA, 529 bp, Homo sapiens
  chr1:55462135-55462664
  hyper
gcctgcgtggacctcgatgcttacctctgtcaaatgggcgtgctctttccctccctgcctcggggtgtcatgggagcccgctcgcaaggatcccgaaagctggggttagcgcgccctctgctggacgatgaaagactccgcgcgctctgctccccagtcccccaggtggcccgggggaggtgaagtaaggcgggagggcggggggactacaggagaggagggggagctgctgcacccgaacatttccagcgcaccctacacacatgtccttacttaatccctagcccgactctgtggaagagcttaggtgagacccattttccagagttcctacctgtttcctacttgctactgaatttcttactcgtagttaccttattttttttttttttttttaagaggagaagcgactcagagagaaaaggggcgaagaaggctgggccgtgtagaggaaagaaaaggcgcgagagaagaagactgcccgggtgaccgcgaggcctctgaggaatggctgaagagcagatccatc

SEQ ID NO: 227140 - DNA, 476 bp, Homo sapiens
  chr1:55505133-55505609
  hyper
taatcagataggatcgtccgatggggctctggtggcgtgatctgcgcgccccaggcgtcaagcacccacaccctagaaggtttccgcagcgacgtcgaggcgctcatggttgcaggcgggcgccgccgttcagttcagggtctgagcctggaggagtgagccaggcagtgagactggctcgggcgggccgggacgcgtcgttgcagcagcggctcccagctcccagccaggattccgcgcgccccttcacgcgccctgctcctgaacttcagctcctgcacagtcctccccaccgcaaggctcaaggcgccgccggcgtggaccgcgcacggcctctaggtctcctcgccaggacagcaacctctcccctggccctcatgggcaccgtcagctccaggcggtcctggtggccgctgccactgctgctgctgctgctgctgctcctgggtcccgcgggcgcccgtgcgcaggaggac

SEQ ID NO: 227141 - DNA, 127 bp, Homo sapiens
  chr1:57110514-57110641
  hyper
cttttacagcccctcgctcccgacatgcgaggcccgtctcttcttccagtttgacttccaagtctttccattccctaggatcgggccccagtctcaccccctattttcacccccttcggttttcctc

SEQ ID NO: 227142 - DNA, 99 bp, Homo sapiens
  chr1:57111421-57111520
  hyper
tctggaggtcggagcaaggcacttctgtgttctctggacctcagtgtcctcctctgcaaaatcgggagaactggactcgttctgcgaggcgccttccag

SEQ ID NO: 227143 - DNA, 2749 bp, Homo sapiens
  chr1:57887908-57890657
  hyper
actgttaaagtgtatttaaccggccagcaggaagggagcaggaaggaggaagaaacgacggcgcggattctcgccccggtccccgccggctggctaggagctgcactggagcatccagctcgcaggagggctcgcccccgggctcgcccccgtccagctcccaggcggagaaaggcgctctcgctaccgcaagccctacatcgcccctctttctaatggagctaaacacaggcgtgcgccgacatccaaacgcacacgcagacaccgacccacgcgggcgcgcaccccagactcggcgacacatacacaccggagcgcacagatgcccgcgtcgcggcgctctccactccgcccgccgccaagagcggagcggtagccaagcgcccccggcctccccacccccacgccattccttcagactctcccagcctaagcggaagtgccccagcagacccccaacaatgaggatttgtgcgatgcagttgggggttgggggtagttcacacggagtgaaacgtacacagtctggcgggtctgggagcagccaagtggcgtccgcctctccaggcagcgatcccttgtgcccactgccccccatcaggcccaccagcaccaccaaaaaacaaaaacagagaaaagaaaaagcgccttaaaaagtgcagagaaaagatgcgccctcccaccaggggtcacaataatactcctcgggacgcagccagcggaggcagggtcctggctgcagcagccaccctggttttgaaatttactttgtacactcacccagtggcccctttcagacgccgcgacacgacctccccccatctcggactccctgcctctgggttctctcggcggttgacaccctcttgtgtgcctgctttatgagccgaaccacagagatttaaagtttccttggtagaaaaaaaaactgagctctctgcatccaagtcagagcgtcgagtctggagcagagagaaggaagaggggcgggctggggaggcgactagctgggcgtggggggagggggtgctggggagtggatggagggggacgagcggcagagaacagagtccacagaggatccgaagaaaggccggggtccgaggaacgcgggatccagttctcacggtgcccgcgaaagggctgggattactgggatagagtcggtttttcgagaggtcgaagccgaatctcagcgctacggaggagtagggaagtgagaacggggttcggccgaatgaggaaaagggtctggccaccagcgagggagggagggagtttcgggagcccaggacagcgggagaaggcaggctcgaggtccgatatagccaggaccgcaggaggaaagagggcgcagggggtcttggagagagacgcgtgtcaggggtggacaagtctggagacaggatcgcgcgtggtcggaagtagggagacaggggcgcggggatggggggcaggacagagaaagagaagtcgcccttttcctcccagcaagtggagggagaaggcgaaaaactgctgcagtcgccatcctcccagcacccctagccaaactgctgagtggcgcgtcccaggagccctcctccgcgccccggggctccagcgaagcctcctggctccccggcgccctgtcctcgcggggcacctgcggcgctgaactcaagggttgccgcgcgcccccgccgcgcctcacctcgcctagcccagagcatcctcctccgctgccgcagccgcccaggaagcggctccccatgcccggcgggcggcggcactcaggcgcgctctgcagcccggggaagcccgggcgagcgccgagctgggtccatcctccccgggagccaccggccccgcgtcagagtagggggaggagaccgccacccgcgcggacccgcctcctcccgcggccccccgccccgccgccccccgcgcccgcccggcgccccgcggcaccgctcacctgctagctccccggccgccgccgccgggccgtgagcccctcgccccggcctcgcggctccctccggggcgctctctgcgcagccggagcgcgctccgagagcttagccgagtggcggtggcgacgaggaggtggaagaacgagcgagcgagcgagcgagcgagcgggggcgccgcggcttgcagtcgcgcctctggagcccctgcactctctctccatcccagcgtggaagggggagagacgagccgagagcgaggggtccccgccccagccgcgccagcgtggagagggtaagggaggggggttgtcacaaagtatccagtgttttctcccccatcaccaccactggacgcagctccgcctggcctctctcatttttctctaagatctacccttttatccaagcctcgaaaacatatgcatacccaaatatatggagtgccaggaagggcgaaaccacgaggggagtctccgcgagggcatgttgcccccacgccccttggcaggagggggcgctcgctcccagccgccagtgcaggttcggcggctcctgttttgactgaggtttcccaggcaaagttcggcaagttgggagggagaaggctggcacgtgtcaagtttccgtcagtcctcaggagagacccgtgcccctgagagcacgcagaccacggttaactccggcttactccccgcgactcccctactcggctcttagaatgactgggagtaaacaatcctccgattcgaagctgtgcgggaggcggctccagcgagtacacagtcagttgctcc

SEQ ID NO: 227144 - DNA, 192 bp, Homo sapiens
  chr1:58714602-58714794
  hyper
acctcggtctgcaacgacgcgattcctcagacaccaaactaaaatgcattcattggaactcagcctcccaaagcggaagcaaagccactgcaaggcgatttacaggcaagagcccctctgaaagagaggaaaggagggggcttggaaagcaaggggacacaccttttctgagctgttcgaaacaggctgcct

SEQ ID NO: 227145 - DNA, 197 bp, Homo sapiens
  chr1:58715252-58715449
  hyper
cagaaaagaaatgaagagaacgcggactgagcgaggaaatgctcaagaccacaggactgaaccccccggaagtctcgacgctgcccagccagccagagtccagtcgtcgacgcggatgaagttgtttccccgggacaggaagggttaaatggctgcgcgtcaactcggcctcgactggggtgtcagggagcaagagc

SEQ ID NO: 227146 - DNA, 55 bp, Homo sapiens
  chr1:58715749-58715804
  hyper
ccgacccacagtaggcagtgcgggcacagtgttgcagaccaccacctcgccaggt

SEQ ID NO: 227147 - DNA, 160 bp, Homo sapiens
  chr1:58715984-58716144
  hyper
ggctccgcttttgttccctggggctggcaggtccgtgtggggccagggcgcgcgggagacgccgcggagctgggtatcccggagaggggatgctcactcctagcggctccgctggcagcagtagtggcggtggcagcagaggcagcggtagcaacagcag

SEQ ID NO: 227148 - DNA, 426 bp, Homo sapiens
  chr1:59012378-59012804
  hyper
gcagaagcgaaagcggtgacaccgcagacccgacctatgcgcaggcgcgcacccgcacttcctgcccgccataccggccggggcgcccttcgctccgcccacacccggcagtcaatacagccgcccagagtcgttctcccagctgccccgggccccgcggagactgtggcgctctagcgcctccgtgtggcttaaggcgggacatggccctgggctgggctgcttgcctaggaacaactttctcccgtctttggtgagttgggtcctctaaagaatgatccacgcaaggctgtgtccgttgtagtctctacggcagtaccggccaaaagggaagagactcgaagactgccaaaagacgaaggcttcctggttctgaatctgcattcatagaaatagtctttggagtatgggaacagtgctttcata

SEQ ID NO: 227149 - DNA, 1064 bp, Homo sapiens
  chr1:59041928-59042992
  hyper
ccggttggtgatcaccaggacggccatgccggcgacgagggccaccacgaccaccacgatgacggcgatgaggccggcggtgaggcgcttcatggagaacttcgggggaatctcgtccaggtaatagatgagcgtgcgctccacctgcaggggttctccgcgcacgcgcaagtccaggccgccgcggccctggaatagagactcgcccttgatgtccctctcgaagtagtaggcggcatcgccgatatccacgtcaccggcggccttctgagacgtgttctgccgcagctcgatctggatggtgggctgctcgtagtgcacggccgccacgaacttggggtgcagccgatagcgctcgcggaagagccgcctcagctcggcgtccaggtctgagtggttgaaggcgccggcggtggggcggtggcgcaggtcaatgaggatgtggtgggtgcgcaccagctcatcgcagcgtaggctcaggtcgcccttgtccgtgcggcgcacgcccaccgagttcacgcaccagcacaccgacgtctggttgcactggcgcgccttgaagcggccctcggggtcgcagtcggggtcgtagaggccatcgttgtccacgagcgcgtgctcactcggccgcaccagcgtgcgggcgttcttgggggcgctcatgcgcgccttgagcagcagacacttggaggtcagcgtggagcagtcgaccgccatgcccgagcccagcgcgcggcactggcagcggccgccggggccgtcggggctgcacacggtcatcttgttggtgggacacgtgcagttgtcctgcgcggccgtgtggccggtcaccgccgccagcaccagcagcagcagcggcagccgcagcggtggcggcgcgaggccggggccccgagccatggtggggcggaggaacgcggaccggacgcgggcggatgaggcgcggggactcgtcggggctcgggctccggcgtctgggatggtctgcaggcgtctgccgcccggccgctccctccggctcttatactctacccgacctgcccggctggttccaccaccgaccg

SEQ ID NO: 227150 - DNA, 196 bp, Homo sapiens
  chr1:59247411-59247607
  hyper
tactgaatgagatcgaatgttaggtccatgcagttcttggtcaatgttaacgaaaagtccaacgttccgttcgcgcggggacagcccgtccgcaaagcggggcagcccgcaggcggccgctccctggctccacgccaagggagggcgcgccaagtccttcccactcgtgcacactgggggcgccgtcaggacgcaa

SEQ ID NO: 227151 - DNA, 101 bp, Homo sapiens; identical to SEQ ID NO: 197551
  chr1:59249797-59249898
  hyper

SEQ ID NO: 227152 - DNA, 453 bp, Homo sapiens
  chr1:59281467-59281920
  hyper
tctctccccaacccacctatcgtcaccgagattgtaaaacttctaaccgggaagaatcaaatacatgcacaacgggttacaggttaacagacagatgggagcggaaagggacattccagcgcttccctgggcgtgtcgcacagggcaactccaaccacaggcgaattttcctgggtgacagttaaactcctttttgcatgaaaaaatacagattcttattaaaacaataatcgattagactataaaactctcaaagttatttcggatcaaaattattttcggctgtttccacacctttttttctcgattgtgcagaaattcttcacaccgtctgcacagatgggcaaactgagacccggacgagtcccattgagagagagaggcagagccggggttgggagaagactgagatttctgggatccggcttggggtgtttccgctgggtgggggcg

SEQ ID NO: 227153 - DNA, 517 bp, Homo sapiens
  chr1:59612306-59612823
  hyper
ggagaaacttcagagcggcaggtgccttcgtttcccgttacctgctgagtctagtcccttccagggcacacagtgggcgcttagtaactgtagaaagaagtcgaacgaaatcggaagggggagaggcagaggccacaatcaagacacggaaacgacagtcagtcgaggcagcagagagggtttcacgcgggccagcggaggcgcagggcagttgagaagggaacttgccacggggcggaggggccgcgctccccaccagcgcggcgcgggggcgctaggccagggaccgccgggccagggaccgccggctgcgagcagcgggaacggacctgccccgggtcgcagcggtttttcccgggcggggctgaggctgcagggaggcgggcgttccggcggagggtcacggcctcgccgccgggactttcctggggtggaggtgtgagcacgtaggagccctggcctttccaacttcccaggtcagactggggctgggaccaccctgcgcggccttggatgc

SEQ ID NO: 227154 - DNA, 31 bp, Homo sapiens
  chr1:59762509-59762540
  hyper
ccgtggggttcggcgcggctacgtgcagaat

SEQ ID NO: 227155 - DNA, 249 bp, Homo sapiens
  chr1:60280227-60280476
  hyper
cgcaacctcccacccccgccctcactgcacctgccaggtcataaacctcttcccacccactctcactctctacccaaggctcaggcttgtctcacgttgattggccagagcccacgagggcacgtccaatcagcaatcccccctgcgcaacctatcccggttcttcccgcccccgccccgccccgcccgcccccccgggtacctaccgtctctgtgactggtgcgcggccaggtcactcagggcggcgg

SEQ ID NO: 227156 - DNA, 277 bp, Homo sapiens
  chr1:60539352-60539629
  hyper
ggggcttaccgctagggcagcgtccccaccctggcagctcagaggtgcgcggtccgtgcttctccccaggaagctgacactctcagacccggggacgggacggggcgtggggaccgagcccaggaatccggccaatcacagggcccgcatcgcgggcggcgcctgttccgccctggtcgctaaggacgctgaaggctgtttctgggcggggaccaggtttttctccactgcctaggcaatggacccaggctctggctgccaacgggtgaagagccta

SEQ ID NO: 227157 - DNA, 82 bp, Homo sapiens
  chr1:60747090-60747172
  hyper
gagtggtttcctgtcgagaggcacgcagacagcgagtgtgttcttacacatacacacaatgcatctacggccgcagcatttg

SEQ ID NO: 227158 - DNA, 93 bp, Homo sapiens
  chr1:61509076-61509169
  hyper
cggggcgcggggacggccgggctccagccacagaggcccgaactcggcccgcactgcccggcggcaggccgcgaaggagccccgggtagtggg

SEQ ID NO: 227159 - DNA, 652 bp, Homo sapiens
  chr1:61519332-61519984
  hyper
gctgctgaactggtggaccacgaattaatgtggagaacgaggccgtccgggctaggttcccggggctcaaagacgcaaagggaaggcgacaaaggtttctcacaggtcgccgttagggagagggggcagcgcaggaaacccgtttatttaaagttcagttgtgttgggcatctgatccaggacaactcgcccaggagcccggcgggtttcagctgccaccacgaaagtaaggatcggttctgccgcgtcgccccctccttccccttgggatgtgccaggcgggcgacagataagggggcgcggcgcggggtcagccaccgagccagagggcggcgcccggttgcagcgctccacagccgcctcctgcagcctcgcggtcgtgaccttgccgagcagctcctgcgcctcaggctcggtccctgcacccgccctcactccagtccctctcagggcctgcagtggaagatccccgtggtccgggtgggtggcgatggagagcagaattgaatttatttgctctcaaattcccctaaaagctctgaaactgggaaagtccgcgggctgccagggacagtaatcactgtgtccccacccggacgcaggaggtctcgggaggagctccgaggccaagcgcccgcgacttctgggtgcc

SEQ ID NO: 227160 - DNA, 223 bp, Homo sapiens
  chr1:62190978-62191201
  hyper
gtacccagtccctcgaggcgaattttcccccacgaacccttggaaggagctaaggttaatctttgagtgctggaggaaggaaacgagtggtttaggcaatcaggtgcttcacccgcttctcattcccgcgcccttagctgaggcttctcggtcctctgaaagtgccagcggcgtcagaggttggaatcaatgctttcctgacatcatcgcagttagccctgat

SEQ ID NO: 227161 - DNA, 187 bp, Homo sapiens
  chr1:62207660-62207847
  hyper
actcccacatttacacgttttagaatattttattttgcgtcagcgaatagagaaaacaaaggagggatgagagaacaggaaaggaaaggggcaaaaagacaaagtgttaagcggattgacccaacgctttcatcgatatcctcctcaatttccttgatcttgggtctcgctctacacgcaggcctcc

SEQ ID NO: 227162 - DNA, 396 bp, Homo sapiens
  chr1:62208087-62208483
  hyper
gggcggggagagtcggggcgaggggagggcctgccaggtgaggcgcggtcaccctgggcctctcacttccgcccaggtgaggcagggccgacaccgagcccgcccgacccgggctcccacctgctcctccagcgcaccaggtaaagcgtgaggtcccggctgtgcagtgcgcgctcgcccctgggtgtccccgcgcctggaggccggccgggggcagctccctcggggcttcccgggcctgcctgccctgcccccgcgctctccccgcccgcccgcctggagtgggtgggagccggaggtggagggcgccgccgggcgctcagaggggccgcggcgaggatggggcgcccgcggcgtgcgtccgcgctgacccgggaggcggggcgggggcgccgt

SEQ ID NO: 227163 - DNA, 954 bp, Homo sapiens
  chr1:62784250-62785204
  hyper
gtgccagggttggcactacggggagacttttgcgacaggagagagactaagagctcgattccaggtagcagtgggagcccgcggcaaagaacgcccagtcccgcaggctgcatcccagaccgcagcgcctagctcggaaaagctgggcgggggctgcaccacctgagtcgcaaggacagcacggcctccccctcctcaccagtgttctccacccccagaattggggcgcggagagccaatctgggctggaaagggagcggcgcccacctttgggcagcccgagcagccccgctccttttctgtcgcagaccccaggctgggaggcgggggcgccaggtcggcccaagctgccgcagccactgctttaaagggagccggggacgcggcgctggggactgggcgaggcgggtggcagaggcaagaggagagtggtcgagcgccggggccaacactcgggtcgcgcagggcgggtgttgaacaccccagcagacgcactgcgggggactggggtcgcagagtcccttaccttggcgagctgcggaagtcctgcgcgaggcggcccgcggtgcacggggccggggcagctaggcgcacaccccggcttcggagcgcacgcaacctccgggtgcactgtccgcgtcccaggcgcgcaccccggggctggcgcaccctggtcgtccgcggcgcgcacaccctccaggcgccctctggccgacggtctcggccctggccccggcgcacccctgcgggcacacccaccgcggcggatgcgggactggccaggcgccgccagccgcggcttcgccccgcgtcgccagctgccaacagcgcccgagtccccgccttcgctaggggagaaaaaaaagactcctgacgcggcgcggactttggtgtgtaggaaggggcagaattgcgaaaccgaggggagggtcttagcctcgataaactcaaaag

SEQ ID NO: 227164 - DNA, 67 bp, Homo sapiens
  chr1:63539431-63539498
  hyper
aaagggggataacgcggaagagtgggggagggggtagatttgaggtgtgcaattcttaccacatctg

SEQ ID NO: 227165 - DNA, 190 bp, Homo sapiens
  chr1:63539798-63539988
  hyper
tgacccgcctgctgatggggcgccttccctttcatcctcgggattatgacaagttattaattgccaccattagccgcagcagcctgcccgagatctctgctgctctctggaggtgagaaaccgcgcatctgaatgccgagggaagaggcgctgagcagccagggcaaacggagcaacaatctgcccaaaa

SEQ ID NO: 227166 - DNA, 1231 bp, Homo sapiens
  chr1:63785164-63786395
  hyper
ctctgtatctgtctcgcttcttccgtctctgtcctacagcttggcggtaactgacgacctgtgagcttttagctgcaaactgcaactacgcggcaaacaatttatttagcccgacatctagccggtctccggcaggaccctgcaccgcgtcgggatcggacccttccgctggggcggcctcctgcgtcaaggccagcaggaaccttcctgtcgccctccccggccgccgcttcgcctccttcccgcccccggaggttgtgcaggcgctatggtccgcctggagggagaaagccggcggccggttcctgagccgagagcggccgcggaaaaatcctctgcctccgctggaaatcgatattaggccggcgcgggcgcgggacgtcggggccgcagccagtaggttgtgcacgtctcatcatttagctaatcgagtcgaaaagtttctgtaagggccggacccagcatcagatggtaacactgattgaacaagagattagcacaatagatctctaaccgaggggaagcgttgcttttcacgctacgcgccgtaattaatggtatgaatcaattaatttgacttttattgtgtcgaaggaaaaaagcgcaacaaatggaaccggcagctgggagttgttcgtcctccacccccttccccagggaggttccaaggagacaccggggaatggacggatcaggctgggccgtggcagagggagggtaggaggcagcgaccagcagcgtggagggagtccagagagctagcctctgcggacggcggaatcgaaattaggctcatttggagactacttcgagaccggtgaggggagccctgtagccaccatcctccggcgcgcatccacacatactagtccacgcgggcccagccaccaaggccgcggcagggccagcgctgcgccccgggcccctgcctttagggctgggcaacccaagcagagcaaaggaggttcctgaatgtgtaaatttccgctttttagctttttttttttttttttttggaccttccgacacttcggttgctgaggcagttgcagacgcgacctctgcagtcctgggcgatggccagccagctcagctcgggtcggtttcgcggaaagctgtctagacggcattgtaaacggttcggagcctgcgggccacaaagctgtggagctacggaaatcaactctgagatgcgttttagggccgtgtgcaacctcgggatcatttagat

SEQ ID NO: 227167 - DNA, 914 bp, Homo sapiens
  chr1:63786771-63787685
  hyper
ctcccctcccaggccgcagcggacagacagggattgggttccgtgtgcctgccacaccaggcaggctcttgcggctcccaactaggcggcctaaatgagggaggaaagaggaggcgcatcgctgattcaccgcgtcaagagcactgactttccttggaggtgtgaggtccacgcaccccagccacgcacttgggggtcggtttgcggtgcctccccctccagtcccagtgaaatccccacagtttttcctactatcactgacttgccttgcactccgcgtgcattggccacacatcctcgcctcctccacccgctccgccgccggttttcttggaagttaaatcttggaggatttgtccacaccttaagagaagaaaatccacgttagctggcagcaacggagatcccagcatgctggcatgcccaagtctgcccaggttcccccaaggccatgcccgccgcccgggaagtcactgcccgcacccctcacgtttcttcagccgcccctgggcgctgcgtctaacctgaagacaccaggcctcttcccggatccactcgacttacccaggccgctgccaatcccagctccttccccagcgcctcatttccgattttttcatatgctaagtcgtttaacaactccaagtagccagttatggcttctttatttataggttccctgctattttacgtcgtttttatttctctcggcaactattctagtagattaatcaatagccattttctgaccttcgggaaccccagctgatgctttttgtggccgcacgaaaaaatacatacaggaaaacacgcccgcatcaagccgggaaagagcaggtaggacctgagtggtttggttgggggagggggaaaaagacatctcagcaggtgtcttccccggaatgagcactgag

SEQ ID NO: 227168 - DNA, 426 bp, Homo sapiens
  chr1:63787903-63788329
  hyper
agggcagcgacagtcgcacagtcccgcggacgctcccaggcccacgccctgactcgctcacacccacccacactcacacccacccgctccctgggccccagggcccggatccagcctgggtgggggggtctccgggcgggccgcagcgccctccgtgccccggggatgctggcgcacagtgcggagcggagttgcgcgtctctcgtccctttgttgacaattccctgaaccaacttgagtttggccggctcggccgcggccctgacgtcacgcacggtcacgtggccccgcctcccgctggatctttaagtagaaagtaatctatcaggccagtccttaaaacgggactttcgactaccggggcttcggcgtccctgacacccagccccctgcccccccgctactgtccctgcccgcgccctcccg

SEQ ID NO: 227169 - DNA, 440 bp, Homo sapiens
  chr1:63788809-63789249
  hyper
ggtgggcgagggcgacgacgggctggaagagaaggacagcgacgcaggttgcgatagccccgcggggccgccggagctgcgcctggacgaggcggacgaggtgcccccggcggcaccccatcacggacagcctcagccgccccaccagcagcccctgacattgcccaaggaggcggccggagccggggccggaccggggggcgacgtgggcgcgccggaggcggacggctgcaagggcggtgttggcggcgaggagggcggcgcgagcggcggcgggcctggcgcgggcagcggttcggcgggaggcctggccccgagcaagcccaagaacagcctagtgaagccgccttactcgtacatcgcgctcatcaccatggccatcctgcagagcccgcagaagaagctgaccctgagcggcatctgcgagttcatcagcaacc

SEQ ID NO: 227170 - DNA, 223 bp, Homo sapiens
  chr1:63790149-63790372
  hyper
aatggccggcgcaatagggacgcgccaatggccgggacccagggtccggcggcggcctcgagcaacaaatgcacctccaggctgcgcgccctgtcccaagcccggtcccggtcccgctgcccaatcctggactctgcctctccccaatttcctttcccctgagcccccaacgcctaccttccgcggcctccatcccctcgcgcacacctaagctggtcgagca

SEQ ID NO: 227171 - DNA, 82 bp, Homo sapiens
  chr1:63790402-63790484
  hyper
tccatacaggtaaaaccgaaaaccgaattttccaaaaatgcaccccgacggcgcctgctcttagtaccgtggggatgggagg

SEQ ID NO: 227172 - DNA, 424 bp, Homo sapiens
  chr1:63791878-63792302
  hyper
ctcggccctgcgcgcgtccttttggttaatcccggccagtccccggtgttgtcgtccactttgcctccctggtggtggagatgcctccccgtctcggatcccacctcatttctccgctgtcgacgtgggctgggggtcgctttgaaagacacttccttgcaaatacccaatctgttttcctggtaaacggtaaacattattgtgtcttgagtaaacattccttcgggatcagggtcctaaaataaaacaagctgccgggggtgagatagtttaacttgataaacaagaacctgataaccaccgccgagagaggagcaatggtaaccttcaccgagaggagattatggaccacacggtctccgggcgggtcccttctaatctccttttacaaggaaaactaaacggatctaattttgtttgtgtg

SEQ ID NO: 227173 - DNA, 1108 bp, Homo sapiens
  chr1:63792544-63793652
  hyper
ttgttacttataaaattactcgctcatatttccgcgcatagcagcaataccggccgagcctgcgccagcagcgtgacactcagccacaagccaccgccggagactcgcagggctttttccagcgctacattcattaggcggcggggtgaacgggagagacctgccggcaactttccttccagccagttcttacccttgaacgacggcctaaagatggtccccttcctttatgtcgtggaaggcaggaaactctcggacccagaccctcaagctgccagcggttgtttaaagtcctggcagatgtcaggaagatgggcccggccgtcgcaccctcaaaagctctttttcgtttaagctttttaaacctcgaagatttagcacaaaatgggaaatgcaaatatcatagacaatgatcgcaagcacttagtggtggggctgggggaagcctgaaacccttgtttgatgttatggaacgcaggcacctgcgacaaacggcactggaaacagctctctcgttgagatttaaagtcaacactactgatatccactttttattccacttaagaaaaaaaaactaaaggaaggggggcagatttatttgcaataaaagaagaaagcgggttgatttttatggggaagattttagctttcggctacacacgcatttagacgtttctactttctctagcactcattcctagaaaaatcaatccagccctgaggcctgtggcccctagagcgttctcaggaccaaggtctgagttgggaccgcccgtatctagttcctcggaggggtggatctggatgtccggggaaaggcgaatgaagagtagagcaaaacatgtgccggctgttgagggctgtcgatgcgatggcagatgtggcctgtagggggcgacgagcagacggaaaacttcgcggtttgtctggaatggtccagccccagccccggacgcctctccttccctcccaggctctgagcctcctgacatccttgcttattctcaggccccggaagcctaggtcgaatctcgagaagctgatttcctcctttcccccgcctgtgtcctgggaggaacagagtcccgaggggagtttgtcctaaaga

SEQ ID NO: 227174 - DNA, 934 bp, Homo sapiens
  chr1:63795343-63796277
  hyper
aagggaaagacagacacagacgcgccgggccggtggaactcagctccgggaaggctgtggacctggaccctggggctccccgctgcctgggcgcctctagcccggcgatgagtggttctgcggggaccgacggccccatttccttcttgcctcgtgatgtgggagggaagaaagaaggcggcaactgcaggcccgaagctcccctcgcccagcggcccaaccacagtgctgtcgtgtcggggatcggtccccaagggagcccccaaccccctgcccacgccgagatcacccccgtgccaacctcgagggctcggcctgcgggactccagctgcccctgcctggagggagggaagggagaagagaatacgaattaattacgaaggaaacccaggtgtgaaaggcacccgccgcggagctgggcgtgcagcggggcgcgcggtgggacctctgctcccgtccccgtcccgcggctactcagttgcccgctcatgggaggctcgcgacggaaaataaatcccctcagagtgaacctgggaggccgagaggacccagcctgggatctctgggggaaataggggcaagtttaccacggtttaattaagccacagccctagcacgaggaccccggcgacccatccgggctgggggatggactggagtgccccccaccccaggccgcgaaccggcagcgagaagcacactctccgccatccccggccccgccgcttccgcctctgcggactccgcgtttgccatgctccttcccggggtccagggaccggagctgcggtgcacgtcttattgaaggggagagctttggttcttttcctccctgcatccctcccactttcctctcaacagatagtaagcaagactcaattttctccaaaaaagcccgttacccctttctgcaaggggcgcatgcctaggttc

SEQ ID NO: 227175 - DNA, 200 bp, Homo sapiens
  chr1:63989066-63989266
  hyper
gccataccacccccgcgatagaggagcaacacagctgtctctgtgcgctccggatcagcgcttcctagatttctagccggatcgtttggagaagggctctgcatcttatttccggtggcggtgaggtgcagttgccatggtgattagagaaaggccgagatctgtccagctgcggtgagaggaacgctgaatcgccgaag

SEQ ID NO: 227176 - DNA, 1575 bp, Homo sapiens
  chr1:64239452-64241027
  hyper
tgtcaagtagcctcgaaggtccccggcgctcggttcggtggcgagtttgaggagtgtgggggaggggaggggagggagcgtgcccgagacgcgggagccgcgaccgctttctgcgaagtcggggagggtgcgggcgttgagaggctgcagcagagggcgctgggtcgccagcctgggccgcgtctcccattggtcggggctggggcgctgggctggagagttggtggaaagtgacaagttgagcgagagagggagcgtggagagctggagcagccgccaccgccgccgccgagggagccccgggacggcagcccctgggcgcagggtgcgctgttctcggagtccgacccagggcgactcacgcccactggtgcgacccggacagcctgggactgacccgccggcccaggcgaggctgcagccagagggctgggaagggatcgcgctcgcggcatccagaggcggccaggcggaggcgagggagcaggttagagggacaaagagctttgcagacgtccccggcgtcctgcgagcgccagcggccgggacgaggcggccgggagcccgggaagagcccgtggatgttctgcgcgcggcctgggagccgccgccgccgccgcctcagcgagaggaggaatgcaccggccgcgccgccgcgggacgcgcccgccgctcctggcgctgctggccgcgctgctgctggccgcacgcggggctgctgcccaaggtaagaggcgcccgccggcccccgcccgcccagaccccctgacccgtggccacccttccgccgtccagccgggcgcgggacacgcaggaagcgccgcgctggctccggggcgcgtccggccacccgccacggggctcgccggcgccgccaggccagggtttgccccggagccccgccaggccagggtttgccccggagccccgcggcgggccggggcgcgcccagggactcgttcctcggtgcgcagcagcgattgtcagcgctgacaggaagcgtggaggggtttgagggtcctgggggtgatcggggcacttctgtgcagggcgtccccccttgtctccctggacctctagcgcgccccagccggtgttcaggcaagtctatcctgcccccaagttgcgagccggcccggaaggcgcggtccaggagggagtttggattttcagtggtgctcgccagagcccaggcggctcgcggatcgacgcaaacaaaagccctgtcctcctggggctccggcggcctcgcatcgccaccgcccccggccctccggccctcccgagagtcatcatagaggccaaaacttgtgcgccgctgcagccgctgccactttgtgcaaaatgtgctgtcagaggcggcctgcggctccaaagtgctttgggtgtgcacgcgcgcgcgcgcgcgtgtgtgtgtgcgtgttacaaacaagagggggaaaagccatctaatgcatatttgattttggtaatctctaaagacaatcgcaacagttagagaaagacttcaccgcaagccggagcgtcttagttcgctgcgggaagctggggtccttgctgcgtctgagccggtac

SEQ ID NO: 227177 - DNA, 1002 bp, Homo sapiens
  chr1:64936233-64937235
  hyper
tggtggccgcccgcgctcccgcgctgtagccgggcgccccctaagtttgggagccttcgccaccgcggcgcggagcagagcctgcaacagaggaagaaacttttgcggggtgcgccgcgcttttgcggggggcacctcccgcggcccgcttccccgcgcccggagcccgtcggcggggagtggggggaggcagcatggcccgccagccggaggaagaggagacggccgtggcccgggcgcggcggccgcccctctggctgctctgcctggtcgcgtgctggctcctgggcgccggggccgaagccgacttctccatcctggacgaggcgcaagtgctggcgagccagatgcggaggctggcggccgaggagctgggggtcgtcaccatgcaggtaagtggcccccgagctggccagacatcccgcctttctcctttgctcaaactcccatcccactcccggtacaagtcccctggactgtgtgcatcggctccttgcatacatagagcccggcttcccgtcggacccctctgtcctctgcacagaccccctgacaatacaccaactcttcttccatgcattcgtctacccctgcccttctctggagaatcccctgccctctgcacggaacccacttgaccctgcacagcccccctcttctgagtaccagcgccttcatctcgtcaaggattctccagtttcctcgcacgtcttctctaatttgcacacatttcccatgtaggcttgttttcaccctgccacgcctgcaaactccccctttgtgtccccatcccagagcagccagccccgtctggctcggacgattttccgaagtccccaccccacccccttgaccgcgtcctcgcgtcctcgcgtcctccctaccgaggcgcaccaatgggcgccgggagggaaggcgccgcagagtacgcagctgccccggggacacctaggtcccggcggagagcggccctccgagtgggctccgcgctcctttcccctc

SEQ ID NO: 227178 - DNA, 327 bp, Homo sapiens
  chr1:65211031-65211358
  hyper
gcggatgcagcgggagctgagcaaccgcaggaaaatcctggtgaaaaacctgccccaggacagcaactgccaggtactgggacggtgataggggcgacgcgtcccgaggggcggcggggcggcgctccgtgtccaggctgggatcgggggcgcctcagagcggtcctggggagtgggtcggcgccgagtggtgagagcggcccctcggtttgactgagttcttggggtttctagcctgcagacgccctgccagggaggggggcagattgggaaactgaggctctgagtggcgaagcggcttctccaaggtcacgggaatcaggggct

SEQ ID NO: 227179 - DNA, 321 bp, Homo sapiens
  chr1:65431033-65431354
  hyper
agtggcaggaaggacggggtccccttccccaggaacacacaggaaatcatggagtgcaaaccctccaaaaaacgtgtgcacaaacacctggcaaacatcgcatcttttatctagaagttccgtggtaaacacacatccaaggagcccacatcccagggaccctggggagtgactttggaggagtgtctattagtcctccgatgctcccggtcgccgacgatgcgcggatggagttggagtgagggagccagagaccagccccagtttcggttaatcagtccctttccagtgggattcgcaattccccgggtagttctctcc

SEQ ID NO: 227180 - DNA, 754 bp, Homo sapiens
  chr1:65468242-65468996
  hyper
ccaagcctgcacccagggagcgctcagtaacgcagcgctgaggagtaggccaccccggagggctccaggtttcagcgcaggcttccgcggagccagctggatgcgtcaccatccgaaagtgcgagcctggccggcggcggcggaggcgggggcaccgcgcagttggaagcccgggcgctcttaccgaaagcgcgagcccggacttccccgccacgatcgatgtggccagtctgcgcctgccgcagttcccgctcgcaccccggcccctcgcagagtcccaggaaagcgctgtggcgggcgggcagtctctgcccccgggaggggacgcacgcacgcgctgctccttccaggtcccggcggggaagcgatgctttcttggcccgggcttggggccagcgggaaccgggctgtccggccgcgccgtcgcgcctcgcacggcgtgagacaacctagctttttttttttttttttttttaagaaaagcattggcaccgcagcagcctcccccgcttcttccctactaggacgcccgcctgactcgccccattgcacaattcttaccgtggaacagccgcgtgactcggcgggagcccaaaagtttcccaggtttcctcagcctagaaaagcgtgggtgggtgtcccggcctggctccaggcgccctttaagttgtatttcttcgggtaactgggttgccctttaaaatgtggagattgtcctttagaaagaaagaaaatctcacgagctcgctggccc

SEQ ID NO: 227181 - DNA, 42 bp, Homo sapiens
  chr1:65532728-65532770
  hyper
ccccgctacccctcgggaaaaacacacgcacgcgctaacaac

SEQ ID NO: 227182 - DNA, 50 bp, Homo sapiens
  chr1:65533816-65533866
  hyper
tttccctcccgggcggctgtaccgttgtgggctacgttcagagaagtccc

SEQ ID NO: 227183 - DNA, 153 bp, Homo sapiens; identical to SEQ ID NO: 197576
  chr1:65534604-65534757
  hyper

SEQ ID NO: 227184 - DNA, 38 bp, Homo sapiens; identical to SEQ ID NO: 197577
  chr1:65614491-65614529
  hyper

SEQ ID NO: 227185 - DNA, 295 bp, Homo sapiens; identical to SEQ ID NO: 197578
  chr1:65614752-65615047
  hyper

SEQ ID NO: 227186 - DNA, 605 bp, Homo sapiens
  chr1:65731332-65731937
  hyper
ggattctggggttttaaattcggaggctccttaaatattctgccgcagttgggggaggagcgatggacccctaggtctccggaggctacacgtgttccccgatcccgtttccagggggagcccttccttcctattgcgctggtcgtgctcctggcccgcgtgcccaggaagggcgcagcggagtcgcgtgcccgtccgggcggaggacgccgtctccgcgcggcggtgccgggcccctgcttccggaacgctaattttagggttcgccggcccccctttcttttcacccgctttccgtgcgagccgctgcgcagcagtctgcgcttcgagtgcgctgtgttttaaggaggccccggcgcttgccccttgggctcgggggcttgggtgcgcaggtgggggctggcacgcagcccgttgggcaggtttcgcgcagcgaccctccccacgccggagctaagttctttgggtgagacgtgcaacaacgcaggccccaaagctctctgcgcgcagcgccgcggggcttggccttctccagtcctcgggagtcagccaccgtctctggcttgttataggattcccacctcgtggtgggcaatgatatatac

SEQ ID NO: 227187 - DNA, 886 bp, Homo sapiens
  chr1:65774901-65775787
  hyper
accctcccaacccacgtcgtagtagtcccctcccccgaccaccccgccccgtttcccttcaacccccctcctcacgaacctcccctcccttcctacctccctttccttccctccccgcgggccagcggctttggcgctgccctgctgcgcggcggggcgacgcggcgacacctataggattgcttccgggcactcctcagccaggaggtgctggcctggggcccggagctcggcagggccgggcggctccgcggcgttggcccagaggacgcgcgcccccgcccggccgcgtctccttccctccctccctcctcccggcgccccgagccgagctcagcccagggcggcggcttcgcctcgcccggcgaagcttctctccggtggccgctccttcttttccctcctctttgcgtcatgtcgggcacttaatttttttttttttttaattccttcttcagccctttccaccttccatctcccttttcgcttcccaggttgattattttctcttttctccgggcttgcccatgagcctcctcgggagctaccggaaaaagaccagcaacgatggttatgaatctttgcagctggtggacagtaacggggacttaagtgcgggaagcggcggggttggcggcaagcagagagtgaacgccggggcagcggcgcggagtcccgcccgacagcctccggaccgcgccagcaccatggacagctcaggtagcgctgcccgaggggagtgcagcgctgagccccgcgcggcctccggagcctcccagtcgcccggcccgaggcccccccgtggtcccccagccccggtttgcgagagagccgggctggaggcgaaggcttctaataccacctgggtgtcgagtctctaatttct

SEQ ID NO: 227188 - DNA, 791 bp, Homo sapiens
  chr1:65991033-65991824
  hyper
actgccagggaactcgcggcaccgcgtgcttgctgagttcgcctgggctctcggcctccctgcgggcaggggtcctccctccccagcgccgggtctctcctcccgcaggcccgcggccacccgcagcggcattccccgccgccgcccccgccacctgcgcgaccgccctagccgctcgagtccgctcctcccgctcaggggcggctgcggagggcgcggggcgcacgcgggcggccacccgactcttccctcccttctccccaccccagcctgctcctgctcagccccacctccccacgcactcggctgccctcctcctctcctgagagttgccccgcaccttgggcgaggagttcggagcggccccatcgcagagcccacggccagccgagcgcgcgcgacgcaggtgcccgagccccggcgccgccgccatctctgccttcggtcgagttggacccccggatcaaggtgggacctgcttccctctccgacaccccctattgccacctcttcccgctctgggtaactcgagaatggggctttgggacgcgcgtggcagacgcggagccccgcgggccgcttagggactgggagtccggggcagcttagcgggaccaccagaggggccagcgcccggcgggcggcgggggtggggtgggtgcgacgccgggcgactctcggctcccgtggggcgaggaagatctggacacacggctgacagcagccggcagcgcctggagcgaacctgctcgggaccaccgagagagcatgccacccggccaacttctttt

SEQ ID NO: 227189 - DNA, 604 bp, Homo sapiens
  chr1:66258048-66258652
  hyper
cgaatgggaaagagcgcgggcggccgggggagggtgtgtagtggcagacggccgctgggattatgaatgggggctggggggccggcgagtgtggggttcaaaccaggattttcggtctctggctttggataggcacgcagggctgtgcgtaatccttcagctctggtggtaagggagatgcagtgagctcccggctgggagagagggttattttgcaaaactcccctggtaccgtgcccgcggaatattgcaggaggtctgtgaggtaggtgggggaaaaaataacctgggagggcaatcagggagaggccagacgactggggacggcgtgctttgcaccctagaattgacaggtggtggcctcagcagttacaacctactacacagcatctcgtccgtgcgatacggtcacattgttattccccgcacccggctgaggagcgcagcgcggcagaccaagtggcaccggcgagctgtctctcttccggggggcgggggtggacagtagggagagggggtttaaagggccagaggacgagagaagagctgaggggcgcgtcgccagcgcctgtgtctccctggcgcgggttccccaggctagccc

SEQ ID NO: 227190 - DNA, 111 bp, Homo sapiens
  chr1:66258892-66259003
  hyper
cgggcaggaggagggcggcttctgcgagggcagcctgaggtaagggctgcctaggaggctgcgggtttatttttcctcattctcttacttcatcacacactgaagcctcaa

SEQ ID NO: 227191 - DNA, 703 bp, Homo sapiens
  chr1:66797585-66798288
  hyper
cctcttacttgtgcgggtcagtgttcgctgaattagaagttattccaacatgaacacaatcctcaggatgaatgactgcctagactttgaacgtaatggtcaaccagttttcacccgaattttgactgtttcatttagaagaaaagcaaaatgagaaaaagctttcctcatttctccttgagatggcaaagcactcagaaatgacatcacataccctaaagaaccctgggatgactaaggcagagagagtctgagaaaactctttggtgcttctgcctttagttttaggacacatttatgcagatgagcttataagagaccgttccctccgccttcttcctcagaggaagtttcttggtagatcaccgacacctcatccaggcggggggttggggggaaacttggcaccagccatcccaggcagagcaccactgtgatttgttctcctggtggagagagctggaaggaaggagccagcgtgcaaataatgaaggagcacgggggcaccttcagtagcaccggaatcagcggtggtagcggtgactctgctatggacagcctgcagccgctccagcctaactacatgcctgtgtgtttgtttgcagaagaatcttatcaaaaattagcaatggaaacgctggaggaattagactggtgtttagaccagctagagaccatacagacctaccggtctgtcagtgag

SEQ ID NO: 227192 - DNA, 906 bp, Homo sapiens
  chr1:66998817-66999723
  hyper
aagctccccacctggggaagcgaggccgctcccgtgtgcgctcggcggggaggacgcggtggcggcgggactcgaactcggtcgtcgaagggcgccccgcagggtcccgtctgtagcccggacggcgagcccaggttggagtgggagggagccggcgtgcacagctgtctttggtcgggctcaggcttccgctccctgcctgctcccctttccagcctcccgccccagaaacgatctcgagcgttgccagtttgattccagagccccactcgggtgggttcttttgtttctttgttttaatgacagttcccagcccttcagcatgtcatgcgcaattaattccctggctctcacgaaggcagctggggtgaaatttcttctgcatcatccttttggggatgtttatgatgtgacgtcagtcggattgatttttctctcttgaatgaaggatgggaggggagaaagagagacggagagagagagagacgcacagatgtgcacggaggccacagacactgacatttggaattccttcagggtaaaaggacaccggaatgggagcttagaagtgtgttgctaagatttccggctgcacggaattattaagtttttcttaaaaaaacaaaaaaagaaagaaagaaagaaaaagaaaagaaccccctccgcagcgagccacttaggtgctgctttcacgccagagtcccctgttaaggtggcagcccttgataactaatctcgggcacccagccgcttctgtaagcttaaggagacgacgaggaggggcgggggaagtgcgtcaccaggtggggaaggggctgtgtatttggtgacaagcgggaggcgatgggggtggaggggaatggggacgggaaataggttctgtgtgctctccgggggtattgtgtc

SEQ ID NO: 227193 - DNA, 278 bp, Homo sapiens
  chr1:67218065-67218343
  hyper
agagggccactcagcggccaagtccggccggggagggccgagggctctgtttgaggtcaccctggagaccggcctcagagtccagggagagtgcgcgggcggccgccggctgaatgaagcctgggacgcgggagccgcgccgcgcgcagtgtctgcagtgccggaggtctgggaggctccgggcgaagcctccctgctgcaggtagggtcgcctctctctgcagcgcgtctggaccccaaaggaaggatagggggcaagggatcggccctttgttgag

SEQ ID NO: 227194 - DNA, 379 bp, Homo sapiens
  chr1:67390718-67391097
  hyper
gggcttcttcaggcggtggcggcagcagcgaaggtggcggcggcagcagcggcagcggctgtaagtgcagcctccacaagccatctctccccttctattccagtttgggatgaggggctcctgaggtgtcctcagtcccctttctctccttcccctcccccacggcagtgtaccgcccggaagacccttaacttccggggaggggctgccgcagaacgcgcctggcttgctctccgccggctgccaaaggcgcatgcgcagcttcctccctctggccatcgactgcctcccagcgccgcctttttgccttcgcggtggtggcgccgcgctgggaatccgctgcggagtgagttcgcctcgccccgttcgcttcggtccc

SEQ ID NO: 227195 - DNA, 166 bp, Homo sapiens
  chr1:67395533-67395699
  hyper
cagttcttgccgccgttgcatcacagcaacatccgtttttcagcaaatgcatttcaaaaacgacctacatgtaaaatattacgtatttttcctctgctgtgtcaatgctggatgtgactcctttggcactgttccttgacctctctgatccgtagacaaccccctc

SEQ ID NO: 227196 - DNA, 208 bp, Homo sapiens
  chr1:67773427-67773635
  hyper
cgacccccgccccggcccgatcctcactcgccgccagctccccgcgcccaccccggagttggtggcgcagaggcgggaggcggaggcgggagggcgggcgctggcaccgggaacgcccgagcgccggcagagagcgcggagagcgcgacacgtgcggcccagagcaccggggccacccggtccccgcaggcccgggaccgcgcccgct

SEQ ID NO: 227197 - DNA, 138 bp, Homo sapiens; identical to SEQ ID NO: 197585
  chr1:68001181-68001319
  hyper

SEQ ID NO: 227198 - DNA, 135 bp, Homo sapiens
  chr1:68150809-68150944
  hyper
catgcaaatgaggcggaaggtggttggctgagggttggcaggataaccccggagagcggggccctttgtcctccagtggctggtaggcagtggctgggaggcagcggcccaattagtgtcgtgcggcccgtggcg

SEQ ID NO: 227199 - DNA, 1741 bp, Homo sapiens
  chr1:68297572-68299313
  hyper
cctaggtgagggccgccatcctgcgataatttacttcgagagctgcgaagcgctggcaagggtgcagtctggtgactagcacttttaaaaacaaagccaaactccgcttttaaaatagagaaggcacagacgcagaccctgcctctgacgacatccaaaagattcattatacacagcctattcaggcgaagctacaaccgccccaggaaatataaactgtgtcggcaaagacagcaggggggagaggaagtaactgatgggaaggaagctaatcatgtgaagtttgtccaactccacacggtctaataaattcccgtttgtttccgctgggagcagccattaaacgcgccctgacacgtgggcgcaggaacctcccttctacctctggtgttcagagatttccttctcgacccacttgtttgtatacaaccacgcccggcaggatgaccaccagatgaccggccgcagcaatgcctccactcagtcccagttgggcaaagtttcactccactgcggcgacgtgaacaagaatcacggcttccttatcgtgagttatgaatgatttaagccaagtttacaggacacacaaagcgagggacgagtgagtgacgggaggtgctaagtgacagcgttttaaagttagctttaattgatatgccctaattaaaatgaaaaacagaattcaccctgccccacgggataactgtcggggcaataattaaaaaaaaaaaaatcacccaagactaagcctcaacctcccccttaccacttgcaaatacagtctgcagaaaagcagcctcgggtccccactcgggggtccctcgcggggtgcgtcatatgggctctcccctctgcgacccgctatttccctgctagacccccagcgcccagcggattccaaggctgcgctcccgccggctggtcccgggaggtagaaagtaggcagaggggcgtggcgtccctgtcgcccccacatgccagccctcctccaacgcctgacaccaccacaagccacggctgggaacactgggggcctcccaacccggcgcggggcgcacggccgcaggctggcgaggaggcaagcgagctcaaggggagacctttccttccacccccagccctagccccagccacagccgtgggggcggcttcccgcaacctcgggcggccgcccgtcgagggcgcgcgcgccgtttctgcctctgggtctcggtgtcccttggccccttcctccccctccccccggtctccggcgcccagcgcccagaccagtccccgccctccagcaggacactcttccctccttccttccttcctccgctccctccctccatctcgcttcccagcacccgggactcggaggcggcccccgaactcgctggccgacgccccgcgccgcgccccgaccccgcggggacccgactcaccacccgcgcccgccgcttggtactcacccgcctgccggtgcgctgccccgccgtcgccgccgggactcggtctctaagggctcctggagacggctccgacctctcctcctcctcctcctcttgctcctccgggcgccggctccgcctcgctggggtgggcggggcggcggcggccccgggctccttcctccgcgccgggccctgcctcccgcccggacgccctggctgtgctgtcccgggccggggagcccgcgttgtggccccgcaggaggaggggcgaggcctggcctgtggaagctcggtggacgtctggt

SEQ ID NO: 227200 - DNA, 1011 bp, Homo sapiens
  chr1:68696600-68697611
  hyper
tctggcagcgacgccgccggcgcccccgggcgttttccccgcaccccacatcgcgtgggcgcccgtaaaggcacgcgcggagaaagcccctccgtggactccccactccgcaaagtttaacaaagccgtgaagtaaggaaaccgaacctcccgtccgcgcccgctgcaaagttggcattgaagtttgtgccgggatgtcccaaatcttgagggggcggggggcgcgagtgtgcagagaggcgggaggatggatgcagatggggagacagtgaggggaagggagtttttccgagtggacggtccgtgaggcggttttcttcacccggaagcctgtttgactcagagaggtccgggaggtgcacgccaggggaggtctcccggggcgggcgctgtcgccgaggaggccggcgagctgtcacctgcggggggctgtggtgggagctgagggcgctctcctaagcgccaaaagaggacggggacattcacagtcaccggctctcggggctctaagtagtgggggaagggatattcacgagtgggcaggaggccaaaagcaacacctttcggatacgcttttcccctccgacctctccaacttcccgcggcgctggtcaaggactccctcccaccccaccccatcccacccaacctcccggccgacaattcggacctgtccacggcagagcgtggggtggagtgcggcgggaaagcagagggcgcgaaggtcgggaccccaaattgcaaaccctcagcccctagcaaagacgaccaaatgcatttacaaccgtgcaagtatctcagccttgtaacagagctccgggtttgcgccgggcacagttccccgactcttctgttgttcctaataaagtcgattacgttgccctcccggagctgattggaagggaaccgagaggaaaagggggggaacgcgggaaaaagcgggggggggggggggcgagcaatcaactttgtaacccagcgcttcctcgcgcgatccgtcgccatgcttaa

SEQ ID NO: 227201 - DNA, 494 bp, Homo sapiens
  chr1:68698072-68698566
  hyper
gcctcctttctgggcgctgcaaaacttcagaggtgctggagcgcggcgaggatgggaccgggacggaaggcgcccgcacggattcccccggcgcagccggctcgggttcccccaatgcccggagctgtgattgtggccgctccgccgcctgtggacgcttaaaggagcagggaagcggatcacatgacgccgcctccctccctttcttcctccctccctctcgcgcttcctccctccctccctccctctcttcctctaccccttgcccaccagttcggggctcagagctctggcgggtgctggcgcctggctcccgagtctggcctgcaacctgtctctccaaggtctgatgccatttaggggttgctgttgatgttaagcgggttccccctgcccagcttctcacaggtttccttttctggtttccgaagtgcgagatttaaatcaccggtggaccgccttgcagacctttaacttacgcgttgactttagga

SEQ ID NO: 227202 - DNA, 1922 bp, Homo sapiens
  chr1:70032826-70034748
  hyper
ccagggcagcagccgcaaccccagaatgaggagaggacttaagagcaggcacaaggttcgctgccatgactgatgtgaagcgacctgacgcacaagcggagacttttctccttggcagccaacaacctgcagcaggcaaggcgggcgggggaggaaaccccgaggaggcgctcccggccgcctctttgctgagatagcaggagcagcagcctgaggagccacgagctcagcgtcactgagctagtgcgggtgcaggggcgctcaggcaggcgcacaggccgggagccgcttctgccgctcaggcggccgcgctgcagaaagccgcgccgcgctgcccgagcgcccggggctggcccgcgagcgggaggagccggcagccgcgctccgccccgcgctgagattcgtgccacctgcctcgaacaccacggaggcgagaggaacccagagagctcggcctctcgtcccgttctcgaaaagcagcctatcgtgacggagccgggagaaggctagcgtttcaatcctgtgcaggactgggatttttcttctcataatttgggggagccggagtagaggtcagagggacaggcgaggatctcaaaaagagaccgagggttgtgaacatggttaccccctcctatcattggaaaatctccttgacatttttcacactttgaagcagctgcagctggtgtcgtcggaaaagggggtgggaaaaaagagagggggcggggagagcggtgagacacagccaagagccatgagcggcgcctcctcgcctgccaatcctggcacctgtgcgccgagccactgcaccgaggaggaccctactccgggtgaacaccgggcttgaagccacggacacccagccccagtgcagcgggttctcgccggcgggacctgcagccgcccactcgggccaccgccaccgcctcctgcagttgcggagcgctcagcccctccgagacgcccgctgcgccctggcccctggggatcctcgccctgcacaggcgcggcaacgggcaggggttgttacggagttgggtgcaggattcgcctttcctgcttgtctcttctccgcccaggatttattgtctgtggagccttctgggggcggggagggagctgcgcctccgccaccgccgccgccgccgccgctgctgctgcggtcgctagcgcggcgcgctgggcaggctgaggctggggagtggacgcgctcctgcctcccccgccggcgcttcgggcttcccctcagccgcttcccgcgggaacctctccagccgtccacctgaagggcactggcatcatggtctaacgtggcaccttcctggattcccctctatctcctgttcttcctaccttctactccttccctcctcttctcctccgaagaccctggcgcccactccactgcggacccctgaacacttaaggaataacccttggcagctgcacgactacgctctccgaaacctcatgggcagtttctcccgccggcgatgtgagtaaggcacgctcgctccgtggcggagggtgctgcgggggcccggccgcggcgaccgtaggcgcgcgaggtgtgggaccccagaggccggccgggggcgggggtggcagggcgggaggcttcggcgctcgcggggagctgcttgtgcggtggccgagggaggcggcgaagatgtggtaggttgcagagcatttggaaatggggtgctaactgggcgggtgcatgggagcaccgagtagcttgagctggcaagagaccttaaagggttacatactgcgaaaaggaaaggtaaatgttgggcgctggtgctgggaccattggttccgctgaaattaggtttagctcctcgttattatcttgggtatctccagtcagcttttttcccagaggtgtctgagggatgaagcgcgtgtttgatcgt

SEQ ID NO: 227203 - DNA, 613 bp, Homo sapiens
  chr1:70035030-70035643
  hyper
tcctttgtgtggcacgagaagctggtgaacctgcctattcccaatccagcgctgggtccccttgaggatcttgcgtcctcctctccgagttattaaggatgcaggacgtgtttcggattcgacgtggaaagagggagggaagcacattagcattaaggtaatcatggcaccctggctcgtggactattagattggctaccagtggtctctaatcttactgtttgcagagtcaagaatgggggcgggggttgggggactgtatagattgccttttaaaatagtgtgacttcataataacggagatggctgaaagattgcttccttacactacttctcggccatcagggctgaataaaggacccgcctccgccctctactccggctcttctctggctgtctcttccccatcaagtcataaagcgagcgggttgggcgagagggcacagctcgaggcagagaagagacggggtcactttcacaactcccaggaatcggcttcagaaaggaaccatctgcgactcccacgttcctttcgaagttctccttcaaaaggaattacaaaaaaaaaaaaaaaaaaaaaagcgatgggggtggggatcggtaagacacaggg

SEQ ID NO: 227204 - DNA, 672 bp, Homo sapiens
  chr1:70671105-70671777
  hyper
ggccgctcttcctcgctgccttcaacagcccttggggtaccgaggtaccgcagtctcttccacctgctttgaaaccagcgcggagatcctgccccgctatccgcttcaggcgcgacatgttcaaagtcctaggtccagaagctgcagccccacccgtgacgcttaaaggtggcgccgttgggatgccccgctcctttcgtgagcgcgcgctctgggcgctgggctcgcggcctcgcgctgggccttcactctctgcggcgcagtccagatgtcgtcagcaccagcgcctgggctggaggacagagaagccttttccgttgccggtgccggcctagcgtcctggaattacttcaatcaagtaagtgcgtttaacgggcttaagaggggctttcgggtttattgtttgcactgttactgcgactccaaccttctcctctgtgcttccaccgtggcgagggtgtggggaaagagaaccctctcttctcccctctcctagtctgaacgtgggccttgactaaaacttgagatctgggcgcggtcggcagcgtttctggaccccagcctgtgtttgtcgcttgtggtggtggcgccagacctctggcgtacggagtaaaagaaattttctgttcttaaggcttgtactctgacaccattctcgttgtattgagggta

SEQ ID NO: 227205 - DNA, 325 bp, Homo sapiens
  chr1:70820330-70820655
  hyper
atctcagtctcgccgtcgcagccgccgtcgctgccttacaccgaaaaacagggcacggccatcttcctcttgctcctctcgcgagagctcccccaggagtgaagagagagaaaacaccgcgataagtgagccacccgctccctccctcgcaccttctattcccagaatcactaggcgccggcgcctccgaggcagtgtgtttccgcccagagctggagtctcccagctgccagccgaccccgaacccgcactcccgccaaccgcgctttttgtgggcggtcggaaaccacagcctccgttggatatgttcggtgcatgttataaa

SEQ ID NO: 227206 - DNA, 1133 bp, Homo sapiens
  chr1:71512731-71513864
  hyper
cagcgcgggtggcacgcgtcttcatgtggctcgcataccagtgcggcgccctgatggccagcgcccgctcgacggccatggcgctggcgatgaacaacgaggagagcccgaaaacagtcatggtcagcccgaaaaaggtgcagagccgccccgacgggtcgatgtgctcccaacgctgcttggacaggtacacgacgatgacgaccggggtggtgagaagctgcccgaccaggtcggtgagcgccagccagccgatgcacagcaggaaggacttcttgcgcttgctctcccggcgccggtagctgcgcgacacgagcagcatggccagtgcgttgcccacgaaaccagtgagcagcatggtgatcgggaaggccacggacaccgatccgcaatcctcgccagaccctggagggcgcgtgaggttgccccgcgcctcggcggaacgctcgggcgcccacatgcctgtgtaggagtggttgaggcgggtgcagaagggggcatcccctccgtagccccgggtctccttcatgttggcttcgaggtgaggaggggatggcgtccagagagccgcagcgggagggggcagacgcggcgcgggcggcggcggaggtcggcgtttaccgcggctggggctgggctgccccccatggtgcggggcgcagccgccgccctactccgctgctgggaccgcggccgcggcggcgccagggctcactggcccgggagggagccacgccttcctctctgggaaacctctggtggcgaggcgcgcggaggtgccgagtcccctttataaggccgagggggcggggcgcccgtgggtgtggacagaaccgaggtgggaggagggtgcaaagcaactgagcgcctctcttggctgttgcctatcctgatcgcctgggttgggaagccccagacggtctcctctgaaacgccctgctcctggccggaccgggagcccactggggtctcctccagttctccgctaaagtgtcggtggacggcaagcagctaataagtagcactggacttgcggaccccaggcaaactgccgaggcgcacctgagcgctcgtcctcctgcttcttcaaccacaaacgctcctacagggacgggatccttctcctgaagtcc

SEQ ID NO: 227207 - DNA, 2899 bp, Homo sapiens
  chr1:72747787-72750686
  hyper
gtgctttagcatcacgagtccagcttgctacctgccccagcataaacgggccggggctccgggaagaatctgcacctggaattcttgggatgtggtctttccatgatgagcaccaccagcattattgcttgtgttataaagaaggcaaagagggttcaaagagagacagaaagatagaccgaaacaagtacgaaaagcacgccgttcttcctacctaagcaccgccgtgtccccttttctgaccatcatgttgtccacggccgcccaggggaagtccacactctgtccagccgggaggcaggagggtagcaggcagcacaggctgaggagcaccgccgccagccactggttcgagcaacaagcaccctgcaccaacagcatcatgtccatccctgctagggctgctcactctccagcagctttcagctcgcactcccccaccccctggtgctggcgagtcttcccgggaaccaggcggcgcgccacaggatttttttttttttttttttttttttttttttttggtgggtgggtgggtttcttttctttctttcttccccccaccccagttgttgggtgttgtttctctctttttgtttttcggtgtttttgcctcccctcctcctcttcgctttccctccctccctcccctccctccccctggcaccacactacacctcctctcggttgcttttggccgcgtccggagtgtgtctaattctcgggcggctcgcacaccatctagcgaggaggcgagcgcgccggcgagtgagggaggaggcgcggcggcgggggaggaggcagggcgagcggcggcggcggcggctgcaatcccagcagcagcagcagcaacagcaacagcagcagcagaagcagcgcggagcgctgcgccggccgccggctcccgggctcgcgcgcgttgccaagcggccgtttccttagcaaccccgccaggggactggggatggagaagggagggggattaaaaaaataataaaaaaagaaagaaaaaagatagcaagaaaaaaaaaagaaaagcaagacaacgaaaaaaaaaataggaggaactgtatcacaattatgcaaactaagggggaaagagaggcaccttagaatgaaggctctccttactgtcgtaagcgctagagggattctttgctagaaaagtctccgtgtcagggctggggtgaagagagctgaggggcgctttgccttccctcaccggtgcgttttacctctcgaggcaccgtaagtttgaagtcctccaagttgtggtcggcgccatcatgacgccggcgactgtgagttgtttttttgtttattttcttctaatcttgcctgggtggctacgctgcagttagcgagcagccaactagttctctctgcgttttctcgggaataggtagggacggtggcggggcgctgcttttttgcggggacacgaggaggtgcaaggccttgcggcagagcagcttgcgtgtttgtggcggtcggcccgtatggattgcaggacgcccctcttttatctgtgggtgttgacactaagttgtgtgtgtgagtaggggattgtttatggtcaacatggagtgtgtgtgtgatagagagcgtgtcgtgcgcgcgggggcctgtgcacgcgcggcacgcaggcgcgctgggagggacggggcgggtcatgctgggatgtagagtcgggaaaagactgcaatcaagtgttttaattgtgtagagcccaggcggtccagttatgtaagaggcagtttaacccatttgagcctatcaggccgaataatcggcgcatccgagtcaaggcagggcagagttaaggggtttaacgagtcgcagggttgtatttcttaacagcctccacaccgcgttaacaggcttgctcctccgcggtgcagagcggtaacctccgcttccccacgcagcagcccctccgcagctcgccgggctgttttcagccctgccctggcccaaggcagaaggagatactaggcgtggggccacccctactcttttttcttctttccttcttgaactcatttccagattcaagatccttaagcttttccgggccatttgcaaatcaatgcgagaaccgaggctgagtcgttagcagttacaccaatcaatcttgttcagcgaggagtttgggaagcagagcggggaagtgaaaatggaaaataagtaattaaaaaataagctccctccccctcacacactttttcccttcctccaccccatccccctttagcagtgtttgaagaagatattctttgccagatcccagttcttcttttggaggaaatgaagcaaaacctcacacgtccgtaactcgttttccataatgctagcagggtcatttggcaaagcgcaccgaagcaagactctctgcaggggtcagcatccggctgcctccgcagactgagctctttacgaggcaggcagggagtcgttttgcttggtggtagcagtgttcagagtgatttttatcgccatgcacggggatatatggggaaagggaagggttcccatcacctgtgaccacccagactggcttacagacgaatccttaactagcaacacctccctgctgaactggcactccaaggctgggcagctaacggagacatttgcgtcaggagtcactgatgttagtattctgccttaactctcaaaaccgactcggaaactgagagtgcaatagtttcaaccgcattttgaaacatcaataaaatgttagtcatttgcggatgaatgaaaacattttctttaccgtctggtatgctagggaaataattgtgaaatgacagactctcactaatatcgatgccaaatacctaagtaacactgtcatcttgttaactgcatttttctatcttgcgtggcacgctgatgg

SEQ ID NO: 227208 - DNA, 57 bp, Homo sapiens
  chr1:74663885-74663942
  hyper
ggtcagaaacaaccgggcggaggcgcaccccagggcgcatgcgtgctgtgcggcgcg

SEQ ID NO: 227209 - DNA, 42 bp, Homo sapiens
  chr1:75594039-75594081
  hyper
cagcaagagtaggcgtgggaaggtggcgctcttccccacagc

SEQ ID NO: 227210 - DNA, 55 bp, Homo sapiens
  chr1:75595516-75595571
  hyper
aggctatatctgcccggtttgcctaggacttgtagggaaacgcggtaaagggagg

SEQ ID NO: 227211 - DNA, 552 bp, Homo sapiens
  chr1:75595799-75596351
  hyper
gtgatggactttagcgtttcgcgccatagcttttagccgggaagctttccaggctgccctgcttaatttcggcgtggttcctaattttctctctcccatcctctctcttagactggaaacgcttcccctatttcttccgtagcggaccgggagagcttactggcgctctgcgaaccggctggaaagaaacaccgagtcactcgtacagactcttggtcgcagaacttggctttccgctattggtcctccagaaccgcttgaaacaactggccccagctggcgcatcagaccgcagtgaggaatgccgcggggcgggtggcgaaggcagggtctgcccgccagtggattcccgggtgtcccgcgtggagcaggcttgcccagctgggaagcccatcaaacctcagtcttggcccacagtgggagagagaccagtgggtcccagacggaggccctcgcccgcttttggcgacctccactggcgtgaataaaagcacccctctcttaccctcagaaactgtgggtagcaaggtataaaacggagtctgggaccgg

SEQ ID NO: 227212 - DNA, 324 bp, Homo sapiens
  chr1:75596628-75596952
  hyper
caccttcttatgatcgcgaaagtctccccatcctccaccgcctcctacagtcctatggcccactgtacccttggcgctggagccctggaggtgggcggtgagggccgcgggccagggaaagctcgggtccgcaagagcagggctctgtttctgcgcctgcaggccgcccgggagtcctggatgcgcctcctttgaccacgttttctctcaggctccagctgtgcctcgccccgatctccacaggtctgacccaggcgagtccctagaaggcgggcgggaggagccgtagcaggggcagtttcgggaatccgagtttccggagat

SEQ ID NO: 227213 - DNA, 253 bp, Homo sapiens
  chr1:75597154-75597407
  hyper
tgatgaaggatgtttataaacggcgcctgcagtgcgagctgagtgtgaaaatatcagttttatgccttttgataagaattaccgaggcggaaggctcattagacgattacaaatttcgcagctgctcgcagcccaattaggcagctcttcgggtgagtggaagctgtgggggtcagggcgggttgatgttccctctctccagcccggacctccaatcaaggcctggctccacgggatctagaccccttccctg

SEQ ID NO: 227214 - DNA, 1186 bp, Homo sapiens
  chr1:75597687-75598873
  hyper
ttggaatcaattggcgtttgggctaaaaaccctcattactaagaccaaacaaacaaacaaaaactcttttgatttttagcgcacccctgtaaagtaggaagataacttttccgttgccccagccgaggatgagcgtgggtaagaggcgtgacgcgagctccagggaaccgggccaccaggaagaagctataccttcgtacgcccacccctgacaaaaggtcagaaggtcgttggaccccagaccgacaggacgatcagccctgggattcatagcaaacacattcccctcttcttgcacactcgacccccagccaaaggcttataccgcccaggacatagaaattgactcaccgcccagaggcttacagctcaaggaggggtgcgcgcagctgcaccccgggacaggtcagcatcccacaaggcgcctggagtaaagcgaggccagaccaatctttcacgtcttctgctcctgtctgacgaccattcttcttccccaagcccagaaacctctaaaaatgaatcattttctccacttatgcagagatagacgctcttagatcaaggttagtattttgaaaacctgactgagagccgcctgattaggcgagggtgggtggaaagaccgcataaatgcccgcacccccgccctgcttccctaacacagctccagctctctctggatctccaaatgacccgcgcgataaattctcctcgatagtagccagacagtaccccagattcactttaaaccctaacacacacacacacacacacacacacacacactgtaattaaatatccaaaccggacctttatgtttaattccactttcaacgaaatcctgctctatacacgacctgatggcgccaatgttctgcacgactctgactttccattcggaagagcggtctccacaacgatgctatttcatggaaaatgcattatgtgaatttctccaccacccccaataccgatttctgcatttgatgaaaaacacaagtctttctggttcccacgcacaagttagctttttgaaaagtcagtccaccccaatctttcaattttctaagagggcacagattaattatatcgtcctcctcccttcgctcagtaaatttaaacgagatctcccagagaggaccggcagggggatggctaatattaacttgtgcgcagctgcgcgaaa

SEQ ID NO: 227215 - DNA, 1325 bp, Homo sapiens
  chr1:75600110-75601435
  hyper
ggaattttaagaacggttcatcagaaagtggtcaggccacagcggcctctttggacgaagacacacttgtagcattatccttctcggcatcagcttttattagtggatcggggcgggggaggggggagatcggcagacacggacagcctctgaccctctggagttggtatgtgataagcagccctagcagtgccatgtattggaagaacgatcagatgtttgtgtgtaaactagtagcaaaggacgtgccggagctggcagttccccctgagaaggtgagcgagccgacgcctggccagaccagctgaatcgcagtgtccttgaaactcgagttgtttgggctcctaaacaaggttcagaaactacctgtaacggcctcatcttcagacctggcaattttttttttttattacgtagtagcgttagtcagtaatcattgcactccctccccaaaagctcacttaacctgagacatggagactgtaatttgggagatgaagcctcgagcctaaggcgctctcaggtccatgtgagtcgtgcttttgttctatttgctgtggtgatcgtggcggtccgggagagtgggtcgggaggactgggcggctgtcgggtggaaccggagacctggctcgtttcgttcggctgcccgcggacacttgcctgccctgaggcacacctccctctgcggggctccagaaaggcctccgggatccctgggcttgccgggagagccattttacctaaaatgccaaaagaaaaccgcagggcacaaaacgagtcacgcggtttgtctgagtagactggggaagctgacaagctctcacctcactcgggaggcaggacctgtgggtatttggtgttttaagtttgaaatcatctgcagcctgtctgagggcctcagcaggacgcgcgcggggcgcccctgactatttctttgctccgaagccggttggggacaccaggcgaaagcggagctgttctgtttaaacgccctttgtgtgtgaggacgcggcctcagtgcagctacgctgggtcccgcgtagggagcgcaccccagaaagggagggtctcggccgacggtccgggaggcccccaggttggtatcttgcctggtgcttccagagggagggagaaggggaggcgaacagtcagaaatgcagaagtgcgagccgctcgagttcggggtacccacccgcccccgagctagagtttttggaaacgaaagcggtctaagcccagggacgctgcgttttcgtttaagaacaaaactccagcaaatacttggaaacacttgagtaacgcgcgttgtttctttaaaacatttt

SEQ ID NO: 227216 - DNA, 901 bp, Homo sapiens
  chr1:75602326-75603227
  hyper
gccctggcggccgggaggactcgcaaaggcgccggggaagagggactggtgagtgcggaggggctcgcgtgctggcaagactggccgtggggaggcggcgcaggacgaagggccgctgtccccgcgctccttccagggcccagctggcccctcctgcagcagacagaggacggggcggagagggtctgggtggggtgggaagcttagctggcccgcgaggagggcagggccgcaagacttctggggtccgaataggtcaggggtcggcagccccagcgggtgcgtagccagagcttggactcggggaagagggcgagaatcgtgacctcaagaagctgggggtggggtggggtggccagggggaagggaggggaggcggtgggggcgcccttgtgggtaggtgggatgcgaaggggaggaggggtctagaaccgcctgcgcctcgcggtttcctgcaggtgagccccgagggagcgggggacgaggactcgtgctcctcctcggccccgctgtccccgtcgtcctcgccccggtccatggcctcgggctccggctgccctcctggcaagtgtgtgtgcaacagttgcggcctggagatcgtggacaaataccttctcaaggtaggatagggcctcgggtgcgaggcccaaggggagcgggcttagcgtgggagctctgggaaaagagtaatgttcctcccaccaacctttccgttcaagttctgggtgaaggttgtaggcttttgcagaaaatcagcccagtttagggcaactcatgcggtgggataaagtgagaagaaatcccagactcttctatgtcgttgcaaaacagctaatgtgtgacacatcctggtctggacgcgccggatgtgtgtggatgcgctggagtcagccactggctt

SEQ ID NO: 227217 - DNA, 833 bp, Homo sapiens
  chr1:76080132-76080965
  hyper
ttaaggatcatgattttaaacgctttccagtaagtgctttgagtactccggagcaattaaaaagcaagctgacgcgccaagataaagttgtgtccccctagtgacctctagagcggagctaagctcccacaagccagacttgggaggaaaagcaaaaagcacgccaaagcctgagcgctgctgtagtccaagccaatgtattcagtaatacccttcacccctcagttctcatctgagttcctgtccttttttatataaccccaaaggctcagtaagtcgctgcctcccaggtcattgggcccattgtgttgaaatccaacttcgaacgacgccccttccttgccaccatcctcaggtccagttcccccgcgcacagccttcctcaccgcgcatggtgtcgagcccacttccacctctctgcagtgctgcagacaacctctagggctctgcgagtcccccagcgagagctagggagccgacaagctgcgacctctgcgagtccgcgctgcgggagcgggtggcttgcacctgctccccgcgcgccggctctgcgacccctaggcaagacgcagcccaggaggctccctcccgagtcgcgccccggaccacgccgcaatgcctcgtcaccccagcaacaagctcttccttgtcctccccgccatcgcttctctccgcgaactttccaactttggaagcccgggttccaaaggagcaacagggagactgcttagccggagccactgcccgtctcgacaggttggggagcaggaagtagcctgcagggactcggccggtagcaagtccccttgaccgcagggaaaaggagaggcagc

SEQ ID NO: 227218 - DNA, 1184 bp, Homo sapiens
  chr1:76081201-76082385
  hyper
gctaggagcccagtcgcttctctccccactgcccagaggctaggaggtgcaacagatagatacccaagctcgccgagtagcaaaggggtggggtgagagaggagtctccaggtttccccaggttgcaaaaggggcacaaactcctgtcagtgtccccggaggccaggggaggtgcagcggcgccgcggtttcccccaccccctccccggacacggcaaactcttccccggcaggagccttccacttggccgcgcctggatgtaaacaggccggcccgaggggcagagggcgggtgagagaggggaggcggcgaggggaggagggagcgggactcacccttgatgctggggggctttctcttcttggccatcttctgtccccttccctcccccggaccccccacgcgcttcctccggctgccgcgcagctcccaggcgagccctcgccgcggctctcagctcagcgagctctttgttgctgtgatggcatctgcgagcagcagcggcggccgggctgcgcgctcagctcggctcggctcggctggggcgggcgccgccgcccctctgctctcggccgcgccgctggcccccctcttgcgctgctgtggacgcggtggctgctgcggcggcggcggctgctgtgctgctcctgctgctggagggggcagcgctgggtcccctgagcgcccgcccagcgctgacctcccccttctccacaccctccctcccccacgcccccacccccggtgtcccgtctgagccgccagcccccatccaaccggctaccgcgccgtcatccagcagcctctactggaaagacaacggtggcggcggcggggagctgctggggggcgcggagagaccgcggccatctggggccgggaaggagaaagccaggcagagtctgatggagtctgcctccggcctgccttcctctgggccttcgaagccccctctcaaaaggccaggacgcgctgggcccaagaaagacacccgtcttcacaggccaaccagaactctggccacctgcgggaggacggcactgtcccttgcgacccggcccaggagccgtcctcctccacagcctcctcgaggatagcgagcccgaattccacgcgggcgatgagccccgaagcgcgcggttgcctctgcccctcccgaaccgagaaggaaagaggggagagg

SEQ ID NO: 227219 - DNA, 258 bp, Homo sapiens
  chr1:76082673-76082931
  hyper
agctgtcctcccctcgcgtgctgataagggatgaaaagaagttctgctggcgtcccagaactgcaagggcaggcgaaagtttaagaatataaaggagtatcggaccttaaaaagaaacgcttaaagggtagggtagggagaggttaccagggtgtgccactgtgggaagaggctacaatatcgaattttttttatatgctgcagctgagattgccgccgaaacgcacttcctaattcgcagtgaccttcttaacactt

SEQ ID NO: 227220 - DNA, 239 bp, Homo sapiens
  chr1:76251752-76251991
  hyper
gcaggactttggacgcaggcagtgaggacacctatgagcgatcagtggggtcctacggcagccgtggaactgctctgccttgcaggcgaaagtgtggtcagctatatcggagcgcgatgggggcctgagaggcgcatctgcgcaggcgcccggctcctaagtctacccaggaactgaccctgctctctcctttccctgttagacatggtaagtgtgagtttagcgctgctgtccggatg

SEQ ID NO: 227221 - DNA, 849 bp, Homo sapiens
  chr1:76540052-76540901
  hyper
gcccaaagtctccagaagggcgatgccaaacccactcaactttgacaaagtgtgaaacgtctgtaaaaaggagttctctgatgtgtgagaggagacggaaccgagaagaaaaggccgtactctgccccccgcgggacccaggtccccgcctgctgcagagcgcactctgcgcacgtcgagccgcgaaaggttcacagaagaaaacaagagaaagaagtagcaggcactgaggagccgccggcgccggcgcccaggacggcacgtgacccgggggcggggccgcgcgggccgcgggccagtggatggggacgggggcggggccgcggctcggggggcggggtctgtggcggcgcagcttacaccgcggtccccttatttggatctgcgggaatgtgggctggagaggtcctgccgtggtaccagcctccagcctgcccccaggactgcccctgacccaggcgcgcccgctgctcggtggcaggagggccggcggagcgccatggcctgcatcctgaaggtaacgacttggatctgtggctcggacgcgtggttggccagccccttgctgctcagaggcacggagtcagccgcggtcccaccgcatcctcatctcagttgtcttttcctggcattgattttctttttgttcctttggcaaatgcatatggagggagattctgaaacatgcagctggcacagcttcttttcccaccattcctgcctcctgctcgcgcctgcattgaaggagctgcagactgttggctccaggggagagcagggctgtgtgccgaataatggggatggtagggagaggaggggtgttcccgcgggtcccgcggctctgtggag

SEQ ID NO: 227222 - DNA, 1881 bp, Homo sapiens
  chr1:77332977-77334858
  hyper
agataaataagcccgcggaccaagaagtgggtacactggctcggttaactctctctccccagaaatttcactactgaaaagattattatttgggggcggggaaggggatgtagaggtctttaggacccagcaggcggcggcaggcggcagttgtgtagatcgctgagagactacgagggtccggttcagttttaattctgtctctaatctctgcaacagccgcgcttcccgggtcccgcggctcccgcgcgcgatctgccgcggccggctgctgggcaaaaatcagagccgcctccgccccattacccatcatggaaaccctccaggaaaaagtggccccggacgcgcgagcctgaggattctgcacaaaagaggtgcccaaaatgaagaccctgatggtgagtcagttgtggcaactccaccgggcaaagagggggatccccgggctcagggtccacgggacgcaccgtggagactccgagacgcctaaccctgggccgcgaggtcgcctgttacaaagggacaactttctacccgctccgcgttccctcccgattctccagctctgcctggctcggaatcccagagccaggatgggaactcggggttgcctcgcctcctagatctccggcgagaggtccgagggggtggcggagagctgcaggagcgatggaggagtgggcagattgctcaagggatgggggtgcccaaaagcaacagcctgccaaaaactaagagggacggggaggggggacctttgcagactttcttcgttttcttagatttcaaacttgcaaggatcgcaaggatccagggccccaggaaaggaggggtgtgaaggactcaaaattccagcagcttggctggggtggctgcgccagacgggcccttccccaaagtgcaaacccacccctgtcctcggccccggcgcgctccctccctcagcccggggccgtacaccacctgccctctaccgagagatctgggcggcggcggccgaaagcagcgacgcgcccggagcatcccttgcgatacgctaggggacggtgctttctctgtcccagttgcgtgcggcggggctggggcccaggccgccccaaatctcccccactagagtgaccaccgcacagttgtccccgctgggcgcgctcctccggtgtctgcgctcagccgctctcctcttctctctcccgcccgcccgcagcgccatggtctggcagtgtgtttagcgctcaccaccatgtgcaccagcttgttgctagtgtacagcagcctcggcggccagaaggagcggcccccgcagcagcagcagcagcagcagcaacagcagcagcaggcgtcggccaccggcagctcgcagccggcggcggagagcagcacccagcagcgccccggggtccccgcgggaccgcggccactggacggatacctcggagtggcggaccacaaggtgacagcatgcccgccagcccgctcgccactcagcctggggatcccgcacacctgagccttccccctttcccggggctgggaggcgctgtgagtaggtgccgttcgaaggctggaggggagtggacccgctggggtagggtgggctagttccaacttggtatgaattcttatttggagaaagacacaaagttttgtagaaaataggggtgaggtgcgtggaccccaaagcctaatttcccagcagaaatcggccctggaactagaactccctgatccccagaattgcagctgcggatggaggtccggttcctgaagcctcgggtttggccgccgagtcgctgcctggtgggaggaaactggggttggcgcgggtaccagcctgagcgttcctctgacccggaaccggagggtgagcgcagccagcccgcg

SEQ ID NO: 227223 - DNA, 79 bp, Homo sapiens
  chr1:77684951-77685030
  hyper
acagccggcctcccggctgtggtcaaatgagcctgactcctacctcgatatgactagcggccacgctgccgaaggacaa

SEQ ID NO: 227224 - DNA, 1525 bp, Homo sapiens
  chr1:77747294-77748819
  hyper
ggtttttcctgggagttcctcggagacccggaggtaaccgtgtatgtgcgtgcgagtgtgtctgtgtgcgtacaaggtccggagaagcgaaacggtcgcaggttcctacagaccccgaccctgttcccttggccacctggtccccggtagctgcatccctgggcggcgcacgcagtgaagcgtcgcgctctggcgccggtgccgcaccgaggggtatgactacgaccccttgcgcgtgcccgcccccacctccgcacctcgcgccagcccgcgcagcgtgaccggcagccgccgcagacccggctcggggaggcgcggagcgcggcgcgctgaaccggagaggcgggccggctgctgccttgcgttcgccacgctgtcctccctcctccgctccctgcgccccacccctggcggccgcgctgcctggcagcccgggaagccgcggcacagctgctcggcgcctgcagctccggctcgggggctggaaccgaagcgggggcggcgggagcgcggagaccacagcccccggggagaggcggagggggtccctggcctgggcggagaggctgagctgagtgcgcgtgagaaagagggctgcaccgctgctcggcgcggactctgccagccccagcttcagccccggctcaggtcgccgcagcccgggagcctccccgcttgcgccccaaggcacgcgcggcacagccatgaacaccaacgatgccaaggagtatctggcccggagggaaatccctcagctttttgaggtagggctagagctggccgacgggcggtagcatccggggactgcatctcaggggttcgggttgaggcagccgcgccccgtcccaccttccccacacggggcatgtaatgaaggggcttgtagaagcgcactcgcccgctcccccgagggtagtcgcctttcccgcgggttgccagggtccttgtcagaaggctgggcttagaagcctgcatctcacagatcaagtttcagtcttccagcagggttctgaaagcagcctgctcccatcgcgcccctcggatgtggacacccagggtgggctgcagaccgcggccgggccgcactctctgggggcgagggccaggtcaggtggctgcactgtcgcccagcagcgagtaaagactcgaaactgagggagccagagccctagtcactctgctggtcgagggtcggaacccctgggggaaagaggaaatgtggacgaaggcagcccttcctggagacagcttggaagagagggatgaagatgcaaaaagcaaaacccaacctatcaagtgccacctccccggtgacaggcccccagccttgctctgcgctttcgctgaatgaactcctgagcacgtttttcccgttgcctaggaagggttgggccgcaggtttcgccagtgctcgacaacccacctggagatagcgggtcggggagggagctgcgaggggggcggactcctgttgctcagtcttcagaccgcagcacagcatcatctgcaccgggacccgggaatg

SEQ ID NO: 227225 - DNA, 109 bp, Homo sapiens
  chr1:78148510-78148619
  hyper
tttccgctttatacgtctcctcctttccccttgtacagaaaagcagaaatcttaaaaacctccgattaccacgattatactacataaacagagcgcagtgcgctgcccc

SEQ ID NO: 227226 - DNA, 35 bp, Homo sapiens
  chr1:78149316-78149351
  hyper
aagtttggtcttccgagggcgggttgcagtccatc

SEQ ID NO: 227227 - DNA, 213 bp, Homo sapiens
  chr1:78224923-78225136
  hyper
acccaggagccggcgcgctgcagggctttcagtcacccactgagagggactggcaagcctgagtggggagaccgaggaagggagcagagcccccgcttctcgggctcacctgcacctcccgcttccagggaagaacccctgaggacccttcctcaaatcaacgaccggttcccatcctccaccgaccgttgacagggcgaccactagattatc

SEQ ID NO: 227228 - DNA, 229 bp, Homo sapiens
  chr1:78225422-78225651
  hyper
aggggcagtgtcgcgtcaggagggccggaaaacggccccgcagcgctgccctcggggggtccgcctcctgaactggccacttcccgcagcagccgcggctccttccggtgtctccggggccgccgcaggcgtctccggcgataggggaggtgggggcggagcctcgatgggagcccgccccaggggcggggccacgggagccaggcccaggtgcggggacccaggccgg

SEQ ID NO: 227229 - DNA, 219 bp, Homo sapiens
  chr1:78245317-78245536
  hyper
cccggaaggactccgccttctccatgtcagactgctgctcagcgccaggcatcagctgggaagctggcgtgggcaggccagctgtacctggcctggagctccaggtacagggccaggggcggggtggggtggagaggcgggcgggaggaagcggagagttgagcggccacgcagttggggcagaggcctcggggcaggggtggcgcggactccatcgct

SEQ ID NO: 227230 - DNA, 766 bp, Homo sapiens
  chr1:78354203-78354969
  hyper
gctgcagccggcgctgggcccgcctggaatgcgggaacaggctgcacaccaggacttttatggaaacttgctgctggagacggcggcggcggcggcggcagcggcagccagaggactcccagcggctggagcagaagtgttagcggccagagctcccagacccctacccacagccaggcgggacgcgcacagtccctccacgcggaaagaagtaccttcgccggtcaccggctcctgcagggtgagaagagttgggggaacgtgggctggggggagtggagacggaggtgtcgggtcccctggtgggggcgggggcgggaacggcggctgcagagaggcgctcggggtctgcggcttctggccgtgctccgctgcagctccggagggcgccgggcgccatacagctgtggtccgcgctggccccggcccgggcgaaccctgccttggagccgcatcctgcgggctcggcggggtgcctaccaggggctgccccagggtctgaaagtgtcggccggccttgggcttctggttgcaatgtctttgccctgctcccctgcgccttgtcggctgagtttcgggtgcgttccctactgtagggagggagccctctgtgagcggagtgggtgccgatccctcggctgaacccttggggtccttagggaagttcagtgccgtcccccaccacttgccccagccgcggtctccgtctctgccagcagtgccagttaagaaatcctttctgatcggtctctgtggaagatgggga

SEQ ID NO: 227231 - DNA, 84 bp, Homo sapiens; identical to SEQ ID NO: 197605
  chr1:78444895-78444979
  hyper

SEQ ID NO: 227232 - DNA, 1004 bp, Homo sapiens
  chr1:78956556-78957560
  hyper
gctctgatgcatccgagcacggtgccctcttctctcccagtactgctctgtgcccatggaaaagggggcggaggcgagagagaagaggaagaggcggaggtcactcgcgcgccccatccctcccaggctgccagcgcagctaggtgcagagggatcccaggagccgcgcgcgccccgcagtttccgcgctaagggaacgagtgcgcggaggggacgagcggctggaccacagccggcgcccgatcaggatctccgcgctgggatcggtggaacttgaggcagcggcggcgcggggcgccatggcacaccgagcggctccgtcttctgctcctcagagagcccggctggcggcctgggatgacaaggtaccatccctccagaggctgatcccaatgcatcggcttcgcttatctagacccagatttaatcaactcaccccctgagacacccagccacagcttctgctggctgagcctgacactgagtttggaccagattccccaagctagggagacgcatagagaaagaagggtactcgagctaacccatccccattctgagctgctctgcgggggattgggtagaaagggtctcagaagagggaaatcggcacagattccgcttctcgccgttgcggggttccctgcgggcggcactgcgagttcctcacccgggcacgtcctcactccccgtgcccgggatgagggagaaaacagccctttggcgtttgagcaattgcagaaagtttcagcgagttcgttagtttggagggaatgttgcgaggccaggccgaagggcgggggggatagtaacgggcgaaagtcgaactgtgagtaagacctggagaaggcgaccgtcctgggggtagcctaggcagttccactcgggctgggcgcaggaaaggctggctccggaattcccagcctccgggaaagctagctgctcgggaaacgccaatcgaattagctcagagaagagtggccgtggccttgtgtatccagtgt

SEQ ID NO: 227233 - DNA, 86 bp, Homo sapiens
  chr1:81880257-81880343
  hyper
gccctggacactgccgccgtgatacgataggtggcgctctcccctctgagtccatgtgaacgatctccgaacgtgctctttggagg

SEQ ID NO: 227234 - DNA, 3103 bp, Homo sapiens
  chr1:82265931-82269034
  hyper
ttagctggctctacgtaactacaaagaaaaaaatcatcgcaatttaaaaaaatgtaactttcattaacgagcgcgccggaaatctcaggtatcaaagacgcattaaccctggagcgtcccccgcgcgccgcagccggacggaggcagccgcggcgaacagacgttctttctcctccatgcagttacacaaaaggagggctacggaaactaaaagtttcggggcctctggctcggtgcgtggagaaaagagaaaacctggagacggggtgggtgaaagacgcatcccgggcgcctctccgaagtccaggccgggagcaagctcctgggcctagaggggagggggccccgagccgctggtcatccccctgcgctcagcctcggagcgccgcgcttcgcggcgctctcccaaatactcttcacccactccagaaataaaataaatgtttttaaagtgcatgtgtgtggacaggatggagagcgcgcgccggcggagcgcgcggaggacccagcgcgcagtgagtggagtttgggggtgggctaggggttagcggttgaatgggtgtgttaatggggggagctggaggcagagctcggggacctgggggtagggggagcgcgaaccgactgggaggggagagaaggggaggggcgcgagctggcgcaggccgcctccggggcgcgttccacggccgtgcgcgcgcgtccctcgccgccaccgccgcccggacagccctgcggccgccccgccggcggagccggggccggcctggtcctcgggcggctgcttggccaccgccaccgccgtccgaagggctcgagcccgtaagtatcccctttcgctcctcctccccgccgcttgggcgcacagccgcagcagctgctcaaatggagtggaaaacggccattgggcgacaatgagttatagattatctgctccacgttttgtacttagctgcctgtaatcttcttttgagtttgcccgagccccttgctggaaaactcaggagggagagatttgtcctttgacgctgtacacgctagtatgtttatatgattagcccaactggcggggagggcggatttgggggaaggaggaggaggaggctggaggtgactccagttcagacctcgcggagagtctgtgtcaggacttcgcattcccccgtctctctctctctccctctcgctccctctcactctctctccgctcacacacacgcagaggtgctggggcgaaatcgggagcttaccagagaattccttgggattgttggggggcatctcccctccgctgctgtgtgtggcgtggctcttcccggctactccttgcttccccgagcccgagtctgcgccgccagccttccttggggcagcggccaccgctcagccccggccgggagatccgaaatgtgaggaggggtcgccgccgcctcccgccccaggccgcagggtcggcgcgagggatgctattccggccgggcgctcggggggctgaggggcttcgcctgacaaactgagttggcctcgcgcccccggcgccctcccgcccgtcgcttcgaagggactcccaagtctgcgcacctctgtcaggcttttgcttccaccacccctttcgctctgattcccgatttttttttcctaagggagcgtgcggtctgggggtgtgtgcgtgtgtgtgaaagacctctctcgaagagcggcgtgtgggaaactgcgggaaaatgttgacttaaccccaggagccgcccggcgctggctgctcggctggaggcggcggcggccgagcaggaggacgcgccgagctgcggcgccgtgtccggccggggagctgcggcgctgcctcccgcgcggactcggcggccgaggacccgctcgcggccggcctcggccctctccggccggggtagccgctgccctccgcgcctgtccccgcgcggcccccacgccagacggccctccctcggggcgcgctcgcagacggaggtaagagccgcaggagcgaacaatgtgcctctgtgcccagcttcggagacctgtttgctttgcgcctccagtccgggggtggatgctggaggcgcagggagccgcgggttaatggggctcggctgttgctgttcggctggcccagggggagacccgcgctcgctcgggctgctcgctccctccccccaatctcctcttggaaatcgatccgcagaactctcagtccggtccagccggcttctccttttctcgtggagccattgtaacgctctccaggcatcagtctagttgccgggggcgctggcaagggggttaggatgaggctcccgtagccatgcattttttaatttcataaaagcttggggtcgcaaggttccgcccgtcctttcactgggggcctggggaggaggagtgtgaagcgcgtcctcggcggagcttatttgctccgggcgctggggcccggggccaccccagcgtcccgcccgctttgccctccggtcccgcactgtaagtggagcggggaggctgagcggctggagcgagttcgggggaagtggacggtgggggagggcttggacgagtttttgagggttgctgttccttctcgtcagtggttaggtggtgtggggaggcgaggatgacagtaaagcgcagccagatgtggtcgggccgccgccgggactggctacgattgggagcggcggggctgctgctgccagggcggcctcgtgggtcgggagggtgcaggggccggggacccggcgggccacggggagggcagagagcctcccggagccgcagtgagagggcagcagcgggccgcgttgggcctgcgggagaagttacggagtgtatgctgctggagtggctgtggggcagggagcctcgggagcttggtttgtgggatgggggtgccactggggagtggcgacgagagaaaggcgtgggaggagcgcgagggaaggggagacccccgcgctgcccgagcgtgggctccttgattggctggggcgaccctcaggcagagggggcgagggcgagccaaaccatggaagcgccccagcagtgtggaggtgcgcctgcgagacttctgcgcttgggacccgtaaagtttgttcct

SEQ ID NO: 227235 - DNA, 33 bp, Homo sapiens; identical to SEQ ID NO: 197608
  chr1:82269508-82269541
  hyper

SEQ ID NO: 227236 - DNA, 179 bp, Homo sapiens
  chr1:84158381-84158560
  hyper
gggtgagcagtgcccgtggtaagtgagctcctgcaagttcctgtcacagacctgtcccttccacctcctacccttaaggcagttcctgcagctctcacagctgtgcccacactttcactcctgcaaagaacgtctcattggcttcaattgctttagcggctcagcgtggtccctgtcgg

SEQ ID NO: 227237 - DNA, 498 bp, Homo sapiens
  chr1:84326247-84326745
  hyper
acaactgtcactcccaggcccggccactcgccgtctcagcgccccctcgcggcccttctctacccacctcgggacttcccaggcctcctggctgcgccgcagaccctccccgtcccagatcccgccagggcccactcgggctccagccgctgcctgggacagccaaaggccggcccgggcggttcttccccaggtggtccggggcgtcccgggccgcactggcctggcccatgggccccgaagaaggcgctcacccaaggaccactgtccgagcggcttcccccggcccggcctggtgccgcgtccccaccagcccggggtggcaggttctactcgggaagcctgttttatgtcttctttcacgcccatatcacaccgacaagggtgaagctgtggaacttatacctcggctgggccccgccgccaactcctagggcacgggaactgcgcacaggccggggttccgcgaggggcggagcttcccgctctgccctcggg

SEQ ID NO: 227238 - DNA, 1147 bp, Homo sapiens
  chr1:84464234-84465381
  hyper
ggaggcttataccacgatgtgggaaaacgacggaattacagaataaaccagcagggagcctcctcgttcacccaacccgaccccgcccgcccgagtctcccatctggagcctaaaaactgagctgagatcacagcaactgaccccgtcccctccgccctctccctcccccattctgcccaaacctctcagggcacgaatggtgctgaatcatttgcacgaacgcagcagctccccgttccgcggctcccagcggggacggtgtccccagagcagtgacagtccggggatgggggcccggaaagagggccagggcggagcctttggggacgtggggacatggaagggggtcgggggaggatggcggcagcaggtactcacccgggtgaggaaagcccagcccgggtcctcgcgtccccgctgcaagcggtcccccaggtgctcccgcgcctcgcagcttccccgtgggcggccgccccgactcggcagcctgcactggtggtccggtgctctcctccgcccgcccaccgcccgtggcagccacggctcgggactccggtgctcgacgcggagtgcctggaacagctgtcgctgcccaagcgggtggcggctaccgacgggccagaccattcgcctgctgcggccgggggtgcacgacgtgccgagaggcgcgggcgccgggggcggcgacggttgggaggaacaaaggactcggggaatcctctgccccctcggagtcaggaggtcctggggacaggagggatcaacggaggggccgctgcctcttctgggggtttactgaagacactgctcgagctttcccgggccacacacaccccccccccgtttgccttggtcccgctcggggctcctttagaacgcggcaaacagaggacttagcaacgcgagcgcctgggcggcgcccctcctcagagatgcgagaggcgctggcctgagcgcctccggccacctccttctacctccgggccctaggcgcccgatccacctgcctatctgaccacagacatcttcccacaaaacagtggagctttttgaatctttgaagagagtcttcagatcttttatctaagcatctttgtgaagcaaagaataaacgggtatctgaggccagctcgaaagttaggaaat

SEQ ID NO: 227239 - DNA, 1017 bp, Homo sapiens
  chr1:84543141-84544158
  hyper
aaccccgaggacaacgtggtgggctgagcgaatacctcaatgtgcgagagaacgaaaagctcgaaccacgaccgtgcctagggaccaggcttttcctgtggccgatgcggggcagatgcagacccagaggccacccttgcgcgcgatctccaacccgacggtgcggctcctctcggacctggagctgtggggagaaggcagccttttagtgaggagccgccgcgtggcgggacgcaaggaaaaccacccgagccgctgaacagtattccgcgactgcactccagggcaccgggaccgccagggtgaggagggactctgcgttctgcaaagctagcggttcccactccacctcccactatctcagcgatgggcacgcgagcgccagcccgggcgaccgcgggggaagaagcggtccacgccacctcaggcccccgccccaggctctgccagctgggggtccaccgcccgcccccggggtcccgggcctgcgcgtcacttccggcgcgcgcgcccgcctgcgaagatacagtcgggccagggcctggcctgggcgcgcggctgcccgggggcgcgcagagagggcggaccgcgcgaagggggagtgtctgcccgccgccgccactgctgctgccaccgccgtcgccgccgccgccgccgccgccgctgctgctgccggtgctaaggagttcgctggagccctttcctcagacccggcccggtcttcgcgcccggactcctggcgccagcgctaggcgcactcaccgctctgacgggtgcagacgcgggagttgtcccagactgtggagtggcgggcacggccccagccccccttcccttccctgaccccttcttgccatcgccccagacatggggaacgcggcgaccgccaagaaaggcagcgaggtggagagcggtgagttgaaggccgggtctgggtatccgctgggcgggccggcgcggggcaccgagcgccctccgggtcgcagcttctgaggccgcgggcacgggccaggccta

SEQ ID NO: 227240 - DNA, 194 bp, Homo sapiens
  chr1:84972303-84972497
  hyper
ggcgtgagtcacccgcacacccccgccccgtacaggcgtgtctctctgtgacccgagtttggccaacaggcattttcagttccacccccaacccccagccccgctgacccgaggcggagagcaggcgcggaggtcgctgtcgcgtacccagcggagccgggcgggcggggagcaggggcgctgattcgctggag

SEQ ID NO: 227241 - DNA, 56 bp, Homo sapiens; identical to SEQ ID NO: 197611
  chr1:85040191-85040247
  hyper

SEQ ID NO: 227242 - DNA, 335 bp, Homo sapiens
  chr1:85358942-85359277
  hyper
gccccgccccgccgggtgcgttcgacgttcccactggagagcgtccccaacctgcaaggccgcgagctgcgctcaaaggggcccgtgcgagccgcgggagggcagcgctcttgcagacgcgttcctgcctgggatcgtccccaggtgggtggtcggccggccccgagagggaaaagcgcccactaaaggaccgctagtacccacaagcctcacggagccatacctcggagctccgtattagaacgcagtccctctgcccctctgtcctcagagatttgtttgaagtggctgcgggaagtgcagcccacacccaccacccccgtgggaggcaggct

SEQ ID NO: 227243 - DNA, 167 bp, Homo sapiens
  chr1:85462469-85462636
  hyper
actcctcacctgacggttaacctgaaaacacctgatcctctctccggaatccttgcctggggaaaacgataaggctgccgggccatgcctcctccttcaaaactttccagggctctcgggattcggaacaggaaacaccgttcacggccgactcatttcgccctcgc

SEQ ID NO: 227244 - DNA, 248 bp, Homo sapiens
  chr1:85463877-85464125
  hyper
gaaagtgcgaccggcgcgcaaggaataggaaaagcgagttgccctgcgcccgcgtcgggatgaaaggcagggagccgggagggagcgtcagcgtggcccggcgggcgcggagggagggcgcacggccccagggctggactcgtaaccccagcgccctgctgcagccgccgttgcttttccctcttggtgcacgaaaggaagacgcctgtgggaaatcgaacagacaatcggtcgccgttcgtgaatct

SEQ ID NO: 227245 - DNA, 283 bp, Homo sapiens
  chr1:85527761-85528044
  hyper
gtgaggcatggaccgagcctgttagacctggggtcaggccgggccactgtcattaatatacttaagacacaaaactctttccttggtagtggaaagctgctggcctcacccggttcgcgttgagtgacgtcacatagtggcaaccaatcacaagtctgctttgaaagatactgttagggagcggacactgtattggtagagatgctctgtcagtctcgcagaggactcgcctcttttctcttagcgacagatgcgtcctggcaacagtcggcagagttgctgc

SEQ ID NO: 227246 - DNA, 161 bp, Homo sapiens; identical to SEQ ID NO: 197615
  chr1:85666112-85666273
  hyper

SEQ ID NO: 227247 - DNA, 41 bp, Homo sapiens
  chr1:85666727-85666768
  hyper
gcctgtctccaggcggccgccctccgcccccagggaggagc

SEQ ID NO: 227248 - DNA, 174 bp, Homo sapiens
  chr1:85741885-85742059
  hyper
tcctccttgtcctcggactccaggcttccgctttcgtctcccgctgggctgcagcccgcccccgcccgccctgggcacagctgcgttactcacgtccttcttcacttcagtgaggtcctcctcggtgagggacggtgcggtgggctccatggtggaggcgggagatggcgcttc

SEQ ID NO: 227249 - DNA, 332 bp, Homo sapiens
  chr1:85773929-85774261
  hyper
cagatcctgggaagacgccctttactcagtaaggagggcccaggcgtccaaagcccaccagggggcagcggcggcattcttagccccacttctccgcgctcaaaggccggctgagaaaacgcgagtgactacccgagggcgctgttactccacaatttttctgcaaaagctaaggtcggcaaacatggatattcggatttccattgtttttgaggctaaatcaaaagatgcctctggggaaaaggggcaacatgcactgtcggatcggcattcatatggaaaaacagaggtaggaaacattttatacattttgaagatactttgatgtgcag

SEQ ID NO: 227250 - DNA, 378 bp, Homo sapiens
  chr1:85929935-85930313
  hyper
ggcaccgacaccccgttaattcatccagcttgtcctgctccgagcgccaggcaggacttgggggcttcggtgtcacgactggcgctgccccctggagggacgcccagcctccacccgccctaccggagcggcacccctcgcggccctcgctccctgggaaacactcagagttgcactgtcgtcgctgccgtttaattttcacaaataaaaatgcccgtgagacggaatcccccgcccacccacctgcccgagaccgtacaaccacattgaatcggatcctccagaaggctgccggcagccgggaggtgtgaacaatgaacttctctctgactctctgacacacacacacacacacacactcgccccccgacgggaagt

SEQ ID NO: 227251 - DNA, 98 bp, Homo sapiens
  chr1:85931033-85931131
  hyper
agcgagggcaagaagtatgcggaggcgggggacctcggcgaaaagccaccgctacccggacctggcggtacctgtgttctgtcgcaggtgcacacctc

SEQ ID NO: 227252 - DNA, 35 bp, Homo sapiens
  chr1:86042647-86042682
  hyper
ccgccaccgccaccgccaccgccccccgaagctag

SEQ ID NO: 227253 - DNA, 384 bp, Homo sapiens
  chr1:86045827-86046211
  hyper
cactcctcttccccgttctactctttcaacagataacttgcctctcaccttcgctgtaaaaaagcaaacagctcactgccttcccgggtgagggcttcagtggctgcccggtcaactcgcatcaccaaacaaaacgacttttgttcctccctctcaggtcctcccacccacccagtccaggcaaagttctgaactggcccccctcgcccctcacgaccctccaactaccatcaccaccatcacgccccaaagaacccttcccaacataagtcgtaatttaaggtggaaaaaacgaactgttttcttgacgggtctgggacacacacacacacacacacacacacacacacaccccccgaactgttttcttgacgggtctgggag

SEQ ID NO: 227254 - DNA, 983 bp, Homo sapiens
  chr1:86046271-86047254
  hyper
acacacacacaaaggtgcaatggagccaggggaggcgcttggcagcagcccgcgccaaccagcattcctgagatgtttgagaattctggaacgcgcagacagagccgacgtcactgcaacacgcggcgcctccgccggcccgtataaaaggcgggctccggggcgcctgggcagaccgcgagcgagagcgcccccgagcagcgcccgcgccctccgcgccttctccgccgggacctcgagcgaaagacgcccgcccgccgcccagccctcgcctccctgcccaccgggcccaccgcgccgccaccccgaccccgctgcgcacggcctgtccgctgcacaccagcttgttggcgtcttcgtcgccgcgctcgccccgggctactcctgcgcgccacaatgagctcccgcatcgccagggcgctcgccttagtcgtcacccttctccacttgaccaggctggtgagttggactctccttttgccacctattccccgtccgctctccagccccttcccctggtcccagattgcccacggcaggaaaagttaaaaagttcgcgatcgtttgcgggtagccgtttctttaagcactctccccctccccccgaagacgtgtcgggacctcttggtgggagcagccttccgaggtggccgggctggacgagatcagaggctccccgtcgatagggtcggagacccccgtccctcactgcggcagccgcggcgcccctcctgcgcaccgcgccgagtctcacgcgtatcttctcccccttccaggcgctctccacctgccccgctgcctgccactgccccctggaggcgcccaagtgcgcgccgggagtcgggctggtccgggacggctgcggctgctgtaaggtctgcgccaagcagctcaacgaggactgcagcaaaacgcagccctgcgaccacaccaaggggctggaatgcaacttcggcgccagctccaccgctctgaaggggatc

SEQ ID NO: 227255 - DNA, 1476 bp, Homo sapiens
  chr1:86621179-86622655
  hyper
ccagggcatccagccaaagccgcgcaacccctggtccgagcccttttcccagggaaggcatgggagcaggtacagcgcccaaaggggaggtggggtgcccgtcaggacccgcccaaaacctccgcaggaggggcaggcccgcccccgtgtcctgctcccctccccagtccccgccgcgagtgccacttccccagtgacagggcaatgatcagggcgcagcctcggctcggatgggcaacgtttgttggccttctaaccagaggggattgcctctgagcccgtgggtaaaacaaccccccgacgcccgaggttctgcagccacccccttccccccgctggcgacccttcctcacgcctgagtccagtggtccaggctgcgcacactgaccctgggggacctctagcgtcacagcaatcgccaggctggacgccctgagaagcacctcggggaagcaggacctcgacagggccctgcgggaggagaaggggaggagggcgcgagggcggcgggagctggagccagagagatcgtcggagcccagctctggagcttagggagccgctgccctggacctcgggactcgcgccagcgagcttttcctctcgagccaaaagatcgctttagcataaactgtctgagatctgctggcacgaggcatcctttcaaacacggtattttgcaagctgagaagacaaggggaagataccgcgggtactcggccgctcctaaagccaaaaagtgccaaggagccggacttcagatctccatcaggctcagcagaaccagggggtggagagaggggttggtctaacccctaccctacccggcgggtgggctacttacgtttttgccgtgggggagacttttccacgccttgttctgtgggctcttaaatgcatttgtatgcatttgtccgtgcagcaaagcgctaacggaaaacagaagccaactctgaactgcttagggtgcaggtactgtccatgaaaaagggaaaaaacaatcacatgaaaaccatgcttcaaacccgcaacaagaaaaaaaggaggggagggggtgaagtcgggaggaggtaggaaatagcacccgaaggggaggacaggcttcctagctctctggctcggtaacgaacgagcccagggttgcgctccccggggagggcgggcgaggaggtaaacctcactgggaggcctcggggcgccggcggcagcgggagccgggctgctagtgcagcactcaagttcacttgcggttcaaaggcgactctgtgactccagtggagtcctctgctttgggcctgggaggagaaaggggtgggggtagggaaggagatgaagtgggggaggaagtccttggaaacagcccgcgcccgaacgtttgtcaaacaagcacacacacccacttcggaaatcaagtcggtgcgagggggccggtggcaactgcaggcgctcggcgttgactgccgccggctgctttgc

SEQ ID NO: 227256 - DNA, 84 bp, Homo sapiens
  chr1:87379857-87379941
  hyper
atccaaaacagaacgctaacggccgttgcccttacatctctcatttggaagtgacaggtattaaataacggcatatgaaagctt

SEQ ID NO: 227257 - DNA, 52 bp, Homo sapiens
  chr1:87380149-87380201
  hyper
agaggaaaccaaccgtaaaccgaaccaagagcgaagcgcaggggctcttccg

SEQ ID NO: 227258 - DNA, 347 bp, Homo sapiens
  chr1:87617583-87617930
  hyper
tgcagttgtgaaatttcactcggttgattcttgtgagaaccgaagtttgttttaattgtcaattaaagcgaatggtgcttgggtccctgggatccagggaacctcagggcggtgctcgcctctgcccggcagcgagagagggacccggtgcgggcccgatgacagggtcgaccgctgggggtcaggataagcttgcagagtggccccgccgccgtcctgaactttctcgggaggggaaggcggctgtgtacagaacagcacgccctgggaagcaaaggcctgtcggagaagttgatgaaagatgcaccttaggtgtccccgagcagggccgccggcctccccagagg

SEQ ID NO: 227259 - DNA, 242 bp, Homo sapiens
  chr1:87800822-87801064
  hyper
cttcccccacccccggctcccgacccctcagctccacccaagcgccccaagtagcttcggaaactccgtttctcttcctcgaaccgtctttcctccacccccacctcgggcccgaagactggcgcggaaagtgcagcgagaggaggaagttcggagaccggcgggtggggctccaggtccggggagggcgaggaaacgcgccggaagccagggtggcggtcgtcggctggccctcgctccct

SEQ ID NO: 227260 - DNA, 310 bp, Homo sapiens
  chr1:88928297-88928607
  hyper
gtgattaaccgcgccgaggactgcagcaggcggcggcgctgccctttctctgcgtgtctctgggcgcgtcctgcccgctccccgcgccgcccgcgctcctctcgccgcagctgccgctggggctgccgcgggcgccgctcagccggagcgcgcctccgcccggcccgcccgcgccccgcagcagcgcgctcgctccttaaccacttcgccgctgcctttcgtcggggccgcgagcggggcgacggccgcccagcgcccctggcacccctgatctccagccggggctcccggcccgcgccttggtggctgg

SEQ ID NO: 227261 - DNA, 94 bp, Homo sapiens
  chr1:89149364-89149458
  hyper
caccttaactggtcgagaaggcgcgctgggggctgggtttgagggtgagcaaaaggcaagattattagtttgggttgacgtgggggtcaagggg

SEQ ID NO: 227262 - DNA, 84 bp, Homo sapiens
  chr1:89150030-89150114
  hyper
ccggtgagggcggcgagaggaagcccgctacgagtgccctagctccccgccgctctcgatgaaccggacggaataagccgcgcc

SEQ ID NO: 227263 - DNA, 34 bp, Homo sapiens
  chr1:89990216-89990250
  hyper
caggagcagctaccgaagcgactgcagcctcttc

SEQ ID NO: 227264 - DNA, 494 bp, Homo sapiens
  chr1:90098843-90099337
  hyper
cctagcaccttctccagtcgacactctcgcgcccggaggtaagggcgggggatccgcggagggatggagaggggcagcccgcagagggccacccgctcggtccgctgtgcgcgccggaccgggactcgccccgcctcactcgcgtccttgcttccccccggctctcagacaggcagaatgtggttgcccgcccggcgtgtggtgctgggaaccttccgctactgcggctcaggagcccgccaacccctaccccacccaatccgcgctagcccgagcggccgcgcgaggatctcagcctggcgcccaacgccgcgccgcagcggcaggtcctgcagactgggcgcgggggtgggggggcggtccgcgaggggaaatgcgtccgtggccggggcgatcgttgttctttcctacctcgaaaatctctgagaccccggggccagtcctttccggtctatcacccccctgccacctccgaacccttgaagttagcactt

SEQ ID NO: 227265 - DNA, 172 bp, Homo sapiens; identical to SEQ ID NO: 197626
  chr1:90286176-90286348
  hyper

SEQ ID NO: 227266 - DNA, 45 bp, Homo sapiens; identical to SEQ ID NO: 197627
  chr1:90287493-90287538
  hyper

SEQ ID NO: 227267 - DNA, 338 bp, Homo sapiens
  chr1:90308853-90309191
  hyper
accggcggaggaagcgtggagtccattgatctaggtacttgtggggaggggagaacccgagcagcagctgcaaacggaagggctgtgagcgagcgggcgggcgggtggctggcagcgaggccaccagcagggggggcccgggccgaggccgcgccacctcggcaccacgcgggcagccggtgcggcggggtcgccacggccaggggagcgctgggtgcccaccatggcagttatgcaagcggtgaccccctggtcttgcctccccgccgccctgcactccttcctccccgctgccgacacttggatctctctagctctttctctcccctgtgttttca

SEQ ID NO: 227268 - DNA, 189 bp, Homo sapiens
  chr1:90309431-90309620
  hyper
tgctgcagcttcacttgcccgccccccaccactggcttctcacccggggtctctgccaaactctggctgctgccgccctgggttcgggccggcggaaggccctgggcgtgcgctgcggagccgcctgcgaggactccactagggcgctttccaggctggactgccccgggctgcgctggagctgccagt

SEQ ID NO: 227269 - DNA, 212 bp, Homo sapiens
  chr1:91170441-91170653
  hyper
ctcaaaataataataggagacgggtaagaggaaatggataacagaagtttgggcccggctctgcaaccaggcacgcccaggtagctgccactcaatggctgaagagaaggcaatgggagagcccctgcaatcgcgcagccagccgcgagggtagtagtcacgtgatgccgctggctagaattgtttggtgcgaacatctggctcttggtggt

SEQ ID NO: 227270 - DNA, 1127 bp, Homo sapiens
  chr1:91172120-91173247
  hyper
gcaggaactcgtggcggccgggcggtcctgaaggtggaggagcgcggggcccagctggggtacgcgccgagcaagaacccgcacggagccggcgcgccgcggctgggcttcaaggccgccgcgccaaatccctggctgcgacgtgtatgcgaatcgttaggaggaggcgggaggacagccacactgagggcctcttcactaaagaatgaagtctgacggcgggaatgggggtgggtgggggcgggaatccatcagctccacaaagtgacagggcccttttatcgtaaatcaagttcaatctcgctctcgcgaaggtcctcttttttcggcggagctcccgcaggggcgactcgctgtcccagaccagatagtagcaagagctgggagagacccaaatctgcagggagagggcgcgggctgagagccgcggtggggagcagggcctgggcccagcgcgacctgcagggctgctgcctcgggagcgcttctgctctgcctgcggtggccgaggcggcggctcgccgagcgcgctccgagctgtgcgaacagaggaagtatgtgccagttagaagggttccgccggccacctcgtcgcagccgcggcgcaaggtcttggagccgcagacctgaggcccggctcctccctcctcggcttccactaagaacttattaaatagggacgattcacagttgatctgtcactgagcactacttaccccgagatctttgggtttttgaattactttattgatctgaagattttgttctttggaatgtgaccctgtttggacttagagctaatcaggaaacgctgccggggaggttgctttgtaatcactttgcttacctccccccgggcgccgccgacccttcctagacgcctccgctgcggccgcctaggcttttacccggaacccgccagcccaggttacctagctccacccggcgccctgggagctgtctgtggtgctagcacacagaaaccgggagcgggagacccagtggacaaggagaggagagaggagacaaactgagaatgtaaggttaaccgagacggtccacccagcaacactcaaactgacaaagaccttcaaaattcagccggaaggaccgggggaaatagtccc

SEQ ID NO: 227271 - DNA, 380 bp, Homo sapiens
  chr1:91176445-91176825
  hyper
ggctgggggctggacgcccgccgccagggactgagaaggcaacgatcaaagccgccacaagggtttgttagctggccctctccaagtcccccgggggcgtcctaattgctcgtcccacagcctcccgctcacaggctgtccgacctcgccggcgctcagccgcgggcagcagaacagctgcgaggctcgaggagcgtccgcctgccgcccagcccctgccggcgttgtcatcgctgcccagcgcttcggaccctcgctgccccaggaagacccctagaagaaggaggaggggaggacagagggatcaccacaccggtgaagctggggcctctatgcaggtcaggacggcagcaaagttggccgccgacttagccagcacc

SEQ ID NO: 227272 - DNA, 229 bp, Homo sapiens
  chr1:91177942-91178171
  hyper
cgtggatgagcacacggggcaccaggggccgctgcagctggggatggggtgctggaggagtccggtacatgctgctgtacatggcagcggcagccgccgccgccgtagtgctgtccatgctgcccagcaggcttgggtgatagaaataaggcgatggaaacatcctctgcagcgccgagtagttccctgcctcggccagcaactccaggcccaccgctgtctgccgctt

SEQ ID NO: 227273 - DNA, 234 bp, Homo sapiens
  chr1:91178992-91179226
  hyper
accttatgaaggaacgcagggctggtgggccatccatacccggcagctccagccaaattaataaacatgtcgcccattttaaattggctacaaatgacactaatgttttccgacagaattagggtggctgaaaccgtatgtaatgagacagaaaattatggtaaagatgacaagtggatgggcatttccaaccgcacttatggacgattagaacacaaacgggagaaaaggagg

SEQ ID NO: 227274 - DNA, 58 bp, Homo sapiens
  chr1:91179581-91179639
  hyper
ctgcttctcccagccgcctcacaggccaaagcaaggacatttacgccgaggctggtgg

SEQ ID NO: 227275 - DNA, 228 bp, Homo sapiens
  chr1:91180120-91180348
  hyper
tcagtgaggttgagcgctgcagccaggtccatgcgatcctgcacgctcaggtacttctgccgctcaaagctacgctccagttgattgagctggtggtcggaaaaagctgtccttgcttttcgaggcttcttggctctcacagggggactctcacggctactcgtaatctcccggtctccttcctcctttgtccctaccatagaaacccagccacggtggtaagttagc

SEQ ID NO: 227276 - DNA, 1316 bp, Homo sapiens
  chr1:91181891-91183207
  hyper
aaaggaaggagctggatggccgtgaaggttgtggggtagaacaataaacagaacttcgaggagtccccacatcgcacgcccaggcctcccttcagctgcagtcttttgaccgtcgcccagtcgcccgagaagctcctggaatcgctccccagcagagatctgctgaaggctgaaggggagattgggaaccaggaggacaagctagacggccgagagcgccgggtggcgggactcaccgtggcatttgatgtcgctctgggaatcctcccgcttgtcgagtttggtcttgctgtcctcctgctcgagctttggcctgaagctctcgtgcactgcgttgctctcctgcttcggggtgtggtggggagaggatacgctggtgctgtagggtgcacatgccgccagaggtttgctgtcgcccaagatgtccttaattaaaaaagaagacgtggaagtcctgggggccgaggcggccgagcccagctgctgggggggcggcggcggcggctgctgtggcggcagcggctgctgctgttggggcaaaggctgcaaactttgcgtcggggccgcggccggcggcggcggctgctggctgtggtggaggtggtgatgatgctgggtcgcgtctgctaccagatgcggctccgggggctccatggtgactgagataggagaagaaggcgccgtccctacggtatcaatctccgaacagggagatggggtggcctgactcctaaaatccgcggtcctggcctcaccgagcgggcggaaatctccattcatcatgcctgggctgcctgaactggcactggacaaaatcgtgtctattccaaaactcgacccgctggccccttccattgtcattgctacatgaggtccacgccactccgccgttcagcagccgccccgaaccagcgaagaaagctatcgatcgtaaaacaaaataaacaccaaacaatgttgccgccgcttaaaaaaaaaaaagtggggcggggagagaaggaagggtaattgggaagtggcaatctgtggatactttcgacacaactttttttcttttatgcaaaaagtaggggtggaaagaaaaaagatgcggggggcggggggagttaaaaaaatttctgagaaaactcggaacttgcgctccaggaacgactgcgcacgtggcgcggcggtggcggcgcggaggacccaggcgaaggcgaaggcgaaggcgaaggcgcaggcgaaggcgaaggcgcaggcggcgggaagctacgccaaagccgccgccgccgccgctgccggggtctgcccacagcctggcaccgggcggcagc

SEQ ID NO: 227277 - DNA, 306 bp, Homo sapiens
  chr1:91183747-91184053
  hyper
cctgagcccgcagccctgagccgaactccgagtccagtggtcccggtgtccacaatcacgagtgcgaggcaaagggagagggaggaagagatcagagggagaccagagaaagggaaccaaaggggagaaagaaaaaaaaaagtagcaaggattcgcccgttttcttaagtcagaagagagagagaagaggacgggaagggacttacctttaggctccagcgcggcggccctcgcagcctccccaaacgcgcgcgggaatagtccgaagacattaagagcggaggaaggagatccctgaaggaatcc

SEQ ID NO: 227278 - DNA, 299 bp, Homo sapiens
  chr1:91184233-91184532
  hyper
aggctccaagctggggaaccagcctggtctccagctggaaaaaatgcctggccagacgctttctcccgaacgggggagctaatgcccgaggcgttctctggtggcgagggcagccacggttcactgcggtgtcgggcgggcgcggggctcaggacccatagcggctggtctgcagcccgcgcccctgccgcgccccgcggcagtccgtccacctctgtcccccggcccctttcggcgagcgctcatttggaaaggaaacagtcactgcggatccacttgggacccggagcatgactgta

SEQ ID NO: 227279 - DNA, 877 bp, Homo sapiens
  chr1:91184750-91185627
  hyper
accctatgaatctgcgaggcgggcatcgcttccgtggctaggtctggaatgatgttcgagtggcctttaatgtctccaaaggctgggccgaaatctggagtttagttgcagttctggaggtcactttctgggccacagcttttatctgttgaggacgaagggaggggtgtcagggaggcaaatgacctcctgggacaagctcttgcctttcggtcggaactgcttctgtgtgagccctgggtccggaagcgggtagctgggcgactcatcctgcctgcgttttcctagggaaatcggtgtgtttgacccagaaaaaaaaaaaaaaaaaaaaaaaaaaacagcactacttggagggtgggttgagctgtttctcatcgtctcagtggcatttttcctagggctgttccgagagaacagcggggattgaagggacggaggcaaggagatgcacaatccgggcagctctcgctcttctcggaaggcgaagggagtttggcggagaagacggggttggtgagccgaggcggggactccggacgtgctccatcccggcaggggccgacagtggccagaggggtgcggggaggccctcgggaacgggtgactgggccccgccgggtggggtcgggccactgtaggctggagcggggttggatcaaatgcctttggcgcgggaactgagtgctggcccgggagaccctccggagagctcgcgggctcggcctcggcctcggcctcggccttcggccgcggttaccgaaacacagacggtagacttgtggaggtggcttatccgaggccgcagggcccgacgctgcacagcttcgcagcctaaatatcctgcgcctctgtcacagttgaccgctgtggggaggac

SEQ ID NO: 227280 - DNA, 765 bp, Homo sapiens
  chr1:91189043-91189808
  hyper
tgttaattaacaagcggctaattaaaacggcactttgagtgctaatcaatcgccttattaagttacagccatcactggaacaaattgaaacctccccgccccgttttctgcctttggtgcaggcggggccgcgttcccagataccgtgagaggccttggggcgcggaggttgggggcagcctcggtcagctttctcagtctctcccaggtctacagaatacgccactggacaagtgcctaagcagcgacttctggtccagacacaccgcccggggagtaagtagttgcgtcgaagaacaactcattcagcagcagttaacaccgacgtttcctcctagaaagagctcccgcaaagcggggggatgtgacctgtgggcccccagcaggggtaggaggcagttcagcccgagagggggcgctctagggcctggatcctgcatccctatttcctggaacacacccaacgcctcattctgaaaaccctgcttaggccctggccctggtgccgctcagcaaccaggaaagagctggacctgccttcaggcagcaagaacaggactgccagcctcctgtggctctgtctcccgaggctccatgagaaggggatgggggtgcaagaagggaagagtgaggtggtgtgctgggcgtcggggacgaggacgcacgccagccaagacgtgcctcccacccagcccacgcgcgcttccccacccccctggccctccaaaatcggtaagagaattaagatttcgaatccctattttg

SEQ ID NO: 227281 - DNA, 308 bp, Homo sapiens
  chr1:91190089-91190397
  hyper
cattggaagaagctcttttgcgtggtgggcgatgtgtgggtgggggacttgtggcatggcccacggtgttgtttctgtgcctgcgatgacacacgtatgtcttgagctgtgggctcgccttcctggaggtgcgcccgaccgcatctgctggtgggtctgagcgtgcttggggtgtcccaggagaactgagagaacggctcccacgtgcaaagttccaaagcattaatattttcatcatattatcattattcaatataataatatttgttcggttagcggcactaattaggccacattaaaaccgtagt

SEQ ID NO: 227282 - DNA, 1675 bp, Homo sapiens
  chr1:91190427-91192102
  hyper
ctcacatttttctctctgaggatgggcggctgcaggctggtaggggaggagagacaggcaagcggcgggctggattagggcgtgacgccccccaccacgcacacaaacatacacagcccactggatgtctgccgggtgggagccgcaatctccgcgcggtcgatggggccctccgctgcgcactcggccctgcgccgagcaccctgcagcctcctcccgcgacacggcgctttgaactcggcggattgattttgcttcccttcccccttttgtgtgtgtttgcgttcaattggttaggtttttaagatttgggagggctggtgtgaaagaattaaaatactcttaactggagcccctccgccgagaactggaggtcccgcctcctagttcggcgctttcaggaccctcttcccagagggaatttctttcagaaattccagggtgggcttgtaaaagacgcttccgcagagcaggtcccgtcagggtctttttcctgttcctggtgccagcggtcggcccgggcgccccgcagacctcggcgaggtagatgttaagctcggagagtgcccctcccgcaggcgccgtggcgagatcactctgaatatgtaacatatttgtaacgtgcgccgaggtgtgatgtgtgtgctgaaatagggggatgggggaattcgaagccggattgggaaggcgggggggaggcgcacagaactcacaatgtacttcgcaatctaacaatctgaacattcatttattaaaagctgctgcgtgacatttacactgagccaccagtctctgcctctaatccgggcgaaaacgattgtactgccgagttatggctgcagcgtatggggacgctgctgtccgcggccggacagagcccatcagctacaacgcggaaggcctctgcacccccttgggggcgggaggaaagtactgccagtcctgcctgggggccgagggtaacaagcaccgagcctctcgctccacgcagggccagctgcccagctcagcgaagctcttgtgatctggtgcgtgtctctcgctcttccctccccatcaaagaagtaaactttctacctactccccctaatccgatcgtttagagctgctgttttccttttgtcagattcctcctccccgatcagtctgagtacacgatcagaactgctcagagagcaggaagcacattgatttcagcttgttctgtccacagacaggccctgacaaggttgttagaacagccggagaggtctatacaatcacttaattaccaaaactgtcagtcaggcgggacgcggatccgcgtcccgggctgcgctaggcattccagcactgggccgcgcgcgtgattgatcggtgctgatagcaccgcaaaataattacggcgaattttctgatgtgtgattttatcccaagttcatgcttcagagaggtaatcggagaatgagaagggtcagtgccatttcggattacctggaatctgcgagaaagggtaaaatgggggaaggagctccgaggaaaacgggagagatgggggtgcagagagagagggaagaagaaagcgagttatggattgctggagggactgcaagcaattcgtcaaactgtgcaagtgatttccttcagagccagcatatggcagattgattttgtccaacgtcggttttagccacat

SEQ ID NO: 227283 - DNA, 352 bp, Homo sapiens
  chr1:91192369-91192721
  hyper
atggtgctgactcccgccaccttggagccccgagctgagcctcgggcagaagatgacaggccagccgtggggcaaggaggccgcggaaacgcggaacggcttcggggagacggaagcgcccaatgagattcaccctgcagcccgggtccagcccaccttcctcggagattgccgcggccctcgaacccgggcctaggtcttcatgtcccggcggccagaggacgttgcggggaccactggggagctgccctcagtcagctctctgccccacgccggaggtcctggcgcggcttctttcccgaactagactggcgactctgggccaggccccaaggaccgccccggcctctcc

SEQ ID NO: 227284 - DNA, 135 bp, Homo sapiens
  chr1:91194581-91194716
  hyper
tgatgtgatatgaccgtatcagggaaacaaagctaagtgcagtcaggatctgttagtacagtggcttttgatggaacagctgaggcacacatcgcccgtggcatggactccggggccgaacgctcacgaccaaga

SEQ ID NO: 227285 - DNA, 39 bp, Homo sapiens
  chr1:91195366-91195405
  hyper
gaaacttctcgcacctttctctctcggtctctgcctttt

SEQ ID NO: 227286 - DNA, 439 bp, Homo sapiens
  chr1:91195987-91196426
  hyper
aactctcccccacacccaggcgcgcgcacgcacgcgggcacgcagcagcgatggggatgtaggtcaccccgcgggttagggccacgcgcccgcactcccgccgcagccgcaaccgcagccgcagccgcagccaacgcggccgcggagcgacgcagtccgcagcctcgaatttccagaaattccagcactggcagcagcacgtctagttcgaacgcttccaattaaacaacaccgtattcgcttaaagattttcgcaaaaagtgcactggggccaaaaatcaatcactctccctagcctgacccggtgaaaacagatgcataacatattcatgcgctgagcacgccgagcagcccagcgcggaacttttttttttttcttcttcttcttcttcttttaaataaagcgaggaggacttccgcggctcggcagtcctgctaa

SEQ ID NO: 227287 - DNA, 1201 bp, Homo sapiens
  chr1:91316202-91317403
  hyper
ggactaacagcatgtattagcgtgacagagactaaaaagctaagaaccgccgtgcgatggccggctttgggcaccgggggtgggggctacgctacgcgtgaagggcctcagtcctcgggctttagttcaggaagaaaatgaaagctggaggtctcgtgggcgggactggaggcggccagataggcaagaacccgcaacaggagtagggacattttttcttcaaattccaatcccatccagcgatagacaggcgcgtgggtctccctcctccacgaccaccacacaatggcacacacttttgctggaaactgaaatcgaagtctctgaggcaggctggggcccaggccggcagcggggaggggcagggtccagccacctcggcgtggccttggcgagcgctccggggtcagaggccgtcgttctcgccgcgctccacagcgcgtcacccgctgccctagcgacccccgggcgaccccggcatcgcctggctgcgccgtcccggcgggccggccctctccacgccctctcctggggtttgcggtgggcacagctccctccagactgggtctctccactagcctcctccccaactgcaacgtgggaaccagagctatccgagtcacgagccccaagtgcacacaaagcccccaacggggccacggcgcctccacgcctcgctacctccagctccaggagcgcagaacgcagcgccctgggtcaccgcgtctgccctgcggagcagccccactgaggggaagcctcgggcaggaggtgagaccccgcgcacgcaagcacccccgccccaagcagggccctctgcccgagggagactctcacctcaaataaacgggcgctgccgcctccagggggaggacagcgggcggagaatactcacgctgggcccagccgcgcggggacttcgctgggaaccacgcgcgggctcccgccggggagcggagccccagcctgcagtcctgcgcccgccccagcaccgcctcctcggaagggaggcctctaccgtccggcggcggacctgcagccgccgcgggagacgctgccccgccccccggccccgcccttcggcccatccccgccccgctggcctccttttcccctgccccctccctccgctcctcaacgcccgccgggtgcaatctgctctctccgggagacgaacgcgaagcgacgtggaaacccttcc

SEQ ID NO: 227288 - DNA, 114 bp, Homo sapiens
  chr1:91486937-91487051
  hyper
atgccagagccagcgtttctggccacaaccgagcagcctcaacgagaggggttggtgactgctctcggcccgccccgttactcagtgcattgcaatggcgaccgccaggctccc

SEQ ID NO: 227289 - DNA, 134 bp, Homo sapiens
  chr1:91487792-91487926
  hyper
caaacgagggcagcggaaacagtgcaccactgttctcgggtgccagaaaccaaacaaggtcacctcccccagcgctgacctaatcactcccaaggaggttcccgccccaaagtaggcacgctccaaatatggtg

SEQ ID NO: 227290 - DNA, 698 bp, Homo sapiens
  chr1:91869767-91870465
  hyper
tggctggaagggtccggctggggaccgaatcagcacctaaagcaaaataacagctctgtggatttcctaaggagaatatcctaaatccaaggcagaggccttagggccccgagagtggcacaagaacggggcgctggggcgcgtcactccaccccccgggtcccgtttcctcccaccgctgtgaaacccgcggctcagacagatgggtacgtcccccccagcgctcgctcagggggcgccacacaccggaacacaagacacaggaaccgaacaccaatcagccgactttaggggcgggccggacgcccagccggtcccacctcgcggggagctgggcccgccctgcgcccgagcgcgccgcaggcctcaccgctttctgactggaaatgcggctgaggcgctggcgcgggccggcggcctggagacgcctggtgaccaacaactcgccgcgcccgtccgctgcctgcccggcagacggctctagagatcgaccgctgcccggacggctcggctgggtccccacttccccgcgggcgtcgggcccccgtccccaccttccccgcgggcgtccgggcccctctcctcacctccctgcggacagctcctaggccagtcgagcgccgatttatcagcccctctgaggaccgccaagcctggctaagccgagctccaagcaatggatcgcccaagcccccaac

SEQ ID NO: 227291 - DNA, 140 bp, Homo sapiens; identical to SEQ ID NO: 197635
  chr1:91966293-91966433
  hyper

SEQ ID NO: 227292 - DNA, 105 bp, Homo sapiens
  chr1:91966641-91966746
  hyper
agtcgcgcgcctgcgcactaagcatctggttcggtctctggcccgagggaagccggtccttcccggctgagctcgcggccagcgctggccggcggattcccattc

SEQ ID NO: 227293 - DNA, 170 bp, Homo sapiens; identical to SEQ ID NO: 197636
  chr1:92350554-92350724
  hyper

SEQ ID NO: 227294 - DNA, 331 bp, Homo sapiens; identical to SEQ ID NO: 197637
  chr1:92351379-92351710
  hyper

SEQ ID NO: 227295 - DNA, 502 bp, Homo sapiens
  chr1:92495400-92495902
  hyper
gacagccaagctctgcaccccggcctggcccgccgcaccccgcaggcccggctctcccctgcgcgctccgggctgggcgcggcgcgtgtgcggagccgccgcggtgacacggaacgccggccgccccgggccgggggaggcgcgcgtcgagaggcgacggcgggctggcctggcgcgctgcggcgctcgctcacccgctcccgaggaagggcagtgggccccgccgccgcctcccaatggcgaggctgcgggattgcctgccccgcctgatgctcacgctccggtccctgctcttctggtccctggtctactgctactgcgggctctgcgcctccatccacctgctcaaacttttgtggagcctcggcaaggggccggcgcagaccttccggcggcccgcccgggagcaccctcccgcgtgcctgagcgacccctccttgggcacccactgctacgtgcggatcaaggtgaagggccgcgcgggcctggcgggagcgggagg

SEQ ID NO: 227296 - DNA, 616 bp, Homo sapiens
  chr1:92545648-92546264
  hyper
tcgcccagtctttcgttggaaaaaagtgtagacctgtcaggaagacacagcatagaaaggctgcatgtgctgatttgaactcgagcctcagtaaaacattgaaatgaatgaacaccaaccggaagggaaagaagaggggaggggataaggagcctgaggattggtttgccccgcgggatggtccgcgcctgagccatgggaggcggggtgcccgccggcagaagtaaacagagcgagtacgcctgcgcacgctcttcctgggtcaagagccggctcggttctgggattctgaggctccccaccgcggtccggcttctctgggagactgtctacaaaccgacgagaggcgtcaaccttttaccctagggggcggatttgggtaggagccgagcgttcggtcggaaacgcccccttcttcctcctgggcggggcaagtgaggccaagtactgggcctccagggcgtcgtacctctgtgagacatggctcgctgtggggaaggcagtgcggcccccatggtacttctggggtccgctggagtttgcagtaaggggttgcaaaggaaggggccgtgtgagcggcgccggctgaaggcgacggtgtcggagcagctcagcc

SEQ ID NO: 227297 - DNA, 184 bp, Homo sapiens; identical to SEQ ID NO: 197640
  chr1:92764405-92764589
  hyper

SEQ ID NO: 227298 - DNA, 3173 bp, Homo sapiens
  chr1:92948158-92951331
  hyper
actggccagctccgcgcaaacgaatctaagcgacaagcagctagggtcctgccgcctgggatggaggcagcagccccagcgggcaagctgtccaagtcccagagaagccggatgcctccttcccctacgaatcagctcccttctcccggaaagactctccaactccccgttagcatttctacgcccaaggtcgcgccaattcccccccagcactgccgggtccctgcagctcccgcccaagaggttcccagtgggttcctacctggagacgcggagggtgacgggggcctccagaagtcctcaaactccgagctccgttcgcagacgctgccttcgcagctgtctggggatgcggaggctctgtctggggcttcggtcagctgcgattcgggggacaaacggtcccggggctccgccttcgccccgcctgcatttgaagtgctgtctgcaaagaggaggcaggtgaggggctcaggctgggaccggttgagtctgagggtgctgaaggctcccccaatcccccgaccagggcagccgagcgtcttcccctctccacccagaccccggccgggaaccctctcggatccgagggcaggcgcagagaggccatggcacctaggagacaaacccggaggaaccaggacagtaggaaacaaaaacagcagcaaaagggacgttggggcagcccctcccagctccggactaatggtgtgccgaggtgcagtaggcatccgggggagcagccccgcctggcccgcgcgcgcctcgcacctgctcggctaggcgccggtacattctctaaacggagggaatagtctggtcctggggagcgcggctggtggtagctgtgagccttcttgcttttgacgagaaatgagcgcggcatggtggtccggcactttccccactgcgccccaagagtccctggagccgctgtcacccacggtcactccgagggcttgctcagccccagcccggaggagacctgagagggaaagaaaaccaggtggagacgtgggtcagtactctccggtgcggcggactgggcacccaggcggagggagagcgcgggccagggaggcgcgcagagggcccacgggaggaggggcttgaccctgctgcgccgcgcttaccaggtggcacttggacaggtggcgcgaacccgccgtcgttgccgccgccgccactgacacagctcagcggtaaaacctgtcccggggccctgtctcaggcccctttcctcctccctgcccacgccccccagctcctcccctttcctagcgaagctcgctccggcaatcaaactccctggagagctgtagttcccatcgggtgggttaccccaactcagctactcatcgcctgcctggctgtgctttacggctggcgagggagggcggggacacgcggatcggtttaggggccggggatgcccagtggtcgaggacccggaaggggcaaggagccaagacctccaagagccagctaccaactggagtgaaaggaccggggggaggggggaacagaacacaagataaaactgtggggcggcgggaggacagcagcagagggattggggacagcagaggccagagaaaggaggtgggagagcaaagggacaggaaagtgaggggaacaacagacgaccaacccccgccccaggagaaactcgcatctgggtgatcccactcgcccctcactagtgccccacgtaggagaaactttgcccttggactcccggctgcggcgggcaccggtcgaggctgcggcgagccatcccagaccatggagacctaacctcgggaatcaggtcccgggaaaaaagcactttccgttctgctcaccaaaaaatcttgtcctagggaggtggagcccgatccacgaacgttgactgggaaatgctaggtgtcccgagtcggtagtgcaccgacaatttagcagacaaaaaagacaggacgccagagcgcgcaggctgcattagcagagagcgggggtcgggcccgggcccgggagggaactagctgcccggggcgtcgctctcattaacccccaatcagttcacctaataccaggtcgaaatctgagcgcagcgggagggcgtggctgcgcctgccgctaggctccagccggctccgggggcggtaccccacagtcgaggtggtctggagtaaacgaatctgccttcctcccggggtgaaggcgatggtgaccgggttcacacgtgagctgcagtacagcagttctccgtggcctcggctggttcagaaacgagggtgctgggaactctgggccggggcaggacctgcagtcctccggcttcgcgctgtttccactgccggactaggagcccctcggcttcctaggcaagatgcaggccacacagtctacgtctgtccgttggcgctctcagctcaaacgagtcctacaggccttggtccctgtagggtgcaggccccctgctccagatccccagccccattgtgtccccttctccggaggaatgggaatagacctgggagaaaagacgcctgggacgtgtcgcggggctcccgcgaagtttcccgctacccaagcgccagaatgcccctaggggtgagagtgccatccgcctccctccggggtggctcctagggctagagctttgtcgcttcctgcacttctcgtccgtacaattagacgccacaaaccccaaacccaattctttaaacagccacgaaactcggaagaaaagaaaaacggagtggcgttgtcccgagggtcccgctgcagcttggacccacgttggctgggagcgggacagatgggggcggggtaactgtcagcgccggagctgggtctgggctggcgccaccagagaccaggcggacgcggaggccgcctccccacccgggctgtaagcccacgcctctctcgcaccccggcccgctttgctggttcctgtggggagcgacagagtttggaggagataggggccccggggcctgggccgagcgcgtgggaaggcaaccccgcgctgcagctggcgcgggaggtggggcggcccctccgcgcgctcaggcctctcctcaccgtccgggcccaggaaggagggagccgagggcgctaagggggcgtcctcccgagcgcagctgccgccgcctccccaccagatgtttccttccctggtggatttg

SEQ ID NO: 227299 - DNA, 236 bp, Homo sapiens
  chr1:92951691-92951927
  hyper
cccaaaaccacaagcttcacttcctgagcgttactgagtcgctcgcatagccctcccagacctgctcccaacccccgtcgggcggccgggcgcgctcctttgcgcaagtggccaggcggtggggggcctggcctttccagcccgtcccgcgcgccccttagtagtcctcccagttctctccctgtgggtcggcaggggatgggggaaattggaggtccggacacttaggcactaga

SEQ ID NO: 227300 - DNA, 88 bp, Homo sapiens
  chr1:93426908-93426996
  hyper
gtggctgggcggccgccggcctacctggaggtaatagggtttccttagccaggcccccggacagagactcctcgccatggtaatcaca

SEQ ID NO: 227301 - DNA, 167 bp, Homo sapiens
  chr1:93427437-93427604
  hyper
gctccccgcgctgcgcccagctgcgcgtcccgccacccgccccggcagcaccgacgctccccatggactcttctcctggagtcaggacgtgtctggacgggttgtttggaaattcaagggaagcttggggctccttccctggggactggctcgtcctccctcgccct

SEQ ID NO: 227302 - DNA, 225 bp, Homo sapiens
  chr1:93544520-93544745
  hyper
agggaaaagaaatcggcccagcaagatgcacagagcaccgttacgaccacgcacaccgaaggtcgcacacgacccttttcctgtataacagtgccagcctgccgacgatcaggagcgcagctttcactattgtgttagccccggcggcggaaggactgagcctcactgcaacgttaaagagtccttctttgttcagccccagtcggggacgcagggcgcggtgtt

SEQ ID NO: 227303 - DNA, 761 bp, Homo sapiens
  chr1:93645817-93646578
  hyper
gggctgaaagaggcgtcaggtactgttgtctccgctccgcgtttcctctctggactcctcgtggttgacagggaaatctggagtctgaagaaactccaggtggcggccgcggcggcggcgaacactccctccgaaagagaagcgcagttctccaaagggtagggactctgggcggggctagcagtcctattccgcaaccgcctcagtctcggccccctcaggccaggcgtgagcgccgcccgcctctccccctgacggcctccggttcccatggcttcccccaccaatgggcatcatggcggtaattgtgggaaatgtagtcccgggcgggctccgctagtgggctcgggcgcgctcgccgaccacgatccccggcaagccccgcgccttcggcggcgcctcacgcagtctgcgccggggcggggcagtgaccgggtaggcgcgtcccaacggctcccgcggcggttcgaattctgtgctgccggggttcgctggttctccgagttgtgtccgaggcttccacgcgcaggggcccgggaaagggtcagaggcttcctaacgcagactcgagtgcgaagcgcgcagtcgccgggtgggtctctccccagcgacgatttgggtggtgagcgactgcgccttggcgtggggaaaccggcttacctgggggagttctgttcctttccctcccggcaccttggatgcgctgggactggtcctcgtggttgctgagcatgctgctctgaacggttgtattttatttg

SEQ ID NO: 227304 - DNA, 100 bp, Homo sapiens
  chr1:93646698-93646798
  hyper
cactgtctctataaaattaaaaaaaaaaaaaaaaagaggaaactgtcacttccgtcccccacccccgcccccgcttctttcagacggatgtaagattagc

SEQ ID NO: 227305 - DNA, 534 bp, Homo sapiens
  chr1:93810812-93811346
  hyper
cttagccattaggcgacttagttgcctctaggcaagtaacttctctgaaatgtttcatttttcatgaagtttaaaaaaaaaaaggtgaaggactttagagagctttgaaccgaataaggtctatcagacatcttgaaaagctttttctccagacgacgcagaaacaggcacacggggttctgctttccccacctcccacccccaagcccaggtcccattcttctcactttcaatcctcatttgggctcctaaaggaatagcaaagagagttattttatcaataccagcgctcctctgtccccaaatccagctagggaaggtttcggaggcctcagctacttgagagagggtagagacgatccttcctcgcctatctacccagccacccaccccttcccagatgtagcgtccgggccccagaccaagcgcgtgcttggagctctccggtacagtgaggcgcgcgcttgcctggctagggtccctgtgaaggaatgggatcccgaggtgcttgccaggaccgtagcaggcggaagc

SEQ ID NO: 227306 - DNA, 191 bp, Homo sapiens
  chr1:93913559-93913750
  hyper
ccaggatgcactgcgccccgccccctccccgcgccgcgttccgcctcccctcggccccggccccctcccgcccagcgcggggaggcggggacgcgtcggcggcggaggcttctccagtcgcgtctttctcactcactggggagcccggcggtggcggcacctttcgaggtagacccgctgagctgctagcc

SEQ ID NO: 227307 - DNA, 151 bp, Homo sapiens
  chr1:93913990-93914141
  hyper
gggtcccgctcgtctttgtgtgcagactcctcttcccttctcggccgggggtctagggggccgctagtccgtgctcccgcctttgccgccgtggtgcagctcgggcggcgcccgggacggccgggggagcagcccgcgggctcctgcgtgc

SEQ ID NO: 227308 - DNA, 143 bp, Homo sapiens; identical to SEQ ID NO: 197646
  chr1:93914736-93914879
  hyper

SEQ ID NO: 227309 - DNA, 203 bp, Homo sapiens
  chr1:94312192-94312395
  hyper
gcgctcgagcgcgcgccctccgaccacatgcacccgcatacgcatgctcccagcgctcccacgcgtgctgacaccctcccggcttccgcccacgcagtcgcgggccccgggcgcgcgggctcggggcagctgcgcggcgtccttggaggcaggtgctggcggcaagacgagctctcggaggatgctgcggcgcggggcgcgtc

SEQ ID NO: 227310 - DNA, 663 bp, Homo sapiens
  chr1:94344323-94344986
  hyper
ccctccttggtaccgtgttaacagtaaggtttaaaagttcgaactgtgcttctgcattaaggagttgaacgacccaaataaagttatctaacctctcttccatactaaaaattgccttaagagacagtggtgaaggctaaacagtttccgtgacaggcttagcacggggcctgggagacccaagcgcgcggcaagctcgggtcctctctgtcggcaggtcctcacccttaaccggacccttgcgccgccccgcctgcctgagcgcggctctgcgaagcggcgagaagtagggaagactggatttcctaccttttgcccggaactttcagccgacgcggcttggatgctggccttagcccgtgcagatctggtaaccaccatctttccggctccctcgcgaccaccacgacttccctcttccctggcgctccggaaatgcgtcagagaactgcctcgagcgcgttttccgcgcagatccgagaattcgcgagaatctccgcccagccagttcaggccagggcggtcagagacaaagggcctgggtttaagtgtgcatttcagagctgtagaaggcaagccagatttttgctgggaaagaccttcatcggggcggcgaagcccgcagtgacagagggtcttagcgtacccgttcacatgaattgt

SEQ ID NO: 227311 - DNA, 131 bp, Homo sapiens; identical to SEQ ID NO: 197648
  chr1:94374254-94374385
  hyper

SEQ ID NO: 227312 - DNA, 231 bp, Homo sapiens
  chr1:94702421-94702652
  hyper
gggcaggtgggagcgggaatagaatccaggcaagaacacagacccatagtgatcaggagcacggattccggagcaaaagcgcctgggtttaggtcctgacgctgccaaccactagtctgtgtgcttgggcaggtttttaacctcggtttccccgtgtgaaccgagtcgaacaatcatggagtgttctgaacattaaaagagttaaaatgtgcaaaggcttcagaacagcag

SEQ ID NO: 227313 - DNA, 156 bp, Homo sapiens
  chr1:94703372-94703528
  hyper
cagagcgactcagagaaaagtcacctgaggactagatgcggctaatggccagatgagcagctacatttcttatgagacacttctgtggatcgcctttttcctccctcttccaggggttagggcctggggaagggcgccacacgtctgaatgaagaa

SEQ ID NO: 227314 - DNA, 286 bp, Homo sapiens; identical to SEQ ID NO: 197653
  chr1:94713018-94713304
  hyper

SEQ ID NO: 227315 - DNA, 120 bp, Homo sapiens; identical to SEQ ID NO: 197654
  chr1:94884615-94884735
  hyper

SEQ ID NO: 227316 - DNA, 457 bp, Homo sapiens
  chr1:95006823-95007280
  hyper
acagtccaattactcggacaccccgagcaaaactctccagcggaaggggcagcggggtctggggcgccaactccctccctgcaactcccgccggcgcccgacggactcggttcattcaagccgggctgggtgagcgcagccgagtcccgtaggcgcgggggacaacatgggcgccccggggaaccagggcgagcccgctgccagccaggactgtcgcctccctcctgcgtgtggcgcgccccgggcttccaggggctggtgccactcacctgaagcgccggccacctgggcgaagacccagccgagcaggagcgtccgagcgacggcggtctcggggcgcgggacccggggccaggcaggggtctccatgtctaccagttggcggcgagatcgagcgggttccgtggcgcccgtggggctggggaggttgggctgaaggcgccctgggccggccaga

SEQ ID NO: 227317 - DNA, 612 bp, Homo sapiens
  chr1:95007520-95008132
  hyper
actcaccccagtgattcaaccgcgccaccgagcgcggagctgccctggaggacgcaggcgggtctagttgcccgggtcccccaaggcccccggattcacccaggcccgcgactccgacgtgcagcttaggtgggttgcaggtctatggcaggaaagggagggcgccttggaagaattcttcccttccatttggtgataaagtgggagaggcggcatttacaacatttaatagaaagcacgggctctgggctcccctcgggcagcggagggcatttcccggatgctttgcccacctggggcagaagctcgggacctgcagcgaagtaaacgtgtggctgtgagcagggccctctcccagccacggtggcttcttctaccccacgaaggtcaagaatacctggcctgcccacctcgcggggcccttagcgggtcgcacaggagaaaggcggtgggaatgccggtgtcagccacggtgtgaccggctcggctcacaggtctgagggtcagttggctcaggcatcgcccggtacgaccagagatagtgactgaggaagagcagcctcacatctggcagtttgcctctgggagaattccagcgtgacatctgcagct

SEQ ID NO: 227318 - DNA, 672 bp, Homo sapiens
  chr1:95285587-95286259
  hyper
gctcagggcagaggccgaccacccgcccaaggtcgtggcggcgccggctcagctttagtcgtcaaagtgcacatcctgggagccgctgcctcgaggtggttgaggcgagagggcagggaagcgtctgagcctcttcctcccaccagagcaggaccccagctgacagcgggtgagctgggcagaaacccatgccgggaagaggcggacccagtggaccgcagcgcccgcagtcgccgggccaggcgcagaggcgaacgggaggcggcgctgcaccgtgcccgcccctccccggcccggccccggctccagccccagccccagccccagccccggccccggccccggctcgcgggcgctgcgtctccgcgtacaggaggcggcggcggctcccagtcaccggcccccgccggcgagcgcacgatgcactgcctgggcgccgagtacctggtaagcgctcgcagcctcggccctcgggggaggagccccggggaagggtcgagtcccccgccttcacgcaccttccctgccggacgcttccgcctttcccgcgcctcggggatcccgcccccgcttagtaccttggggccacctggcggggaggaacctggaccctgctccagtgctggggcggaggcgggggagacgcgggccgcggggcgcaaacttggggtc

SEQ ID NO: 227319 - DNA, 1599 bp, Homo sapiens
  chr1:95391500-95393099
  hyper
agggggacgcctctcatctctttcccaggccaaaagtcctaaagataaacctaacgcattcttgggctcagtggcaaagctgagcgtcaccaaatcccaatcgctccaaactataagccgcctcagcaaacaagccccaaacaaaagcaacccacaaaaataatcctttatgtcgtgaaagtctaatgtacttcaaacttctcagtgtttcataaaaagtctcaagcctaagcagatatcactcgcacagtggcgcgctcaggctttgtctccatttcccgcaaaagcaacagcagaagcagcagcagcaatctgcctccaaatgcctcccaggcaccgagatcggagactgtgatgggtcccggaccggcttccgttcctcggggcccctggggtcggcgggacattaggcggtctctctccccgtggggaggcgcggagtccgccagcacccggggcccgggcagatggcgggggctgcggcagcggctcgccgggtccctggccgcgcagacgggctccgcctaagggcgagtggccacgcaggagcgcccccttcccggagggcgcgttctgcagtcaccaaacggcccccgagacccccgcagccggaaaggctggcgccgcgggactccaggcgcccgggaacccaccgccagccactagtcctgtcccacggcgcgggaacaaagccaggcgggtgcccgggagccggccccgcaagcccggggactggacgcgaccgggacaggcagagacgctcgcgccgcctcgacggcccctctccaggaaaacggtgagccacagcgcgaagagcaaacgaagcacggcccagcgccaggccagcccaagggtgccccgggggcccccgcgcccgcccgagccaggcgtaccttgttcttgacttcggccgagagcccataggaagggcccttgttgaagtgggtcatggtggttcgggcggcgggaagagacagcgctggggtccggggtctctcgcacttcgcttccccgctcctggccccgaggagtggccgccgcgggggatgctcgaactccctcctctgggaggcgcaggagacggccgcggggcgcgggcggtgcctgggcgactgggtccaactgggtgctacagagcctcgagctccgctgcgaagcacccggctgcctcgctcgccgcccgcacctcggttccccacaggccgcccccgcctccgcctgggccttcgaggattggccgccgggcccgaccaatggagggccgcctcctcccgcctctgcgccgaggggcggtgcggccaattgaagggccgcgggggccgctttccctcccgctccctccccgcgaggtccccggcccccgccccagccctcacgccaccggggccggcggctaggcggccccgcccccgggctaggcagggcgcctgggggcttcccagccacaggccattcacgtcaacctccaggcatcctccgcggcgggccggaccgggccggcggaggggagcggaagcccaccggggctggcccgccgctgacccgccgcctccgtctgcctcctcccgggctctgggcccagcgcgcccagatgccggg

SEQ ID NO: 227320 - DNA, 204 bp, Homo sapiens
  chr1:95428539-95428743
  hyper
gccatttcagttcctgttatcgtgctttgaggtgcactgaactgcagcaaacccaggggatccaaggctacgttgaaaagcctttgaccacagtgcagggagcagaagacattaatgacgtgatgtcgacacagcccgcactcaggatcctccaggaaaagaacacagagataaccccggatcgatggtactttttgaaaatgc

SEQ ID NO: 227321 - DNA, 491 bp, Homo sapiens
  chr1:95538361-95538852
  hyper
aacgtccatggaacgaagcactacccatattcgcaggattaggaaaaccgccacagctcctgcggccgcagctagaacgagaacgcacaccatgcagagaaacggcgcatgcgtccaacttccggggaccagccgctgtcaaagttcacaactacgggtgccgaagcgactcaaacgcggaggacgcacgtcttggtgggctggtctttcctgagctgggaggagtggaggcgacggagaagctgaggtcccagtcacaatccattttacctcatttatcatgtagtattcgtgtttcctaaactaaatacgcaatacctagattaataatgcacaacagccatacagggaaactgcatattagcgttaaaaggtttctacgttctgtacgttcacgtttgtcagcggaacccctgcttctgcgcggattgtgcgcagctgcagccaagcgtaagctgaaaattgtaaagttaagcgctggggaagcttga

SEQ ID NO: 227322 - DNA, 157 bp, Homo sapiens
  chr1:95582633-95582790
  hyper
accgctgcgggggcgggctcacacagttcccccgctggcaagttttgtgacttgctttggaaaacccgggaattgcaccctctgcccttggcaaggtgtgagcttccaggatctctccgctgcgacttcgggtgttagggtttttgggctctttccg

SEQ ID NO: 227323 - DNA, 178 bp, Homo sapiens
  chr1:95583390-95583568
  hyper
cggaaggctcagcatcgtccccgcccggcgggccacggcgtcgctccgggagcaaatggtgtcccggggcccgcggcccccgcgccgcccgggcgccccgcattcctctcgcgtttctcgggctgcacgattccggctgccctgtctgcctggcggtgcctctcgggtctgagcttaa

SEQ ID NO: 227324 - DNA, 246 bp, Homo sapiens
  chr1:95699851-95700097
  hyper
ggaggtgctgagccgctcaggtgactacccgcgcgcgggagggacagggcgccctcaggggccacccgcgttcgctttgcgtctcctccccaccacggagcctgggcaccccgcctgggcccacgtatggggaccgggttagttgaatgatggaatgacacgcccggaggccggagtggtgtcgcagcgggcgggagtgtgaggcgaccccagaaacactaagagagcggcgcggcccactggggc

SEQ ID NO: 227325 - DNA, 43 bp, Homo sapiens
  chr1:97187291-97187334
  hyper
gcggtggcccgtgcgcctcggcaccttcggcaatttccgtcgg

SEQ ID NO: 227326 - DNA, 106 bp, Homo sapiens
  chr1:98386670-98386776
  hyper
ccgcgccaggcacggcagccgcagcccggccttcccagttcagcccgctccgcgccccagcctgcaagcagaagggagggagggagtagagcacccgctctgggga

SEQ ID NO: 227327 - DNA, 1073 bp, Homo sapiens
  chr1:98510850-98511923
  hyper
ccaaagagattggacgtctgaacagtcactgcctgccccaacctctttcaggaaggttccaggtctgtgccacactgcaaccaatccggttcccatcctgtttctccaccccttctcggagaatccgaaaagaaaatatgcgttcctgagagacccgccacacttccgatctggaagttccgcggggacccagcccccgggcccccgccccctccccatctcggccgccaagtctggttgcggagcagcgcggccggccgggggtggggctccggcaccgccccgggctcgggattcgcgaagtcacgcgcttccgcaggcttgcgggggcaccttcgcccacggacacgccctttctgcggaggcagcccccagcgaccctctgcccagcttcggcgcctcactcgcgacgctcccaaactgctcaaggcctttcagtcgttcccaactttagaaaatcgccccgtccgcgtctctccctccagccgcaccccaccgtggagaggagaggagcggactgggaacgccgaaccgccccgcaggctcggggaaacggacccccttccgctccccgcccatccccttcacctcgccccccgccccctgcgcgaacccattttccagtcctggtcaccagaggcgcagcgcacagcctttccggtggaaccagtgcgaaaacacccgaggaaatgaaaagaacaagaaagtgctaccttggcaaccacgggcgtttagtggccagctggtgggctggggagggcggccgctgcccccctgccgctggtactctcctcgactacgcgtattcttaagcaataacaacgtaatccgtattatccacccaagaatacccgtcaccgaagagagtcagaggaccaagctgccgctgccgctgctaccgctgccgctgctaccgctgccgctgctactgccgccgccgccgccaccagaactcttgctgctcgctgagcccgcccctgcctggggatgggctgagcttgaccgggaccataaatccataactcgatttccctaaagaaggatccaaagctgtgctcggctgcttcctgccc

SEQ ID NO: 227328 - DNA, 504 bp, Homo sapiens
  chr1:98513941-98514445
  hyper
cttcagcacctggacgaatggacagctcaacccgggccgactgccggcagcactcgcagcagaactgacgctctgagctctaaccaaagctctctcgtgcttgagcggggcagcctgacttacgagaacaccatttcctacgagaccactgccgctgggtgcatattcaattcaagcctccttaagctgtcggatttcccccacccatccaccctcccccccttctccaccctccacacaaaaacaaaaaagggaaaaagcccaataccatcagggcgtttgttgatcaacttacacttcgcttttgaatatttagatactgctagcggaacaatatcagcggaggcttaggtccgcattaagtacctttgttcatcgactcctgcaagccatgtttattagaatctacatttctctcgcgccccaataactagaggtgtgttttgcgggcagggggctttcagcaccttttgatctctcaaggccaccgcgactgattgacgg

SEQ ID NO: 227329 - DNA, 276 bp, Homo sapiens; identical to SEQ ID NO: 36026
  chr1:98515026-98515302
  hyper

SEQ ID NO: 227330 - DNA, 960 bp, Homo sapiens
  chr1:98519027-98519987
  hyper
gtcccgaaaaccgccggaggccaggtgtcgcggacgggccccgggctaaactctcgtctggcgaagtgaagagcgcaaagtctccaggcccagcgcgccttcgcggggcaggccggacaccctagccccgggccgggctcgctcttctctgaagccctggagcgggcaaggggcaccattctggccacaggaactctagtttcagcagccgcagcccgccagcgctggctcggaccggggcctcctctgggagagtaggagagcgaaaaaatcaaccaccaccttggatttcagatcgaggaaaggaagccaaagcaaaggtgtggttacacaggacatccatagacaaatcgttgcctctctaagtgggcctgagctttgcggctccagaagcgcgaggcgcggttggtgcggacgcgggggcgtgggagtcatcgctctccccgcagccctggccgagctctctgctgtcctcccgagtttgggccagagaccacggctcactccctaacgccctcgcaaggacggctgcccgtcgggccaagggcgccccgggctggaggccggagcaagacggccccgcgggactcgggagccttggtaaggcggaggctcagaccccgttcacgaaaacgcctggctcctccaggatttgtcaggtcttaagcagctccgagaaggctccgctggctcttggggaaccccgctgtgcggctcacccccgtttgtctctctcaagctctcgccctcctcccctggtcctcccttctccagatcccctgccctgcccgaggtccgggccgcgcgggctgagcccaatacgcccggagaagagcgccggagccccctgctggccggacgcggcaggcgcggcggcccgctcggtcccctccgccccgcgggctctgcccagcccggacccgcctccaccctccagtgccctggcgctgggggcgtgct

SEQ ID NO: 227331 - DNA, 99 bp, Homo sapiens
  chr1:99127911-99128010
  hyper
gttgttgcttgtggatttgagacttgggtgagtctcgggtcttgtgggaataggttctaggaaatctccctgaacaggagaaaacggttgtttctaaca

SEQ ID NO: 227332 - DNA, 1236 bp, Homo sapiens
  chr1:99469745-99470981
  hyper
gcccagtcacccaacgctgaagccaccgcggggtgtgggggggtgacgtgtgggaagagctgggggcttccttcgcacccaccctcacgcgccctagaatgtcctctggggaaggggctgcccataacttggaggaacttagaaggcaaaacctactgcgccccaacccttagaggggcctcaaccccgaaggcgaggggcgagatcagggactcggcgacgagggcgagcgcccccgggcttaccacgagcacggggaccccggcggccagcgagtagaggagcacggggggcacggcgctgctgtcctccgggcccgggtagggtttgcggtaggcgctgtcgtggcagaagaagccctgcacgttcacggtgaacgtgtccgtatactcgaagtagtacgccagcatcaccgtccctgccatgatcaccatctggaaatagagcatgctgctggtgagcgccgcgggcagcaggggcatgcacgcctcccgggccgggccgagccgagccgagcgggcggtcgacgcggtgggccccctccccggtccgccgaggcagccaccgggggcgcggcggcggaggcggcgggaggacgaggcacgggaggcgggatggagccgctggaggaagaggcggaggcaggtccgggcttcgaggcgccggcaggctgcagaggaggcggctacccccggacgagccccctctcccctgcccgccccctgcccgccgcaagcgccgcccgccccggcgcggggtcgcgagggagggcggggagtcccgggcgacgggcagcggccgctgcgcccctgcacgagaccattcgagaagcagcggcgctgggtcaatcccccaggctagcccggaggaggcgctgcgtgggcggacggggcggcagccggcgggacagcggcacctgtacccctcacagggcggacgctgtggggctggagaagctcctggcgggggtaaaatcaaaagggggggaggggaggcagtagagatggagcttccagaaactcttccgaggcaccagctgagaggtttaagaaacccgcacaacgcctgggaaaatggtgcgtggacgcgtcttccgagcgcaaagcccaccaaggcgcaaagtgccgatgcggcgcccagagtttcaaccggtgcgttcagcctgcatccctcgaattccttgacccagcccggggctggagcctggcggtggtttctaggcgctgttagaaaaat

SEQ ID NO: 227333 - DNA, 32 bp, Homo sapiens
  chr1:99730207-99730239
  hyper
cctgcttttatttcgtcgaggtgagttggccc

SEQ ID NO: 227334 - DNA, 40 bp, Homo sapiens; identical to SEQ ID NO: 197672
  chr1:100316318-100316358
  hyper

SEQ ID NO: 227335 - DNA, 328 bp, Homo sapiens
  chr1:100435244-100435572
  hyper
ttgcccttccttacgcagtggacaccttggcaccctctgcaaacagacagtcccgcagaggccctcgacgagtgtcactccatctgtttcgcgctcctaggagaggtgtagcagaaagcagtgccccaggcctccacgcgacggtgaagcaggaaccaggggctgccagcagagcagcccaggtgcgtcgccttagggacagagctgccaagtgccgagctggggctgccagagccgagccgggaacggcatttgccagagccgaggcggaagccggagcatttgggggacgggaccgcgggaacccggaaacgcctgggctgcaccg

SEQ ID NO: 227336 - DNA, 551 bp, Homo sapiens
  chr1:100503350-100503901
  hyper
taatagcttaggacgtctgtttccgtgagcaggtaacaactttttgaaacaaattccctcatctgctgaagaagggggacaaaaacggcccctatcgcccagaaccgttgcgaggatttagctagctggtgacgccggagcacgaagttgtacaggtagccagcagcacccacgcgagcccgcggttaccctggccgcgcggctactgtagagtgggctggcggcgagcgggcggggcggtatcacgcgggaggggcggggcccgctcgtcggctgatcgcacgattgtgacgcgccgccggaggcaggccgggccctcaagatggcggcgggcgcccagagcggctcggcccggcagtagtggtgggacggcactagctgctggggcctgccgccccgggagtggctgcagcagcgccaggaatcgaggatggtaaaatgacccaggggaagaagaagaaacgggccgcgaaccgcagtatcatgctggccaagaagatcatcattaaggacggaggcacggtgagctgagttccgcgccggcgagcgtc

SEQ ID NO: 227337 - DNA, 248 bp, Homo sapiens
  chr1:100598145-100598393
  hyper
gagaggtaaccaccgggccctctgggttccctatccgcttcctaggggggccgactcgacacctaggtgcaaggtggatcccacgggccagaaccgccatctttccccattggcctgaccccaaccgccacccgcgggcactggatgacgcggaccttacctctcctcacagtctttgcatttcacctgcaacgggactagttggtggaacagcacttggctcatgttggctcgctgcctcggctggt

SEQ ID NO: 227338 - DNA, 94 bp, Homo sapiens
  chr1:100715388-100715482
  hyper
atgacaacagtgccgcaaactggagagactctcctcggcgcggcctatcaggagatgggaaacgcgcctccccctgggcgaccaatagggaggg

SEQ ID NO: 227339 - DNA, 305 bp, Homo sapiens
  chr1:100731302-100731607
  hyper
agataacacactccgcatacacaaacacgcacaccgcaaggaaccaaaggccaagagtatcaatgtaccagggcgcacacacttcgagagacaggttcggtgcatcgcaggatcccaatctttcttgcatcttcagctctaaaagtcggcacctcggggtatgccaggatcctcgagaaaacagatataaacacatatttacccacaaaacagagataaagcacaagcctgcgggataactggaggagttatcttacagttgagactttctgcaacctgcagattttgccgtgcccagggcacaa

SEQ ID NO: 227340 - DNA, 100 bp, Homo sapiens
  chr1:100816956-100817056
  hyper
gtagcgccattttcgtatggaagggactgcactctgattaggtacagccttaggacgcccagcgttcaagttgttcaaacagtacgtagagcctcgcaga

SEQ ID NO: 227341 - DNA, 65 bp, Homo sapiens
  chr1:100817825-100817890
  hyper
agcaattggtggacggcaacaaagccttagcaaccggctcctagtgacccgcggggcgcctggta

SEQ ID NO: 227342 - DNA, 70 bp, Homo sapiens
  chr1:101004540-101004610
  hyper
acatccacctcctccaccaccggtggctcgctgctgctgctctgcgaggaagaggagtcgtgggcgggcc

SEQ ID NO: 227343 - DNA, 70 bp, Homo sapiens
  chr1:101004790-101004860
  hyper
tgctcgggctcctgcccaccggctctgcggagccccccgcagactgggacggcgctgggggcagctaccg

SEQ ID NO: 227344 - DNA, 63 bp, Homo sapiens
  chr1:101491304-101491367
  hyper
gcaactgcaaaagcgccggctccgtgcagagaaaaggcccacgccgccggcctcacctacggt

SEQ ID NO: 227345 - DNA, 79 bp, Homo sapiens
  chr1:101491588-101491667
  hyper
tggcttaaacacccgcttcctaagcctgggtaagtgcagtagctcttcgctcgagaggagccacgtggaagagagtcgg

SEQ ID NO: 227346 - DNA, 219 bp, Homo sapiens
  chr1:101701719-101701938
  hyper
cccaacaccaaaaccggcgctggttcatttctctgtgcactctgggaaagccactgcccctcagaccgcagttgcgagtagcacgaggatctggggtggcggggggagtacaggaacctcccggttcattctccctcccgggctgcttgtctcctccgtacctctcgcagccccttcccagcctctcctccccagagcgccgccgacactcgccgggcc

SEQ ID NO: 227347 - DNA, 101 bp, Homo sapiens
  chr1:101702178-101702279
  hyper
ctgggcgagggcagtgatttatacagtagaatccaggggttaccgggctccgccccttctctctctctctttttttctttcatttgttgtttggggaggag

SEQ ID NO: 227348 - DNA, 88 bp, Homo sapiens
  chr1:101703555-101703643
  hyper
gtggggtgggggggcgcggggggaggcggggagaataagaagaagaaagaaaaggcagtcgcttcacggaggcgctaagctttcctgt

SEQ ID NO: 227349 - DNA, 622 bp, Homo sapiens
  chr1:101774905-101775527
  hyper
tttgccgcagcaaacgggaaaataccaatttagctctgtttgctgcagcttcgcagctttaccaggagagggcgccgacggacctgacttttgccttgcctcgcagtagagcccaactagagggtaaacagcagccacagtaagttctagctgttgcagaaataaattacaaatacatgtaggaaaaaggacttcaaaaggctgcggtatcaaagtggcagttaaagagaaggcaacgctcagagttgcaggtggagcagcggcggctgcatcagcgtctcaaattgcgaaaacattttgggctgaagtatttctttgtagcatttcgtggagcccctttcctttgatatacactagccttccgacttccctttgttcttttttcacacgtcaggttttatcgctgacaagctccaacgcgtcaaaggcgttagatctgagggctgcagcagccttcgcggttccgcattgagctccttcctgcagccctctgcggaggtcacggccacgtgtgggcagggaaggccccctacccacttcctcattcggacccgtcacctttagccggcgaccaccttttgatctcttgtgttgcacttgtgtcccccgtttctcctccagc

SEQ ID NO: 227350 - DNA, 215 bp, Homo sapiens
  chr1:102462482-102462697
  hyper
ggaagcagaggcggcggcagcagcagtagcaataacagcagcagcggcagcggcggcagccgccctggggggcgatcattccgcaggcattctcagagctaggagtccgggagctctagagagtgggttgggctgcagtgggcgctggccgcggtgctgaagcgcctccaacccgcgcgccccagtttaccctctcccccgctgctatatagcta

SEQ ID NO: 227351 - DNA, 138 bp, Homo sapiens
  chr1:103572600-103572738
  hyper
tttcgcctgccagtcgattctaaggcacctaacggaccgctccagccagatgccttttcgggaaagggcgggggaaagagggagggagaaggcggaggggaggagtgaagtcgctctccctccgtgggtactgacagg

SEQ ID NO: 227352 - DNA, 844 bp, Homo sapiens
  chr1:103573573-103574417
  hyper
agaagcagtaggaccgacggcaatctcccacctccccaaatccattttttcttacctcctctgacctctctagcttggaagaggaaggtcaatgcgagggttgttacggtgaaatcccagagccaccgtttcgttttccacctagaggaccacggctccatctccgagccccgcactcacaactgtgaactcaacccacgaaattgcgactgcagaccaacttcgtcctttccaaggtatcgccagggatgtttgctacacagccattggggagggagagggggaaaaagtcaaagggctttttcttctaaatttgatggtttgcgttcttcgtgtctctagccctttcctctccctctgagttggccccaccggccgggaccctccggccgcgaccctctgatccttcctctgccgggccctgccttcagaatgaaggcagatgaggggcttccaccaacaagctgagagtactgtgtgcccctaaaggcttcatgccgtcagtgggctggacgagtggctccgggcagccccctcctccgcccactcccctccctgctcccagctccccctcccagggcgaaactgacaagcaggctgagggtcagacccaatcacacgactctggggcggccccaagcccgcccccgcctccctcagcccaagaatgaggactccgagcaggcccagcccaccaaccaccccccatctccccactcctctcctccctcctcgcctaccaaatccccgagaaaaaatgggagggagttacgggggacgcgtgcttggctccagcactttgggaatgaaaggaattgcaggagagccccggagcacacggagt

SEQ ID NO: 227353 - DNA, 421 bp, Homo sapiens
  chr1:104068298-104068719
  hyper
gacggtcccagcccgcacatgcgcagtcgtgagtcctcttgtccttgagcgtcaaccttctttccctgaagtggctggggttcctgtttccttctttgattgacaacttgtgttaaccctcgcacatctctgggccaatttttgcttgtaagtctttccggagacccctggaatttaaatcattagcaccgcgcccttccccgaagagtcttcgaagggttgccgcttttcggtggcgcagttctcgcgagaaggtgactttctttctcggtatttcctggtttccagaatccttagcgcgaggcggaaaaaatatttctcccagcttgtgttgatgccgcgattttgactgagacttcttcccacgatttctgtttttgcttctccaaggaaaatggcagctcccgagcagccgcttgcg

SEQ ID NO: 227354 - DNA, 823 bp, Homo sapiens
  chr1:107599193-107600016
  hyper
caggagaccttccgcgccgccggccgggcgaccccgcaggaagtaggaaggacgagcgcgcactacaagtcccagaagcccccgtttcctggagcccgcgccgtgccgcgctacgcccgccgggagccgggcagagcggccaagatgtcgcagcccaagaaaagaaagcttgagtcggggggcggcggcgaaggaggggagggaactgaagaggaagatggcgcggagcgggaggcggccctggagcgaccccggaggactaagcgggaacgggaccagctgtactacgagtgctactcggacgtttcggtccacgaggagatgatcgcggaccgcgtccgcaccgatgcctaccgcctgggtatccttcggaactgggcagcactgcgaggcaagacggtactggacgtgggcgcgggcaccggcattctgagcatcttctgtgcccaggccggggcccggcgcgtgtacgcggtagaggccagcgccatctggcaacaggcccgggaggtggtgcggttcaacgggctggaggaccgggtgcacgtcctgccgggaccagtggagactgtagagttgccggaacaggtggatgccatcgtgagcgagtggatgggctacggactcctgcacgagtccatgctgagctccgtcctccacgcgcgaaccaagtggctgaaggagggcggtcttctcctgccggcctccgccgagctcttcatagcccccatcagcgaccagatgctggaatggcgcctgggcttctggagccaggtgaagcagcactatggtgtggacatgagctgcctggagggcttcgcca

SEQ ID NO: 227355 - DNA, 146 bp, Homo sapiens
  chr1:107600256-107600402
  hyper
tgtccacctcgccttttcacccggccactcactggaaacaggcgctcctctacctgaacgagccggtgcaagtggagcaagacacggacgtttcaggagagatcacgctgctgccctcccgggacaacccccgtcgcctgcgcgtg

SEQ ID NO: 227356 - DNA, 607 bp, Homo sapiens
  chr1:107682642-107683249
  hyper
gttactggaaacggcgcttctgtggaggagccgggggggatggggagtagagggagggggccctgttgcctcagcgccccgaggtcgtggagcggcagcagctgcagccggagcagcaccagcaacagcaacagcgagcgggacggagttaggaccgctcggagcgcacaggtctcgaggtagtataaggtttgctatccttccacttgctggcagttgcagaagaagatctgctttttaagtgaaacgtacatgccacccctccgagggctgcggcttccccgggcttgcttctttgccgctcctctttccggctctcgcgctcactctttaattggcactggcccctaagtttgccaggagctcgctgcccgctcggagcagggtcccggccgggagccgctggtgggggcggggagtccgggagccgcaatccagaagcgtcgtgggccatgtatatttcatcaaacggactttgggtgcgtcgcgtctcactgccatcagtgctatgtgcagtgacatttctgacttgagtggaggaatgcgcgaaggaaacccgggcgaaattggtattagaggatcttcttggcgccaatgctaattgtcc

SEQ ID NO: 227357 - DNA, 49 bp, Homo sapiens
  chr1:107684509-107684558
  hyper
aacaaaaaaaacaaaaaaacacttgccctattgccggccttggggatct

SEQ ID NO: 227358 - DNA, 827 bp, Homo sapiens
  chr1:108506277-108507104
  hyper
agctgaggctctgcgtcatagaggattagtgctgaaatgtgtcagggagagggctctgtcctctcccttttaagttgaaagcagtttggttttttgttttgttttaacattctgaaagagaaagaggctctgaaccgagtttaacatccttctgtacaaaaattttccgacaggacaaataaactactcttccactgaactgtgacttttgagctgactctagggtgcacccaaccttccagaggtgtctggcttaaccctcaaagaggcagctccagccccaggagccgaccggcaccacagcacctgagcagggcactgcaggaaggaaagcggaatctctagtgaaacttctcatttcctgtcgctgctgagagaggctggactcgctccttctcacatggcttaggaagagctgtaaacgggagcttgccggctggccaccagctcaggggccctgggggcggcctccgggttctgctccctgttcttccctttgaccaatgtcactcctggacagataacgggaccaaacgcccttcacttcctcgagtcctcatgtatgtcatggttcctcttttaggaaaacatgagtacaagacgcaaagcaaaagaagagactaaaggcaaattaccccatcacctcgtttcgtccctccccttcgttattatagaagagcttgatcaaattccctttgtcgcgccacacacacgcagagtaggtgaagggcaccctaagacaacttatttctttcccgcctcacagaaagcctttacgaaatcctcacaccatctccggacgcaaagctttcgcattcagcttgagg

SEQ ID NO: 227359 - DNA, 884 bp, Homo sapiens
  chr1:108742393-108743277
  hyper
ctgttaccggggtcgccggtcgcggccccacgcccgagtttctgaagccaccggagcgctgggcgccacagttcctccttcctctcctggcaacgcctcaagccgccgccctcctcggtcctcgcagtgtccccagcgcccgcagccctccctacgctcaggcggcgccccggcggcgacccacctcctcggcgtcctggcccagagggatgcccaggttcctgagcccctcctgcagctcgccgatgtccaccactccgtccccattgcggtccagtgcctggaagagggtctcgtagcgcgtcggctgctccgcgtcctggcaggccgcggtgggcagcacgaagtcccgcagccagcgcaacatggtcccagaggcgcaggcggcctggccgaggaagtcacgggagatcgagggctgcggggcgagaccgggaccagcgcgaggccgggctgggcggggcgcgcggcgcaacagcgtttggggcgccgtcggggttgcggctgcggcgcgcagggcgcagggcgcaggagcggagaccccacccgagcccgcgcggagcgcagggtgtggccgtcccgccgctgctggggaggagctcgccgcgctggcctcggcggcactggccgggcccgcctccagagagccggaagtgagggagctgggagctgggtctcgggaggtgctgtgcggacccggggtcgacctctgcccagttgccagtcccgctgtcagcatgcgggtccgaggaagaggcccccagcaggtccagggctgcagcgtcagcgcgtcggtggcttgggagcggggtcttgaagactggttactccacttaaagaccctctcgggccggagccttggcggtcagcccagagctgcttct

SEQ ID NO: 227360 - DNA, 116 bp, Homo sapiens
  chr1:109204223-109204339
  hyper
agcctccgctttcatcccagagcagtccacgggggccttaaaggaatgtaggctgggtgaagttggcccagtgacacctgcgttcagaaaaacgttctttccgctcccaacgcccc

SEQ ID NO: 227361 - DNA, 208 bp, Homo sapiens
  chr1:109234633-109234841
  hyper
ttagcaagcacaccgcagccatgcgaacccttcctggctcagctcccgacaaaagaaatcaagcccccagtcaaaatacaacaacaacggattaggcctacaaccctctcccccggcccccaaattctcaggagaaatcccctaagagtcaggtacggaggtcactgcagcgacttcagcgtgcagagaacgcggggacctaggaaga

SEQ ID NO: 227362 - DNA, 182 bp, Homo sapiens
  chr1:109235041-109235223
  hyper
gtcattttgtcggcgtcgggtgccctctcttgcccagctggggcacagcgaggcggccccttctcccgacgacgttcgatggagtagggtcccagaccgttgtcccgaagagcgagatcgagcttggccccctcccccccctccttccctccctccttccttccgccgcaacatggctaaca

SEQ ID NO: 227363 - DNA, 37 bp, Homo sapiens
  chr1:109584672-109584709
  hyper
cgtccgcccctcccggcccagcgactcctcagctcag

SEQ ID NO: 227364 - DNA, 171 bp, Homo sapiens
  chr1:109618424-109618595
  hyper
cccgaactctgtccgctgaattcactaaggcaagcagacccgatcctgaactctgcctccgctactgagcccgaaggagtgaagaaaagacaggttttggacagagacggtcactcaccgtggggtcttcttcctcatctgccatcccactagcacgccaactcacagcgt

SEQ ID NO: 227365 - DNA, 514 bp, Homo sapiens
  chr1:109632945-109633459
  hyper
tcatttcatttgcaacgttcagacgcagtctgactagatttccatccggagtaaggaagagcagctcaagggcagtcacggaggccgcaggtgcggcttcttcacccgcggtgctggagttctctcaagtggaagcccaggacgatgaaaacctcataggtaggctgctgcttacacacagcagccgccacggcgcaaaataaactacaaaactacaagcctttaccttttcaaacacactgacgcgggccagccccagccctacgcccgcaggggcacgcagaaaagacttagttaccacggccaagtacgaagccttcgagatagcgttcttcttaccctacgtaaacacgcagtttcccgagctcgacaatcggctagccactcctgatagcgttcggcgctcgcctctcggcccttgctcctgcgtactacggcttcttccagtcacctcggcccggatcgggaagtgtcaagcgggcgctcccccatctccgccgctattaccactgaa

SEQ ID NO: 227366 - DNA, 36 bp, Homo sapiens
  chr1:109642650-109642686
  hyper
ctatgttcccctccgagccacgcgagggcagcaacg

SEQ ID NO: 227367 - DNA, 210 bp, Homo sapiens
  chr1:109643170-109643380
  hyper
ttgatcagatagacgaggccgggcttgtccccggccactgattatcgaggcgattctgatctgggcacggccaccgggctgcgggctgccggtggcgtaggggcgagcacgtgaacggcggcggcgggcggggatgctgagcgcggtggccaagggtaaatgagccgctgcccctccccctggagctggaaggtcgcggaggcctttttg

SEQ ID NO: 227368 - DNA, 1106 bp, Homo sapiens
  chr1:109656101-109657207
  hyper
gcgcttgggaaattgcggctaaggcaaactcctcgcttaaactcggatcaactacagtgtcagggcttctcttctagccggttgtaaaagcacggatggatttggcgggatgtaagatctccaggagtggccttcgtaggagggaacacgtactggggcctcttccaggcgacgacgtctggagggtgatctctccatcttctttctctcggttcacacgccacgtgtgcaacatcggagatgctcataaaataacccctggcccgaaagggcagtagaaaacggaaatttgttggctggcttggaggatgcttccactgtgttcttcacacgagccccgggcctgcctgttgggccggttgcgcaccccgggcgcgcgctctcccgcgcccacgccgcgcgcaccagcggcggcggctgccatggcgacccgcaggtgagctgcagaggcgcgcgtggtccctgccccacccgcgcggagccagagaggaggcggttgtcaaggcgacgtgggtaggaggagaggacagagggaggaggaaggatgggcggtgttggcgtagccgcagggaggtgactgaagcgagcctggcctcttgcatcctccgcctgtgtacctccctcccctttttttccgccttctgccagcagaagcagcagccgcagcacctgagccgctactgccgctcactcaggacaacgctatggctgagcctgggcacagccaccatctctccgccagagtcaggggaagaactgagaggcgcataccccggctgtggcggctgctgctctgggctgggaccgccttccaggtgacccagggaacgggaccggagcttcatgcctgcaaagaggtactgccgcccccctacccgatcccgctttggtcacaaaagtcttggatccaggcggagaccttggggacccaggcgcagagagtttcagacgccacggagtttagatttctttggggatgaggcgtggggggagggaagaggagccagtctggcgtcatgaggaggccagcacattggaggactcacggatagatcatcctcacagattgggatgctgagctcagcgagaaaggtcccagccccaag

SEQ ID NO: 227369 - DNA, 83 bp, Homo sapiens
  chr1:109940753-109940836
  hyper
cggggcagagactgctgaggtcaaccccgcctcgcccggcgtctcccgggcccggcttgtggagttcacgtaggagcttctca

SEQ ID NO: 227370 - DNA, 210 bp, Homo sapiens
  chr1:109968966-109969176
  hyper
gaggcagcggctacgcggggattctgaggaccaacacgactccaccggcacccaactcaccggcagccaactcacccacacggccgcagtactaaggaccaactgcgcgtgcgaccgcgacctctttagcccgccctcctgtgcctgcttcctattggctggtagtagttcccgcctaggtgattgggccaacgcgcttcctcacgaggg

SEQ ID NO: 227371 - DNA, 49 bp, Homo sapiens
  chr1:109969513-109969562
  hyper
ggcggtaatgagtcggctacagtgggtctgagccggcgccgcggacgag

SEQ ID NO: 227372 - DNA, 1230 bp, Homo sapiens
  chr1:110008894-110010124
  hyper
aggagaaaaaccggcgctgggcagtttgcaatccaggaaaatagggaaggataaacctgaagcctgtgcgtccaggtgcgcctggctagggtttccgacggccgcggtgtctcggtggggaccggtcccggaggcttcggcgaggaggacccggagtcccccccgccccgcggcggaactaaccacggaggcctctggtccctttaaggtgcccggcgagcggagaaagggagcagagggggcgggaggagggttcgggagcgcacgccacgtgacccggcggccaagttcgctgcgagtttgacagaagtttgaatccgagtcgggggctttctgctgccggcggggcaccgcggcggccgcagcctctgagagcacgaacagcagcgcccccgcgtcccagccagccagccagccagactggactccggcccaccgacggccgctcgcgctccggccccgctcgcctgctctgccccggacctgcagctccccgctcccccgccgtgtccgccgcctcccggccagagagccaagccaccacgccgcgcccagcgctcgccgcgccagcatgtcctcgaccgagagcgccggccgcacggcggacaagtcgccgcgccagcaggtagtccctgcgcgcccaggactctcacccgcccctctccacctagatgtcgggctgcacacttatcccacccctggaccgcgtgtgagtggggcaaggggaccagcgccttcccagggttccccaccgccctgaccccccggccggctgtgtctccgcaggtggaccgcctactcgtggggctgcgctggcggcggctggaggagccgctgggcttcatcaaagttctccagtgggtgagtcgctgccccggccccgggctatttcgggagcctgggctgtgacgctgacctgaagcaatggagccagggtgggggctggggaggtgctgcggccgggccacggcggaagggtggggggcggcgacaggtgggcgggggaggggcgggctggggctgcttctccggacttagtggcaggagggtgaagagcgaggcatgcggagtcccggattcggtccttctatgtgcaaggagcctttgcccagggcgctcacatttcacccgggcgagaggacccgggtgtaacctttccagaactctgatcctgcacataccactccttggtgacgggaggggggagaaggacgacggggacgaggtccg

SEQ ID NO: 227373 - DNA, 101 bp, Homo sapiens
  chr1:110052079-110052180
  hyper
gggagctccgtcgcggcctctcccggcggcgcctcaccggccggcctgtcactgcgcccaccttacgcaggggcccgcgcccggcaccgtcgcctcccggg

SEQ ID NO: 227374 - DNA, 103 bp, Homo sapiens
  chr1:110090998-110091101
  hyper
caaatcaggtagccgaaaggtaaatgaggcttcaagttgggcggcgggcagcgaacttgacagaacctcgaaactctgcagatccgccgcccaacccagccgc

SEQ ID NO: 227375 - DNA, 172 bp, Homo sapiens
  chr1:110162331-110162503
  hyper
caagacccagggtcggctcaggccagccctaccgcggtgtggtggctgcccacgtggcgcccaggaagagaaaaaaatggcgaggcggggtcggcaggcggaggcggggccaggcgggggcggggccaagggccgcagagcctggcgcggagccggcgagattttggtgggg

SEQ ID NO: 227376 - DNA, 236 bp, Homo sapiens
  chr1:110185990-110186226
  hyper
actgtggtcagagccgtgccccttgcaggtgggtagcgctgagagcagagcagcgcccgcgggactggcctgaggatcccgcaggcaggagggaccccgcgggcctttccctacctgggaggtgcacggttggccaccagggcgcgctgctggactctccccagaaatcgggcggaggtttaggcctcagagtcacttaaacttgtaaccctaccggtagccgtggagtctagtaa

SEQ ID NO: 227377 - DNA, 208 bp, Homo sapiens
  chr1:110230511-110230719
  hyper
ggtactgggacatccgcggggtgagcgagggtccgctggacggtgggacgagggcgcaggggagggaagtgcgaagcagctgcgggacggactctagggaccgttcctcttcagggctgcccgcctcagaagggcctgtgcatgccgctgtgtgtgtgttgggggtgtgggcgggtagaggaggcaacgggtacgtgcagtgtaaact

SEQ ID NO: 227378 - DNA, 684 bp, Homo sapiens
  chr1:110282510-110283194
  hyper
aggcggatggcgtgcgccagctggggaagacagcggttcagcgactgcgcagctcccacccattcccaacccccgcccgctaacgttccccggcccggggctgccgagtccctgcgtcctgccggggcggtggttaagcggcccctaggcccggctccggcgtggtctcctccgcccctccccacagggcccgcgatcccagaggctgggcaggggtcgacatccgtggctcggcagctcgaaaaggctcccgcgtagagctgctcctgctggagatcgcggacccagagacccgccctctccgcgtcagtctctttgaccgagcggctctaccgttgagacggcactcaccccacgaatatcccagtacccgagaaccatagacgactcgcacgacatggtgacgggcttccgagccttcgaggactagggaaactgtgagcgggaggggctttatacccgacataagggggcggggcccacgcgcgggcgccctgactccgcctccgccccgttctccgtcccttgcctccgcggctccacagggccgtgcgcaggcgcgactaatgccggcgttggggttcagggcctggcgaccccgaggcgggacccgggcaggagtgctgcaggagagcaaaggacccgaggttgaggctcctcccttccccgcgggtgggagccaga

SEQ ID NO: 227379 - DNA, 88 bp, Homo sapiens
  chr1:110453864-110453952
  hyper
cggtggcggccctgcagctgcaccgggactgccaggcttccctgggaaacggagggctgctcaccccattgcacggaggggaacactg

SEQ ID NO: 227380 - DNA, 62 bp, Homo sapiens
  chr1:110526885-110526947
  hyper
ggaagtcacaaagcgttgtgcagaaaccagactactctgagtcagttctgccccctatgaag

SEQ ID NO: 227381 - DNA, 194 bp, Homo sapiens
  chr1:110526977-110527171
  hyper
gagctttaatccaaagggcctggggctgggccagtgagtgagtgggctgtctcgagccccggacatttcctaggaatcgctgtaggatgtgtcgtgtggggctctggtctttgctcccaaacacccctttcatgcgcctctgaggccttgccaggaaccccgcagcccaaagaccctccgttccgcagcatcgt

SEQ ID NO: 227382 - DNA, 84 bp, Homo sapiens
  chr1:110577102-110577186
  hyper
agacagaatatcgcgaggtattggtcagccaagatggcttctaacactggccgccacacttaatatggcggccagggaaatttc

SEQ ID NO: 227383 - DNA, 1773 bp, Homo sapiens
  chr1:110610426-110612199
  hyper
cgtgggcaggaccccggtgaggcctcggtgcccttcttgggggttctcagcgttggcccagaagcctcagcccgggtctaagaacttgggactctcctcgactttggcgatcggccgggtcatccggctcagggcctcagcggcagcgggcaaaactctagtaggagtctcttgccgagggcgtgtttcgacgtcagagccaaactcgggacagactagccaagcgcggacggcgcgagagtggctggcagcgccagcacgcagcctgggttcagagcaaggctgggcgctctcagcaaagggcggcctggggctgcgcgggcggcggactgcaggcgggagaagagcgaggtgcgccaggctctggggcgcgcaactgcccagcctcgtgaaagatcgcgccgcagatggggcgcagctgcgcgctcactcgtgtggactggaaacgctccgagccggttattttaaaaaccgggaaataaggcgggttccctcttcgcccgccacttcccaccaagtaggctgtgcggccctgggggctgactgtcctcaagcagccaggctccaccgcgcgccgcgctgcgccgaggtccgctctgccgcagggacgctggcagcccgttgaacaccggcaagagcgccagaggctagcggccgccaggatctctaccaggctctgctcgcacccgcctgcctccctttcgtttggcctgtcctccgttcaactgaaatcgttaattttcttacccccttgttctcattttgatatattctacgctttaaacatgctccgttttcttttgtttagtctgctccctccctctttgtcctttcccccttctctagttatccgtttcgttcgatcttgctcctgctttttttattcgttcgttcctcatttattcattttagttcatcccagctcgccgactgccatttaccctctcgttctcgccgcgctctccgttgttttgttcaatttcccttccccttttcttggttgtcgctcgctttctttggttttctttctcggtatttcgttgtcaaggccacccttgccgtcggatcccggggtgctgggtttctcccggccgctcgttccgcaccagcgctctctgcagttcgcgcggcaccggtgtggtccgggggcccgagctgtcggtgccggatgcggcgcgcctagcagggacgcgggcctgggggggtggctcctgcccgacgcggagcgctgagccaggccgggtacctgtctctggcggtgctcaccgcactgcgcggcctctgccgtctggctgggatcagaggagccaggccaactgcttctcattaagtcccaactgtggtttttatcaggaaagcctctttcaaagggcacagacacgaagctccgcggactcgttcatttcctccgttgacccacacacacctccccgccctcccctacacattcccaccgccccggctgggcgaaagccggagatgcccggccactccgtggaggcccgcgaggcgccagccgggcggcggcagggggttgaggcggatcttggaggatccagttctgggcctaggctgcgggatatggcagcgcagataaggtgggtgcagtgcggaagccgagacgccttacaggtcatagggtgcggcggacggccgcagagctgccgatcagcctgccaggcccctgccttcaggcgcattctcggatgccggcgcggtccagccggccttagcacagggcaccggcccgtgagcccgcggcgccagggggtt

SEQ ID NO: 227384 - DNA, 634 bp, Homo sapiens
  chr1:110612459-110613093
  hyper
ccgcagtccccagccgaccccgatttgaccactctaggttgaggcccagcctcagggccctcaaagggcgccagacacaaaagccgcgcttcttcgtcaggtctcagtgtggctccacagccctcggccgggtctgggcttcagggtaggtggcagttccagtccaacttcggcagagcatgctctctccttcccaggtccaactgctttcgggccccgactggactccgggccgtcgccactgcaccttccctcgacctcccgccttccattcccgccgccgaggaacggtggttcaccctcccgccccacactggcctttgcctggcccgggccagcgccaacccggcttccgtggaagccgtggcgaaaggcgagaggggcaaaaagttgagaaataggcgagcgggagagataagcaggaaggcccgggtgggcccgggtaaggaagaagaagagagggtcgggctgcgcgctacgccccgcgccgcgcgttaccttccgcggggccctcgtagaagtggccgccgttgagggccgggccgggcccgaggtcctgcaggtacttggcgggcggcttggccggctctgggaggtagggctccaggggcccgcaggccggaaagcgggtcag

SEQ ID NO: 227385 - DNA, 226 bp, Homo sapiens
  chr1:110626360-110626586
  hyper
ctgttccccaacttcggttccccctccgccaaaaccgtatgatattttagggaagcccctctttattcattagaaatcggctgctttgagtttggcccctaaaaacttgcctcctgccccggaagatttattttattaaatggtccacacctgaaagtaattgagtctcggcgtgggtgcggggactgcggagggagggtccaggcgcggcagcggcagtggcggc

SEQ ID NO: 227386 - DNA, 47 bp, Homo sapiens
  chr1:110626946-110626993
  hyper
tctctataaaaccagatcaaagggaacaggcgtttggtttcttccca

SEQ ID NO: 227387 - DNA, 558 bp, Homo sapiens
  chr1:110672763-110673321
  hyper
cttcccggctcccacgcctcttgctggggagggtggctcatttttcacgggtgccgcgtgactttccagactgtattttcagcctcggtttgacgtcaggctctcacggtcccaaaggatgggctttgtacatttccaggccgcagaccggagcctcccatccctttgggcctcttgggcggtccctacggccacctcccgcagctccctgggggcgggggaccgctggatgagggaggaggggaggtactggggggaaagggcggttggcgggaaggaagtccaggtgagacaggcccgcgttgggactatcgtgcgcggtatgtcggccggcaggtggggctggtccgggcgcaggaggcggtagagcaggagcagcagggggagccaggctggccgagctggggggtgagcacgtttgtctcaggcagctcatcgcctgacacccccgggaacgggctctgccccaaggcctaaaatgagggaagatgaggaaatgggggtggggacgatggagaggatggaaggggcggcgggggggtgcggtggtctgcgcgg

SEQ ID NO: 227388 - DNA, 132 bp, Homo sapiens
  chr1:110694037-110694169
  hyper
ggtcctcgctggattcggagctagcagagagcccttcctccctcgtgggaagcgcatctggggaacggaatggctgagacaggggacgtgcgtgtggtgcccatctggagggggcgccgtcctggcgggtcg

SEQ ID NO: 227389 - DNA, 139 bp, Homo sapiens
  chr1:110752409-110752548
  hyper
ttgggcctccgaggcgcaggatgcggggcggggtggtcagaaggccccaacacggtccctgggaaaggagagggcagcctgatcctcgcgacagcgtctctaccctctttcttccttggccttccgtcagccgcagtga

SEQ ID NO: 227390 - DNA, 117 bp, Homo sapiens
  chr1:110753510-110753627
  hyper
ggggggaagaggccacatgccgccgccgccgcctcgtgttgaccgcaagcagcccgggcccacggagctccggctgccgtgagagtgtcggcctggccccggcagccgctcggagga

SEQ ID NO: 227391 - DNA, 102 bp, Homo sapiens
  chr1:110753807-110753909
  hyper
gcgtttgtgtgtcccgtcgtagcgggggaccgcgtgtgtgcttgcttctacttccccgggtcctccctctctgcgcctccctctctccggagcttcctgccc

SEQ ID NO: 227392 - DNA, 166 bp, Homo sapiens
  chr1:110754569-110754735
  hyper
agcaccgcgacgccgaggaggcgctcgacatcttcgagagcccggacggaggcggcagcggcgcggggcccagcgacgaggccggcgacgatgagcgggagctggccctgcagcgactgggcccccacgagggaggcgcgggccatggcgccgggtctgggggctg

SEQ ID NO: 227393 - DNA, 218 bp, Homo sapiens
  chr1:110880352-110880570
  hyper
tagggttgaggaccggatcaatacaagaatcctcataacctccgccccggcgcgaacctgggagggctgcagacagtctaaaggctgtggtgacctcagcgctgcgtccctccagcaaccggcgagtgctggggcacaggccatacccccctaagctcggcatcgcctgcacctctcacaggtgctctgtccgccacagtaacgcactatggaaagga

SEQ ID NO: 227394 - DNA, 357 bp, Homo sapiens
  chr1:110881806-110882163
  hyper
acactttgggtcacgtgaccgcagagtgcgaggggcggagctacagtctggcgcgaggaaccgttaagatagacaacaaatgtaaccaatgaggtactccgactagggggttgggaacccaataacagtggttgggcgggcgccttcctggagcgcggggagatgtaaagatagacaaataattttcccaatgagactgtagaagagagagcaattggccaatgaggactgcggggcgggaccctgtgccgcggcggagtccaagatggcggcgtgcggttccgctgtgtgaaacgagcgcggggcggcgggttactcagctccgcggagacgacctccgacgacccgcaacaatga

SEQ ID NO: 227395 - DNA, 270 bp, Homo sapiens
  chr1:111097874-111098144
  hyper
cggtcggaactcagcgctgcggaagccggtgtatctgagtctctccacgtggctctacttttctgcagccctgtagaaataaacctgggtcctcgctccctggcctggggaaggaggtctgcaggggtctgtgggggccctggaggcgccttcccagctgcacaggctcagtcggaccagcagaggtcactgcgtgggaaagagtggggcgccaacccgcgcagagcccagccggcgaccgcccccgcgtccccgcggagctccctgcct

SEQ ID NO: 227396 - DNA, 103 bp, Homo sapiens
  chr1:111149268-111149371
  hyper
agttcagctcttaagcccccggcgtccagccgagggaccgccgaggctcagtgtccaacccaaaatcccggaacctgatctctgggggtggggagtagcctgc

SEQ ID NO: 227397 - DNA, 581 bp, Homo sapiens
  chr1:111149611-111150192
  hyper
ccgccccgcgccacgcaaaccccagagggtcccgagcccattctgtgcactcttcttgagcagggtgcaagttccccttgatctccccggtctgggacctgccgagcagacggcagtggtcggcaagggcttgccgccgcggactcagcccaagcctgctgcgctgcaggctgcgccgccgggtgccccgcagcccctctgggcgccgcagccgggcagggaaggcagcacgcgccgcgcaacgccccgacacggatttacccttccggatgggcaccggggcctccatgttcctaggttacggccagcgccggcagaaccccggcagcgggcggcggcggggtgcgggcggccagccgggagccggctctgcagtcccgcgggcggcgcgtacggagctcccggccgccgcccgcagccgcaccgcgccacgcagcgccgcacctggctcgacggcgaactcgaattaaaggggccggcgggggccggggccggggccggggcgacaagctgccctccgccgccaccgagctcgtcacctcgttgggcccccgggcctcagcccccgccccgcgaggaaa

SEQ ID NO: 227398 - DNA, 97 bp, Homo sapiens
  chr1:111216715-111216812
  hyper
acgatggcgatgccccgggccggcccggagctctcggggtactcgaagagcagccacacctggcgctggaagtcgcggcggggcaagggccgctcct

SEQ ID NO: 227399 - DNA, 40 bp, Homo sapiens; identical to SEQ ID NO: 197700
  chr1:111289414-111289454
  hyper

SEQ ID NO: 227400 - DNA, 1080 bp, Homo sapiens
  chr1:111505935-111507015
  hyper
tcacataagagcgtcggccatcttggttttcatctcccgtggagatctactcggtccgcctattaaacttgagacgctggggtcccgcggagccgctgtgtcaggctctaaagaggttttacatttcccagaggaaagcgctctatgggctttaagcgccgcggagacaagcgcttcccgcctgggtggcgcactctgcgggctccaactcctctcaactacacagcgtccggaaacgacggccgactccacatccctaagacggacagaggggcagccgtggggaggattcgaaaccggtacttaccaacgcgaggcgttgcctgaattttcctctgcgggtttcaggaagaccctccgtaggttatttgacattttagtggggagaaaggggacacctcatccagaaaagtgggaagcgtggggccgagtttcccaatggggcgagaaccagagcgagggaatgttgggctggagttgcccacagcaactgtgaggggttcgaccttaacggagggcgacagcgggctctcgagagggtgtatccccaggcttcgggacgaggtcgcgcaccgcgcagaaaccggaaggctcctggcggtggactgcgccctcacagccctacgctgagagagaatcggcgtgagtctccgccctcagagcctacgacaactctccagactccgccggagcaggcgcagggggcgtggccttggtggcaccacccccaacagagcctggtcagtgctgaagactgcgtcagtctggctctgccgccccgcccactgaagccgatagctggagcaaagctcggtcgggcgtcttccggggtcgtcacgtccggttgccaaggtgactggctcgctaaagcccaacccttatgatgcaatccaatggcaagtgatatttgctatcttttcttccggatcaaggaacaaatcgcaaaagaaagctctcccgacacctacgcaaaataaaatgtttccggggtcaatcataaattttctgcttctgtgctcgccgctagcgtacgtttttctctcccgtcagtgcattaaaagacatcggcgcgcttttttg

SEQ ID NO: 227401 - DNA, 88 bp, Homo sapiens
  chr1:111682579-111682667
  hyper
tcccaccctctgacgcacccttctagagggagcgggctgcaagcgctggggcctgtcccttctcccctacttcgacttaccttaccag

SEQ ID NO: 227402 - DNA, 260 bp, Homo sapiens
  chr1:111683181-111683441
  hyper
ggcggagcgccggcgcgggagccggggggctgttgtgtgggagcccaaggtaggggtgggaagaaccgtggagggccagcgctgagcgggccgagggctgggagcgctacccgtgccgaacggaccttgcttgtcaggtccacaccctcctgcccgaatgctggcaagtccacacaccgtgtggcatcctctgccgggtttgtctccccttaggaatgcggtgctgatgtttgtggctgggacgcgcttctggtcagcaa

SEQ ID NO: 227403 - DNA, 748 bp, Homo sapiens
  chr1:111746591-111747339
  hyper
tttcaggcacactgcggttgcaccacaagcttcctggatggaaggacacgtggccccggggccccacaacggcttcctgtgtcccgccgcctccccctcgccccctcaggcctggcctcgccgtccccgcccccacctgaccctcttcccctctccgcgcgctccttcccgctcacctgcccccgcgcagcctcctgagtccccttccaactgctcccggatctcgacgccccgtgccgccctccaccgggccccagccgccagccctagccccggctccccggtgcccacgccgtccccccgcgctctccccggccggcactaacccccatggccgcgcttcagtctcaggctggctcgaaggcggcggccgagcccatccatggcccctggagtgcccggctcccgctcccagctccgcgctggccccgcccccctatccttgacctccgcgggtccgacactttcactttcacgcggggggaggcctaggggacaggttcggggcggcgcggcgcaccttccggactccggcccaacccccgggcgcacctgggcgggcccgctctgccctcgccctgggcagggcagcgtggggtggaagagggcgctcgacgcgcgtccgggactgggcggcgccacctcgttcccaccctccgtggggctcccggggaggcttgacttagcgaacaccctgcagtccgcaaaagcgcatgtcctggctgaaatcaccgtcttccaggtggcc

SEQ ID NO: 227404 - DNA, 271 bp, Homo sapiens
  chr1:111813494-111813765
  hyper
ccaccggtgagtcccgggtggcctagggtaaggcggaccgggagccacctcacacccacacagcctgcgggaaggatccgacaaggtgagggtagccccgcgcggggccgcaacagcctattcctcccgtgtgtgacgaccccagccagagagaacccaacctgagtgccagcgagagcctgtccttggtcgctccgacccctcgccaggggatgtccggtaggaatagcactgagctgatgtgacggcgcggaggcgccaaaatctccac

SEQ ID NO: 227405 - DNA, 155 bp, Homo sapiens
  chr1:111889101-111889256
  hyper
gggctccaaggtgcgggttcctgccccagtagtggctcggtggacgccccaacttgccgcgcaggcgcgctcgggccctctccccctccccgcgctccgcagctgggaatcacgggactagccttcgtttccttggcaacgcagtacacaagtgc

SEQ ID NO: 227406 - DNA, 279 bp, Homo sapiens
  chr1:111991909-111992188
  hyper
actctacttctcgcgagaattgcttctatggctccatcctgctttccggctgtcgccctcatgcgataggctctcagcgttacttgactcttctcgcgataattttttttaaaaatctcccaaggaaagttgaaggaagagtacaaaattttcatctcgcgagacttgtgagcggccatcttggtcctgccctgacagattctcctatcggggtcacagggacgctaagattgctacctggactttcgttgaccatgctgtcccgggtggtactttccg

SEQ ID NO: 227407 - DNA, 264 bp, Homo sapiens
  chr1:112531585-112531849
  hyper
ccccggggccgcgacggcccttggcgtcacgtagagacctttcccagagctcgcggggtggaagtggcgtcgggcaggaccagatggactggcccccagcctctggtagacacaccgccggctcgccgagctggagaactttgcgaagcgccccaaaccgctccgggtttccactttcagccatttctctccttgtcccctcaccaagagcggggacggagcaagccttcgccacctgtctctggcacccgccgagggaagaca

SEQ ID NO: 227408 - DNA, 145 bp, Homo sapiens
  chr1:112532138-112532283
  hyper
cagcccgggccccgcgcccggcgccccgcgcgcgcgaggaagctgcggccgggagccggggccgcggaggcgccgagcgcccagcagcgcggggaagcgcccagcagccgccgctcgcgcggctcctcctcgccagcgcagtctc

SEQ ID NO: 227409 - DNA, 827 bp, Homo sapiens
  chr1:112532952-112533779
  hyper
cggagtgtaccgacgcgggtgtgagcgcgtgtgccagcgagggtgggcacgggggtgagcgtggcaaggtgagctgggtttgggggtgggggaggagcagggagtacggcgtgagcgtaagttcgggggcgtgtgtggctggggacccacggagaggtggcagggagggccggcgtgtgcgcgcgtggggtatgtgtgcacctagctgtgtgtctatttctcgctgactgtccacagggcagcagcacctgcttgagaccaagcccggcgacctggcaaggtggggccccctaccgcgcaatctttgcggctggcccccggctctcagctccgagtgcagaggctgaagaggtacccgggggacacactgcctctaaccccacctatgagccgctctcctctcggaggacgaaggcaccatcagaaggtcgagattcgccctcctctcccgccacgtctacccactacctagaccgggagtctggacttgggagcgtgaactctcacccgagccggtccccttacaactggagcccgcccagcccctcagtccctccctgaagcccatgggtccccactgctccgtgcctcgtcgacccaggatggggagtgggaaggtcagcatgtgcccacagggccaggtgtccggcccagattcccaccctcagggcggcggcgcgcaaagggcgcagtccccgccgctgggcggacccgcggctccggctttcccggtgtctccagcctcggtgcccggaatcctggatctcggcctggcgctccggaagcgaggcagctccgtgccccagcagggacggggaacgcttggc

SEQ ID NO: 227410 - DNA, 35 bp, Homo sapiens; identical to SEQ ID NO: 197705
  chr1:112938562-112938597
  hyper

SEQ ID NO: 227411 - DNA, 165 bp, Homo sapiens
  chr1:112939042-112939207
  hyper
tcccggtattccccgaggaggcggctcctcatcctccgagggtcctcacagctactttttgtccctcgtcgattcccagctcctcagaaggggcttccctctgacacccctcattcaaaggcacctcccaccccgcacctcagccttggcggagaggactcacag

SEQ ID NO: 227412 - DNA, 195 bp, Homo sapiens
  chr1:113008785-113008980
  hyper
gtgggtgaaggggcggtgatagaagttgcttgtctagattggaagccatgtggttctgacgccaaggcccggctgcaacgtgcccgacgggctactccgggctggcagccccgcccttcttcggaaagctgacttacttgcgccccctggtgtttcacatgctgtgaatctctcacgaccgaggtctggccgcgc

SEQ ID NO: 227413 - DNA, 179 bp, Homo sapiens
  chr1:113052013-113052192
  hyper
cttctgctcctgctgctgctgacgctgccggcccgcgtagacacgtcctggtggtaagtgtggctctcaggctgggcgggtgaggcgcttggtaggagaggccggaggcgcctggagggactggctgctcacgggaccaggctgttgcttcgacgggttggagacgattcgggcaggac

SEQ ID NO: 227414 - DNA, 119 bp, Homo sapiens
  chr1:113162277-113162396
  hyper
ctacttcctggggcgcgggcgcgggcgctggcgttaggagacgtcactcccgcgcataactgacatggggccctcttggtcggcgtttccgggcgggtccttccgacggccgccgcggt

SEQ ID NO: 227415 - DNA, 436 bp, Homo sapiens
  chr1:113216760-113217196
  hyper
gaatgcaacgaagcgcccaaatatgtggctcaggggtaagggtcggtcaccagcctttccacataagccgatgtggcagagaaaagcaattactgtgtatcctggcagagccccttgtccctccctcccacacgtacacacctttatctcagagacactgggttcttttccccaaacttctttgacccttatgccaactacgtgcgtctgaaagcccgagaagggaaaatgggggagggggcgtgtcgccccgagtttacgtccctggaaggctgggggaggcgctggatgagcttccccattccggccgcagccgacctagatcccagccctgccctttgctctcctgcttttcactgagtcccgaggctctggagggtgggcgtgagggtagccctggctgaggctcggaggtcctcccgggctgttcagaggg

SEQ ID NO: 227416 - DNA, 160 bp, Homo sapiens
  chr1:113249975-113250135
  hyper
agcggggggagcacgacccgggtggactcagactctgcccagccttcaatcccctaggggaggaccggcgtcgggaaagttaagaggtgctcggggtggggtcaggaagggccgctgctgccctcctgtggccaagcggccacccgctcctgctgcacct

SEQ ID NO: 227417 - DNA, 657 bp, Homo sapiens
  chr1:113256960-113257617
  hyper
ccagccggccgctccgggcagggggtccgcttctttgccaggccagcacgagttggcaggctgaagggcatctaaatgggaccctcctctaccccgggcgtccccctccccgctcctggggaagctggcggcctcctggtgtcgcgggctatttctgggtgtggagggggaggggaactacggtaagagggacagggaactggggcgctggagccgggaagcgggtgagcgagtcttcccaaccgctatgtcccctattaaaaagaaccccgctccttcgtgaaaccccttttcccttagcctttaagctgccgggccgcgacggggaactggccaactcatccttcgccgggctctccgccctccgggctctggggcagaacagggtcctgaggcggcgtgggcgagggcagtcaatgagcgggaaggacgtgaagaaggtgacacaggctgccccccactggaaaatgggttgggagggggtgcggcccgaagaccagaggatagcaaaggtccacggaaaagggagctcctggcccggacgcggcgtggggaacgcgtcctagcgccggggatgcggagctggggagaggggtgggagccccatcctggtttgggtgccccagggggcgctcactcggcgtagcctgtgctcca

SEQ ID NO: 227418 - DNA, 140 bp, Homo sapiens; identical to SEQ ID NO: 197710
  chr1:113258352-113258492
  hyper

SEQ ID NO: 227419 - DNA, 157 bp, Homo sapiens
  chr1:113286990-113287147
  hyper
gtgggcgcggcgttcggggtcctccgggagcaggtgcgaaggacgtgtctggagtctgtcgtctggacctctggcctctgggtgcgcagcaacccctcgcggcaggattgcaaccgcggaggcctgcagctgtgactaaactcgcgcctcctccgcc

SEQ ID NO: 227420 - DNA, 643 bp, Homo sapiens
  chr1:113392152-113392795
  hyper
ctagcgccgcgctccgaggtcacgcagctgcctgcgaagccctcagtgaggccgcctcccaccccctggagacgtggtctcccctcccgcgagggtccctccgaccccacccgggcaactagggcaccgcgggctgttacccaactaaccattaagcgcggagccgagcgcgtgcgtggcacggagaggcggggcgggtctggtctgcgctctcggcaccatgcggcccccaagacgtagagcttccctgcctcggtttgaagggaccgctgggctgcctgattacgcgcccccggccgagcctgcgcactggggacgcagtcggccctcgcgtcctctgctgcccgaaacaagcgcgtggaaagcttggtcggggcttctcacagccgcgcgcacagactggttctccccccgcgtctcccgggagcgtcgccgccacctgcacgcgtccggcacacaaacgtcggtctcaccccttagtttctggaagagaaaaaggaaaagccaccgagaggcctgaccctgaggggtcggggggagatgcgggcgcgtagtagagggaagcgactgaggagcggggactgggcagcatttgaatggatgcgggtgccgctggcacccgggaagacgcctgggagccggc

SEQ ID NO: 227421 - DNA, 757 bp, Homo sapiens
  chr1:113497849-113498606
  hyper
aaagtaataaaatgttaaaacgcatgctggaaaaaaaaaaagacgtacttggaacaaaaaacttgcatcggaccaagtgtaacgctatcctccagatttctctcaacagggccgccttaagtccatgagtagaagggcgctgcggcggacgctggcagccacaggttgaatgacaaagagcccccgtcagcaccactcccaggagtctgcgggctgccccgtcccctccgcaaagtctactcgaaccctgcagtcacgccttggctgtggggaatgcggctctccgcaccactctcgcaagtcaccaggtggggcaaggatcggcgggccaagaaggttggggcggacaatgtcacgaatcataaataacttctgccccgagtcccttcccttggggcagaagcggccaggagagtctggaggtaccacatgcagcagcctcatgttatcccttttccagatcaaagcatctctcgaggagcctattgaagacttaggggggaagggacttccccaccgtcaccgggcaccacgacccaactcctcggccaggcctgggaccggcatcttagcacggggcccgcggctcggctaagagaggcgctgaccccagcgcctcaaggtctccttcaccagcactgcagtccgaggccacgcggctgcctgtgaccacgatgccctctgctgggccgcctccctccgccggagacaaagtctcccaaccccggaggtcccctccgaccccaccagggcagcg

SEQ ID NO: 227422 - DNA, 64 bp, Homo sapiens
  chr1:113498966-113499030
  hyper
gcgccctctagctcgcccgcgcgcgccggcgccccctccccgccacgtgaccggcgtcccagtc

SEQ ID NO: 227423 - DNA, 254 bp, Homo sapiens
  chr1:114354449-114354703
  hyper
atggtgcttgtgccgctccttgtggcccttatgcttgggcccggccgcgctcaccgtcagaggcgagaaggtgaagagggccgaggtgcttggggccgggagaggggcagcgacagcgggcccggcgggtgccagcgaaggtggcggcggaggcggcaggagaagaggctcaacagggcctgggacagttggggctgcattcgttggcggcagcggcccaggatgttggcggctgcgacgccgccggtgagggg

SEQ ID NO: 227424 - DNA, 84 bp, Homo sapiens; identical to SEQ ID NO: 197717
  chr1:114355230-114355314
  hyper

SEQ ID NO: 227425 - DNA, 155 bp, Homo sapiens
  chr1:114471834-114471989
  hyper
ggtaatccctcaccggcagtgaagctcctctgctaggcactgtcgtcccgtacactgcccaagctctgggggtgtcacactaaactgtggtgatgtcacactagctgggatgacattttacagttggatcccgtaccaccgccaggcacctttaa

SEQ ID NO: 227426 - DNA, 117 bp, Homo sapiens
  chr1:114695296-114695413
  hyper
gcgacacgccattccccctgccgcgactccccggagacgccgcagctgcgcgccagggtccagcccggcggggatcgggctcgggactcacccgctccggcgagctcgactcagctc

SEQ ID NO: 227427 - DNA, 113 bp, Homo sapiens
  chr1:114695593-114695706
  hyper
gggaaggacgccgcaacaccctcataccctcccccaccccgccccctgtcccccgccccccagcggagacgcggaaaaccactcgcagccggagagacacccggacacaaaga

SEQ ID NO: 227428 - DNA, 1172 bp, Homo sapiens
  chr1:114696006-114697178
  hyper
aatacaggagggccgggggcttctaccccaacctccgctccccttcgggtctctcctggctgtgcaagcgatgggccagagggctggacgaggctggctcccaatccagaatcccgagctggggagttctctctaggttctggggctcctgggaccggggctttggggaagggagatcgcaggacggatatccaggaagggagggggccctgggtctcccgttacctgcgcctgccgcgctgggactccgctctgggggctgcagctcgaagctccgacaagtctccacgtccagcccgagagggggcggccgggcccggcacagcgaggcgaggaccgcgagcgcctcctggcaccgaggcccgccggccccccacactccgctcatgccctagacacccaggcttgccgagcagcagctcgaacccgcgccccggccgcactggggcggggcacgacggccccaagaagaccctccctgcagcggccccctgcggctccgctctgcttttaatcacttccccgcagggtccccgcccctcacgtggcatcccgcggcagctggcgagtctggcgcctcgcggccgccccctctacactcagggactggcctgagtccggggggtgggggtttcgaggcgggaagccgggctgtcccgaatctcggagggtgcaaggccaggaaagagtccgggttcccactccgcattcactgcctggtgtgaccttgggcgtctctgagcctcaattttcctctccgtaaaggaggtgtaatgattttaagtacttcacggactccctggggatagaaagatcgtgtttgtgaaaacactgggtaaactgccacatgccacacgaatgacagagaaatagataaccccgtaacagaaagagcgacggtcaggcagggtctgggaggaccttggccgaggttcctgacgggagcagttagactggcccccgagtcccagcttcggaggtagaagaccccaagacaggcgggcgatgcgaactgcaagactttccgagctccgcaatcctgcggtccgcggtacccgcatgttgctatggcgacgggaggcagcggccgtctctctccatggcaacgggagggaaaagtttctggcaaacaggaatggggggtcatttcaagagggcgcagggcgctcagt

SEQ ID NO: 227429 - DNA, 477 bp, Homo sapiens
  chr1:114697443-114697920
  hyper
tgatctacacctgtcggcggtggggccccttctgtgtggggctcgcctgaagccccagactcaggtccatttgctctcccggagctgggaaggaagctttagctgcagcccctggaggctgctgggttggtgtatgcccgagtggctggcgagggagaaaggtcttgcctcttaattaacacgcttattggaagtgactcgggcagtgactcacgttccggagggaggagattcggagccttagctcctggcggtctccactgcgcgccatctgtgccaaccggcccttggacttgcgatcccctagcagctggtgcctggggcaccaagggctaaggcaaggcctgtgaggaccctggcccagccaggcggcttttccaccgtgaggcgccccctggctctgtccacggtgctgaagacccagttggtgctaccatcgcgtgggcataagtttaggggacgagggagaggcaattg

SEQ ID NO: 227430 - DNA, 99 bp, Homo sapiens
  chr1:115053407-115053506
  hyper
ggcgtcgatactgcgcccccggcaactccagtgcccactgaggccgcaggagatgaagcagcctgggccgagcccgaggaggccgcggccacccccccg

SEQ ID NO: 227431 - DNA, 275 bp, Homo sapiens; identical to SEQ ID NO: 197719
  chr1:115124231-115124506
  hyper

SEQ ID NO: 227432 - DNA, 629 bp, Homo sapiens
  chr1:115212645-115213274
  hyper
cccgggtatcactcgggtccgctccgtcccgcccccgcaggccctgccgaaggccccgtcccggctgcagccccaccccctagccccgccctccctggcaaggctcagttcttattggctcctattcccacccctcacgctatgcccgcctccgacaccgccccggccggcggtgaggggaaccaccacgcctcaagtccgctgtatggccagaaccttgccaggacctcggtcactgcagttccagcaggcgggcgaccagtgtcaccgtcgtccggccaagccctcgagccagagctccatcgccttcgcctgccgtcgcatcggccccacggagacggccctatgcttcatgtgaaggtttactcttcacaactactcaacaagataaagcctggcttaatcagggaatccaagcactgtttcctaggctgacctcagtgagcaaacaattgcactacggtgccaacttgaaacgtcaagagaagcaaataactctcgcggcacctcaggcttggaatctcagaacgggggtgccttgatactcccagtgcgtgaggtcagcccccacgccctgttgagacacacatgcctaagcgctccgcctgcaacacgctcttgcttaggta

SEQ ID NO: 227433 - DNA, 195 bp, Homo sapiens
  chr1:115323253-115323448
  hyper
ccgggctcagctacgcgactcgctcagatcttctgggagtctgtctcagcattacaggcgtcatttccgggcacgtttacaaggtgtcttggtaggcgcaatgggcgcctgcgcagtggcagcctattttgcgggttgacccgctttaacctgcggcttccttgcagtccttccttgcgcggagccccagaccta

SEQ ID NO: 227434 - DNA, 905 bp, Homo sapiens
  chr1:115631836-115632741
  hyper
gtttgccttctcctcgcctccgcgtttgagcacccagccctccccacgagcgcgactcggacgccgcagtcagcagctcggggaccccggccccgcgcccgccacccggccccctgccctgaccggccctcccggctcctggtctcacccagaagagcaggttgaagccaagcagcaggtacttgatgcaccgcaggcccccgcggaagcgccccatgctgcggcccggcggcgggatccccagtccccaggcccgcgctacgagcgcggggagcggcaggctccggcggggagggggcggagcggggaggaccggggcggggcctccggggggcggggcggggcccggcggggaggggcgcgtggaccccaagcggcgtggctggcgacgggtgggggcgccagcgggtggagatcgagcagcccgagggagcacgttcgctcttctcccggacccagggaccaccttccttccctccagtgggcgcaccgccgccggctatcggagcacctgcagggcgggagcgcccaccggggactggggacccatttaatcagcgccctgtgcggagaccggtttgaggcccgggcgatgcttgagggataagcacttggtctcgtggctatggaaatctaggaaggtgacctcgggtagaagagctaagtggggtcggaggttgccccgaagctggcaggaccagtcgcggggcacctgactgagtgtccagggctgcggctccgcggcgcggagcaagcacacaagcagcttctaggggaccctccctccggcccctcccccctcctcgggggactcttaccttaataggcaagaactgagagagggtgcgggaggcggcgccctgagtcctgtgggctgccctcaacccagccggccagtggaggga

SEQ ID NO: 227435 - DNA, 167 bp, Homo sapiens
  chr1:115880473-115880640
  hyper
ctcacttgcgcgttatccacttctagccctcgagctagaccctggcatggccgtgggcttctgcaggcgccagggctgctccctggactgcaggccatcctgggactagggactccacgaccagaactaacgctgttccctcggtccgactcgtcctcccgcgaggg

SEQ ID NO: 227436 - DNA, 130 bp, Homo sapiens
  chr1:115880820-115880950
  hyper
tcaccgctgcgctcccctccggctcccagcgctctctgctgtgccggagcgccgagctgctctcacacaggcttcttgaattcttagcccctcctcccgtactcctgagtcacacgctccaaatcctggc

SEQ ID NO: 227437 - DNA, 65 bp, Homo sapiens
  chr1:115881153-115881218
  hyper
agtttctggggcaccggcaggggtcgttgggccgactggctggggctgggcggagttgctcgcag

SEQ ID NO: 227438 - DNA, 33 bp, Homo sapiens
  chr1:116185541-116185574
  hyper
agcagtggggcggagccgcggcctggctgctgt

SEQ ID NO: 227439 - DNA, 551 bp, Homo sapiens
  chr1:116370915-116371466
  hyper
caaggtcccgtggccgcgatcccacctgcggcgtccgcgtccgcccgctctccctgaggtctgcaccctgagaggaggggcgagcgagccaacttggggcagggatcaccgtgtccacaggcgcccactggtgtggcgtcctgagagtgcgtgcgtgagcgagcgagcggcttatcctagactgaagacccagggaaacagatctgtgtggaggatgtttctgttttcagcagaacagacgcagcccccgagtcagtgccgtcagaagacacgtcagtcaattcagtggaaaacacttccagtgtgaggcgttcgccggcgccccttagacgcggccgggtctgaggcgcctgccgagcgaggtggcgcggcccgggagctgtggtcgaagcccctgggcctggcgtgtaggctgcgcgggcggcggcgggctgggggcggggctctccgccctccgcgcgggtccgcctggcccctcccccgcccaccccgcgcccgtcccgcctcccccaccttctcccagaggaggtgacagacgggcctgtaatttg

SEQ ID NO: 227440 - DNA, 57 bp, Homo sapiens
  chr1:116380575-116380632
  hyper
gcaccccgccctacacgtccaggacgtggttgagataggagatgtagcagatggcca

SEQ ID NO: 227441 - DNA, 116 bp, Homo sapiens
  chr1:116380992-116381108
  hyper
ttttggaggctgaggaggggtcggaaaattaatcagtaaaaggaatcagggtattttgctggaaggatggctgccgaggcctaccacgccggtcctcccagcggacgcgcggcccg

SEQ ID NO: 227442 - DNA, 1217 bp, Homo sapiens
  chr1:116381288-116382505
  hyper
ggcctggggaacaaccgcaggcctgtggggtcgcgactgggtttttgtgcctcttccggccaaatgccaaccgcgctattcctcctccctcccttcgtccccttcccggacaaacgagcgatttcgaacaacgaatacatctgggttttcacgggggcggggagacgcggggtgcacttctcgccccgagggcctccggcgaagcaacccggcagccgcggcgcccgagggcctggcgctggtctggggctgcgccgggggcgcctggctctggggtgcggccggtcaggaatccccatcctggagcgcaggcggagagccagtggctgggggcgggaaggcttcttggacccctcgcgcttctccgaaatcgtaaagaaatgactaaacaaacgtgggggagcctttaaaaagaaaattgactccgatgccctcgcaggctcccggagcaccatctgtcacgcagacagccacacacataggggacctagggacacggcgacgtgggatcagacaatgcgcccggcagtctggcgaccaccttgcgggaaaatgccggcagccgggccgctgagggaggagaggatgcagagggaagggaagagaagggaagggcccggggcggggcaggcggggactagcgggtgcagcgcgtgttgtcccggcgggagctgcatctctgccggcaaagttcgggcgctcccggaaccggagctcggcaggctgcagctgtccccgggtggcctggccaagtccgggcatgtcggtgcttagccttcctctaacttaactgtgccctcttggaaacgccacctggccaggcttctctggggcgcctggagcactggcccggactgtgcgccttctgggagggggccgctcagaaccgctgggcttccgggtaattcgggcttcgagaaagggcccggcaggaggagaaaggcccctgcaggggctgcacgcaccgcccctgggcgtcgggagtgaggaccaggctgagaactcggggccccggcgtgggcagcctccacgacgctcggcacgggagaaatccgcgtcggcgacgtataggagcgtttgcttctagagaaacaaaagcaaggggatgggtgatcggttcccagcaccgcacttgcagaggagcgaattgggccaaaacagctttaatttccctgcgaggaaatcaggtcctctacggcaaaataaaaacaaatgct

SEQ ID NO: 227443 - DNA, 35 bp, Homo sapiens
  chr1:116519005-116519040
  hyper
gccccgcgtagcccggctgcgctccccgctccccg

SEQ ID NO: 227444 - DNA, 685 bp, Homo sapiens
  chr1:116710669-116711354
  hyper
ctgggatcgctgtccgcagcaccagccttctcctgggacgtgttcagaaagagggaggctacagtgggcggggagagaagaaggaagagaaggtgggcagaaagggggcaagatgaagcggcaaggaggaaggaaaggagaagctaaggagggaggatggggaggcggcgacaatggccgcgctaccggtcgcccactgtgctgcggtgggtcggggcccactgcccctcgctggggcacctggggagggggcgctggggcacctggagagggcgcgcaggagcagcgggccgagccttctgcggggatggggtgggaagagaagaaatgaagacacagaggagtagaacaaagaggcgggagcaccccgccaggggaccgggaagggtcgaggaaaactgctgccgcgccccactgggttttaacaacgcccgggatgggggaagggctcccacttgcgccccaagcgcatgcggagaaggttcggcagcgcctcctgccggccgcccggagggtccgcggtggcgccagccccgatcgcagccgcgcaggcccgagggcccctacccgcacggtgaattgtcttccacgcactagtattttctcctcgctttcaactgaatggcggcattggtttcactatttccttcctggagctgtggttgaggccgactgtcccagctag

SEQ ID NO: 227445 - DNA, 59 bp, Homo sapiens; identical to SEQ ID NO: 197728
  chr1:116961169-116961228
  hyper

SEQ ID NO: 227446 - DNA, 191 bp, Homo sapiens
  chr1:117209809-117210000
  hyper
actcctgggaattcccgtcacctcctaccgagcccgggcgccgcaggtagccccaccctccgccagggcaaatcgggaaggggctccgcggtggggccgcgactcccggcccccgccccaaccgtgggagctctgcgcgcgacgcgtcccaggtggccccgctattgttttaccttgcagggtgtttatat

SEQ ID NO: 227447 - DNA, 40 bp, Homo sapiens
  chr1:117215387-117215427
  hyper
tgcgcccccgcccccgatggagcttcgaagatgactttat

SEQ ID NO: 227448 - DNA, 1057 bp, Homo sapiens
  chr1:117452364-117453421
  hyper
cgtggggtgggggcccagaggggatggcagggtgggctccgacgcctcctcgcctttaagcgggtggccccggctcttcctccgttacctggagcggggaggggcttgggaaagtttgtgtttgttgctggcaaagcgccggatgggaggcgcgggcgggcgctgcggttcttcccttctgctttcgggaagcggtcggggctgcacactcggatcggcggggccggctcccgggcccggccggctggaggagggagggaaggaggcgggagggagcgagcggagccaggggcgcacgtacgccccagcgctgggatttatcggctcgcgaggagagcggagcaggcgcgcggcccaggcggaggagcgccgactctggagcagccggagctggaagaggaggaggaggagaggcggcggggaaggaggaggagggggagagtcgctcccgccgggcgagcatggggcgcctggcctcgaggccgctgctgctggcgctcctgtcgttgggtgagtgtgcgcggggctcagcggggcacacggggactggcgaggccctggagggctcggcggggcgcggctgcagcgcgcggcctggggcgccgagggtgcccgggctgctcccgggaaacccggccggggtgcgcgggttgttcggcccggcggggagcggccgcggggccgcccggagcctggcgcgaatccgctcgggccccgcgcgcggggtgcaagtggccgctccgccaggccgagcctcgcccccaacatgtgccggggggagtggcccggggccgtctttcccccaggtctccctacctgttggccgccgggagcccggctcaccttgaactcccggcccggaaggtgctgcggtcccggcccgggtcctcggctcgagagcggaaatgtgagcctttgatatgccccgccatagccgccgccggccgggtcgctcttcacccaacccgcgcggagttgcctttccagggaagcgagagaatcctccaacttccttccacgaaggtcacagggtggcccggagcgttacaatggaaat

SEQ ID NO: 227449 - DNA, 58 bp, Homo sapiens
  chr1:117664693-117664751
  hyper
tcttaaaaagccacgctgatttggcgccgggacggccttctttctgccctcggactcg

SEQ ID NO: 227450 - DNA, 412 bp, Homo sapiens
  chr1:118148622-118149034
  hyper
gggggcgtggtcccgccgtataagaacggagggggcggcggcgggacggctcactcggtgccgctgcctaggggctgtagaggtcgcgccgctcctgctggggcctgcccacgccaaggacctgcctctgtcgcctcctcttctattgcccaggtgagtccgcgacccccctcctctaaaggtgcggcgatgcggcagcagccccagggagccgcgagctcacttagtgggggtccgcccccactaagtggtgctcaggtctttgcccagcctggtagggggcaggcggacccgaggggagctgcggacaggtgccgagacccggtgctcctttcccctcctgctccctcgaggacccccgcccctgacacacccgtcccaaagggccagaagagacgctccgaaagggagc

SEQ ID NO: 227451 - DNA, 317 bp, Homo sapiens
  chr1:118149462-118149779
  hyper
atccaagccagtgacttgtgcgctgcgcgtctctcagaaacttcttgggaatgcggtgtctgtgaaacctgcttcctctccttttgaaaatgaaacttgctttactgcgtaggtgaaaagccacggcaagtgggtcgactcggacggataccggtgcggctgccccgggaggtgtcgcagttcggggactcccttcgcactggtcgcgaggcaggagggagcagggtgggaggcgagtcagaggagggtgacttacctgaagaatacaggttggtagcctgcacacctgaactcaacgctggcgggcgagaaaacca

SEQ ID NO: 227452 - DNA, 376 bp, Homo sapiens
  chr1:118471568-118471944
  hyper
cttccccctcaagcggccagagagcggaaacacaaagccaggccagtgtcactccagggattgcgggaacctagacaacgcaccatcctgggctcagcgtctacccacccctcacccgaggtgctctcggttccgtagaatgtccagtccacaggaacggcaacacggacttgtctttgggactacaaccagcaagagctcccgcctgccccatttcacctgcaccctagggcgcccgcctccttggctacagcaccactgttcctagtgcccgccgactgcccaccctttcacttctcgtagagacggcgtccccgacaacgcctcgggaaagaacctaaccaacatgcgaggaagtggcgccaggctcgttctt

SEQ ID NO: 227453 - DNA, 119 bp, Homo sapiens
  chr1:118472379-118472498
  hyper
cggctgggagcctcgtggaggctgaggtgagtcctggaggtgcgtggttggggcggagagcattatctgcggctccgattttgcagattctggctgaggcgttcgtgatgtcagcagca

SEQ ID NO: 227454 - DNA, 151 bp, Homo sapiens
  chr1:118727840-118727991
  hyper
gctaccacagtaaccgaagccacgcccagttcctgaaccacgtcggctcccctcccccaacaccgttcggaatccttgggtcaaccgcctccgtctccacagcaacggagtttcagagcgcgcggcagcttgggggcggggttcccagtcc

SEQ ID NO: 227455 - DNA, 443 bp, Homo sapiens
  chr1:119522353-119522796
  hyper
gagctaagaacagccgccatccctcagggttccgggtcccgggtttccagggtcccgggtttccaaggccccgcgataaccccgggcgcacgcggcgcgatgcggcgaggcgaggcgaggcggtggggccagcgcggagccccaggcgcgagaacaggaactcgggctggcacaccgaggcctcgcagccaagccgcgcctgacccgttcgccgttccggccccgcggcgcctccaaggccgggccgaggggccgaggggccgagggcgggcagacgcggccacggcctaattctgacttctgaaggtcaccgaaactgcgctgtttttccagagatgggttgaagagaagagatgcaatcccagttccttctgcggcgaaacgggatctgaaattcttggagagggggaagaattggacgttttcatcgtgcgtggaggaaa

SEQ ID NO: 227456 - DNA, 1276 bp, Homo sapiens
  chr1:119526833-119528109
  hyper
tgtcgatctgcctgcgtgtccttggatgtgcctgtctaggtgcccacccgcgcgcgccaccacatccccaggcctctggaacgcagctgctgtgtggcccggcccgaagtttctggaggaggaaatccctccacagaaggtttacattatttcgctccgcgggagacccggcttcggcagcacttagcagaagattttggcgggaaaggcccaagccctagctgaggactccgggtggagcaggggctgaggtccgagcgcagatggcgccgccgagcgcctgaaatatacttgcaaggccgcagcaatatacttgcaaggccgcagccggagcagctgttccagccgatcctagctcgaaagttcctctgttgctctgggagagggcgggggagagcaggctcgagagccaggctcctccgaggctggtcttgaggcacttctctagtagcttctccaaaagactgagagtgccggcgtaggtatgacagtgagggtacctcacagacccttctccaaagtctggcgggccttggggtttttcggggccaccaggctcggtggaatttttgaaacgctttcgaaatacatagtttcctctgtggagtgagtgcctacaacgcgcaggccggactgatcccccgttgctgcaggttggtgccccaagctgcgggtgctcgggcgccaactaaagccagctctgtccagacgcggaaagaaaaatgggctgtgaaaaagcaaaaggcctcgtctttgaatgaaagttaaacattaaaatctgaccctagagttgtctaaagatcgcggaattttgaagctccggcagagcggactaaaaaacggtgctatgagagatggtgagaatactctaggcatgaacgtgtgcgtgtgtgtttgtgtgtgtgtgtgtgtttcattcttcccgcaaaacaattttttgtttttttcctattcccggtttgttatcggcctagggcgggagaaccacgcagcggcttctgggccctaaggacaaaagagttaaaacaatgaggctcacccgggaagagacgctgccctgggcacaatagggtcgcctgcattactcctccatacacacatctttaaatgtgtccctgtgtgtgttcgttagggtgctgtattacagaaaaagaaaggcctaaaaacacccccagccctggtcgcgcctttcgctaccgcctgagtctggagccgacagctccacctcttctgctccctggaccgccgcgtctccacgccacggcgccctttttac

SEQ ID NO: 227457 - DNA, 435 bp, Homo sapiens
  chr1:119528623-119529058
  hyper
agacgggctccgtgcgatctggggcctcccaagagaaaacttccccgggacaggacgtctgccacgcgcagctaaacaacttctgttttttccgccgtggggaaaataaaagaaccttacaaattctaaggcgtcataacccctgcaagaacttctaactgtatgaaggcccacgcgagattttgacaatagataaatgagctgaggaaatagggtctggccagcgaagggaaacacacagtagccctgggtgcctttctggaatgcccacgcaggggtccgcgtggacaagcacttgcattcaaatacaggaaaaggcttggacggtcgaaataaatctccttttaattttcttttcatcgactaataaaaataattccccagcactaaactcaaataccgtaacgggccacaaaaacacggagaattcataaa

SEQ ID NO: 227458 - DNA, 1280 bp, Homo sapiens
  chr1:119529857-119531137
  hyper
tagatctcggctcccgccgttgccttcggcccgcgcccctcccaatcccagggaccggcagcccttcatccacggacacccagaaagctgcgctctccacccaaaagaaaaagaaatgcaaacaaacaggactccttgcttaggctggcgacgaaaatgcaaggctcagtccagccccaaaaattggttccggtgaatttagggaggctcagggcatttgcgcgaagaaacagaaacctatgttggggcaaggcagggcgtcaatggcagggcctagctcctcacccgcgaccggcgactggcccttcggcgtcccctctccgcccgcctcccgcggtcggctgcgacgcactcacccgggtgaggctccaggccgtgtgccgccgcgtcctccgtgtctccgagtgggcccgcggggctcagcgcctccatagacaggtccagccccttctcctcccagtctcgcagtttccgttttttatttgagccgatcaaggcttcaacggagaaggcatgtgctcgcgagctcagggcgactgcagatcttctcctttcactcattttagccgcccacacccctgcctccgcttgcccccgctaccgagggagcagccggcgccctcaagctctgagcgcccaccgggcccggcccgggagaggcggaggcgcgtcggacgaggctgagactgcggctcgcgggtctctccaccctccccctgcgtcctcctccgccctcctctgccggatccgacctgcgcccctacgctggcccagctgctaggaactagcgccccgagcgccgcccgctcgctgcatgagcgcccgagtcctgcttcccacccaccggggcaggcgctcacagactgtgtccactgaacttcatcttgtttttgttattattattattctctctcctctctctctctctctctctctcccctccctctctttttctctcctccccctctctctctcttcctctctgccttcccgtcctccctgtgatccaaacttctgggaaacttttttttccgctaaattcctcccttcccgaggaacagggggcaggcggtgcgctcctgtccgaggggtgagggagagggagggggaggaagaaaaagactgagggggaaaaaagccagcccccaaccaatagcgaggagggaacaagagaaactccgagagcgcgaaccaatgagaggaagggagagactgaggcccgggccaaagcgcagcgccagtcgtcccctggatgctcctgggccgactttaacccctgg

SEQ ID NO: 227459 - DNA, 65 bp, Homo sapiens
  chr1:119531624-119531689
  hyper
cgcggggtttagggcgagctcctcaggcgtattccagctgggccccctcacgccgcaaatactct

SEQ ID NO: 227460 - DNA, 143 bp, Homo sapiens
  chr1:119531987-119532130
  hyper
gttacgccaccggtcgaggacggcaggagacccccgagtgcagagaaagctcaaaccggcagcgaagtcggtcctagccaagctgaaaaaacgtctcggatttcgcggacagcggcctagacacagcccgatcttccagtcct

SEQ ID NO: 227461 - DNA, 680 bp, Homo sapiens
  chr1:119535262-119535942
  hyper
tgggtccactcttgcgggccgcacctccagtcgctcctttaagtcgcagagagctgcgggacccgcataagtcgttaactattcaagcaccccctcacactttttaaaaataaaagtccatgggggtgaaaggtctttaatgatgtttttttgttttcacgaaataaaatcttttatttttattttaaaccagcagcgtgcccatcccttggtccttccagatgtttgcaataaaatcgcaggttttgcctttgggactggaaataaaatttaacggccttcaccctgtaattattctcttagcttgcccttcataaatttatctgcgttctatcggcattggggcaagaggagagcgaaaaggggggggaagccccgattttatatttgtgactataaaaaagcgccacccggtttcctcgccttcggccgccgcggtgtggccggcagagccggggccggcgggccgcaaaattgcgcgattgttcgctgacttcggtctgcgcaggagcagggcccctccacaaagggagccttgtgtggccaggccggagcggccgcgcccaagaggtgaggaaatcctgttcccccaggcccagcttctctttccccacggcgtttcgtgcaacgccgcagcccgaccttcgactgcagggtgcgcccgccgttccaggcgccag

SEQ ID NO: 227462 - DNA, 345 bp, Homo sapiens
  chr1:119542144-119542489
  hyper
ctgcctgggttgaccggttctccggtggaggggaagagagagagagagagtgagaacgaacgagaacgctggcgaagaggaatgcgctgcaaacccgggtgaacagatgtgcatggtgccctcacccagccccggcatggcctagacaaccgctgctcagccctgcgcccgtgaaattacattattttctccccggcccaatcatcgttttacaggaaaaaaaaattaaataaatataaattgctgctttgcaagatcaaagtgccgatttctggtgcatctggaggagtggggagatggggaggaaagagagggggagagtggcgcagccgtggttgcccaact

SEQ ID NO: 227463 - DNA, 1513 bp, Homo sapiens
  chr1:119542980-119544493
  hyper
gtttatttgtgacccggccacctgggcgactacgtaggcctggtacaggaggcaggagttgcctctgtccccactgcgctttccttaatcgaagagcgggtagatgccggccaagcaaagtgctcgaaagtgtagctgggacgcccacgccggaagcctggagaggcaagttgcgagttcgcagggcttgggagttttttgcggcggaagaagctgaatctaggggctgagtccccgggaagggatggccgcctcttagctttcgccaggagattatcttggagcccagcggccgagattgagagctctttctgcggaacctgcctccggagtcagatgagcaaggggaccgccacgtcctcaccgagctcccagcggcctttggggcgggtccggggacaagccggaggactaggcttctcccagagcgcggctgtctttcccggaaagacccaagtgcgcgatgtcagcccgcctgcacttcatctgagttgtccttatgtggccatttctgtttcaaatttcagatttttctactaaaaaaggatgggttaaaacagctgagagcgcgcctgctctttcccgccctgggttctacatctctctagccgcccaccagactgcatctccaatctgggagctatcctcaccttgggagggtggggcaacaatgttattctcgtttcccgataaggaaaccaacgtccctacaacttgacgttaaatggtcccaggttcctgagcctcaaatctaggactattacctaggtcacctaaaaatttttgttctttccactcccccgagggtgattctgttagcctcgcaggcccttctcccacccgtcatttgaagtcatcgaccccggggcagccccaacagttctgtgcgggcctgcgcgcaccgccctcaccttgcgcgccaggcatctcacctcagccgggcaggtgcagaggtgacaggcgcggcagccgcggttcgtccggccgaggggcaggaggaggctggccgccgccttctgctgcccgcaggctgagggggcaggggagggggaacagggctgggaaactgccgtcagcgggtcccggccccgcctcccgaacgcaacgtccaggaaacctcagaactttctattgtctgagaagcttcactgaacaaattgtccctaaaactttagagctgcgaagagcggatcagggcaggttctagtgtggccctgtgccccggagcctgcctgccataaagtgtgaccggaagcccccccccccccgcccactgtcagaaccactgaggagagaagagcgcggcgccttagtgccgccctgcgtcgtggtcgggaagccgagcaagcggtgtggacgccccaggagcagggggatccaggcctaaactcatgggttccgaatgggcaagggagcagaatcaagcatcggtgggcgcttatagaaagcgcgtctgtcttggaacacccttaccagggtacccaaccccagcgccaggtttcctggccttgca

SEQ ID NO: 227464 - DNA, 80 bp, Homo sapiens; identical to SEQ ID NO: 197733
  chr1:119544707-119544787
  hyper

SEQ ID NO: 227465 - DNA, 1468 bp, Homo sapiens
  chr1:119548810-119550278
  hyper
tccagatgccgctgcgttcaagctctcccagcacccgcggccgaagtaaataacaattctcttaatgctaaggcagcaaggagagggcactgcgaactgcagacttttcttctaaggatgaagaggacattataaaactgcacactacctccctaatggcccattcgtcctagctctgtctagtgaagtagagagcagaaaaaaacatctagctctatcaagttgaaaacattttcacattcaccttaaactggtgaagcaaacgggttttccctttactaacatcgctcttgtttttccatttagtctttgggaacgtagcctcaatcttaaccgcgtatgatcgtttccactgcacctgtgcgggagagacaggcgcatatccccgtggcgtcggatctctaaattatctaatctggcggctgcgtacgactcagggaaagccctggccgcgagctttttcaccaggcttgagctcagcagccgggcccgcagtgttgccgccagtggggaggcagggaggctgtcggcgcgccggagccaggcgggaaagggactacagccgcccgccgttgtagcgcaggaagcgggcggtgccaacacacacctcgcagctctgcacgttcttcgtgtcttggaggagagtagagcctccgtgtgaagctccgtccgcacctgacgaagaggagggcgtcttgcgccactccagcgactctgcgatgttaagacgcagacccgctgctgcgcctgcctttgtcggggcgggcgggcagccgccgctcggagcaaggtggggctgcggggagggagagccgcggggcagatccctggccaaggtcctctagaaagcccgctctgcgcccaaacgcgccgctcggtccgtgggccacttcggacctgacgctgccggtgaattcacgcgctccgggacgcgcggggacctttgacgaggtttttgaactggggatcgtcccctgtaacctggccgcgttacctccccaggtgagccggactcgcgggtgggttcggcagccggcgatgtggcaaaaaggcaacctcgccttatttctaggggcttggagatgaagagcggctgagtgtccccgtctaccccaacccgggtattaccctcttttccgtcttctagaaggggaaaaccatgctgttttgaattcaacatatttagattctgaaaatcgacggcccttcccttctttcctaggaaggcctgccccgtaggcacaaccttcggagaaacgggcggcgcgtgagttccctggagccgcctcctgggcatccaggctcctgtcgcacggctggtgcggcgcccactgggcgtggggactgggcccaaggctcccgggaccgggtcgtggttaacgccgaggccaagcccttcgaagaactctgagttctctgcctgacgttttgtccctcaggaagtgtcccttcccgacttttgagggtg

SEQ ID NO: 227466 - DNA, 828 bp, Homo sapiens
  chr1:119550506-119551334
  hyper
cacagcccaggaaacgggaaaggccactgtctgcttccctttcgcagattctatccgctggcacgcgaaggtcacacgggctctcaatgctaatttggaatgggaagcaccacgaagggttgaggtagcctggtggccctgactgcgcagggtgcggacagtgagcccgtatccagcttcgctgccacgcgcctagcagcccggcggccccggcccggcccaaggaggaggcaggccgcctgggtcggcttccgtggcctgggggtaagctctgattcaccccaaggtgaggtccccggggatgcccagattcgggccgggaaacgcaccgggagagaaccaccaagcgctcttggttatgaaccagagcttataactgtggccgcagctagacctaggggaggcctgagcgccgaagcctccgtttcctcgaccggaattcgtgagctattaaacatgggccctagcggggcccacgccctgtcttcctttgctgacaaggctccgcggggtagtgggcgggagacaagggtctcagaacagaggggctggcccggcgcggcgggccaggaactcccgggcgtgtgtgtgcagtggtgcggggtgggggtggaggtgaggtctcctttagttcctgggatctgggaatcccggcttctcgatctcatccggcgcggagatcttaagggtcggtggaccagttagtgtgtacggcctcacccctccgcctccagctttcgaggctctccgcttcagagctccaaaggaaaacttctgcgacttcaagaacgtcctgcgcattcacatggggtcgcttcctggctggtt

SEQ ID NO: 227467 - DNA, 74 bp, Homo sapiens
  chr1:119683271-119683345
  hyper
agaagggcggagccgtcttgtttggaatgacgtctgttcagagagccaatcccagtctcgcgactcctgcttgc

SEQ ID NO: 227468 - DNA, 843 bp, Homo sapiens
  chr1:119869837-119870680
  hyper
acagaacttcaaagcgaaaggaagcacaagcagtagggggaggaggtgtaaatttcccccgcggtcccttggaactgtgaacatttgcagattccccaagccctcccgctagctccctgccaggtgtccgaggcccgaccgcgccccgcccccaccgcgcccccctccccgcaccccgcccctcctgctcccggctttcatgtggatcaaggctggaggatgacaagctcctgactgatagatacatggagacttcgctggtgatttattggctttctgcacctgacgagaaccactaggcctatctgaggagggaaatatatgggctttcctgactccaagtggcagccccggggcgagcatgtgatgtcaagctgggcagaggaaagcggagctgtgcaccggcctgtgtactgtaagccggcccgggtcgtaaaagtgtcagcacgcgatatatttcttgcaggggatcctctctggctcttgccagcgcctctcccccgtggctggcagccgccctagccgggcctgcaaacagcggatgccccaggtcgctatccctccgccctgccccggagcgccgggccctcacgttctcgctccagcctggggtctctcacgtggcatctggccctggggacggtgcagcggaggagttaattgctgtcactcctgacttcagcgaaagaggtcgatcgtggggtgagatattgaagctggggattgacctgtggaccaagagtttgatggggcaactcaatagcaaactcaatgttcccagagatgaaccaagtaatcagttatttattcagaaaattaagtgccattcgtgtgccaggcact

SEQ ID NO: 227469 - DNA, 69 bp, Homo sapiens
  chr1:120190364-120190433
  hyper
ctgatgcccccttcggtggtcggcgggacggtcctattccctcttgcatcgctgtctcctccctcaagt

SEQ ID NO: 227470 - DNA, 508 bp, Homo sapiens
  chr1:120190872-120191380
  hyper
ccggctgactcctcactggggcttcctgtagggctggacaaaggacatttcctgggaggagcgggagaatgttcccagcatgcctcgatttgtagttcccggggacttcctgccaccgcagcagcgggcgccctggaggtagctcgggccaggctaggactccgggacaggaggaaaggcgctcgctgcttctctaagcgctgtggggaagggagcggccggcgggtcttgccccacgccccgccccgcggcgctcaaggagcccgctgtcccggagcacgcgagatcccagcgctgcactccgagctcgcggcaccggttgcgggcagccggtgggacgctgccgctgagctgtcccatggttcgggagggctctgcggtgggagaggccttttctttaaaaactgggaagtttgtggtgggttcgctttttaaaaattaatctaaaaacacaaaatctatcttttaaaatagattttctttttgtcttttacgccgttgacatcct

SEQ ID NO: 227471 - DNA, 255 bp, Homo sapiens
  chr1:120254605-120254860
  hyper
cttctactcacagcggccgattccgaggccaactccagcaatggcttttgcaaatctgcggaaagtgctcatcagtgacagcctggacccttgctgccggaagatcttgcaagatggagggctgcaggtggtggaaaagcagaaccttagcaaagaggagctgatagcggagctgcaggtaaggcgagagagagaaaattgaggtctctagggcaacctccatggaaaaaggctggctgcgcccaggccagcgcg

SEQ ID NO: 227472 - DNA, 212 bp, Homo sapiens
  chr1:147775411-147775623
  hyper
gacgcctgcgagggtcaggacggggcgaaggccattccgctgcccttccagcttcggaatcacccaatgcacggcaagatgtgccggcaagatgtgcctctcaggttttccgaggctttggagcctgcacaattgttctacaaaaggcagtagctccgccgaacgttggatcgtcccttggtctggtgataccagaacgagagttgactgtg

SEQ ID NO: 227473 - DNA, 217 bp, Homo sapiens
  chr1:150459684-150459901
  hyper
tctgggggaatagcgagggtgtgttacattttcggtcttccggtcagccggaaccactcacaccgctgctggtgctgtgtagggtgtacctcttcggagttcctggaggtggtgccagactagagtggcagctgtagtaaccaatagacacggactttgttggaccagaagccaatgaagaattacgtggaggagaagcggcgataatctgtttgag

SEQ ID NO: 227474 - DNA, 99 bp, Homo sapiens
  chr1:150522061-150522160
  hyper
tctccctgcgctgtgcggtcgcgaccccgccacgaccccggacccagctccggtggcctcggacaatcttccagcccctggggtcgaattcctggggag

SEQ ID NO: 227475 - DNA, 38 bp, Homo sapiens
  chr1:150552000-150552038
  hyper
aaacattgccagtcgccgccgccgcctggctgagaaaa

SEQ ID NO: 227476 - DNA, 112 bp, Homo sapiens
  chr1:150586171-150586283
  hyper
tccctaatcataaacgacacttcagacatggaccttaacgtcaaaccaggattcatgatcactaaatgactttccttttgtacgtgtgagcaggtggcgttcaccaggggtg

SEQ ID NO: 227477 - DNA, 61 bp, Homo sapiens; identical to SEQ ID NO: 197738
  chr1:150601697-150601758
  hyper

SEQ ID NO: 227478 - DNA, 458 bp, Homo sapiens; identical to SEQ ID NO: 197739
  chr1:150669481-150669939
  hyper

SEQ ID NO: 227479 - DNA, 69 bp, Homo sapiens
  chr1:150849135-150849204
  hyper
tccccagaagcggcgcctgaccgccgcctccgctaccgcggaatccaagatggcggcttcagcagcccc

SEQ ID NO: 227480 - DNA, 87 bp, Homo sapiens
  chr1:150898621-150898708
  hyper
agggtggtaggagcggcggagactcggtaatatactggccacgcctactctgccctgccagtctcttctcacgtgtgcccctggaag

SEQ ID NO: 227481 - DNA, 106 bp, Homo sapiens
  chr1:150947649-150947755
  hyper
cccccaactgctgtgcggcccccggtccccgccagggtgggcacattcccacttccagccccacggggcgcgggcggaggagggtgcagcccggggatcctgccca

SEQ ID NO: 227482 - DNA, 271 bp, Homo sapiens
  chr1:150980783-150981054
  hyper
cattgcggagttgcgggactacgtttcccacgtcgccccacgccacgcccccttggcctcgccggaaagacgtcccaggagcctctgggcgtagagccccgcctccgccgctgggggcggggcgacgccggactccggagcgcccgcttacgcagttcctcccggggtcggaggccgattcgccgtgtggcgggttcgagtcccgcctcctgactctggcctctagtccctgagtcccgggcgggctgcattcgtcggggaaacctctcct

SEQ ID NO: 227483 - DNA, 814 bp, Homo sapiens
  chr1:151020069-151020883
  hyper
tccaaagaagtgaacgactctttcaccaccccttgcatcccaaaccttcggttctggcagagttcttgccgcagaggttccttaggagcaccccgcgcggcccgcgcgagcgcgcctgcgcgtcgaaccccacccccttccccgcgggcctcggttcaaacgacccggtgggtctacagcggaagggagggagcgaaggtaggaggcagggcttgcctcactggccaccctcccaaccccaagagcccagccccatggtccccgccgccggcgcgctgctgtgggtcctgctgctgaatctgggtccccgggcggcgggggcccaaggcctgacccagactccgaccgaaatgcagcgggtcagtttacgctttgggggccccatgacccgcagctaccggagcaccgcccggactggtcttccccggaagacaaggataatcctagaggacgagaatgatgccatggccgacgccgaccgcctggctggaccagcggctgccgagctcttggccgccacggtgtccaccggctttagccggtcgtccgccattaacgaggaggatgggtcttcagaagagggggttgtgattaatgccggaaaggatagcaccagcagagagcttcccagtgcgactcccaatacagcggggagttccagcacgaggtttatagccaatagtcaggagcctgaaatcaggctgacttcaagcctgccgcgctcccccgggaggtctactgaggacctgccaggctcgcaggccaccctgagccagtggtccacacctgggtctaccccgagccggtggccgtc

SEQ ID NO: 227484 - DNA, 55 bp, Homo sapiens; identical to SEQ ID NO: 197744
  chr1:151031281-151031336
  hyper

SEQ ID NO: 227485 - DNA, 170 bp, Homo sapiens
  chr1:151032105-151032275
  hyper
gaagcggcggcgacgcgattacgaaacccgtccggctcggagcccggcgcactgctcccctctggactgcggaggcactgcactgcgcgggacgtgggagggtgcctctgcagcccctcaaggccgccgcccctgcggggagaactggagaatgcggacacctagatgag

SEQ ID NO: 227486 - DNA, 106 bp, Homo sapiens
  chr1:151042862-151042968
  hyper
aacctggccgccccggaccccgaagaagcagccaagagttaagacgcaatctgcatgactgacgcacgctccgagtctccctcagcagttcgccaggttcttggcg

SEQ ID NO: 227487 - DNA, 238 bp, Homo sapiens; identical to SEQ ID NO: 197745
  chr1:151043249-151043487
  hyper

SEQ ID NO: 227488 - DNA, 189 bp, Homo sapiens
  chr1:151119043-151119232
  hyper
tccagggcgctgtcgggagagccctgggtccaagtccagccgcggatccgcggaggaaaacaatgcgaccgcccggggctctgggctcggccccagtggccccgcccgcctcccagccgggcccacctcctgcccgcctttgggtcgccgcgactaatcccgccctcggagggcggctagacaccgcct

SEQ ID NO: 227489 - DNA, 78 bp, Homo sapiens
  chr1:151138453-151138531
  hyper
gagagtggatttccggatcgcgcaatgcatgcgtggaagtgcgtccccggaagtacggaggccgacaggaagagaagg

SEQ ID NO: 227490 - DNA, 132 bp, Homo sapiens
  chr1:151170900-151171032
  hyper
ggactcgtcagggcgtgaggacccacctcacgtgaccattagcagcctcccgattggttttgctccttttttctccccaatgagtgggctgatgccccgagaaggtcgggcgcatgcgcagtgctcggattt

SEQ ID NO: 227491 - DNA, 178 bp, Homo sapiens
  chr1:151254486-151254664
  hyper
ggcggaggccaatcgtttacgagactcgtagatggggcagacggaccccggcgcagccaatggggagaggtatcttcagagggcctcggccccttgcccaatgagcataagaggactgtgcggggctagttccgagcggcagtatttagggccaacccagtgcggggctggaaggggc

SEQ ID NO: 227492 - DNA, 48 bp, Homo sapiens
  chr1:151319768-151319816
  hyper
tggttgtaacagccgcgatctgcctagatacacgggcggcctgctctg

SEQ ID NO: 227493 - DNA, 232 bp, Homo sapiens
  chr1:151483994-151484226
  hyper
agtggacccggtgcgggccagggcacccgagaggaaagcgagccttcaggggtacctttgaggggcaggcatcgaggcggtgtgagatgcccctctccagggcaccggtgccgagtgggagacgggaggaggggagattggggcggggtggggtactgattaagagccgacccctaccctgaggtgccagatgcaggtggctaggaaggtgccaggcgaggggcacctgggg

SEQ ID NO: 227494 - DNA, 893 bp, Homo sapiens
  chr1:151512578-151513471
  hyper
agcagccccatgtcgctcccaagccccacctttgtgtaaatctatgcgagcaccgatggggcatgtcccagacccattggctccgcccacctcacctcctcgcctatcgttagttctctgcgaaaccgcgaactgggggcgcggcctatcttcagccccgcccctgatgggcctatacaagggggcggttccgcgcgcgcccgcccagttggagccagacagcggggtggacaagtggcgtgtgtgctgcgaccccgagggaagatgaacgggacgcggaactggtgtaccctggtggacgtgcacccagaggaccaggcggcggtaagaaaaagcgctctcgctgtcttctccgttttgtattcccggtttctaagtccgccccttccgtgccccgcgccgtgttggctgacatcacctggtgcccggctcgcgcggtcagccctgcgcggcgcttctctctttttattcttttgcctgcgacgggcagtgggagtcgcggggtgaagactcctttgaggctggagggttcggggcgtccctgccctttggtaggacactgcggctcctgcctgggactcggcgccggcgagcccgtgcttgggccgcgggtctcaggcgtcttttgggcagccacattgggtcataagagaatgagctcaagcgactgggtccctgagcgcctttggacgttgtgtcctgccgaggaggcttaggctttcccgtgggtcgagggtcctggtgacctccgaggccctccaaagaatttcatcatggtgctttggatgatcagtaacaagaaaaatggtagagtaaattacagggcttggactggagggcggggggcaagtaggggacggtaggactcaaactattccgagattggctaggga

SEQ ID NO: 227495 - DNA, 211 bp, Homo sapiens; identical to SEQ ID NO: 197748
  chr1:151566653-151566864
  hyper

SEQ ID NO: 227496 - DNA, 289 bp, Homo sapiens
  chr1:151584377-151584666
  hyper
caggccttgcttccgaactgcgtcttataacctcggctcaggcccaggcccagaccgctccccgcccccgccacccataaactacatctcccaggaggccccacggtgcccgattgtccgcttttcgcccgccccctgcctcctcttcaccccgcgccagcagctcggtggccgagtcggtcccgcggccggcggatcgggcgcgcgcgtcgggggtcgtccggctgccaggcagggcgagcacgcgccgggaggccttggaggcgtagggggcgggggtacggctcgc

SEQ ID NO: 227497 - DNA, 34 bp, Homo sapiens; identical to SEQ ID NO: 197749
  chr1:151584888-151584922
  hyper

SEQ ID NO: 227498 - DNA, 413 bp, Homo sapiens
  chr1:151689189-151689602
  hyper
cggctgctcccgccgctggggctgcctgctttcccggtcacctgggtcccggagctctgctctccggccgcgctctcctcaacaaaaacctcccccctccacacccccctccccactcccacctcctttcccctgacatcagtgatgtcagtctcaggggtcgaatacaaattctctaccctggagagggacgcacaatccaggcacgagccacgccctctttctatctccatcctccctgactcccttcccgcccccagaagagcagctggtcctgttgataataacccttcccccatcttactccccagtcaggagttgggcaaagcactaagatggagaatttatagaggaaccctaaagtggggtccattgttccgggggctggagctgtccccggtgctggaagactc

SEQ ID NO: 227499 - DNA, 96 bp, Homo sapiens
  chr1:151694389-151694485
  hyper
agcggcagaatgatattttatctgtaagaagatgggtggcttaaactttcaagcatcctggggaaagacttgggttaaatgcgcacgccgtttccc

SEQ ID NO: 227500 - DNA, 110 bp, Homo sapiens; identical to SEQ ID NO: 197753
  chr1:151762601-151762711
  hyper

SEQ ID NO: 227501 - DNA, 47 bp, Homo sapiens
  chr1:151764115-151764162
  hyper
ggtgatgagcaataaatatttgctgaaagaacgcaaggttgtatctt

SEQ ID NO: 227502 - DNA, 214 bp, Homo sapiens
  chr1:151801436-151801650
  hyper
agtgtgagactctgtctcaaaaaaaaaaaaaaaaagcctggtgcaggctccctgtctcccttggcagcagcgctgagttcctgagttcctgaggccaccccgcctccgcacacccccctacctctatctccttccttccccggcctggcagtcggccccaccccctcccatctccctgcctctgtccagcatttctcctcgccttttttcacaa

SEQ ID NO: 227503 - DNA, 1092 bp, Homo sapiens
  chr1:151810547-151811639
  hyper
tctcaggctgcgggcggccaggtccggggggccgagcccgtcgaaaaagaaatcctcgttgaagatggggttggcgctgcacttgaccacgcggctctgctgctcccgcggccggacgcggggccgcagcctcagcaccacacagcagccgccgccgccgctcccggggcgggaccgcggccggggcaggccctcggcgctcactaggcgcagccgcagccgcccgggcccggcctgatattcggtggagagccgcagctgcccgccgcggggccccaggcgcagcacgctctcgcgcgtgggccgcagctggcagcacaggaagtccaggtggaagagcggcggcgtgggcggcccggcgcggcgcggcgagtgcgggctggtatcggccgagctcgctttttctggggacagagagtgaggcctggacacccggcgccggcccaggcctggccgcggggagccgaagggcgacgagtccggcgacgaggccgtgtcgctgtcgggggcccggcagaggcgcaggtccggggcggagacgtgcagccgggactgcgccgcggggagtcccccggccggggcaggtggcggcccgtggaacagggattcccgccggcgcgtgtgcgggctctcgggcaggaaggcccagccttcgcggcccgccaggtgaggcagcgagcaggtcgcggggaggccgcgccccgccacgtgccgccgggccgcgggcactgcgccgcccgggtccgggagccgaggcgggatgaagaactgcgggatgcgatccggggtgaggacgttggggcaggcgcttgtgggcgggcccggggcgcgacgcttggagaacaggccggaaggcgcccaacgggccgcaggctccgcggcccccaccttatagccagctttttccaagagccacatgcggtgggtggggtaatggaattccgaattccgcagggccgagagggtccaaatcccgtctcagatgggagtgctcggcggagcggggctgggcgaggagcgcagaggagtcagaggtgagtgatgctggcgtacaccgggcggtcagccaccgcgccccggtctccggaccca

SEQ ID NO: 227504 - DNA, 45 bp, Homo sapiens; identical to SEQ ID NO: 197754
  chr1:151966778-151966823
  hyper

SEQ ID NO: 227505 - DNA, 144 bp, Homo sapiens
  chr1:152008864-152009008
  hyper
aaagtttcagtcccgttgggtcttggccgtctgccgggtgcttactgaaactttgattttccctggggctagacgaccaagttctaaaatgtcccttttctggtgtacagaaataactagtgacccctcgcagctttccagccc

SEQ ID NO: 227506 - DNA, 68 bp, Homo sapiens
  chr1:152009443-152009511
  hyper
tctgtgcgcgcggcgtgcgggtctggagcctctcctcaacccacgcccttcccggcccagccttgccc

SEQ ID NO: 227507 - DNA, 593 bp, Homo sapiens
  chr1:152080384-152080977
  hyper
cgcgctcctggcggcgcagctgctgttcttccctttccggacggagctgctcttcctctaggatttttctgtagcgttcttggcggcgcagctgctcttgctccgtttcttggcgcagctgttcctcctcacggaattttctctccagttcctggcggcgcagctgctgttcctcctggaggaattttctctctcgttcctgacggcggagctgctgttcctcttcgcggaattttctgtcacgctcttggcggcgcagctgctgttcctccccttcctggagcagctgttcctcttcacggaattttctgtcgcggtcgtgacgcagctgttgttcgcgctcctggcggcgcagctgcggttcctcctcgaggaattttctgtcacgctcttggcggtgcagctgctgttcttccctttcctggagcagctgttcgtcttcgcggaattttctgtcgcgctcctggcgcagctgttgttggccctcctggcggcgcagctgctgttcgtcctccatgaattttctctcttgttcctggcggcgcactttctgttcctctaaacggaattttctgtcacgctcttggcggctc

SEQ ID NO: 227508 - DNA, 83 bp, Homo sapiens
  chr1:152082878-152082961
  hyper
ctgctgcagctgctcttcctcgcggtattgtctctcctgttcttggcgccttctcttctcgcgctcctctctctgtagctcct

SEQ ID NO: 227509 - DNA, 45 bp, Homo sapiens
  chr1:152083262-152083307
  hyper
aaaccgttgttcccgctgctggcgctcctcggccctcagctgcct

SEQ ID NO: 227510 - DNA, 421 bp, Homo sapiens
  chr1:152487830-152488251
  hyper
cttccaggtttgtcgtgaggagctccgcgatgtcctctcaacagagcgccgtttccgccaaaggcttttccaaggggtcgtcccagggccccgctccgtgtcccgccccggcgcccaccccggcgcccgcctcctcctcctcctgctgcggctccggcaggggctgctgcggcgactcaggctgctgcggctccagctccaccagttgctgctgcttcccaaggagacgccgccgacagcggagtagtggttgctgctgctgcgggggcggcagccagaggtcccagcgctccaacaaccggagctcaggatgctgctccggctgctgagaggcccgcaacccccagcgctgcgctagagaaacccgcccagcccagagcgggcccgccccgctgcggctcccacgcggggctgggcctcg

SEQ ID NO: 227511 - DNA, 46 bp, Homo sapiens
  chr1:153377336-153377382
  hyper
gaaggacccagccacgtggtactgcctccggcgacaaccagggcga

SEQ ID NO: 227512 - DNA, 37 bp, Homo sapiens
  chr1:153395127-153395164
  hyper
cgtggtgctgaattcactgtgacgtcactcctgtctc

SEQ ID NO: 227513 - DNA, 94 bp, Homo sapiens
  chr1:153438389-153438483
  hyper
cacggtggcgccaccgagcacccacctcgccagagttgcgaggcggttccacgtggctgggccgtccttgccggttctcgcccttatttaggtt

SEQ ID NO: 227514 - DNA, 176 bp, Homo sapiens
  chr1:153508699-153508875
  hyper
ctcccctcatctgcgcagctcagtttgctcagtttgctcttcgtgacacgtgactcggcaaggggagcaggaggaggactgcggcggtcacccctgcttcctctgccagaccgtgaatgtgaccctcgagccagcgcagcgtcaatgtgggcaaggagggcgcctcacaggatgcc

SEQ ID NO: 227515 - DNA, 75 bp, Homo sapiens
  chr1:153606602-153606677
  hyper
ggaaagggcaggccgggtgagcagacggatcggccgactagacagccaaccagcaacaacgaactgagctcgcat

SEQ ID NO: 227516 - DNA, 180 bp, Homo sapiens
  chr1:153631120-153631300
  hyper
agcatttcccgggcgccccctcacggggcggggcagtgcggcgcggctccggttcccggcggccctcgcggcaggtttcgggcttcaggacaattcgtgatggcgggggctggttccgccgctgtatcgggggcagggaccccggtggcggggcccacaggccgcgaccttttcgccgaa

SEQ ID NO: 227517 - DNA, 320 bp, Homo sapiens
  chr1:153650945-153651265
  hyper
ggtaggcgtggggcggccgagaccggggaagatggtccacggggaagcgcgcgggctgggcggcggggaggaaggagttaaagatcctggattggctcttctgtcactgagtctgggaggggaagcggctgggagggagggttcggagcttggctcgggtcctccacggttccctccggatagccggagacttgggccggccggacgccccttctggcacactccctggggcaggcgctcacgcacgctacaaacacacactcctctttcctccctcgcgcgccctctctcatccttcttcacgaagcgctcactcgcac

SEQ ID NO: 227518 - DNA, 140 bp, Homo sapiens
  chr1:153651505-153651645
  hyper
ctgggaccggccgctgagcccaaggggaccgaggaggccatggtaggagcgctcgcctgctgcggtgcccgctgaggccatgccggggccccggcgccccgctggctcccgcctgcgcctgctcctgctcctgctgctgc

SEQ ID NO: 227519 - DNA, 189 bp, Homo sapiens
  chr1:153895707-153895896
  hyper
acatccgggtcttcgacagcccattaagtgtcgggggtcaaaaaatcgcttcaggctgcaactttaccttagagacgttttggtccccaggcagccgccgtaccccagtctctccaaaccgggattcccctttggccatctctcattctttcaattctaaagatggagactggcgaacggcgatggggt

SEQ ID NO: 227520 - DNA, 208 bp, Homo sapiens
  chr1:153919195-153919403
  hyper
cccaaagcccagccgcctgcagcccgacccctggcggctgggagggccccctgcacccaggtagcttcccaccatccagcccgtgcctcaggacactgaccccaggcgacccagagggccgcggcgcgctcccttcccgcctgggtcctgcagtcagatgtggcaagcatgatgtgggcgcaggtgaagtcccgaaggtctagtctac

SEQ ID NO: 227521 - DNA, 108 bp, Homo sapiens
  chr1:153931160-153931268
  hyper
acatccccagtcacgcagcactaggaggaaacggactccacttcccagcagccctgctgactccggaaactggggacttggctccaccctctcggctactccctgaga

SEQ ID NO: 227522 - DNA, 172 bp, Homo sapiens
  chr1:153936113-153936285
  hyper
agaccgggagtgacgtcagttaggagcaatcagagatcgggagcgggagcgggcggagcaggcgacctgaggagagtgagcgagagcaagagcggatattaggaaaaggacctcggggctggggccctggggcgcatctgtggaggactgaggggccggagcgggccagtca

SEQ ID NO: 227523 - DNA, 156 bp, Homo sapiens; identical to SEQ ID NO: 197757
  chr1:153940532-153940688
  hyper

SEQ ID NO: 227524 - DNA, 278 bp, Homo sapiens
  chr1:153963330-153963608
  hyper
ctcccctcacgctgatttcggatcgtagagggtcctcatttaccctctgcacttcttaggacattaactccagggaccgcagcggcccacgggccacccgcatagacgggagcggagaggagataagatggcggcccagctgcgcagacaccaggggcggcgaggggcgagctctccccggtgtgtgacagtgggggctattttcgaccatcccattttcgctgttggtttctaaatctctgcatttctgtccctcttagctcgcaaaggatctcctt

SEQ ID NO: 227525 - DNA, 135 bp, Homo sapiens
  chr1:154244745-154244880
  hyper
ggctggccagccccgcgggtggggtggttgagggacgccctcaagccggtccatttgtgcggctgggctgccctctggcggctttatccgggtgccatccagagtcaaaccctcgaaatcgcttttcgtactgag

SEQ ID NO: 227526 - DNA, 233 bp, Homo sapiens
  chr1:154297541-154297774
  hyper
ctcggtgctgtgtcgttcattcaaggagagttgagatacagtgaaatgagccagggcgaggagggagggtgaaggaacggagggcgggcggctccgaggagcgagagtcgggctgagggcaacctggcgccagggaaaattctggttattcaccacttctacagctctcctgccgctccctgcagaggatgctcgttttgcagagaaggcagtgttcctctattcccttcttc

SEQ ID NO: 227527 - DNA, 59 bp, Homo sapiens
  chr1:154298434-154298493
  hyper
gcgcgtggagagcaggagagcggcgcgagtgccaaggagaagctcgtgcagccttggcc

SEQ ID NO: 227528 - DNA, 215 bp, Homo sapiens
  chr1:154377607-154377822
  hyper
ctggtggctgatacgcccttttctcatcaacagaaccgggaggaagggctctggtggggctggcggtcccctgttctccccgctcaggtgcggcgctgtggcaggaagccaccccctcggtcggccggtgcgcggggctgttgcgccatccgctccggctttcgtaaccgcaccctgggacggcccagagacgctccagcgcgagttcctcaaat

SEQ ID NO: 227529 - DNA, 68 bp, Homo sapiens
  chr1:154531379-154531447
  hyper
ttgcctctgtgggcgcctcagtgcgagtttgcgtatgtcgtgcgtgcttgcgcgcgacgccccttcgc

SEQ ID NO: 227530 - DNA, 226 bp, Homo sapiens
  chr1:154540060-154540286
  hyper
cttgccccttctccgaccatgctgcaggtcctgccccaactttaggacttcagaactcctccaccgtgccgtggaggaacagcccttcttccacctcacgcacaccctaccacggcagaaccaatcgaagactatcccagccggggaccccccttttttttcctgggacccagcgtttccgcctccggggcgcagactcctccccctcaccgtcccaattgtattc

SEQ ID NO: 227531 - DNA, 53 bp, Homo sapiens
  chr1:154600442-154600495
  hyper
tcaatggtctggtcgcagattggtgacatcattggcgcgccgggcgtgggagg

SEQ ID NO: 227532 - DNA, 79 bp, Homo sapiens; identical to SEQ ID NO: 197762
  chr1:154842703-154842782
  hyper

SEQ ID NO: 227533 - DNA, 643 bp, Homo sapiens
  chr1:154909302-154909945
  hyper
ggctgaccgcccgcgaccgtgccctcagctcatgtccaaacagatatggggagaaaagggtgagacacgcggagagaaaggcggttccttcacagagcagcctcccctcgtgaagctcccccacccgaactcacttagaacagtccagccccgcccagaaccttcgctcacagcctggcctgcttaactgacacccggggaggaaccggacgcgactaccttcctccgaggggggtgacgtctgaaatttcctgaggtgaaccccatgttcccttccgcgcagccctaaaactttaggaaaaaaaatctctggagtgagatcacgttggagacgttttggaaactgcccttttgcctgtgcgttatagtacatgtgccacagcaaatctgcgcgcgccccagagtgggaatgggtcttcctgggggcgtaaggcagccctgacgcgagcggcgtgtctggccacgtcatgtcgggggaggagcagaatcgcgcacacgatatttcattgtcaagcagattttataacccgagacgtcactaagatgtggccctttaagcccggcgagaaacctttgattgcttttctagccgcagcctccggcccaaaggttttcggaagcaaacggcgtgggtgacatcaat

SEQ ID NO: 227534 - DNA, 195 bp, Homo sapiens; identical to SEQ ID NO: 197764
  chr1:154955613-154955808
  hyper

SEQ ID NO: 227535 - DNA, 771 bp, Homo sapiens
  chr1:154971612-154972383
  hyper
ccttggagcgtacccgttcctccagccattcttcggcctcagttcctttccatcattcgccctcaggccttcgcctaccccagcttcaaagaagcgaccgtaacctcctagctggctgggttcgagaagccggggacctgcgcctcctggtggctgatcggaaggaggctgagtgcagaggggttgtcttgccttctctgggacgtggagttttggaaactgttcccctgagcttcctgaagctaaatttgcctcccccggccttggggggcgcagagatcccggcggcgattagcgctgcgcggcagccggctccaacccagaggcccggaataggcgcggagttataaatagtgccacccgcaggtgttggggggagtcggcgggaggggggtacccctggcggccacggccccttcaggtgggttgggcggtcgcggtgggagcgctggggggcggggggcgtggggggtctgcggtctgagcgcccccagcggtttcctgggcggcgggtttttcgagggaagcggaggcagcggaggatgggggggagcagcggagaagaggtgggcgcctggcgcatgctgacgctccgcttgcagctcagccccccacattccgaaacaggcccccagacccactcacgcaggaccccgcccaggcaaagcctcgcctttcttaacacctgaaggcctcattcccccaggttctgcaagcatctaacttctatgcttctacccttcggcgcacgtggcccggccagtccgcgca

SEQ ID NO: 227536 - DNA, 812 bp, Homo sapiens
  chr1:155036005-155036817
  hyper
tgctgttggaatacgtccttccttcccgccccctcgcagtgcggtgcagcctcagtggaagctttggcgaacctggcgcgcgctgcggtgcacagagggttaactggagttggcgctgggtggagaggaggagacgcgctcccattggcggaaagttattcaggggcggggtcagtgaatctccgtaccccactcccctttccgcaacttccctcttcactttgtacctttctctcctcgactgtgaagcgggccgggacctgccaggccagaccaaaccggacctcgggggcgatgcggctgctgcccctgctgcggactgtcctctgggccgcgttcctcggctcccctctgcgcgggggctccagcctccgccacgtagtctactggaactccagtaaccccaggtagccgggccgaaccgggcgagcgcacagccaagtctgcgcgctcccgggctttgcgcgcgcccgccacccgctctttgcgcggcgccgcctgagcctggccgcgcgccggggctcctttgtttgagccggcgggggaggggggaggggcgaggggcgaggcgcgccctgggtctccccacagcccgcatgtgttggggggcaggcagaagaccccagccccaagggttgtctagggggtcttggagcatggagctgggggggcctttgcccgcactccgggctccgcccccctcgctgctctcctggcgatccccagcctcccgcaggctggagctgtggctgacgaacttgagagcgagggagggggctttactcttatgaaagagcgtgggttactctcct

SEQ ID NO: 227537 - DNA, 545 bp, Homo sapiens
  chr1:155043326-155043871
  hyper
ctcccaagtgaagccataggcggagtagactgggagcgactagttagcagccctttccctggattgagaactgtgggggtctcacccggctcccagcggccccaggccagcctccttttcgcagaaccaggcgggcgcgctcgctcccgcggctggggctggcgcgcggacgcgccgctgataacgcatgtgcgaaagagacgcggggcccagtcagctttctccgcactcagacgcacgccctaactgtcgggcgctcccacttgacacggacacacgcccctgccggccgcccagccccttgcaggtgcaagggcggatgcctcagcgaccacgggagccgggctggggaggttggtggggggcggggggagtcttaaacttaggcccgcccagccacaggcgctcaggcccagccggccttccctatacaactttcctcatagcatgcgcgggcggctgattcagtcccggggcgcgtccccatggaaagccagggctgagtccactcatggggccgagacgggctgcaggcgctgggaggt

SEQ ID NO: 227538 - DNA, 238 bp, Homo sapiens
  chr1:155051346-155051584
  hyper
gggagctgggaagcggagaagccgggagcgcggggctcagtcggggggcggcggcggcggcggctccggggatggcggcggctccgctgctgctgctgctgctgctcgtgcccgtgccgctgctgccgctgctggcccaagggcccggaggggcgctgggaaaccggcatgcggtgtactggaacagctccaaccagcagtgagtcggggaccctgggagtccgcgcgtcccgtctca

SEQ ID NO: 227539 - DNA, 93 bp, Homo sapiens
  chr1:155055088-155055181
  hyper
gtgtgtcggcattcgcctttctgcaagagaggcgagaggctataggggatgaagtggagcaagaagagagaacagtacgaaggggcagggcac

SEQ ID NO: 227540 - DNA, 197 bp, Homo sapiens
  chr1:155099556-155099753
  hyper
attcaagagcctgttcgcacggtgtacgcgtgtgttgttacatatactcaggttattagcgctctttgacttatctaaaataagaacggccccctctcgagcccagggtcccgcgtgtcgctcctgcgggcaggcactgatgtgatggacagaggcgtccttagccccggccgcacacgttacacactcgatcacac

SEQ ID NO: 227541 - DNA, 160 bp, Homo sapiens
  chr1:155099933-155100093
  hyper
gcatgcgaggctcagaaaggtgcggggcatgtcaacaacctcgcaccctgcaaggtccgcgcgcggagcagcaaagccgtgtcccgcacccccgcgttcgcagactcgcacttgcgagttcttcccttctcccgcacgcgactgcgcccagggacgcaag

SEQ ID NO: 227542 - DNA, 225 bp, Homo sapiens; identical to SEQ ID NO: 197769
  chr1:155100352-155100577
  hyper

SEQ ID NO: 227543 - DNA, 264 bp, Homo sapiens
  chr1:155147170-155147434
  hyper
gggggaggggacttccggtggggagggggcgagtaggcggggctcttgattcccccgctagttcggagaagggggtgccgctgaccgggttgcgctgcgggagagggcgggagggcctgatgggggcgaaggggaatgggttggtaagaccgatggggaagtgaaggatggggaatggaggctggagtggccgcaggccggagctgcggcaggaggacgtatggagcgagcaggatggagtgccaacctcgcctggctatcggg

SEQ ID NO: 227544 - DNA, 35 bp, Homo sapiens
  chr1:155164120-155164155
  hyper
taggtggggtgacagaatgggatttacggacacag

SEQ ID NO: 227545 - DNA, 182 bp, Homo sapiens; identical to SEQ ID NO: 197773
  chr1:155178388-155178570
  hyper

SEQ ID NO: 227546 - DNA, 117 bp, Homo sapiens
  chr1:155179121-155179238
  hyper
tggtgaggggtggcgccggcgccctctgctgtgccctgatgactggggagggggccgaactagccaagcatccaaaccttgccagggctactcagcacgggcgcagtgggggaaact

SEQ ID NO: 227547 - DNA, 115 bp, Homo sapiens
  chr1:155278330-155278445
  hyper
tgcgttttactaacgtgccaatcagctgcccaggaagataatgaaaacttgagtaagacaggcagccaaagccacagcggggacgttcccagcctggctcgcttccggcactgac

SEQ ID NO: 227548 - DNA, 34 bp, Homo sapiens
  chr1:155278672-155278706
  hyper
acagagccgatcgcggagcggattctgcttttag

SEQ ID NO: 227549 - DNA, 31 bp, Homo sapiens
  chr1:155830059-155830090
  hyper
tggctggcagccaggggaggcggcggcctct

SEQ ID NO: 227550 - DNA, 217 bp, Homo sapiens
  chr1:155881088-155881305
  hyper
gccggtcgggtcacgcacttcgtcttccttcactcgcggaggctccggcactgacctgtgacccctcccgcaaccgagtaagatggcgccaccggcgcccgagtcgcggaaggaggggcggggccactcagtgacgcccacagcctgccccgccctcttcccgcccctcccaggtccctaaaacccagttccgggacccaccgctgaaggtcctctg

SEQ ID NO: 227551 - DNA, 179 bp, Homo sapiens
  chr1:155904142-155904321
  hyper
gtgtcgcgctccccgcggacatggcgaccgcttctactcaaccacccgccaactatccgactaccacctctcgtcacttccgcccccaacgttcttacgcacagcctcttccggtcgtggggccgagcggttccggtgaaaatgtcgattccgattggactctcgatgatttaaaggca

SEQ ID NO: 227552 - DNA, 221 bp, Homo sapiens
  chr1:155946472-155946693
  hyper
gaaccaaatttctgcggtttcaaaaaacctcccccgccccccttggctctactccagggtctcagctcaaacggttgaaaaaataaacagacttttggagctggggcctgggctggcgcaggctgtgaagagcctgtctgccaccccactgttccaccacacttcagccacctcaccccggccctctgtttgtcttaggccctactcgaatccccagttgc

SEQ ID NO: 227553 - DNA, 65 bp, Homo sapiens
  chr1:156023928-156023993
  hyper
gctaactcggctccgggacaaaggactttctgtgtcgccgctttatctccgttccctgtgataac

SEQ ID NO: 227554 - DNA, 126 bp, Homo sapiens
  chr1:156024563-156024689
  hyper
acaactcccagggcgtcccggagcaggccaacgggactacgggaagcagcgggcagcggcccgcgggaggcacctcggagatctgggtgcaaaagcccagggttaggaaccgtaggcatgctgcgc

SEQ ID NO: 227555 - DNA, 65 bp, Homo sapiens; identical to SEQ ID NO: 197777
  chr1:156036261-156036326
  hyper

SEQ ID NO: 227556 - DNA, 52 bp, Homo sapiens
  chr1:156084361-156084413
  hyper
cacaccccaacggtccttccccctcctcaccactcccgcccccacccccaat

SEQ ID NO: 227557 - DNA, 92 bp, Homo sapiens
  chr1:156084960-156085052
  hyper
gctcggggatgcccgcaagacccttgactcagtagccaaggagcgcgcccgcctgcagctggagctgagcaaagtgcgtgaggagtttaagg

SEQ ID NO: 227558 - DNA, 169 bp, Homo sapiens
  chr1:156182942-156183111
  hyper
ttcagaagctggtcgccgccggcaggtaaagtggacgcagccgcggtgggagtgtttgttggcaccgaagctcaaatcccgcgaggtcaggacggccgcaggctggcgcgcggtgacgtgggtccgcgttgggggcggggcagtcggacgaggcgacccagtcaaatcc

SEQ ID NO: 227559 - DNA, 706 bp, Homo sapiens
  chr1:156215213-156215919
  hyper
aagtcctcagtacatggtcccgatgcctccagtgctgttcgagagcagtgaggtgtgtcctctcctgtgcctccgccttccccgtccccactggaggggcctgggaacccaccgggagtagcaggagaggccggtgcacaggaaggagttgagtgcggcggcaggcacaaagaactggtgcaggtggccgtgcagccaggaggccggcatggagtaggcggcataggggaaggcgcagcctgcggtgaggtgggggcgtgcagctgaggcctgaggggcgcgcccctatgtcccgcgtcccacccctcgccccgctccgggacgcccagaccccgcgctcccgcgcctgtccggctcacccagactgtagaggctgagcgcgccgtagtcgaggaagtagcagatgtggcgcatgcggggcgacatggagctgaaggtgtgcgcgcagcacgacgcgaaggggtagaggcaggcgggcagcaggaagaccagcagcggccagtggtacggctccgcacggaagccggggccgcccgccagcgccaggagccgccacaggaagtacctgcggcgggcgcgtgctcaggccgccgcggacccccgcgactgccgctgcagcccgtgggcctggacggtccctgcccgcctgggtaccccctctgagctcaaggccgcggcctggggcggagcctcccctcaccaggtg

SEQ ID NO: 227560 - DNA, 360 bp, Homo sapiens
  chr1:156307948-156308308
  hyper
cacgagcactggacgatggcccatcatggcgacgcgatgcagagccgggtacccagagctgggggaaccggcagaaccttctggagagagagaaccagacagaagcccagaaaacgctgcctcctcagggcttacacctcaacccgctactctcaaggtagtcgccaatcaccgcacccatctcattgatcggcacaaaaacagaccaattgacagccttagtcccgccccctacgcaagaacggccagacaagttagacagagagcgcacgacgaaggcactgggagggcacaggcgcttgcgcagtagggtggccgctcccggccgcgtgcagcgcgaacgtcggcgcaggcgccaag

SEQ ID NO: 227561 - DNA, 253 bp, Homo sapiens
  chr1:156326779-156327032
  hyper
tgggctgatgcggccgctggtccctgctctcaatacctgaatgaactatttggctgaaagcctagggtgaggtgttcgggggacggagagcagggcgtggacttcgctccgccgctaggtggcgggctggctcaggacaggtgagcccggcagagagtgccggagggggaggagcccagcagggaagggcagaggggcaccctggcggtgggaggggatctgcgtaggacctcagcaacgttgggggacattt

SEQ ID NO: 227562 - DNA, 319 bp, Homo sapiens
  chr1:156390040-156390359
  hyper
tgctggtcagtcctcgcggctctagcccctcgctcaagcctctccctcccgcccgtgaggccggctttccccgggcccctctgcgcagtgtatggggttatttttactttcggttatctagctttatgaagactccacaccactcatacagctagataaccaaagataacaaccaaccccgcctcctggctgctgtcgccgcctcttccacgcagcctcccggccgccgccgccgccagcacctccgcagcttcccggtcgcccgtcagcgggagtaggagggaagggacacgagtggagttgagggggagggtgaaga

SEQ ID NO: 227563 - DNA, 350 bp, Homo sapiens
  chr1:156390839-156391189
  hyper
aaaaggggaaatgggcagccaaaccccggaggtaaaaaccccagagatgtcctaataggaagcagggaaatcccggcgacccaaagagagaggaaaggctgtggggggcgggtgggggcgacccagagactcccaagcgagtctctcaaggagagaaggaaacagcagagaccccacccgggaagagatccgggagagtacccatgagaggggcggaggggaggaaagcagagggcgacagggcaggtgaccagagtcccaggccctgcagagccccggataaacggctttgttcaaagaggaccagagatcacccagggttgtgaaaatggccgggggttcgaggcgag

SEQ ID NO: 227564 - DNA, 52 bp, Homo sapiens
  chr1:156391549-156391601
  hyper
cgcggctctggccccggcgcgctccggctccggacttttcattcatcctttc

SEQ ID NO: 227565 - DNA, 32 bp, Homo sapiens
  chr1:156405318-156405350
  hyper
tctgggtcctctgtgtgccccggggccaggcc

SEQ ID NO: 227566 - DNA, 58 bp, Homo sapiens
  chr1:156406430-156406488
  hyper
agccagggaaagggaagatgagacagagagacatagagagacagggacagagggagac

SEQ ID NO: 227567 - DNA, 80 bp, Homo sapiens
  chr1:156427347-156427427
  hyper
caaactgcccgagcgaagcccttggagctctaaatacttggcagcaagtacaaagcaaaggtggcggggtggagggggtg

SEQ ID NO: 227568 - DNA, 195 bp, Homo sapiens
  chr1:156468708-156468903
  hyper
tcccaggcagggccgtgggagctgggacagccagactaagtcctggggcgggtgtgaccccgtggccacaagcgggtggacatctgtgaacactgacatgtgccttttcaatgctctcctcagctactgagaccttcctgttggggttgggagaggagtgggaggtggacagctcccaaacgccaaaacacccaa

SEQ ID NO: 227569 - DNA, 205 bp, Homo sapiens
  chr1:156469263-156469468
  hyper
tcaggaggagtcctcggaaggctgctgagaggacagcgtgattcactagggggagggggcccctttccccatccccctaagacccgaacctggtaggagagaagctggcattggagtgggggactaaaagcattttggtctccttggcccatcctcccaaaagcccccccaaactccctaaacccccgctcgcagcccagctccg

SEQ ID NO: 227570 - DNA, 139 bp, Homo sapiens
  chr1:156571300-156571439
  hyper
ccatagagacgtccgcgggaaccaaaatcacggtttttccaggagaaaccattgcggagcccaatttgccggtatggttgccatagaaactgggacctggagcgtgcccattttcggaggttccgaggctgttccactt

SEQ ID NO: 227571 - DNA, 694 bp, Homo sapiens
  chr1:156593618-156594312
  hyper
tacctcctgccccccatccacgaggtcattcactctcatcgtggggccacggccacgctgccctgcgtcctgggcaccacgcctcccagctacaaggtgcgctggagcaaggtggagcctggggagctccgggaaacgctgatcctcatcaccaacggactgcacgcccgggggtatgggcccctgggagggcgcgccaggatgcggagggggcatcgactagacgcctccctggtcatcgcgggcgtgcgcctggaggacgagggccggtaccgctgcgagctcatcaacggcatcgaggacgagagcgtggcgctgaccttgagcttggagggtgaggcccttccgctcccgccccattcctgtgtagcagcgggtccgcctcgcctgggtctcccagggctccttcccagtatctcctccgcacccctggggaccccagctccctctcccaggccgcgccgcccttcctccccctccgctcccatccgctggccctccccaggatccccgccaccccctaggtgtggtgtttccgtaccaacccagccggggccggtaccagttcaattactacgaggcgaagcaggcgtgcgaggagcaggacggacgcctggccacctactcccagctctaccagggtgagcggccgaacccagcacttcccaagccccgcggagctgtctcaggggcc

SEQ ID NO: 227572 - DNA, 697 bp, Homo sapiens
  chr1:156611560-156612257
  hyper
cttctttgaacaacgagaagactctccagttgtccaacttccacccctccagctgcaacatcgtcatcctttagctcagcgaacgctgggcgaacgctccctccccgcccctcctgcccctcctccctactccaagccctcggcttctcatccgctgaacgatgtcctacttcgctcgtccttgctctcgccgctgctgccggagccgaagcagagaaggcagcgggtcccgtgaccgtcccgagagccccgcgctcccgaccagggggcgggggcggccccggggagggcggggcaggggcggggggaagaaagggggttttgtgctgcgccgggagggccggcgccctcttccgaatgtcctgcggccccagcctctcctcacgctcgcgcagtctccgccgcagtctcagctgcagctgcaggactgagccgtgcacccggaggagacccccggaggaggcgacaaacttcgcagtgccgcgacccaaccccagccctgggtaggtgagtgcctccgcagccccgccgcccgccgtggggtcggggacagggagaagggagtgcctgcctggtctgcgccccccgcctgtcagcccttgcctcgaggctctggggcacccaactcgtcgactcctgacaccgcagcggggtaggctgctggacagccccgagcgcctgcagctgctgctgccat

SEQ ID NO: 227573 - DNA, 673 bp, Homo sapiens
  chr1:156626475-156627148
  hyper
gatggagacccaggccggaactccatccctcaccctggttcctgtctcttagaaaaggcaccagcgcccctgcccaagagcccctccaggctcctgctaccccctcattctctactagctcttttgcaccgccctcctgtcccccttagtcccgcccctctcggcctgcggtagtggaaggagaccagccccttccaggggacctggccctctgggttttggggccctaagatgcccgcccttatgtgccgcaggcctccgcttctgcaaccccggctgggacgccttccagggcgcctgctacaagcacttttccacacgaaggagctgggaggaggcagagacccagtgccggatgtacggcgcgcatctggccagcatcagcacacccgaggaacaggacttcatcaacagtgggctgggagacagggcgggaggggcccctgccatatgctctcactctctctcactcgcctaaccgccttcctcattaacccatgcacttattccttggttttctcaagcgtgcattccctcactcattcgttcactccccttctcattctctctcccttcccaccctacgcttaggcagtggccttcgggaacggagagtggaggttcgcgcagtagagtgcgcctgtgtgggccgggccgccgtgcagggggccgc

SEQ ID NO: 227574 - DNA, 209 bp, Homo sapiens
  chr1:156627378-156627587
  hyper
ccaaggcagtcaccgcagaccgcccgggagcggggaacggccgccatctgctggcggctgcgctcactgcacgccttcgtctccctagaccggtaccgggagtaccagtggatcggactcaacgacaggaccatcgaaggcgacttcttgtggtcggatggcgtccccctggtgagaggccccagtcgaaccccgccgtctagctcact

SEQ ID NO: 227575 - DNA, 833 bp, Homo sapiens
  chr1:156646447-156647280
  hyper
cgacgtctccatgtgtgccacgcgctcctggtagccgcgcactgccccgcgccacgcctcgcccagtcgccttgccagctcctctacctccggggccggcgcgggaggcccgcggggcggcgcggggcagcggggggcacaggcagcctgcgcgttcaggccgacgcgctcctcctcgtgcgccacgcgtagagcctctagctcgcgctccagctctgccacctggctactcagccaggcccgggcgcatttctctgcctcgacggcgcgccggttgcgggctacctcctccgtcgtccgctcccgggccagccgcagctgctggcatcggcctgccacgccctccagctcttcagccaggttgtcgcgcgccacctcggccgcgtgcttctcccgccagcgttggtcaacgagggcccgcagggccgccagctcgtcgtcggcatgcgcccgccaggaggtgtccgcggattgtgcccggagccccccgagctccgcgctgagcagctcattctgctcctccagcgccttgacccgggccaggtaggcctccaggcgccgattgagctcccacatctgaaacgactcctcccccatgcagccctccatcctgctcgtctgacccactgaggatggacagacgcggggcaccgggagaagggagcggctcgcagagcttttaggacggaagagaaaagagaccgacggggacaatgacggggcggggcggggtgggagtagcctgagcgactgagagtcgggagtgggagcgaggctattcatactcccgccaggcgggcgggaagaggggcgggacccaggccttaacccct

SEQ ID NO: 227576 - DNA, 62 bp, Homo sapiens; identical to SEQ ID NO: 197787
  chr1:156647957-156648019
  hyper

SEQ ID NO: 227577 - DNA, 187 bp, Homo sapiens
  chr1:156662234-156662421
  hyper
agtggaaatggggacgggcaaggcactctagagggccaagtgtcacggaaagagaaggaagttagacaggagaggagggggagggggctcctaggtcccatccttccataaagagccgtgggtctgaccccgatgcaggggaaaccaagtgtaggcagcaaggatgtgtcctcggggctgcaggaaa

SEQ ID NO: 227578 - DNA, 126 bp, Homo sapiens; identical to SEQ ID NO: 197788
  chr1:156675374-156675500
  hyper

SEQ ID NO: 227579 - DNA, 136 bp, Homo sapiens
  chr1:156675831-156675967
  hyper
tggatccagtgggaccactccgtactcagagaggggcttgggagctgcggggttccgggggttagggatctaagtgaggcaacggcgccccctgctggaacaactcggagaggctgggcgggggcggcacggtccc

SEQ ID NO: 227580 - DNA, 109 bp, Homo sapiens
  chr1:156676147-156676256
  hyper
cgctttctctgtcgcttcactcccgagaccccgagggggtctcagtagggggaagggagggaggcggggacagaggcgcggagccctggcgagctgcgccaccacctag

SEQ ID NO: 227581 - DNA, 222 bp, Homo sapiens
  chr1:156710901-156711123
  hyper
ccgccacgcccgtcgactttctgggagttgtagtccaagtgtaaaacggaagctcaaccacgaatcttacctctcagcatgctgggagttgtagtccgccgctagaaagctggaaacaggaagtttggcgggggtaggaaatcaaggaaaccggaacacaccatgaagcatgtcgggaatcgaaaggcaagctggttcggctggcccgcctggcacattccc

SEQ ID NO: 227582 - DNA, 45 bp, Homo sapiens; identical to SEQ ID NO: 197791
  chr1:156716455-156716500
  hyper

SEQ ID NO: 227583 - DNA, 60 bp, Homo sapiens; identical to SEQ ID NO: 197792
  chr1:156716530-156716590
  hyper

SEQ ID NO: 227584 - DNA, 47 bp, Homo sapiens
  chr1:156721109-156721156
  hyper
gggggcggcgggccgcgctgctcacccgggccggccagtgtgggtag

SEQ ID NO: 227585 - DNA, 209 bp, Homo sapiens
  chr1:156722050-156722259
  hyper
gatttgagccctacgtccgcctttgctaaggaggaaacgcttgagtttggtagccaggagatggccaaggagttgaggcacaaattggccaccttccgggtgcattcgatctcgtttctctaagctactgtcttgccaaggagacttggactcaacggctagctaaccccgcaaagatgagctcagttctagtcggttacggtagaatg

SEQ ID NO: 227586 - DNA, 138 bp, Homo sapiens
  chr1:156737022-156737160
  hyper
gaacttcaagtaccgaaatgctctcctgtccgtctcagtgactgccgtggtgaccggtggggcttgtagtcacctcggaattgttaggcgacgaaaaaaactactcaccccaggtgtccctgcgtcagaggcgggttt

SEQ ID NO: 227587 - DNA, 178 bp, Homo sapiens
  chr1:156814886-156815064
  hyper
aaagacgaaggtggcggcgctgcagcccacggtgtgcgccgcgtggttgcaggcatggatgtcgatccggtattccgtgaagtggcgcaggccgctcagcaccgctcgctcacggggcaccttgtcctcctggatctcgaaatccgagctgttgccccccagccggaggggcccagct

SEQ ID NO: 227588 - DNA, 484 bp, Homo sapiens
  chr1:156818571-156819055
  hyper
ctaccacggagtacaacttgcgggtcctggcttcctgggtcttcatagcctcgctgagctccgccctcacctgcctgtggtcccgaagaaattggcctcgtccggtcccgcccccgctccggccccgcccccggcactcacgactccttgtagtacacgatgaagctgagcaggtcgcgggcctccagtggctcatagcgctcccagcgtagcaggatgcggtctgcctccgtcacgttggacacgaagcgcagggtgcgagtctggcctgggtggggcgaggggcctgctcgcaaccgcgcctgccagctgcttgagcgcccaccctgaccccgcggcatcccattcccagtgagacctctgaggagaacttctcagagtgtccccctcgagctttctccctcccccgggtgtgcgtgtctagtgtgtggccgcgtgtccaccggcactggggttggggtctcacaggcggcgcggtctccgt

SEQ ID NO: 227589 - DNA, 266 bp, Homo sapiens
  chr1:156830840-156831106
  hyper
gcctgctgcccccacggctcctcgggactgcgatgcacccgggatggggccctggatagcctccaccacctgcccggcgcagagaacctgactgagctgtgagtgtccggcgggcggtgggggggcgcggggacaggcaggcattgcagtgccccgagggcgcggactcgctgcttgtttgctggtcaggcaggacgagcacggcggaaggctggcaccacgcagccttcggcgctgcccgggcgttcctccgcagccgccgctgc

SEQ ID NO: 227590 - DNA, 140 bp, Homo sapiens
  chr1:156862997-156863137
  hyper
gattaggggcggcaggaggagaggggggcctcgccctgtcagcctctccgagactagtgggatgcggtgcccgggaggggtcttaataagatcacggttgctgggcagcactggacagtgcccgacgtaggcgatctcat

SEQ ID NO: 227591 - DNA, 341 bp, Homo sapiens
  chr1:156863345-156863686
  hyper
ttttccctcccgggcgcctggatctcccctcccccggctcctgtttccttgtcaaaacttcctgccttggcgagggcccgagttcccacccccttcctgccccccgcccctcggcgcccctcccggccctgcgatcagcagcgtcccgcctccccgccgctcccgcagtcaggctggggctcgaagtggggaccctcgccccgtcctcggctgtccagtcctcctcctcgcagaccccggcggttcctaccccaggccgcaggggagacggggccccaaggcaggtgagtgactgcgcgccccctggcaggggaggcccggtggtgcggccccggagacca

SEQ ID NO: 227592 - DNA, 221 bp, Homo sapiens
  chr1:156890275-156890496
  hyper
gccgggcctggcccgcccctcgggttctggctccgccacccgccctcgtgggctctcccctcgccttgctctgccctgcggcgccccctgtcggccccgcgtgctctctgcggttgcccctttccctcgggcccgcccgcctcgcgcggttgtcttggagagggacgcgtaggctacgccaccgcggacgggtcggatccggtccctggacgcggaacaga

SEQ ID NO: 227593 - DNA, 126 bp, Homo sapiens; identical to SEQ ID NO: 197795
  chr1:157108692-157108818
  hyper

SEQ ID NO: 227594 - DNA, 882 bp, Homo sapiens
  chr1:157963009-157963891
  hyper
gggtatgtgtgtgcgcgcgttgtgggggggcagggggagggctcgtggagggaggcgccgtcggagggagagtagacgtcaggcggagggagggaggcaggcaggcagggaggcagggagggagagagggaaggaagagaaggggagagaaagggggagcaaagaccgaaagagacccagagagatacagcttgagaggagaaataattaaagggggagggcgaccaggaggagaaaaaggtctgggaggaaagagagataaagagaatcggagggcagggaaatgagtttgtgcgcgtgagtgtgcgcgcgcgcgtgtgtgtgtgcaggggcgggcgcgggcgggcggggggcgggctcccgggctcccgggctcccctcctccccagcccgctcctctggctcgctcgccaactccgggccccagccgcgggcgggcgcacggcgggcggacagcatgctgagcctcctcgtctggatcctcactctctccgatactttctcccaaggtaagggcccccagcccacccccggacgctcggcttccccccggggccggggcactgcttccccggtgggagagtgctggagtgccccgcggcccgcggccagtccccgggtccggacgccacgaggcgggggctcggtccgggcgcagagccctgggggagggggcgcggagtaacgaggggctggggagaatgagtttgccgttgatttgcccaagttgtttcctctggctgcgcgggagaaccgagcaatggggccgcgagggctggaggtccgagtaaaacggggaaccgaacgctttctcttgagcttctggcagccctaccgaccctcgccctctgaggccggggttccggacgcctgagtccagcc

SEQ ID NO: 227595 - DNA, 592 bp, Homo sapiens
  chr1:158083065-158083657
  hyper
gaagaaaggcatcccgggcaaaggcaccgagctcttggtgtggttctcctgggataagcccacagtcacaaacttgtgcaggaatgggggtaccgggaagcagcccggtgttccaagccttttgagattctccggacctgcgcgccgcccgctcggcagggggctcggcaggcgcgggcggcgggtgggggcgggaggctctgcccgctcggtggctgccgcggcctcctccgcgctgctctccacgcctggcttattatgcacgaggcaggcaatttgccttcctccccggggacccatctcggagacaagaaggtagtttgttctctgtaatggcttctgctggagtgcggcggggcccaggcgcgagcgggggcacgggcggggagttggcagcgaaggatgcgcccggcgccccccggcggccgcccggagcccgaggtcggcgcgggaggagcgctgactccgcgggccgagccctcccctgccctcctctgctcctccgtaactcctgagctgtggcctgcctttctgctgcctccacgtccctactcttcctttctgccaccccgtttgcttcttaaaggttgtc

SEQ ID NO: 227596 - DNA, 178 bp, Homo sapiens
  chr1:158088031-158088209
  hyper
ccagccccaacacacgcagtctggaggttgccatactaggagaagggtaaggcagggcacaatttgtcttcgtgtaattatctgtcaggtacagcttgtgaaacctcagccacctccctgcaaccatgcaggaaaataaattacacacgagcacgcagagacacggcggcaccatctt

SEQ ID NO: 227597 - DNA, 33 bp, Homo sapiens
  chr1:158150992-158151025
  hyper
cggagagagggagctgggtagggacggggaggg

SEQ ID NO: 227598 - DNA, 333 bp, Homo sapiens
  chr1:159158185-159158518
  hyper
cctcagggaccctaagcccacgtcccacttttctttgtaatctcgacctcccggcccccgcgcgccctctctcggtcctagcgcccctttctcccctctcctcccccacctgcctctccccagctggctctgagtcgcgctgggacgactggcgaagttcacccgggactccaaagcccggacacgtagcagctctgggctctgctcagcagcggatgagctcactgaattttgcgcacttgattggctacttcggggcgctgcggcgggagaccctgaaaagattcgcaaggccggtttctttgtccctccgcctcttcaggttgggctagg

SEQ ID NO: 227599 - DNA, 398 bp, Homo sapiens
  chr1:159750917-159751315
  hyper
tgggtgcttccgggccggctggcgggactggcgctgccgcggctccccgcccactaccagttcctgttggacctgggcgtgcggcacctggtgtccctgacggagcgcgggccccctcacagcgacagctgccccggcctcaccctgcaccgcctgcgcatccccgacttctgcccgccggcccccgaccagatcgaccgcttcgtgcagatcgtggacgaggccaacgcacggggagaggtcagcgggcggggtcagcgcagggagggaggggcctggaaggtcagcgggggacacgggcggagctggggagaccgggcctgggataacttaactgggctcggggaggcagacagtagggccgggagactgggaagccagtgcgggggagggaagcg

SEQ ID NO: 227600 - DNA, 205 bp, Homo sapiens
  chr1:159824301-159824506
  hyper
cggtcccgggggtgcggagaaggctcaggatcgccttcctccgccctcgcccgccccttcccacttttggggaggaggctctgcctccctacgcatttccttagggaaatgccttcacccccagccgcctggcagcctggggcgagcgaggtcgtccccagccccgacgtgtccccagctgcagacagagagccccgcgccctcc

SEQ ID NO: 227601 - DNA, 929 bp, Homo sapiens; identical to SEQ ID NO: 197801
  chr1:159894400-159895329
  hyper

SEQ ID NO: 227602 - DNA, 489 bp, Homo sapiens
  chr1:159915360-159915849
  hyper
acctgctccgcaccgctcggctccactctcgccgctacacaatagggggcggacccgcctccccgcctcggatgccccgagcgcctcccgtcgccctggagaccgccaatccccctcccgcggcggccaattggagccgccagaggcacggcgaggcgggcgggacccctgagcggcctgggagttgtagtttcaggagggaagagctcggctgcacgtgggctcaggtcgccccctcgtggacctctgcacagccaagcgtggaaaggccggtgggccgcttcccgccgccagcaagaggggcagcagggtccggctcgcgctccagggctgcgggagctggccccttgccaggctactggtacgccgtccttctttcggaacctacgggcgaccctctccgctccccgaacgggcgcgccacagaggcggcagcgagggttgaaatctgagcctgggggtaggagaaccaggcggggagcatgactc

SEQ ID NO: 227603 - DNA, 223 bp, Homo sapiens
  chr1:160001425-160001648
  hyper
tagaaaaccagggcgactctggctagaaaggccacaccaaagacgccggctggagccaccttcaagttcaggagccattcgccccagtgcttggtggagcccatgatctgaccgtgcgacagctgcttagccccagctccaaactgccttcgtacttctaaccttcccttcggttctttgcagcaggtggccgccgcatctcccacccgccaggctgccaacc

SEQ ID NO: 227604 - DNA, 144 bp, Homo sapiens
  chr1:160039833-160039977
  hyper
cccttggatgggccgcggggcagcgggacagatggacggacggggcgggcaggagttaggagcagagctgtgcgacgggccgggccaggactcttaaacccggagctgggatcagataagggcttgtccgggggccggggccgg

SEQ ID NO: 227605 - DNA, 374 bp, Homo sapiens
  chr1:160040181-160040555
  hyper
cggggcaaggaagcggagacccagacagctgcaggcgcagagagaaatatccaaagacagagacccagacagacccggggagaaagagagatgaagagacgatatgcgaaacgataggagctgagctggcagggtgacaggggaagggagaaggaagaaaagggaggcggtcctgtcagcgatgggttacgagagctggagccggggggcgggactgggaccgagttaacgaagtggaaatgaattcaggaccggcccagtggccctgcaggcagcgccgaaggcggcgcctggaagtgagattggggcggagtaggcctgggctccctgagccacaggactgtatctttgggcacaattcccgtgttgttcac

SEQ ID NO: 227606 - DNA, 103 bp, Homo sapiens; identical to SEQ ID NO: 197806
  chr1:160040585-160040688
  hyper

SEQ ID NO: 227607 - DNA, 401 bp, Homo sapiens
  chr1:160053733-160054134
  hyper
ggcgcccagcgacgcgcggcaggtggcagcagctcgggcccccgccgcactccaggcgcccgcagcgctcgccctgacgcggccgccatggcgcaggagaacgcggccttctcgcccgggcaggaggagccgccgcggcgccgcggccgccagcgctacgtggagaaggatggccggtgcaacgtgcagcagggcaacgtgcgcgagacataccgctacctgacggacctgttcaccacgctggtggacctgcagtggcgcctcagcctgttgttcttcgtcctggcctacgcgctcacctggctcttcttcggcgccatctggtggctgatcgcctacggccgcggcgacctggagcacctggaggacaccgcgtggacgccgtgcgtcaacaacctcaa

SEQ ID NO: 227608 - DNA, 92 bp, Homo sapiens
  chr1:160055539-160055631
  hyper
agatgaggatgaggaaactgcgggtggaggaccaaaggcccactagggggcgccgcagtccctcctctgacgccagagctgctgatgctccc

SEQ ID NO: 227609 - DNA, 43 bp, Homo sapiens
  chr1:160232422-160232465
  hyper
acagagcgagaggcgcctgcgcattaccgaagaggcaaagttg

SEQ ID NO: 227610 - DNA, 63 bp, Homo sapiens
  chr1:160370324-160370387
  hyper
tcatcccctccccctccgccccctcccccctgcgccgccggctcccgatctgattcctgatcc

SEQ ID NO: 227611 - DNA, 111 bp, Homo sapiens
  chr1:160370747-160370858
  hyper
aatcatgcaaggggccagggggtgcccgaccccagagcgagcggggtggcttatgggggaaggggggctggactccgggcaacccccttccggtccgcttccccactgcac

SEQ ID NO: 227612 - DNA, 424 bp, Homo sapiens; identical to SEQ ID NO: 197810
  chr1:160983485-160983909
  hyper

SEQ ID NO: 227613 - DNA, 947 bp, Homo sapiens; identical to SEQ ID NO: 197811
  chr1:160990370-160991317
  hyper

SEQ ID NO: 227614 - DNA, 148 bp, Homo sapiens
  chr1:161015808-161015956
  hyper
actgccccacttccgctcactccatcttgatgagagttggtgtttgtgggttatttgtgaagccggaaagaagccgtgtcctggagaatgtagctgaaggcctggccactttcgacaagaacgggaaagagacgactaacttgtacta

SEQ ID NO: 227615 - DNA, 570 bp, Homo sapiens
  chr1:161067872-161068442
  hyper
aaatgatccctcccggccctagtggagcagcacctgcacctcaaatgtcaaaatcgcaaatcagttcacagcggagatcacaggggtttattctaaggacccgactgtcctccgactttctgaggttaacaatcttgcaggatttttattgacctgatacagctcccgtagccttggtggcaccaccatacggttcccgatagccacccaggtgtcctgtctccacggtaactgctgctttgcgaccttcggtttgcagcggtcgcgctgcagccgctgcagtggttgctgggcgaccacggagagaaagccgggacttgaggtgggaaccccggctggcgtccggtagggggaggttcccggggaagcccgcggaaggcgaggtgcctggcctgccatgtaggggctcgttccaagccgcagaccccaccgccctccctctccccggggcccatggcggtggccgtgcccccgggtcgggccgcaggctcaggctgggcctggaggccagtggcgcgggacgcgcttttggctagagctttccattcatgcaccgaactgcggggacgg

SEQ ID NO: 227616 - DNA, 41 bp, Homo sapiens
  chr1:161087909-161087950
  hyper
tctggctccagaccgccctccggatcggaccctgcgaatgg

SEQ ID NO: 227617 - DNA, 106 bp, Homo sapiens
  chr1:161102589-161102695
  hyper
cagcggcattaatcggggagtggatagcttcacttcgggaggagagatagagattggcagccatcttgctttggggcaagctggcaacgccggtttgtcttgacgg

SEQ ID NO: 227618 - DNA, 120 bp, Homo sapiens
  chr1:161123623-161123743
  hyper
atgcactcacaagcgggtaactaggtgacaagaaaacaaagatcttattcaaaagaggtcttacagcaacccaacgtctcatcttcccatagtaaagatgacggcgccttgaggtaagct

SEQ ID NO: 227619 - DNA, 60 bp, Homo sapiens
  chr1:161129125-161129185
  hyper
cctctctgggcagcgttgagaaccagcgaccctaaacttggctgcgtttccatggtgtcg

SEQ ID NO: 227620 - DNA, 131 bp, Homo sapiens
  chr1:161136046-161136177
  hyper
ctcactcccagctcggcgctaacacggttaacctccagctcttacagctgccgtcgctccgcctctgccagttcaatgttttattggtgaacgtgatccggggccttccaagtcccgccaatccagatgta

SEQ ID NO: 227621 - DNA, 99 bp, Homo sapiens; identical to SEQ ID NO: 197812
  chr1:161171825-161171924
  hyper

SEQ ID NO: 227622 - DNA, 385 bp, Homo sapiens
  chr1:161195513-161195898
  hyper
ctagtgtcttgtacgctcacaagtttttttccgaccttggagaggcctagtgatctaaagccttccacttaagtctaaggggccaccaatcaagtcctgcccgcctctgcagctccagggttgaagctcttgggccgtcagacctgccactcattttcttcctcccttcccattggcccatggtaaatagcgaggcttttttttttttttttttttttcattgattgggcggggcccaatcagggttgggttgggtctttgacagctttctttgccagattcaaagatggcgcttacggccacgctaagaatgcagcgtgaagctgcagttctgccatcactcaagatggctgcccccatcaagatgaccggggtgtgccggggg

SEQ ID NO: 227623 - DNA, 203 bp, Homo sapiens
  chr1:161196136-161196339
  hyper
tgttccaggtgtagcgtcggaccatgtggaagtttctgaggctggggagccggataatggggggtggggcccgttggggggtaaaggggcaatagcgtcctttcacaggctaacctcggctcttcccagtcctctggactaaaatggggaacacattgggcctggcaccaatggggactttgccccgccggagcccccgccga

SEQ ID NO: 227624 - DNA, 452 bp, Homo sapiens
  chr1:161228440-161228892
  hyper
aggctgtcattctacggtaggaggagcttctattggtcgggctggaggcgggtaccgagctgagtataaaaggtggggccggaggcggcgagctgagcggctctgacaggacgggtcgcagggggtcgcctggccggagctgggctccgagaatcccgggtgccagcaccagagcagcggctctccgcactaactctcctctcctggtcagctgtaacccctgccgcagagcccggcaactttcagctgtcgcccgcggagccccgagggccactcgcctcacctgtgcgtgcagcgcctcgcgcgccctgtccggctgcggagatgagcgaggtgagcggtgcggcccccggcgctgtcggcagggctgcggcggggagggtgctgcggctcgggatcccagggaggcgagggagagcgaggcagaccggagccgcgaagaaccctccagg

SEQ ID NO: 227625 - DNA, 768 bp, Homo sapiens
  chr1:161275450-161276218
  hyper
ggcctggggtgggggggtggcgatcacttgtccgagttcaggcccatcatgttcttgagggcgtttttgaggctggttctgctgggggacttgacagcaggccggagctccgggctctgctcatcctttcgtagctccatctcgatgaccatcacctttgggcctttggcggactccacccctaacccccgatcccccgcccggcccgctaaccgctatttcttatccttgcgagactcccccagccccttggccttcttctcactgacagctttggtgcttctgctgtggtccagcattgcatacagcactggcgtctgggggaggggcgcacacatcagtcaccgagcgactggggcttgactgttcccatcccacccctcactgctgcccggcggctcccagggttctccttcccatcttgtctaggccccaagtcccgctaacctgccgcccgcgcttcgacgcgtcctttcctggcttgtgcaatttccccttctccatagcactgcaagaagagagactgctgtacgtttggcctcgccggaaccccttgcaccgcggacacagcttcctcttccccttggccctcccacccactggagtagtctccgcccagatgggggatagtggggagagggggaggggagctaggctccgccccttacctgagcctcctctgcagggccgcctgcctgcgtagccagcagtaccgaaccacgtagaaaagcagcagcagcaacagcaccaccccgaggacacccccga

SEQ ID NO: 227626 - DNA, 190 bp, Homo sapiens
  chr1:161283831-161284021
  hyper
acgcaacagactgcgaagtccttaaggaagaatctaaacaagtccgccgtttgctgtttgggagtgcgatacaaaatgaatatgtacgcaggtggaacgtagactgcagattttgagccagcggcgtttctgccgaaatcctggcaaattccggtagaagtcggctgcaggaggcggaggaggagactaa

SEQ ID NO: 227627 - DNA, 577 bp, Homo sapiens
  chr1:161368924-161369501
  hyper
gataccggcaatcagcgcaaagcgagataatcaccagcgcactcttggatctgtatacaggtttgtaaactatgtggaggaaaccgacccatcgcagtctcggccgaagaggccggagccggagccagagccagagcctgagcagggtctgaaaaaaggaccggccgttcaggactaggccctgaactacaacttgctcctcaggggtccgggtcggaagtgacgacttcattcactgagcagccatttccggttcccagtgtgtccgaagttccttctgggtgtcagaaaagacacaaaaactgacagggcggaaccgcgacacggtgcctgatgatatcaaaaggtctcacggctccggagggacccagtcgcccacagccgccaggggcgccgccggctccgagcccgttgtcgagagccgctcggctgctggggtctgcccttcagtccttccaactctcctcggacctagagttccgggatctcactgcgatctgggcgaattcttacgtagaattcgaaaggatatggggaaggaaaaaaacaaaaacgggaaccactttgtttccgcccg

SEQ ID NO: 227628 - DNA, 292 bp, Homo sapiens
  chr1:161369561-161369853
  hyper
ccaggcggtggcaggttttccacaaatgactctgaaaagtcagaggctcaccactgtgtctctgacccacgagaaaagtacccgggcgggccacccacagcttcgggatcggggcgcgcagggaagtagccagcaaagcaggtaagtcccgggctgctcgcggcggggtcatgactgagggcacaggggtgaactccatggtgcttcctcaggaaacttccggcgcagtcagggctgcagccagagcccggagatagttgggcagggctccaggcgtccccgaatgctcgtc

SEQ ID NO: 227629 - DNA, 697 bp, Homo sapiens
  chr1:161409868-161410565
  hyper
caagcctccttccccggcgcacaggcacgcagccacaggccaagctgcgacgcgagctccgcgcgcgggatctccgcaaaaggtccgcccgatgcgttgggcgggaatcgagcccgggtcaactgcttggaaggcaactatgctcaccactataccaccaacgccgcacggcgcgggcagccccgccgcgccggcccggggctcccaccagcgcgccgccgacgcccggggcaggccggccccgacgcccggtccgtccgcccgcccgcagctccgcgctgccgcggcctctccaaaggccgccccgcgccccaccggtgcaaggccagcgcggctgacccgttacgcccgcctgcctctgggggcgctctcgctcactcgccgcctcgggcccccagagcccttccccaacaggtgcccgggggggaaacggccggcgccggcagggtccccactcctacgcttcccaccgggcgcagggccccgtgtgtcgcagaaagcctcttccgacaaccactttgagccggcagctcgttgggcgccgtgcagggccagaggaggcctcccggctgccgctaccaagccgcggacgagaagaaaagacaggaggccaaggaggcccagaaggccaaagggccaggcaggccaggcccgagatggcaccctgcgactagctggagggcggaggaaggagaag

SEQ ID NO: 227630 - DNA, 126 bp, Homo sapiens
  chr1:161494853-161494979
  hyper
tacctgggccagcccgtgaagcacgcagtgatcaccgtgcccgcctatttcaatgactcgcagcgccaggccaccaaggacgcgggggccatcgcggggctcaacgtgttgcggatcatcaatgag

SEQ ID NO: 227631 - DNA, 156 bp, Homo sapiens
  chr1:161509889-161510045
  hyper
tcagggctatgagccgcgccctgaagcacggaaagctaattgtgtcactggtttcaaatcaacctcaatttttttggagacgtgagtgctgagcattttttcttcagtgaagtgacttggcagccaaaatcgccaacgcccgtctctgtggcgcaa

SEQ ID NO: 227632 - DNA, 156 bp, Homo sapiens
  chr1:161510105-161510261
  hyper
aagtcgcattttgtgaaccctgggtttttgaaactttgactgaaaaaactgcgtgcgatgctatccgctgggagcgctggggccttggcgctcaaaaccagccgcggtgctaaccgcagggagctctggtagcagacctccgcgttgtgtggttcc

SEQ ID NO: 227633 - DNA, 473 bp, Homo sapiens
  chr1:161582200-161582673
  hyper
ggacatgaggagtgcgggggggaagagaagacggcggaggaaaatcccccggcggtgctcaactgcggctttctctctcggctgtgagccggctccgccctccggcttccagagcaagtggcttctgcgttcaccgccccccgccgtttgtggggcggggccgattcataagaatcggttctcaccaatggagggcttagcatgtttaacctcaggatcataaacaaaagacactgctagaacggtcgggaaagtcatacgctttgcttatcttatatatagatttctaaaattccaaaccggggacgcgttggtggtgtagtggtgagcacagctgcctttcaagcagttaacgcgggttcgattcccgggtaacgaaacgtttttgtctttccttctacgaaaaacttttctgagccggagcctccagcgcgctgtgtattcgttttacgcctcaacgaaactgcagcaat

SEQ ID NO: 227634 - DNA, 452 bp, Homo sapiens
  chr1:161591323-161591775
  hyper
agggctgtgagccgcgccctgaagcacggaaagctaattgtgtcactggtttcaaatcaacttcaaattttttggagacgtaagagtgctgagcattttttcttcagtgaagtgacttggcagcccaggtcgccaacgcccgtttctgtagcgcgatcggttagcgccttcggctgttaaacgaaaggttggtggttcgttcccaccccgggacagaagtcccacttttgtgaaccttgagtttttgaaactttcactgaaaaaaaccgcgtgcgatgctatccgccgggagcgctggagccttggctctcaaaaccagccgcggtgctaaccgccgggatccctggcagctgacctccgcgttgtgtggttcccaatgtcctcttctgccttagtgctgtacgggtaattttgaggtatttggtttttccgactagggttgtagtgataac

SEQ ID NO: 227635 - DNA, 576 bp, Homo sapiens
  chr1:161695645-161696221
  hyper
ttcgagggtgagccgctagtcctgcgctgccgcggctggtacgacaaggtggtctacaagcttcactactaccacgacggccaggccgtgcgctacttccactccagcgccaactacactgtgttacaggcgcgtgccagcgacagcgggcgctaccagtgctcgggcaccatgcgcatcccggtggagagcgcgcccatgttctccgctaaggtggctgtgacagtgcaaggtgggagagaccaggggccccgggagggaggcaaatgagcattgagaaattctgggacaggagctcggcgagaaaagaaggggcggaagttcaaatagctgccacttggagggtttctcttagactatggacgctgtctcctctcctttgccgtgaagcagcgcttgatccgccgcctgcttggaggctggtccctttccccgacgcacatcctggcttctcactctggctggggactcccacagagagggcagctctggcaggggcaggggccactgtgggactgggacgaaggagcgactccctagcgtcctgcaaggcaggcgcagcgtctcctattctag

SEQ ID NO: 227636 - DNA, 285 bp, Homo sapiens
  chr1:161696448-161696733
  hyper
agcggtggacaagccggcgccgttgctccccgccctctccgtagagctgttccgggcgccggtgctgagggtgatgggtccgcgggaggcccgcggcgcggcgctgggtggggtggtgctgcgctgcgacacgcgcctgcacccgcagaagcgcgacacgccgctgcagttcgcgttttacaagtacagccgcgcggtgcgccgcttcgactggggcgccgagtacacagtcccggagcccgaggtcgaggagctcgaatcgtactggtgcgaggcggctaccgc

SEQ ID NO: 227637 - DNA, 69 bp, Homo sapiens
  chr1:161697227-161697296
  hyper
gcctgcgctccgccgacgcccttggaacaatcggctggagccctgaaacccgacgtggaccttctgctc

SEQ ID NO: 227638 - DNA, 35 bp, Homo sapiens; identical to SEQ ID NO: 197821
  chr1:161736084-161736119
  hyper

SEQ ID NO: 227639 - DNA, 78 bp, Homo sapiens
  chr1:162039135-162039213
  hyper
tcctggtaaaacacgaaaacaaaacaataaacacggcccctcccccctctccaaaaacaaaaacaaaaacttcaaggc

SEQ ID NO: 227640 - DNA, 343 bp, Homo sapiens
  chr1:162530845-162531188
  hyper
aggtcagagagcgcgccaggcccgccctgaaagtttctccgcaggaaaatccaccgccctttcccaaccacccgcgtgggtggctcggaaatccgccaccctggggacacagctccctgcccatctctgtggcccgcttgtgccccgtgccgctgggccgactaagagcctcgggctcgcacctcccagtacaacctagggacgtcaggggtcctgggacccacgagccgctctctgccggccggctcctggcccctcctagcagacccaaccgacatccttcaccctcagttagtgcgcaggagggaccgggacgccagccgactgcgctccagaactattc

SEQ ID NO: 227641 - DNA, 125 bp, Homo sapiens
  chr1:162531409-162531534
  hyper
tggccggggctggcgctccacttggcccccgctcccggcccgccccgccgccgcggccccccggatgagggtatatattcggagcgagcgcgggacgccgatgagtggccgcgcggaaggagctg

SEQ ID NO: 227642 - DNA, 471 bp, Homo sapiens
  chr1:162792156-162792627
  hyper
agcctgtggtggaagatgtgcgaaagggatgggggaacgctgtggaccggtgtggagtctaggacgacaggtggtgggctctgtccccacgcgcctcgcggccagcagaggccccctcactgcggccgccgggcgggactggcgcgggcggcgctgggctgggcccgggaggctggcatccctgggtgctccggtgcggtactagggggcgacggctgagccgtgggtggagccgctgggtcagtctcggatagaaataaactgggaaactgctgtggtctctgttgcttgcgtgctcggttttcgtgcttatcacgctgatgatgaggaaggtggttttggttacggagtgagcaggtgaacgcctccccgtggaccccaccggactgggtggggaactcacaactctgacgccccgtgactgcatcccctagctgggcagagacgcatttggctcgccaccagccacct

SEQ ID NO: 227643 - DNA, 70 bp, Homo sapiens
  chr1:163291479-163291549
  hyper
cggaccccgaaaacgctctaaacgctggcggaagtcacgcagagatgggctagacgctcaaccccggtct

SEQ ID NO: 227644 - DNA, 359 bp, Homo sapiens
  chr1:164290495-164290854
  hyper
attgtatgcaaaaaaaactgcgccgtgttcccctctgttgtgtgcgccgcgtccggggagcctgggccgtgcctccctggcgtatgcaggtcgccggcgcagccgccagctccgggggccgcgcttccagccacccgcagccggcggggcccgccgggcagcacgggaatcgcggagcgcggcagctcccctgcgcgccgccgccgccctgctcctggcctctgcaggcgcctgggctgctccacctgagagctgcgcagggcggtctggcggtggctgctgcccacataatccgacccaaaggcccttggcttcaatgcaaatcccggagctgaatcgccaacaacccagggcccact

SEQ ID NO: 227645 - DNA, 312 bp, Homo sapiens
  chr1:164529156-164529468
  hyper
ccgagggggagggcgggaggaagcaggacattggagacattttacagcaaattatgaccatcacagaccagagtttggatgaggcgcaggccaggtgagatggaggcttttcttttcctttcttggggttttttgtttttcttcctcttgcagggggaaacaatgggaaccgaatcaccacagcgctttttttgaaaaatgttatttcttttctcattttgacaagcaactacatggcggaggagtaaaatttgaaggagcgttgttatcgaaagtgtaatcgcccatgccgagatgtggctgtgtacatat

SEQ ID NO: 227646 - DNA, 359 bp, Homo sapiens
  chr1:165086749-165087108
  hyper
gcttccccgccggccgttctctccgcaggtgcccggcccctgcctccgagtgcgcctcgcggagcgcaaagcgctgtcacgactcggtggccgaggtgattaattagcggcgtggccgtgcgggggacgcgtgctggcctccacatctgccccgtgccagcaggggtcaatatgcggtgtcactgctttccctctcactccctccaaagcctaattggctgtgacacgcgggccagctgttgtgagaggtggagcgcggcgggcgttttccaggacggaggctgagggcaggttgacgggcctgtggagaatgtgtgctgcttcctgcaggcgaccacgtctttgttccaaggctaggg

SEQ ID NO: 227647 - DNA, 486 bp, Homo sapiens
  chr1:165204982-165205468
  hyper
accgagttcttctttcagagcggcttgtttactcaggattgggcattagaactcaggggaggctctaattgaagtgacggctttggagattatggggaacatatggccctaccgccgggctctttatctgcattttctcataaaactgccgtccgtgtgtgtttctgcgcctggcctcttgcatttctaaggggcctttgaagacagggccgaatgcgcgcgggggcttcaggcactttgcgctccacggcgggtcccgcagcccggcccgagccggccctggaagcttcgccctggactagactggcaccgacgccgcccccagcctgagcgctgagagggaaaacgagagctagaaaggaaagaaatcggactggtgactgcctggcaggggtgtaattcaaactgttgtgagcagacggcaggagggagttgccaaggtaacgggtgattcccacccgccgccctttcgctaaggctggggag

SEQ ID NO: 227648 - DNA, 1418 bp, Homo sapiens
  chr1:165321203-165322621
  hyper
tgcagaattctgcgcgtgcacgcgcgcgtccacacagtcaacctacaccagtcctaatgcacaaaaacagagacctctggatcagccacttttcttcaatcatctccaaagccctgcaaagccaatacacttattaattaaacatttcgcaaggaaaaaaccgttccctctccttacacctcctaagctcctcccggcacgcccggagagaataaggaagttcttctacctcccactttctggcttcatccaggctttagtgttataaaaatccagtttcgaaatatccactttcttaaattcctgcctcccagttctcctctgaacgtaccagaacgttcatgtggacaggagggaactgaacttgctccgtggcagaagagcgtacccacacctgaactaggatggcggcacaggttgaaggagagggcttcagttcaggccccaactactgtcctaaaagcccctgcatccgagggttctgcagaaaaccaggaaggcgacagtgaaagggcgaacgggctgtgcgcttagctccgaatggcagcagagccatttccgagcccaaactgtccggactccagcgaacaaacccgagcgggaaacgcgcacagggcacaggggacagaagctgcggggtcaatacagtctcaccgcaaggcacaggcgcgacgctggcgcggacacctgggtaacatggggtgagaaccagcaaggagacacggggtcactggcaacccgcagggcaccccggtaaaagagggagaccaagctcgagggattccaaggctaacaaagagtggcctctggaaacggccgagtcagagaaaggggcctggaaggaccagaaagcaggcgagcagaccgtggaggacagccattgcgcgcacttctgcgggactcgggccactgctgcgcgcacccgcgcggatctctgccctaccaccttcccgtgaggggcaatgtacacgactgcgctgaagggaagttctgctcgctgggcgtgtctcttgggccttccagaaaaggactagggtaaaggaggacaaagtcctcgacgcacactgatgccagtgcgcggggagcgctgcgggggtgcggccacttacttctcgtagtcatacttgcagtacagcttcttgtcccggtagaagcaggtggtctccaggggctctttgcaggaggcgcactgcacgcactgctcatgccagaagctgtcgttgagccgcagcagaaacctgtccaagatgacccgctgacagccctcgcagacagacttggggctcaccgctctgcctgtagccacaacagacgttggcgggtgagcagcccgggcaggtagaccatgccaaacctggccgggacccgctcctgatcccttcacatccacggattcccccagcgccccccaccccagg

SEQ ID NO: 227649 - DNA, 138 bp, Homo sapiens
  chr1:165323109-165323247
  hyper
tgataactaagaagcgtcaaaacagagggagggaaaaaaatagcggaagaagcaagccgctgagtgtcccggccgggattcccgatgccaggcgcgttcggcagcagtgcttgagggcgaaacgggcctcaaagtgac

SEQ ID NO: 227650 - DNA, 343 bp, Homo sapiens
  chr1:165323481-165323824
  hyper
ccttccgagaggcccggccaccggctcgggagctgggccggtcgctttgggagcggatgaggaaggttaggagaagcagcgagatagatcccaattttacaattctattttctttcggtagggtctcggcgtcctgggccacgttgagagcgaacgtgggccgagcggaggacacagagtaaaaagcgacgcccgctgtatacataaatccgcacccgctgcccgcccgggtactgcctgctctggcttccgctctcttccgaggctgggcaagtccaaaagttcccgaaaggggggttcaaagaggggcgctcagtgcacgtgatttcgtttcatctagggt

SEQ ID NO: 227651 - DNA, 960 bp, Homo sapiens
  chr1:165324197-165325157
  hyper
gcctagggcccagccgcgcggtctaatccccgcgctgcgttgcctactggcccagaaaagtctctctcggccttgcccatggctgaaattggggctggagttggtgggggagagaagcctcctcgaacttgggcgctccaggcctcgggtctcggatgctattgcctctaggccgcgagaagagggcggcatttatgagacgtcgatcagctccgagattaaaaatccagccctgggtatttttaatcacttgccactcagacgcctacgaacaagctcgcccgcccctcgcggctttggggaattcggtgcccagtgcgtgaggcctggggcggcttgttggatttatttgggtagggacgacccacaagcactgacggacagatagtgatggggctcaatttagtgtatgaagaggggcgctagcttccctatcgcggaccaggtcccagagagcggggctccagagctcagcgccaagcggaaagagagtgcgcccaggacgcacggcctgaacactcacccagcagcgaggagaaggaggccgaggtgtcgatcgcgctttggaagttctcctccatctttaggccgtccagcatgttcgggccgggccgggaggacctgtagaggagaagaaacgatgcgtctgacgtccgtgcccgctgggactcggcgccagcagccaccgcactcctgggaaagaactgagggagtgtccagggcgaccagaatcagccaggaggatagggtccagccaagagaatgtagggtgggaggagagatcagtcacagcgaactgctctggctgatctgatttcacttgaagtcaacacgttatgtacttaggcctccgccccccaactgcgtttctccttctcctgcccccctcacccccacctacatcccttgccccaggttttccatcccgaatccgactccgccccaacctatacgaaggtg

SEQ ID NO: 227652 - DNA, 37 bp, Homo sapiens
  chr1:165325517-165325554
  hyper
tggatgcatttcaagtcaactttcagaaacacgcccg

SEQ ID NO: 227653 - DNA, 240 bp, Homo sapiens
  chr1:165326094-165326334
  hyper
ctgagcccctccgcctctgggagctctcggacacgctaagtttcctcccctccacgtgtaactgttacctcggggcgctctggcccggtcgccccccagtgcccctcaccccgactgggcctttgcggagatgtcggcgcctcctggacagcggtgccgccacgaggattcccccgccgctctccaactgctgctataaaagcgctgcaatccttacccgggccccgggaagcgctgaga

SEQ ID NO: 227654 - DNA, 163 bp, Homo sapiens
  chr1:165345509-165345672
  hyper
agggtttgttgttgctttttctgaattaaaagaaaacagggactagagcaaggaagagagcgaagttcaagggagaatctggcaagtcaccttgggcagcccctggaccgccgccagagctctcttggagagggtgaggacgccgagcgtgtgatgagcgcct

SEQ ID NO: 227655 - DNA, 543 bp, Homo sapiens
  chr1:165414039-165414582
  hyper
ctcatacaggtccacgcagtgaagcccaagggagatacttacctccatagcctgcgggaaacttcatgaagtgagaataatttccatacatgtttactcgtcagttcatgttcctctcctgtgcagcttctaaatattaccgcctctctcggctcccaggcacagcccggctttcttcaacttgggctaacaagagtggtcatcgcttcctagcagcccggggagcacaggctgggccagccctctgggattagtcaggaatctgcctctagatcggagagtccacatagtgcgtttgagacggctgtggcggcagcagctggtgcctgtcagtaatcacgcataatgctgccgccgccgccgccgccgccgtcaccgctactcttgccaccgccgtcgctgctgcttgagatcctgttgctagtttgattaactcagggttgggctgctgcgtgcgactcttccagctcccggcgcgtccccagaggtccctaccgggtggcacgatctattatctaggaagccaatcgatgtatgaccgcc

SEQ ID NO: 227656 - DNA, 55 bp, Homo sapiens; identical to SEQ ID NO: 197834
  chr1:165599887-165599942
  hyper

SEQ ID NO: 227657 - DNA, 124 bp, Homo sapiens
  chr1:165667436-165667560
  hyper
ccggaggcactcgcgttgccccagaatcgctagttgcctacacacacaaccttagactctccactgtcactgtcttgtgctcaagtcaacgctgcagaacacaggaaacgggggctggccggga

SEQ ID NO: 227658 - DNA, 189 bp, Homo sapiens
  chr1:165667892-165668081
  hyper
aggggcagtcactcgattcctctgcggtccaggccaggccctcccctcgccaggagggtggagcaagacaccacattctccccaccaccccgccataccccacacagtctccaggcgggaagaggacttccttcttcgtgatcaatatttgcgtagcactttgcaagtgttttcgggttcatcattgca

SEQ ID NO: 227659 - DNA, 826 bp, Homo sapiens; identical to SEQ ID NO: 197835
  chr1:165737818-165738644
  hyper

SEQ ID NO: 227660 - DNA, 536 bp, Homo sapiens
  chr1:166134161-166134697
  hyper
ctaaaccttttagctattgtcgttgccacctgctcagagtctagttctgaaaggaggcgggtgcggagttatgaaaatttggtaaatataaaagtcccggacgcgaccgcccgtagcctgcggcccctggcggttgaggagccgcggcgatccttggtcttcaccgcagcagccaagcccggcgcgcaccaaccggcgctgctgaaagttggagagctcccagctcgccgatagaattcggcggtgggcgccaggggaatcccttccagtgccgcaattaggaaagttttaaaaagtaaggaccctagacagacaagagatccatcctttcctttagcataagaaacaccccgcgccgcgccagccgaacgctgctcgcacaaggctatccgcccttcttggccgggacgcactcggtgccttccagctccccaccagaactggtccagggggcgcggaaacagagaggcaactgtgtccggcttgtggttccagacggaaacgcctccgggctccctggcccgggggacaagggt

SEQ ID NO: 227661 - DNA, 33 bp, Homo sapiens
  chr1:166136429-166136462
  hyper
ggccgagcagggcgcggcgctgtccagagtcca

SEQ ID NO: 227662 - DNA, 95 bp, Homo sapiens
  chr1:166808337-166808432
  hyper
agcacggcgagaacgcctggagagctcgtccaagcaagtgcaacccgctggtgactgcaaatgagcacatggaactgtgcgcccacgctacgctc

SEQ ID NO: 227663 - DNA, 267 bp, Homo sapiens
  chr1:166853524-166853791
  hyper
tcgggatgggcgggcggcacggtgctgctcttagcactaaagcggctgttgtccgagaaacgaagcgagaatgcagagctggccccggcgcgagcgaaatgtctctgcagcagcaccgcttgccttcgctagaggaagaagagacggccctgagcgcagcatcacctcggccggttggagtctgcccggctgccgccagggggtgatgcgccctcacctttcctccaggatgcccgggatcccaaggagggtcgtgggtctccgcgt

SEQ ID NO: 227664 - DNA, 391 bp, Homo sapiens
  chr1:166916747-166917138
  hyper
aacgcaagcctgcacgcctgaatagcggcagctggctttggagaaaaatgggacaactgtctcctgcccggctttcaagagctgccattctttctttccaggggctgagccaatttctcggtgccacccactctcgcgcctgcccccagcccccgtttcctcccccgctcgggccggcgcgggtccacccgactacaatgcagcgcgcggctgacccagctgctccggctcctgcccggggtaaccacggtaaccgcgggccgccaggaatgcgcgctaattgaaggccgagtttcctcccacagtgatgagcaacaagtgaagcaaaaatagtgaggcggaataaaggctgcgaggagggggcggcgggcgcgaccggggtggctggggg

SEQ ID NO: 227665 - DNA, 208 bp, Homo sapiens; identical to SEQ ID NO: 197837
  chr1:166944964-166945172
  hyper

SEQ ID NO: 227666 - DNA, 41 bp, Homo sapiens; identical to SEQ ID NO: 197838
  chr1:167028536-167028577
  hyper

SEQ ID NO: 227667 - DNA, 252 bp, Homo sapiens
  chr1:167189609-167189861
  hyper
ccacgcgcccccacgtttctggccgctgcgctccttgccgtgcttttacaatgccacaggccactgggggagaccggagcgaagccaggagggaagcaaggcgggaggaaaagggagaagtgtaagaagacacaggcgcccgggatactatataatctggttctgagctagagggagcgcatgcgccggcgacacttctggcggcaggagaaaggcgcgcatgcgcagagccgagacgaaaaatgaagccac

SEQ ID NO: 227668 - DNA, 96 bp, Homo sapiens
  chr1:167190164-167190260
  hyper
gagagttcagccgcggcggcagcagcagcaggtaatcattacagcattttacatattcatattcatactcaaccccggctcccgctgccccccccc

SEQ ID NO: 227669 - DNA, 131 bp, Homo sapiens
  chr1:167424548-167424679
  hyper
gtcaaagctacgccgggtgcactgcgggctgggcagctctcccactacgcccaaagcccaggcggccgggaccgccgtcccaaagtcacaaaccacacccgtgaaggacgccctccgcaagacagagagga

SEQ ID NO: 227670 - DNA, 77 bp, Homo sapiens; identical to SEQ ID NO: 197841
  chr1:167522408-167522485
  hyper

SEQ ID NO: 227671 - DNA, 34 bp, Homo sapiens
  chr1:167523050-167523084
  hyper
cccgccccctccgcgaggcgccaatcagagctaa

SEQ ID NO: 227672 - DNA, 50 bp, Homo sapiens
  chr1:167599108-167599158
  hyper
acaaaagaaggaaatcgaaaagagaggaaacaaaaagaattaaaggacca

SEQ ID NO: 227673 - DNA, 199 bp, Homo sapiens
  chr1:167691106-167691305
  hyper
ccttcccggcggacggatgatggacagcctgactctccaatcgcgtccttaaaagggtgcgggcaggccaatgagcggacagcgagggccggagtggggctgaggcttcggtgcagagctggagagccgcggctgggaccggagtggggagcgcggcgtggaggtgccacccggcgcgggtggcggagagatcagaagc

SEQ ID NO: 227674 - DNA, 390 bp, Homo sapiens
  chr1:167906376-167906766
  hyper
gggccttggttgccgaattccgtgccggtgcctcccccagtcaagccccctgtgcatgctgccagccgccgcccttgctgggtttttctcggagggccgggccgtgggcagaaggtactggcttgtaaaggtgttggggtcgctgatgggttgggactcgggagacttgcggaacctccaggagctgccgcgtttagagcaaaagttagctcttttgctcttttccagcgcgctttccccgctcagccgaagaacctaagttgttgcccaccctctccttcaatctccagagggtttaggtgtcggctgcgacgcgttgaccaccctcagggacttcacgctccagacagaatccgtgtaaactgtttttgcggcgctgagccaaaacct

SEQ ID NO: 227675 - DNA, 177 bp, Homo sapiens
  chr1:168105713-168105890
  hyper
agaagccccaggccgcaggggaggggcgcgcccccaacatcttcccacaaagagctccagctctccaaagcaaggcgcagtgcgggcggaggacagccctgacctccgagaggggcgcggggagaaagggagcgccgtgggggcggggacccttcccggcccgcgccctgagccctc

SEQ ID NO: 227676 - DNA, 243 bp, Homo sapiens
  chr1:168194875-168195118
  hyper
tcctgtgtaggcacgatcgcaatatggatgaaccacagcctttgttcccgtctgcacaaggcttctcccccgtctttgtgtctccggagccttgcacgtggtaggtgctcggcattcgttgactggatcaagtagggcgagggagcgcggcccgttccggtttgaaactgctctggacgccgaattagtgtttggcagcgcctggtggtcttcaatcccagcccctccggcccgccgcgcccc

SEQ ID NO: 227677 - DNA, 189 bp, Homo sapiens
  chr1:168195384-168195573
  hyper
gtgagcccggggccgtcggccccctctcgccgcgctcccgccctgcgtcccctgcccgggcctgggaagcctgcggggactccctggagtttctggacggtagctctgccccttctcctcctcttcttctgcagggctccgcgaagaggtctggcactacacggggcagtggccgcggcgtccttttct

SEQ ID NO: 227678 - DNA, 282 bp, Homo sapiens; identical to SEQ ID NO: 197843
  chr1:168311897-168312179
  hyper

SEQ ID NO: 227679 - DNA, 334 bp, Homo sapiens; identical to SEQ ID NO: 197844
  chr1:169074762-169075096
  hyper

SEQ ID NO: 227680 - DNA, 191 bp, Homo sapiens
  chr1:169337029-169337220
  hyper
ggcaacaaagccccgcccactgtcgcacgaggcgtgggacgccaccgccccacctcttcgtccttagtggctgggagtaatctcagctgcgttcatccaatcgacagacccgcccctccacgctgtcgcctggggctacgagacgccattattctgtttccggcagttttacttccgtttgtttaacagct

SEQ ID NO: 227681 - DNA, 498 bp, Homo sapiens
  chr1:169396432-169396930
  hyper
ccagctataccagacgtttatacctttaccctctatcccaccattaacatctccgcatcgtccttcccttctctccctctatatccctcttgcctgtgtaaaatgcggcggctgggatcacagagatggccgggggagttctcctctcctcctctttctaagctcttcacattgaggcaaaggagaccccggcacctgcctccgcggcagccaggaccacactgccatggcaacagcgtgcctctgcgtcctccatccgggcctctctaactacgagagcgacaaaaatctgcgcaggcgcatgcaatatcctcagaccaccgacccctcccggcacccatcccggtgcttgcgaagggccagtgaagctgaggtttctaaggggacgactaaggaatccacgcatcactaacgttatagagactcgcgaagtgccgctgtgttggttgtgaaatttccctcttgtagctgtctctcgtcagatttagaatttcttag

SEQ ID NO: 227682 - DNA, 150 bp, Homo sapiens; identical to SEQ ID NO: 197846
  chr1:169454465-169454615
  hyper

SEQ ID NO: 227683 - DNA, 202 bp, Homo sapiens
  chr1:169455342-169455544
  hyper
acgccaggcctctgacgtcccagggctcaagcgcggaggacatgtggaactccactccaaaagcggcggcttgcggcggagctctctctagtgaggcggccagctggcgttcgtggcacacttgctgtcggctccgctcatctgttgggaatgcgtcctgtgggcctagtcctccgctggaagaaacgcgctgttctcccca

SEQ ID NO: 227684 - DNA, 358 bp, Homo sapiens
  chr1:169763976-169764334
  hyper
cgtgtcctgggatcgcgcttctgaaaaagctcacctcacaacgcctcctccggacctaaatcgcgcaccagtgagtcgagtcctccaggggctagagaagcccgactttctttccggccttgagggacccgggctcaccaagaaaccagccgccctcctctctatggttttggagccggcggagagcgcgcaagggttggcgggactgcgagtttccggtctgggctttggcgggtctggtttgaagctctcctgtttgacgaaagtatgtctcaggaaggtgcggtcccagctagcgcggttcccctggaagaattaagtagctggccagaggagctatgccgccgggaactgccgt

SEQ ID NO: 227685 - DNA, 37 bp, Homo sapiens; identical to SEQ ID NO: 197847
  chr1:170043654-170043691
  hyper

SEQ ID NO: 227686 - DNA, 92 bp, Homo sapiens
  chr1:170043982-170044074
  hyper
gctccgtagtcaccgcccccttgaggatgggaatagaaagggctgtcaggtcagcttgaaaggagagaggggaatccgataaccttttagtt

SEQ ID NO: 227687 - DNA, 309 bp, Homo sapiens
  chr1:170629362-170629671
  hyper
agcccaccctgcctcgaaactccctgcggtgatgtcggggctagaggaatccagggcttggtccctgcagctgaggcctacgggatatcccaggaaagagcagcctctccgtagtggtgaagagtctctcaagccttagcgctctggtgacctccgcgggattctgagaaaagcactgcggaacggcgggagcgggccctgctgcttgcttcgcgccccccacccgcccggggaccgcgactaagtccccgacgcagctcttcccttttcctgaataccctgggactctgctcccgagttccagctccg

SEQ ID NO: 227688 - DNA, 576 bp, Homo sapiens
  chr1:170630193-170630769
  hyper
gggcgatctgaggacgctgaccccctaaatgactgaggacgctggatctttagggggaacatcgtgtcttgggggtgccaaaagtccccagcccttacccacacctttgtcacgacgggcaattgggtatgtgtaggggaaaaacagcaacgttaaaacgcaactgtgtaaatgaggatagagagtgcgaaaggagggagaggcgaggagctgctctatttctagggaggttttggggagactgatcagctccaaggacagaccgctgggaagggaaaaacggcccacatcgaactggatgccggatggaaacctctctgcgctattagactgcgtccagtacagcagatggcacgagcacgtgcggcgctcagcttaggctctcggaggcagctgagttggaaatcccgacggaaagcacccacaagctcccactctgcgctggcccacccgcgtgcacgcccaccccccacgcgcgtccctggctcagaagcgcacagatgtttactgcttagagccggtaccgctggggagatcgagcgacttgcgcggcgcacagtgcggcgctggcagggc

SEQ ID NO: 227689 - DNA, 441 bp, Homo sapiens
  chr1:170631085-170631526
  hyper
tcttgactataggacgaaaaaaaaaaaaagtctagcaatcaagggagtgcgggagtacggatgcgtgtgtgtgtgtgtgagtgcgcgtttaaagaacataaaacgccacaaataagcacttaatattttactgagtcgtcatacagtaactcatttctaatgagactgttaaagctgttaccaaattccaacaggtcatgaaaaaactgctcagcacctctctgtcttctgtcaggttagggctccgcagacggacgacagaggattatccgtagacttagatgggggttcctccgcccctctctgtcctcctgccaccacagccaggctggacgcagaaccgcacggaagcctccccaactcctgcctctgggagtgctcctgcctgcttcaaggaatctgggcagcgggaccctctgggtttagcgtcctcgcctgggg

SEQ ID NO: 227690 - DNA, 1115 bp, Homo sapiens
  chr1:170633353-170634468
  hyper
gagaccatgacctccagctacgggcacgttctggagcggcaaccggcgctgggcggccgcttggacagcccgggcaacctcgacaccctgcaggcgaaaaagaacttctccgtcagtcacctgctagacctggaggaagccggggacatggtggcggcacaggcggatgagaacgtgggcgaggctggccggagcctgctggagtcgccgggactcaccagcggcagcgacaccccgcagcaggacagtgagtgaggggcgcatgcccacgggggtgtgtgcccgggacagagggcggggacccgtgtagggcagctagagcccgtccgcggccagaaagacaaggtcctgggaccaggagaggtgatggcagacttcaaaggaagggccagtcacaggggaaaccagatgagaaaagcgggtctcggccgagggcatagccaaggaggacgctggagagaggctccaaggtccggggacactccgaggccctgcggtctcaggcagggactctgtccgcggcggactctctttacttcggctaggcaccggctcggttcatcccgcacgcggggcggcggggctgggctgggaaaaggtcttagcggggtgcaaactcagagagccagcgctgtttgggaaagcagcaggttaaagatgctgagtcgggttggaagggcttctctcgggcagcgtatgacggcttgagggagggcaccaggcacagggagcaggacttggcgctgctcaggctgcactctccacgcgggcaccgtaaggccgggcgcgaccgggaggccccgagagaacgcccggccccagacgctggagctgctctctgccccctgctgttgcctctaccgcaaatgggtttgagactggcagagtcaaaagcccggctggcttgggaaaactcgggccaagcaaagggaatgtcctttaagggtgaaacctgaaatccagccccgcatgatcccgcacaggcgagctgcatccgggaggcgcgagcttcagtgcggaggccagtgtcaccttagaggagctctccctattggctcttaaacgcccagaaaagtccagtttcccttccccatcctcaccgaccaacctcgcga

SEQ ID NO: 227691 - DNA, 31 bp, Homo sapiens
  chr1:170634835-170634866
  hyper
cacagtggtggccccgcgggccacgctacag

SEQ ID NO: 227692 - DNA, 365 bp, Homo sapiens
  chr1:170637493-170637858
  hyper
aacctctaaattagcgaaaccagattgtcctaataagaccttttgttggaaacacatgtagtcataaaaaggtagacggaaagtcaattagacacgcgcgcacacacgcacacattcacaagccggtgctaagtgtgcacccggcgcagctggctcccgggccgcggcgggatgcaaatacaaaacagcgacgcgggaaatcgatttgtcacaaagggagaggtgtaaacgcagcgcaaaggaattgcttgcccaatctaccagccacactctctcgggaccttgccccgccaacttctcttcgccagagaaacgcccaggagagcgggaacattttctagggcgctcccaagttggaattctca

SEQ ID NO: 227693 - DNA, 397 bp, Homo sapiens
  chr1:170640317-170640714
  hyper
gaaactttcttaacgggcagagagagaatacacggaaactcggatgcagtaataaagttgacataggagtcggaacagggggctctttttggatctcacctttactggggcttgaggttgtggaatgggtggaagagtaattaactgaatgaagaattttaacgttgaaaacagagcccacagtatttttggttatagtggtgtggtctctgcctcggcaaagaaacaaacacccccaccccatcttcgcagttctcctctctgctgtagcgacgccaggcgctgctttccgccgggtaaattagcggcgagcctcgccagacgctttcctccttgccttctttcgccgaaagggggcgcgctcctcccaggctgcgctggtacctatcctgccttc

SEQ ID NO: 227694 - DNA, 398 bp, Homo sapiens; identical to SEQ ID NO: 197849
  chr1:171220522-171220920
  hyper

SEQ ID NO: 227695 - DNA, 97 bp, Homo sapiens; identical to SEQ ID NO: 197850
  chr1:171220980-171221077
  hyper

SEQ ID NO: 227696 - DNA, 153 bp, Homo sapiens; identical to SEQ ID NO: 197851
  chr1:171455049-171455202
  hyper

SEQ ID NO: 227697 - DNA, 271 bp, Homo sapiens
  chr1:171711247-171711518
  hyper
cgggtccagggcacggagataatcgaggaagtcgatccgccgagccctattcacctaaaagagcccgaacccacacgcagtttagatgcatctctccaaatttatgctgtgctttaggggaggaacaaccactggttgtccacgttccggtcgtgatccggcgtgcgtggagggcgattaggggaggagtgggaaacttccgagaaccgctcgggactgggcgccgcgccggagtgcgtggctggggtgatgaggcgttagaaagaaggtg

SEQ ID NO: 227698 - DNA, 626 bp, Homo sapiens
  chr1:171750679-171751305
  hyper
gcgacggagcctccggagaaaggcaagcacgtcgcagccaatgaggtgatagaaacgcaaagcagcgaccaatgactagctgagttgggctgggccggccgacgaatcacgaggcttcgcacccggatatggttatgggctcggaaatctagttcgggaaaagtgtgaggggctcttcacgtggggaaggaacagcaggcgcggaggagggggcaagcgtgtgtgagattcagtggtccatgcgtgcgtttgtcgtgtaagggtcattcctggggtttggagtgggggaacaaatcaatgtggctgtttttccgtggaaagaattcccactgcagtgtcccggagcctgcgtgtggtgggcaagctcctcaaatggtatctcacagggaataggggagtcttgaaaacgcagcttcggcagtaggaacatgaacctcttacctaaaagttccagggagtttggctccgttgactattgggagaagttcttccagcagcgaggaaagaaagctttcgagtggtatggaacctacctggaactgtgcggggtgctacataaatatatcaagcccagggaaaaggtgaggagcgcgggttggtagcccttcgtacgtgctccggaaggt

SEQ ID NO: 227699 - DNA, 137 bp, Homo sapiens
  chr1:171811642-171811779
  hyper
cacagcttcaggcaattgtgagagagcccgaggcacagacttggcagggggtggacgtggacttatgttgtccaggtgccatgtcattcctgcatcatctcggaactgaccagcatctttctcgcactctctctgcg

SEQ ID NO: 227700 - DNA, 116 bp, Homo sapiens
  chr1:172412823-172412939
  hyper
gcaagccagacaccgttaccccctctgcagcagggatcccagcccgggaatcttaaggccgccgccggggttggagggtctgcgacgcccaaaagggcagcgcccgcccgcagagt

SEQ ID NO: 227701 - DNA, 509 bp, Homo sapiens
  chr1:172501926-172502435
  hyper
gagggacgaagggcggtccactgtaaggggaaatgctgaggatcactgggctcctcccggctttctgaacgcaagccagcaagtgggcgggacctggggcgggcggagcggcgaaagcatctgctcctgcgctttgtggtctcctgcctccggcttctccgcctgcgacgtcgaagggggcgtggcctgcgcagaggctggtgggggtgcgggcgccgcgggacttgggtgacgcgtccctttccagctcagcggtgtgtgaggtgtcgcggccccgccggcgattggctgttgagaggcgagtacgcggcggccgttggtcgctggcctcacggagcaaggcccccggcgggcggggaggatatggggcggcagtggcggctgcaggaggcgggcgtggacgagccggtggctgcagcggcggcggtccccggagtcctgtgaagcgcccctgtccgcgcctctgtggggccctcagagagggctgccaggacgcgagccactgagga

SEQ ID NO: 227702 - DNA, 283 bp, Homo sapiens
  chr1:173638744-173639027
  hyper
ctagggaccttctgcgatcccttgcggctgccggcggggtaggagaccggtgcgcaaagctctggacagaagcagtgtgaggacgctgagattgaagcccactcccctccagccctgcccgagcagcctggagggaagatgtccgtctaccccatcgcactcctccccaagtgcccaccccggcccacagcgccaggacccctagactcaccacacccgggccccggcctcctcggttaccatagcaacggcgcaacacgcgaggcagcgcctcctcctgcgc

SEQ ID NO: 227703 - DNA, 136 bp, Homo sapiens
  chr1:173683924-173684060
  hyper
caaggaacccccacgaggataaacaacctctgaggttacctgaatgccccagcaaagggcacgactacttccggagccgcaccggaaccccttggcggattatgtgggttcctgcgggaacgatttaagaatagga

SEQ ID NO: 227704 - DNA, 452 bp, Homo sapiens
  chr1:173793622-173794074
  hyper
ctgagggcaaggccgagccacttaaccactatcgtcaacctttccaatcgtgctcggttgctcctcagttttcctaccggtgcgaagctttctctcaaatttccgcccgtagtaggcatggcggcggcacctcaccactgattcgttgaattccttcccggtaatcttgggcactagcgggcggagttgaagggcgcttggaccccagcggcgatctgtgtttgggttcgcgctctgggagaattttggctttgctcgccttcctctttcagaagactcgaaatcggccagcaggtctgcgagatttgaaacgcgactgttactccttgttttccggttctggccgcgggagcctctcgagaagcgtggaaagaggagaagggcgtataccttgtgaccgcctctggttgtcttgggctcgcgcctggcgccgctacgtggagtcgctctct

SEQ ID NO: 227705 - DNA, 95 bp, Homo sapiens; identical to SEQ ID NO: 197856
  chr1:173836713-173836808
  hyper

SEQ ID NO: 227706 - DNA, 37 bp, Homo sapiens
  chr1:173837159-173837196
  hyper
gttcttttgatgacgtcacgacgcacgctcccggcag

SEQ ID NO: 227707 - DNA, 152 bp, Homo sapiens
  chr1:174968320-174968472
  hyper
ggctcacttataccgaatccaaacccaggcgagaactacggactcttgaaatggtcggtgaaaggggcgaaagcaccaggaaatcgtgcttcaacagtccatgactgaaaggagggcctgaaactgtggccataggcgggcccttttgttag

SEQ ID NO: 227708 - DNA, 134 bp, Homo sapiens
  chr1:174968762-174968896
  hyper
gtcctagagcggacgaaagcaggtgactctctagtcaacttccgacttggactccgaagatcggtacgttatttccggggctgggttaacgcagcggttccgagctgcgactgcgcagcgtggcccagcgcggt

SEQ ID NO: 227709 - DNA, 255 bp, Homo sapiens
  chr1:175161547-175161802
  hyper
gactcagcccaggcgcagagaggaagactcctgagagtcctcgcgaaggagggaaacacaccagaactaaagttgtgaaggcgcaagaggctacttaggaataattccttgtatctctggggcaggtctcatccttctaaagacaggagtgactgggcgtcttcttccaaacagagggcgcttaaaaatgtatttttaaaaaacataacagaaagtcctgaaactcacctttcggtccgcggaagggcttcctgc

SEQ ID NO: 227710 - DNA, 37 bp, Homo sapiens
  chr1:175162030-175162067
  hyper
ccctgccttcctacgggccgacgcctggcatagttga

SEQ ID NO: 227711 - DNA, 89 bp, Homo sapiens
  chr1:176176505-176176594
  hyper
cggggctccctggcgaagggagtctgtctgtcccaagccgctttcgttccagaaaacgtgccagagggcaggccgtcttaatacagtga

SEQ ID NO: 227712 - DNA, 1045 bp, Homo sapiens
  chr1:177133309-177134354
  hyper
aggaggctcagcatccaggtcggatttggggagaagtcaggtgcacagaggcgctagtatgcaagtgggtgtggagaatggtccgggagtggggcggatccgggaggtaggagtgggggaggggaggtcgtcggcgagtgggtgtgtagagcgagctggagtggggggtgggggcgccggtccagcgcctccggccgcctcgacctcccccgggactcacccagcacgaagtagggcagctccgtgttctccaggtcgtccaccacgaccatttctcccgggaagtcgttgcgcaccgagaagaggagcttgggctccgaggccgaggggctgtgcatgatgctcaggtcgttctcgcgcaggaagggcagtgccgacaccgtgatgcttttgagcttgcactccagctccttggatggatccacgtcgccggcggccgtggccagcaccgccgccggcccccagcagcaggcgagcagggcgcagagcccggctaaagccatcttgagccccggccgccttcctcctagcgctgcgatggtgggggaggaagcgagcggggagggagcgagggagcgagcgcgggaggcgggggaggttagggaggggatggagagccgggagagccctggaccccggaatgagatgccgcttgcagagtcctgggtttaagctctgatgtctggagagccccggattctttgtttcccggagctgcttatctggagaagggaaagcgggggaggggggagaggagaaaaagggaaggaaggacgtcgaaaggaaagaggaagggagctgaggattctagggaatcaggtcagcccccagctggctgccggtgctcctgcctctctcctccgttgcatcctccaacacgagcaaggctcttggctatgaactacctgcacggcatttttaatacattgatctttgcaatgtaaaatcttccctctcgcatcatcatccagaaggcttgagagaggcacacacagacatacaccttaaagggcgcttctgcaaagctgcgcggtgaggggagatg

SEQ ID NO: 227713 - DNA, 727 bp, Homo sapiens
  chr1:177140100-177140827
  hyper
caggtgacactgcttaggtacggagcgcggagtcggagcggggacgcgccgggctgcagctctgggatgcaatccgcctgcctcgcaagctgctcgccgctgcgctggcagcgcttacgctgagctcggaggatcccattaggacttgcccggggatgtgcacctgccgtgcgctccgaggtcagtggcaggtctgcaggcagccgagggagcggtgaagccggaagacctgtctctgcccatgtgcaaggcagtgatttcgggtgagagagcgggtgggtgagtctctttagagttggaaagaaggcaaaatcttgggtttctcctcggcggagggacaggggactcccccagttgggtcttgcacttcccttacctctcccaccccgcgtgcgccccggcccagtgccgaagccccacttcaaagatgctctgggagaccgggatcctggctgctcagcgggaaggcagcaggcaagtggtctaacgttggcggcggtggcggtggcggcggcggcggcaccgacagtaaagcggggagcaagagaatttgaaaagagacatccgctccctctcacacgctgagggggaggcattcgcgtttccccaaatgagaaagaaccacaagaaatcatgaagtaaaaactttggaaagctgccactggagatgttgcacaaaaacctggaatcttttaggagtctcctcccagtcgttgaaggtttgggg

SEQ ID NO: 227714 - DNA, 457 bp, Homo sapiens
  chr1:177150728-177151185
  hyper
gaaataactaagcacgcagtgaggactgtgggggcagctaatgtctgccaccccctcactcggtgttcagccatttatcatcaatacgtcgttaggcaggagcaggggcaggtggctgacgggtgtgccggcggctggcggggtcttgggaggcgccctgcacacgcctcttctttctgaaatctccgacctttcggatttgagccgcgagggaccgcggagcaagggcagcctcctccggaagcctcgggtcactagagacccctagaggcgaaaagctgtgttacaagcccccggccgcagaggcgcaggcgggattcttgccccggaggttgccgaggagtggccggtacctttcctaaaacccttatctgtaagtacactccggcaagctcgaaagggacagcaggggagccatgtgtgcgtgcgcgtgtgcggagaaggaatggggagggac

SEQ ID NO: 227715 - DNA, 156 bp, Homo sapiens
  chr1:178062416-178062572
  hyper
cagcgcggacagggcgcagggcgcagaccctgtgcatatcccagaatcccggacccactgccactccactctgggaaggaagaaggcgctcccccttgggtgactgtaagataaagcagcttcttcgatctctttgtccaataagaaagaaacgtt

SEQ ID NO: 227716 - DNA, 32 bp, Homo sapiens
  chr1:178063292-178063324
  hyper
ggaggtgggagggcgagcctcccctcccgggt

SEQ ID NO: 227717 - DNA, 87 bp, Homo sapiens
  chr1:179050619-179050706
  hyper
ttcctcttgcttttcgtggactcccactgtggaaacctgctggtgttttgctgcggtttcatttccctctgcggaggagccagggca

SEQ ID NO: 227718 - DNA, 39 bp, Homo sapiens
  chr1:179262758-179262797
  hyper
cagggccagcctgcgagcactggcgccggggacccgcgc

SEQ ID NO: 227719 - DNA, 63 bp, Homo sapiens
  chr1:179545332-179545395
  hyper
tgaagactcatctcctggagggttcctaatgtcatgctagagggctgacggagatacagaagc

SEQ ID NO: 227720 - DNA, 1473 bp, Homo sapiens
  chr1:179711890-179713363
  hyper
ctcttcctgccagacttcaccgtcacagctctaatcacaccctgactgatctgatcccgccctgccacgaggcccgggtacccctcagcggcggggacatccaggtgtccctggatttccagggcacagtgcgggccggaaataggaacacagaggagcccttcgggaggctctcgaggcagtctctttccagtggatagcgacacaccctggtccctaagattctcatgctctccgaattttccgtcctggacccgatctgtagggcgcaaagtcccctgtactgaggcgttcccagggcgcccgcctcccgcgtttacatttcttaggcaaaaaggcagcggagctaagcaggggtgtttggaaggcgcccgttgcgctgtttgactgcgtggcttcacttggcccgcgtgcatcagcctctctggcgggggattctccccggactccggccagcgccaatcaggtcgcgcggtacctgcccccagccctggccacctggaggggcgatgaggctccacgcccggagcagggcagtcctcggagcgccggggaggccgcggagcctcacgtgtgccgccccagccgctggcgcccggaaggacgcgctgcgaccccgtgggagccgaacgcgggagtcgctgcccgagcggagctgctcagccgcggtaacgggtcggggcctcatcgtgcaggggagcgagcggaggggcggggcggggcgcgggcgggctgaggagccgccgggctcgggctccgcgcggggatgtgtctggccaccgcgtactttcgagggcgcctcaacacccgggtaagcgcgccccggctgcctccctctgcccaccgcgccgccttcagcgtagcagttccccactgggtctgggtctgcgccctggctctccctctccgcgccaggggcctctcgctccgaggggcgcggcgactcgggggcatctccggcctcgtggccagaccgcgggtggcggtgctcgcgcctcggggccggacttgccgggtccctgcccccgggccgtgccgaaggcgctctactcagcgtgtctgcagcgacccgcttctctgcgctttcagccgggccggacctcacgcggacgccgctgctgctgctgcgcctcgcgcccgccgccacccggggagcatgaggccggggcaggggacccgggtagggtgggggccgaccggcggggtctgctgggccaatgcgccgccgtcggtcagtgagtccggattcgtgccggcaactgtgggcagccttgagaccggggctcggtttgctggtgatttttccgaagttttacaaaataaagagggcgaagtgccttcgcggcgcggcgtgggcatgcaggcggcagggcctgtgggagccggcgtctcggccagcgagtctggggccaggacagcgggggtaggacggagaagccggacgtgcccgtggggccgcggtgtccttgctcc

SEQ ID NO: 227721 - DNA, 510 bp, Homo sapiens
  chr1:179851080-179851590
  hyper
aggacatggtcaacgtagcagtcgatcaaaaagattccagggaaactgcgcaacagcctggggccgagaagcgaaacttgggtcttctccaccctcgtcgcactccttttccccgagacttggtactgggagataggacgggagtctcctacacgcagtcaacacttgccacgagcggctagacttaggacaggcaagttgccctgccatccttctatcgcccccacccctcctttacttaagggcgatggcagagacgtcctcctcccccttctcctcctctttggtgcctccagccaggaggcgggagcgatccacagcagctgacccagctcaggcactgcctctctcacagccctcaagacacaccatgggcccagaggcaggtttgctacacagcagcgacgacgcaggcggcggccccagcgactcgcaactgcctccctgaccacagcggccaccgcccaacacccccgagaagccatcgccaccaccggcaggagaacctag

SEQ ID NO: 227722 - DNA, 360 bp, Homo sapiens
  chr1:179923500-179923860
  hyper
ctgacaggggtgacgacttatttggacgacagttggtgaaacattgtaaactctcagaagctgccgtttccagactttgagttcattcttgtcgaatccccagcttgttttctcagcccggggtgaaatgcgcagccaaaaggcccaatgagcgtcaaagcgaaagggcaggggtggtctcttctgcggatataccttggctcctcccaagtcctacgagtttaaacttcgacgcaccaaacatggcttcttcgcggttctgctccttgttttatttcgctcccacctttcggccacactcaacatggccctaaccgaaggttggcatgcctgtggcactgtctcgggacagttctcgcg

SEQ ID NO: 227723 - DNA, 599 bp, Homo sapiens
  chr1:180197993-180198592
  hyper
gggcacacagtcccccttcccgcctaagctgaaccccactaggctggaaggacacgtatgtctgcatttctggaaggaaatgccgtgggggctgggggcaggagagcggctgggtcttggggcagacggggtgggcttcccgcgcctgcagcccggaggcgtcgagcgcctgatggagcgtcagaggagacctcgtcccagcgttgggccttctgttgtatttctgccagaaactcgcgttgaggagaatttgttttaagcgtttctctacctgtccatgcatctcgtaaatacagtaagcatggcaagccctttcgctggttaaccccggcgtccgtgtgctcactgccgccctgcacgcacgaggtcgcggatggttcaaagcacccgcggtggcagccggagaggcagagcgggctctagggacctaagacagggccgagctggacgactggtggcagggcggccggggaggccccgccgcggggaggtttgggccccctaccctgcggaactggaggcaagtgcggactccggctgcaggccgcggtctgcggggacgcgcgcggggggcctgcgtcccgccacctccgcgcaca

SEQ ID NO: 227724 - DNA, 1610 bp, Homo sapiens
  chr1:180199360-180200970
  hyper
gggaaggagcgggcgggggagggaagaggaaaaaagccagagctgcagcaacagcgtctcaacctgggatgtgcaccaaccccggagagcgagatcaaagggactggaaacagactggggactggcggggggagggggccggccagcctgtggagtcctccctgagaagcggagggcccggcttccaccgtgactccagcggcctgcttggggttttaattattattttgaaatttctgaatcgagctagagcgagagagcgagagatctccgtagactgcgactcgctggctttcgctccgagatgatgcagagtgcgactgtccccgcggaaggggctgtcaaggggctcccggagatgctaggtgtgccgatgcaacgtaagacacccccctttctcgctgatttaattctaacaagacagctagcagcctcagccgctgcggggcgggccggacgccgctcaggggccgggaggggctggcggccggggcgcagaggcggtcacagggcaggggcaccagccagagtgcgtttgagggggccaggctcttggctgtttggggccgaatgtgaacgcctcctggatcatgcttgaggcgagccgagtaccgaaccccgcatctccagcccaaggcttttcttggaacgctggggagagtgctgtttggggacacccaggggtacgagctgtaggccaggcctgagggcgagggtggtccccacaaatcttctttcgccggcgtgacggtcagcgcttgcaggaccgctagtgcaacttcaccccagctggcgggaagttggagagcgcgtctctcgcccctggggctggcggcggagaagccccggccacactcttagtccctgcggcccgcgccccgggcgtgcgtgccgggtgagtccccagccgctactgcccgcggcgcccgccgcgtgcgccgcgggaaactgactgctccttgtgagggaatctgctcgcgcattccagctagcctaggaatgcaggggagggagaagcgaccgcaagttgtgaattccgggttcagcctttgcgcacgcgagggcaggtgctcagggtggctcgggtttggaggggtagagacgggggtgtgtgggagctttgctagcctgcccgcccgctttcttcccgcgcccgaaattagcgagacagccggagctcgcggcgtgtttatccccaagtctctctctgtgtgtatgggtgtgcgcgcgcagagattttcccgaagggaatccgtctctgtgcttcactcctgagcgagagtccccgagagggaatctgtgcagaggccagaacaggtgcccagtcgtcgcgcgcgcgcgcgcgcgcgcgcgacaagcgccgggagagtcctgcccctgtggcttgcacgctcagcagggcgccccgggcaccctggagagaccaaggagttcctcgctccgcttgccaaggggttgtacttccgcctgcgacttctttagtggtgcggtagctacatcttcggggtttactttaagtaagggccggctcatccagggatggtgactacctacaaactagggcgcacgagcgcgccctcctgcgcctcgggtttccatggcagggtttc

SEQ ID NO: 227725 - DNA, 160 bp, Homo sapiens
  chr1:180202381-180202541
  hyper
tcgccactctgtcccggcctcccgcccccgcaggctcccgtgcggacttagcagttcgcgccgtagccctcctggttttttaccgcgccttggtcgcgcggcccccggtgcgggcctcgtcgctccgacagccctacagctgtccctacggcccgcaccg

SEQ ID NO: 227726 - DNA, 128 bp, Homo sapiens
  chr1:180203021-180203149
  hyper
attttattttgtgtttggtagggtcggggtaaaggttttccctgggacttcctctcctggggctcctccggggtgcgtggggtaatgtcccagcgcaggtcgagttgcagatccgagtccccggggtt

SEQ ID NO: 227727 - DNA, 1763 bp, Homo sapiens
  chr1:180203531-180205294
  hyper
aactgctaggatcccgttccagcccctggccagagctgtgtaccacaaagaagggagtttggagaaacccgggtaagcgcggcagcgccccgcttgggacagcggatggctgaggactcccaaggggcgagagggctccggcctcctcctttccagggccttgttatctgagagggccgttagcacggagggaagcttggaaagccgctgtcccagtgcgctccgcatgcggaattaactgttaaagccggacacggagcacgcaggtgcagcaggtgaggggcaaaggtctgcattgagcagtccgcagtgtcccgggaagtcgtaaagtcgggactgagaagaagcaggacctaactcaagtttatttcctctcttggccgaggtccgggctcgtggaaaaccagagctaggcggggctacgcagggctgagcaggagtggcgtcctagggtctgggagcgcgacccacatgacctcgctacgaccggggcagggctcctccgccccgcgggcagatgccggcctgggtggcccggggaacagacgatgaattctttaaatgagcgtttgctgcgcacccatgggcggctcacgatcctgggcactcgcccgggaatcccgggcgtgctctgggttttgggggactcgccggtggaggtagatgtggacagggcggccggcccttcgcgggtagccggctttgcgcttactgcgtcccgcagcggtgggtaaaggtcgtagcccagaaggggacaagggagggaccgcctctctctccccggtgcgctgcaatagaggttcctgcgccttggcccttgcagtccatccgcccagaggttcgcgcccgttttcggagcttattatctcaggtagcccagaggtccgactgagctggaattagccaggcctgggacccctttgctgccctttagagtggtggcagggacttttccagcaaggataggcgcggcaggcgcgagtgcggacggcgcgcccattaggaggaggccgggtgaaaacctctcttcctctccagacccatttcgttccaagcatttggaatgacaaaattaaaccccaaccctggcggctcgagtctaatgtgactgtttaaccctgggaaagcgatgctcccattttcgaaggggctcctcctcttcggagcggggaggccgccggcgggtgtgcccggcccgcgcgttctgcgggtgttcgagcctcggctccccactcggttccgcagcttagtggaccttgacgagcgctggaaacgtgtcaggctccagagagacagagtctctacctaggcggctgaggatgtcaattaaaatcgaccagggaagggagttggcggcactgtgcgccgccggggaaggcgaggtggcgcgggccaccgggtgcactcaccgcacgagaggccgcggctggactgggaccgagcgcatccctgtgtctcagggggtttgctttgtgcaggatgggaccttattatttttagacagtggggcaaacgtgtcttttaaagagatccgaagggtgaaactaatgaaaaaggaaatgaattactagaaaagccgtgaagggataaaaccgggagcagcaggaagttgaaggaaggacgaccgaagctaggtgtatctgcacctgcctcttgacacgccaaaaacaaaggggggttaaggcaagaatgtagactaaatgctgtgaggattagggtaacgcgagccctcaagacgtctcggagaccgcctacagggctgc

SEQ ID NO: 227728 - DNA, 91 bp, Homo sapiens; identical to SEQ ID NO: 197866
  chr1:180472131-180472222
  hyper

SEQ ID NO: 227729 - DNA, 608 bp, Homo sapiens
  chr1:180881934-180882542
  hyper
gaggccgaggcccggctcctccagcccctcccgcggccccacctctccgcgctcggctccctctgcccagcgcgggccgggaaggcgcgggcttggccgctcttcccctccacggcaaagccgtgaacggacagctgatgccacttccttccctgccagcgccctccctgcccgaccccgcttcccgtcctctcgccgggagggagtgcggcccgtggggcgctgcgccggccagacccacccggggcccgggggctgccagcagagccgggagctggcccggcctcggcgccgtcccggacccccagtcggccgcgccccgaggggcgaggcctgcgggccgcactccctccggccccggattcggggctggaagtccctccccgaacccagcagctggcctgggagggagaaggggctggagagggcctggcctctccgagggatggaggggacagaggcggcggcggccaaacccgcgggcggcagcccccagtgagtatagaggaggcagcgccgggccggccgggcgggggtggcggaccggcggggcggaggagcggggagcccaggtcgccccggccactgggaagcgggcctcccacggg

SEQ ID NO: 227730 - DNA, 669 bp, Homo sapiens; identical to SEQ ID NO: 197870
  chr1:181058994-181059663
  hyper

SEQ ID NO: 227731 - DNA, 36 bp, Homo sapiens
  chr1:181286826-181286862
  hyper
cccttgccgcctcgcgcgtgccgcccgtgtctggac

SEQ ID NO: 227732 - DNA, 1143 bp, Homo sapiens
  chr1:181287180-181288323
  hyper
aaaataattcagtgatgtctcgggaatactagcacaccctcttcattcagctgagcgcgggactctgcattaattcaaggtaagccccgggtttttactgccagagatgtgtctgtcttgcgccccgcatgcactgcctgcggggctgcgctgcactccccggcggcgccacgggtctggcccccgcgcttctacgtgttggggggatgcatggaccttggagatccgtagttggccctaaccttctcggaatctcctctgcacgcgctgcctgttcctcctctgcacgctctgtccgttcctttgcaacttctgtgggaattgtcctggcgtgggaaacgcccccgcgctctttggcacttagggtgtgagtgttgcgccccttgccgcagcgctcagggcagcatcccgctcgaggatgcagggttctcaccaagcagtgagggggactcacgcgccgccggggagcggagccaggctccgagaagggagcaggctcgagccgctgggttttcgcaagccttggggcctctggccgcccttccatgcctccgggcgcgggcggctcagcaggtccccggcttcgggaagttttgtgcgcggatcgctggtggggagggcgcgcgggccagtggctgagcttgcagcgaagtttccgtgaaggaaactgcatgtgcctttggaggcgactcgggactgctgtagggtggactgggtgtctatggagttgcgggtcagagcgagtagggtgggtcctttcctgggacaggactgggaattggggctcgaagtaggggaggaaagagcacagaggaagccaggctgcatagggtgacttgctttttgatccggcttgagtctccttgtgcgagagtggttgtgcgtcctttcccagggatggaacatccagttttctgtgcttttttgctttgtgcccatgtcttggagagaataatgggagacactaacccaccgacgtctcccttgagatcgcggcttcctccttgcgcagaggactgaggtcacttgctgcagtcgtgtctgtgagtctggctgctcagagcagatgattcaggctgtgggtgcgtgcagagatctgggggcttgtcgtaatggttcaccgtgttggaacattgatgcata

SEQ ID NO: 227733 - DNA, 913 bp, Homo sapiens
  chr1:181451414-181452327
  hyper
accgctcccggcaccgaacagggcacagcactggggacacctctctgcagggacccaagacgcgcgtgcgtgtgcgccccacgccaggccctcgctctcttgcggagactccgccgcatcgctggctgcacctgcctctctcttctcggcattacttgggggaaaggggactcttcactggacctttgcagaggtggctgctaccctttggccacataaatcaagaaggcaagccagcctcaccttccaggaacctccagccttccggctgcgtccccgcccctcccgcctggccagctcctcccccgcttctcccagcgctcttgcgcgcctcgctgcgcctctgcgcgccgctcgctgtcctctgcctcgcctccccattctccttccgcatcttctccagtgctccgccgagggcgctgcctgcggggaagagggagactgagccgttagtgaggaagttcggtctgtggacaagtgtggtgccaggccgccgcgaggctcggctgcaacctgttcctcgcccgccggtgctcgccgcccgcccgctcgcactcccgccctctcggcggcgcagccgcggatcgctgttgcatgctgatccggggaggcggcggtggcgagcgctccgggcggatgctggcactcaggcttcgctgctctctggatgctgctcaacttctagcccaagcgcaggagctttgaagtcatttgtcccttttcgcttggatcgacttcttattttgagattttgggcattgcggtttacgcaggaacctcaatatcgctctccccacctccctccctctttctccaacctttggatgcgtctctgctggcagatataaagacccaagtcttcgcggtggaatttcttagatggacttgcaggggctggcgttataaagcatgt

SEQ ID NO: 227734 - DNA, 339 bp, Homo sapiens
  chr1:181452695-181453034
  hyper
acagttcacagcggcgggctgctgctgctgcctctccgaagagctcgcggagctccccagaggcggtggtccccgtgcttgtctggatgcggctctgagtctccgtgtgtctttctgcttgttgctgtgtgcgggtgttcggccgcgatcacctttgtgtgtcttctgtctgtttaaacctcaggatggctcgcttcggggaggcggtggtcgccaggccagggtccggcgatggagactcggaccagagcaggaaccggcaaggaacccccgtgccggcctcggggcaggcggccgcctacaagcagacgaaagcacagagggcgcggactatggctt

SEQ ID NO: 227735 - DNA, 552 bp, Homo sapiens; identical to SEQ ID NO: 36581
  chr1:181454729-181455281
  hyper

SEQ ID NO: 227736 - DNA, 219 bp, Homo sapiens
  chr1:182026225-182026444
  hyper
tagggccgctcgcccgtgtgcaggcgcctgtgctgctggagtgtgccgcggtgggagtaggccttcccgcatagctcgcacgcgtagcgcttggcggcgccgccgcgcgtctccgcggggctcagcggcttgctgggcttctgaaaggcccgcccgccccgcaggcacctgtagggacgcgcctcagcctctccgccctcgcgccggcccgcctggttc

SEQ ID NO: 227737 - DNA, 115 bp, Homo sapiens
  chr1:182358842-182358957
  hyper
ctccctcctccctccgtggaccagggtggctagaaagggaacacattgttctcctccaacgactagggcaacgttctgaagtacagtggcaaagtttctacgggcaaccgtccat

SEQ ID NO: 227738 - DNA, 57 bp, Homo sapiens; identical to SEQ ID NO: 197872
  chr1:182360260-182360317
  hyper

SEQ ID NO: 227739 - DNA, 71 bp, Homo sapiens; identical to SEQ ID NO: 197873
  chr1:182360888-182360959
  hyper

SEQ ID NO: 227740 - DNA, 435 bp, Homo sapiens
  chr1:182557967-182558402
  hyper
gaagccctgagtgacgcatcagagtagagaagagacgagcctgcggaagtactccaacagacaatcctgctttcaatttcactttctctgtgcgacctgagtaagtcgcaaagagatgcctgagaaactgaggacatggataaatgacgtgtggactctgacagaactctggaagggcactggaggaagatccttccgggcagccaagggctgggagctcccctcccacttcccaagtcctccagcccctggcctctccagtctccaaagcccaagaattcttcaggatcgacttatcgaggttttctagctttcctccttctgcctgccttacctgctcaactcagacgtctcaattattcctttggcagccgcaaagcctggaagactgcttgcagcccgagcagtttcctcctgctgcgtcactgagtcagc

SEQ ID NO: 227741 - DNA, 51 bp, Homo sapiens
  chr1:182584623-182584674
  hyper
gggcccttggctctgtgacccagcagacccgaaattccaatctggcaaact

SEQ ID NO: 227742 - DNA, 126 bp, Homo sapiens
  chr1:182758310-182758436
  hyper
ccaggaaagctcccgtatgagtagataattcactttaaaattcgctcatctctctttaacacgagagtctgcagggctggtgcagcggcgtcaacccgaagagacctgaacgccgatgggcagttg

SEQ ID NO: 227743 - DNA, 134 bp, Homo sapiens
  chr1:182911449-182911583
  hyper
caggaggcttagctgacaaccgccccgatctcctgttgggctcttccttggcggccccttcggcggagctgaccttcctcttgggtatcctggcggcaggcagggcgcgtgccgggtgcctgcgggccgtggcg

SEQ ID NO: 227744 - DNA, 225 bp, Homo sapiens
  chr1:182991637-182991862
  hyper
gactcagcaggcccgaaaaggaggatgtcagaatccacataatttcgagtcttttaaaggcaagccgaggaacacaaacaacacagtggaagaatttcgcagtgggtcgtgcgtacccaagggaaaaattcattccattcccagccttttcacttccttccttgccccggtaaaacgactggttacactttaaatcagcggcaggaaatcgcttcacgaaactca

SEQ ID NO: 227745 - DNA, 54 bp, Homo sapiens
  chr1:182993133-182993187
  hyper
gggcagccccacctgcagcacggggcagccttcctgaccgactacaacaaccag

SEQ ID NO: 227746 - DNA, 1716 bp, Homo sapiens
  chr1:183385926-183387642
  hyper
atttttagcctaagccacctcgccctgtctttaccgctgtggtgtggttttcactaaacctccctaggagggctcgcgcagtcctcaggctccggataaacacgtgtgcccgcatccagctccggcgcgccctgcatttcagcaccgccgcctctggagagcgccttgctggcgggccaggtcagggcctcccacacgctctctcatccatcccagcccactcgcttttccctactcctcgcttctctcagtttcaagaaaaagcacccccaacttctaacttctcaattcctgcttctaaagtgacctccgcgtccctctttccgtgtctaaacgctcatgccccacgcctttgagtcctacgagcagctgcgaagccgcgtggcttcccaccggtggcgcgagacctccaataggcatctatcgatcacctttcccctaccgctgctggaccccgaaccagccagccggatgcccccgctcgctctctctgactccacgccccaaagcttctaagaaacaaacgcgcgataagtcccctccccccaacacgcacacgcatatactcacacacagtcattcgcacattcgtacacacactagacgcctcaagccttccgagtgccatcgccaccctgggcagagcctcagccaacttgggccccgatccttcggctccggctcgcgcagggcctcccgcagcctccgcccggccccctccccgtcctaggcagcgggtccctgaggccgaacctaggcggaaaagggccccctccctattcactcagcatccacctcgcgcgggcaatacacggcccacaattcccaaacactggtccctgggccgcccagaatcaccagccaaatccgaaattaatcttgaagccccagcccctgtcaccggtgtgtcgggcgcgagtgtgtttgcgaatcccaggcacatacatgatttaactccttcgagctttcggcccatcctaaacaaacagcacgttatctccagccccttcctcccctactcggcgccccaacctctgcccccatcccggtcttcgccagcctggtagccgaaccaccgcaccgccacactccagttctggtatctcgaacccctgcccagccccaaatgatactcatctctagtcccctcccatcccccacctttggccccctgcgagccgggtctggccccggcaagtgacgcctcggaaacgcagtctgcgtaccctcccctgagtccaaaatgaaggggccgacctccaccagctggatgagccggcccacccctccgaaggggcacacgccttcccgttcgatcgccctggaaaacacaggtgcctgggaaaggagaggagcggaagcggcttccagaggtgggcgggaggactcaccaaacatctgaatgtgccctttggtgatgggattgaagctgccgcaggcgagcaagataacgtgggtcttggtggtctcggtcatggtgcagatgggtccttcgcggtggtctaggggttgcctctctttttgtgtctcgttgtgtctgcagagggagaaaggaaggcgaggctccggcggtggatgctgtggactccaaggagccgctccagacgcaaaccgcgtcactctccgcctccccttaacgcttgcagctccggctagatccgaggctgcttttgtattgctctgctctcttctctcctcggtcgctctcttttcgtt

SEQ ID NO: 227747 - DNA, 201 bp, Homo sapiens
  chr1:183441278-183441479
  hyper
gattgcccccttgcgcgggaggagaagggtggattggcaggaagccgccaagcgccaccagccggtctctcagaagccgcacaggcgccacacagctcgttgatcccaaaagggagcgctacagagaggcggaaatcactgagggacaggcgctgctgaaatctcgcgagagggaccccctccctcgcccggtcgccgact

SEQ ID NO: 227748 - DNA, 193 bp, Homo sapiens
  chr1:183604496-183604689
  hyper
ctctcagagcgggcgatcccaaagagacaggttaagccgcaggttgagagggcagctccgcgccggtgccccgcggatcctgcaggctcccgggtcccaggagaagggcgggctgggctgggctggggtggggagggcggtgaatgcaaggatattgccgcaggcaggagtccacctcgccctcgtcgggccc

SEQ ID NO: 227749 - DNA, 144 bp, Homo sapiens
  chr1:183605167-183605311
  hyper
tccgattgcgtcacgtgattctcggtgggggggttcccatagaaacgcttttctgcggtccagtctagggggtctcagattggcggggatgggcagcagcggcaggtggccttggcttttgctgcagccgtcaacgacctatca

SEQ ID NO: 227750 - DNA, 553 bp, Homo sapiens
  chr1:183774208-183774761
  hyper
aggagtctgctcctcgcttgctcgctcgctcgccgcgctccctttgtggcccgagtcgcgcgcaccggcggcggcgggggcagcgcggcgcgtgtctgtgcgctgcggtcgctcgggaccgggaccggggcgaggcgccgcggggctgagcccagcagacattgcgttggcctccgagcagggcgcatcatgcagcgttcgcgcaccggagagaaaactgagaatgaaattgctttggcaagctaaaatggtaacgagagctctctgccttctcccgaggcttctctggtggggaatcttctcccgctttcgctgggcgtgttttggactccctcggagtgaacggagcaatccgattccatacttgtgagctaaagctctctcactccgctttgtattcctctctctctgcgtgtcttctccctttcaaccgtacctactttctcagcaattgcctgtggtgtgtctggggcagatgcatgtcaggaggggagaactttgaaggaaaaagaactgttagtgtgggtgaaccgcggagcgcttctgcgtccca

SEQ ID NO: 227751 - DNA, 114 bp, Homo sapiens
  chr1:184005520-184005634
  hyper
cccagggcatcttcgtctctccccgggacgtggaaccccgatgcaccggcagggacagcccggagcgctcgcaggagaccaggcccacggtggtgccatggttgggcacactcc

SEQ ID NO: 227752 - DNA, 42 bp, Homo sapiens
  chr1:184006234-184006276
  hyper
gccatcctgctcttggggtagtccagccgctccaggcagccg

SEQ ID NO: 227753 - DNA, 375 bp, Homo sapiens
  chr1:184006456-184006831
  hyper
gaccaggcgagggtggcagcagggcgcgcagccatgttccgggccgaggcgggcggcggggaagtcctggcgcgagcgcccggctgggctgcctgagggcggcggcggctgccggggagcaaggggctgcgaggggcggccgggggatgcggcttgccgcggccggccggctcacacactggcctcggcggctgcggttcccaggaccctcccgccgccgctgcaccgcccaggccccagtgcgggtgcgcagcgtacctgcagccgctggcgctcccctgcgcctcgggctcgcagacagtagtggccgaggggctgtgtgccctgagtcctgaggaaagttcctctagtccaggttccgctcgtacagctgag

SEQ ID NO: 227754 - DNA, 507 bp, Homo sapiens; identical to SEQ ID NO: 197878
  chr1:184355381-184355888
  hyper

SEQ ID NO: 227755 - DNA, 273 bp, Homo sapiens
  chr1:184633156-184633429
  hyper
ctggctgcaaagtccggctcctctacactctgcagagctgttttcccccttcagagctcctctcctccgggagggcttgcctcgccccggtccaggatctctgccttcggttgaagcgcagcgcccccagccgtccgcaggagggatcgacgcctctgtctccccgaagtgagggcgctcgctgcggagctgggggtggtctcctcttccccccatcgcggcccagcaacctgggggtccgcgtgacttctccctggccgggggatggaggat

SEQ ID NO: 227756 - DNA, 367 bp, Homo sapiens
  chr1:184724483-184724850
  hyper
tggctgaatgaggcgcactgtccccatgtcagtgctgctgcgttagggaatagtgttggagtagtcgtctaccctcagggaaattccaaaacacagtaacagcaaaatgaattgagcctttgaaggcattgcgctaaggtttttactcgcaatcatctcatgcactcttctcaactctgatagagtaagtaccaccatcccccttttgcagacgagaaaacagaggcttagaaaagttggttaacaagagctcgtcacactgctgtattagaatccatccagcctctgattcggaagcccttgcatttaaccaccgcgcagtactacaaggatgaaggagcacgtgggtcctcgtacatgattaata

SEQ ID NO: 227757 - DNA, 397 bp, Homo sapiens
  chr1:184943400-184943797
  hyper
gtgctccccaggcccccgggcgggcgggcgtacctcggatgtaagcgcacttgccctcgtccagctggctggaggctgagccgcccatgaccgcgagctgcctgtgctgagcgcggaaactgcccggtccgcgcccgctgctagctcctggaggttgatccgacggcgaacccggctctgaaattaagagcaaacttccttcgagaggcgagagacaggaggcaagaggcgtcgccttctggggcgcctcctccaggtccgcgccttctgatgatccgtgggccggcccgggggctgtcttcccgccctcgcctagctggtgagctccgacgggctggcaaccgaggaggtcggccagctcctcctcctcgcccacggtcacttcttgttttcatcc

SEQ ID NO: 227758 - DNA, 135 bp, Homo sapiens
  chr1:185014250-185014385
  hyper
aggtttaagaggacgaactcatgagaaagaagtctgagcccaaaccccagaagccggccaggaaggtgtaaagggtgggccgaagccagggcagaagaacccaagcagaaggttgagcacgaggtggctgcgccg

SEQ ID NO: 227759 - DNA, 254 bp, Homo sapiens
  chr1:185125952-185126206
  hyper
caagtggggagggcgggatgcgtgcaacagacaaaagatgaagaaccagtgaccaaatcctgttagtagaaaacagaaagccagaggcagcgattccagatgcccgtccgcttccctttccccgaggcgttacgacgccaccacaaactgcgcagaagcgtactggggacggcgtccaattgggtaagagggttcggtttctacggtgcgtctccggcccaccggccaaccaccaaaccgaacaaagactacag

SEQ ID NO: 227760 - DNA, 374 bp, Homo sapiens
  chr1:185286448-185286822
  hyper
cccagcccgcttccgtctcgaatccatctgcaaatcacaggcgagctccataaagatcccactctaagccccgccccacccgcggccccgcccacatcccgccccgccttcctccctggtctactggggttccttccttctcggtgtaactaggtcagcgcaaggtgatcctgaggagataggcggcgctcggggggcgccctcgttcctcttatcgcgcctttgtccctccctccgttccttgccccgcaccctcactttcgccgccctgtgcgttgcctgtcccggaactggttccctcaagccgccctcacctgttctgacttcccctcgaggcacaatagcctgagagatcagacgtgggagattagatt

SEQ ID NO: 227761 - DNA, 176 bp, Homo sapiens
  chr1:185643478-185643654
  hyper
gactgactctagtgcgacatgtttagtaggaagtgggagaggaagtaaaaatagaccaaagcaaacatttgctcaagatagacgaagagcaatacatcctctctgtgcccctccacccctatgaaaacatggctctaagcttctgacaactttttttctcccgtttctattgttat

SEQ ID NO: 227762 - DNA, 519 bp, Homo sapiens
  chr1:185703184-185703703
  hyper
gaggtgtctaaagccgcgttgtacacaatagaaaaacaaaattccctttgtgctagtgtggtgtccctcggtttgggtctttgccacacattcttgaaagccattgtttacactagcgttttgcaggttaggaacggtgccggtgggaaccgagctgacaccgtaagcgcttccctgggactgaattgaccctacaatcagtggagggaaaagtcaccctccgggggggcctccagagcaaaggagggaggacggcaactggccaatcaggaggcgaggccgagccaggcttcccctcgtcgctcgtgagctgcaaacagtggaaagttgggaacctcagtcgctggcccaggcggagagcagcggcggcggcgagggcagcgggattcgggccgcggcgccgcaggctcagagctgcccccggggcatggacccgacgcgccgcccgcactccgccacaggctgtccagggcccgcgggcagatagcagtccaggaggaagccgcatccagacaaaag

SEQ ID NO: 227763 - DNA, 56 bp, Homo sapiens
  chr1:186344957-186345013
  hyper
aggtcgctttctgatgaattcagtggcagtgaattgagaccggagggaatctggcc

SEQ ID NO: 227764 - DNA, 907 bp, Homo sapiens
  chr1:186649187-186650094
  hyper
tgggaaagctggaatatccacggagttctttcgaactctagcggtccaagctctttcccaagtcacgtagcttctctattcggagagaagtcggagtactgggatagacccaggaggtcagagcggaaactctgcccgggtgcgtggaaccggagtccccggtgcgcggcgccaggtactcacctgtatggctgagcgccaggaccgcgcacagcagcagggcgcgggcgagcatcgcagcggcgggcagggcgcggcgcgggggtaggctttgctgtctgagggcgtctggctgtggagctgaaggaggcgctgctgaggagttcctggacgtgctcctgacgctcactgcaagtcgtatgacaattggtcgctaaccgagagaaccttcctttttataagactgaaaaccaagcccatgtgacgaaatgactgtttctttccgccttttcgtaccccccacaaatttttccctcctctccccttaaaaaaattgcgtaagcccggtgggggcagggttttttacccacggaaatgagaaaatcggaaacccaggaagctgccccaatttgggagcagagggggtagtccccactctcctgtctgatccctccctctcctccccgagttccaccgccccaggcgcacaggtttccgccagatgtcttttcttcttcgcagtctttgcccgagcgcttccgagagccagttctggactgatcgccttggatgggataccgggggagggcagaaggacacttggcttcctctccaggaatctgagcggccctgaggtccgggggcgcagggaatcccctctcccgccgccgccgccgtgtctggtctgtacgtctttagagggtcgaggaagtcacgtcgggacagactggggcgagtaaggttaaga

SEQ ID NO: 227765 - DNA, 493 bp, Homo sapiens
  chr1:186798092-186798585
  hyper
actttctctaagtccggagctgaaaaaggatcctgactgaaagctagaggcattgaggagcctgaagattctcaggtaactctgggaactgtaagcaatatatttattcttcctctgctccacttctctctcccaccctccttagcttttacttggtagtttacttggaaggaagaaaggacggaggggaaacctcgctgctttaaaaagtcagcatgtcctctgccttttgaagtgaaacacagattagggacctcaattttcttcaaacccacgcagatttgccttcctggatctaaatgcactgtggagtcaaagattaaggtgtttctttgggttggaatcccagaaagttagcattcaaaacggcggtgaggtggcgcttattagcgttccacgtgatgacacccaatggttactgatccccaaacttgagcagcagcatgctgtgctgtttgacagccctagcgatctttagcgagagactttgttg

SEQ ID NO: 227766 - DNA, 38 bp, Homo sapiens
  chr1:190444373-190444411
  hyper
tctgaggaatcgtcgtttactaacgttaaatatagctc

SEQ ID NO: 227767 - DNA, 234 bp, Homo sapiens
  chr1:190444651-190444885
  hyper
acacctttcctacacgcatgggttattcccacatcaacaccaagcctggggccagctggtcaaccaggcaccttgctctcctccgttccctgagctcaggtggcataggcgttgccgtgagctgcggagaaatctccacgcagagtcgcctgttgataaccctccagttaaaacgttcttggcagcgggagcccctcagatgtaaatttccctttcacacgcttgagcttcagg

SEQ ID NO: 227768 - DNA, 257 bp, Homo sapiens
  chr1:190445093-190445350
  hyper
cttgtcaggcaggacgaccggactgggaaagagaccaggtagaaactagtgacctagtgacgggtgaggggcgccaagtggtgcggaccacagtctcaacccccgttccctctcggtgggagtcaagggggaaaagcccttgaatcccgagacggggggatggggcgacgctgcagctggagtacttttatgtctgggagctaaaagggcttttgaatttaaaaaaacattgcttgggttgtcgcgtcagccatcaa

SEQ ID NO: 227769 - DNA, 516 bp, Homo sapiens
  chr1:190447265-190447781
  hyper
actccccaaataaaccactacgaccggtcacattacgatgaccaaatcatcagcgatttgcacgaggcggtggggggtggggggtgcgggcggtgatcgaagggctgaagatgcggaggaggccgagtcgctaggcgctttcgggggcgctgtgccggtgaggcttaggcaaggggacggggaaccgtggttagatgcagcagcggcggcagcagccctcccaggtcccacttctttggcgttcctgctgcctgtgactcaagacaattgacttccacctgaaccctcagctccgaacgccttgcattagaagctagagctttggaggttctgaggacggtccctggggagcaagtggtaggtttcgaggcgcccgcttcccctctgattcctgcagtaactgagagagagtgtgccagaaatggctttgctgccgaatgcattatcttgccattttcgtgtcccaatactgaacaaacgatcgcctgatcgatcggtaagattagctttattcct

SEQ ID NO: 227770 - DNA, 73 bp, Homo sapiens
  chr1:190448067-190448140
  hyper
atctgtataaagagcgctgtgggagtcttttgccctccgctctagctctatcttcctccggaccccgaagctt

SEQ ID NO: 227771 - DNA, 139 bp, Homo sapiens
  chr1:193028795-193028934
  hyper
ttgctgtggctgtcgctgcccgtcaggctgccttcttttgtcgtttcccagcgctgcgcaggacttctcctggcggcgctgcggatccagggggtcggctgccaggtacaggtgaggacattgcgggaggccggctggg

SEQ ID NO: 227772 - DNA, 107 bp, Homo sapiens
  chr1:193074685-193074792
  hyper
cgctggattccagcgagtgccacccacgtgtaaacatcctttagaggggagaagcggctcacttgcttatctcgagggttcatccgagccccgcctctggattcttt

SEQ ID NO: 227773 - DNA, 93 bp, Homo sapiens
  chr1:193091321-193091414
  hyper
ggggggaagatggcggacgtgcttagcgtcctgcgacagtacaacatccagaagaaggagattgtggtgaagggagacgaagtgatcttcggg

SEQ ID NO: 227774 - DNA, 1269 bp, Homo sapiens
  chr1:196577279-196578548
  hyper
ggccctcccatttccgtctctttttcagcaatatttacagaacaatcctccaccacaccactcacctgtcgtcgttttgccatccttggtcccctagcagcaaatctcgaaacctgtacctgggaggcagagggggcacttcgctctccaaatcaaccatccttcctcaaagagtgggaaacatcaaacaacaaatggaggagaggagggagaaagaaagaaaatattgcggagtacagggagaggactaacaagacgctgtggccgagagagggatgggagaaggggaaggggacagggagggggagggggtccgcttggagccggaagctaaggcttgaaagggggctggctcctctttcccgagggtgtaatggggatgatgcaaacccaacccaggagcaaaagtctggctctgacaagaatcaacgctgccaaggaaccgcccccaggctcggcaccgcctctggtccccaggactagggggaggcgggtataaaaagttacttcgccgaaaaagacgcgcggtgcctagaaagaggggagaggggtgggagtgagcgccgcttgatggtgaagcactttccttaaaggcagttgccagatcctcccagagggcagcctcccggctactgttccctcgggcgggcttgcatccggcacagccctgagctggcgggaatcgggggcggtgggtttcggccccagacgcggccaacccggctctccccgcaatctccctgtggagatggagctggaggcccagccaatgagactccccctcattagcatagcacagtgacggcacgggggtgccttggggacaaccaatgggggcgagctaattagcggattgcggggctccagacccttctctgggaggaggggggccagggtgcttggagtgttccactatgccacgagctccctcgctttgattgccttcagtccaggtgggcgggatgaaaaaattgcacgtttctggaaagggaatccccactctcagccccaggaaaatcccatttttttctcacattctgaaagaagggaggtgtttccctgaactcggggaaaaagaagggccaccttaggccgctgaagagaagcatttagatgacagggaaagcacatggaaacgcactgaggattttacagtggtgagttgctgttactgctgtcgctgctactagcagcgttgtgggcttccaggtggcctggcctcagccttcggtcccctcctattagtggttcacacggaggaagaagtga

SEQ ID NO: 227775 - DNA, 59 bp, Homo sapiens; identical to SEQ ID NO: 197890
  chr1:197744743-197744802
  hyper

SEQ ID NO: 227776 - DNA, 1460 bp, Homo sapiens
  chr1:197879611-197881071
  hyper
tgtcgttaccaaatacctagaacggtattggaccgcaaagaggttaaacccggttgctttcgacaggaatgagttgaaagcacccaagcgttttcgggtgggtatcgccgtccatccattcgatggcctcgctgatgagcatagaagatgaacccgggaggactgtcccttcctggctgcgaaacctgaccgatataggggagattctagaagaaagagctaaggaggccagggcggaaagaggaaagtcaggtgtaggggagattaaaaggtaaactggtgggactgaccgggctggtgggactagttagcgaagccaagtgtttgggtagaaacagagatcttgtaggaggtgctccgagctacatttcgggatttgggatgaaaagagaaagccagggggttcgccgctcctggtttgttccttaccgaccctaaactgtatggcggagcttgtgggtcaggcgtggaggcggcatccactcccacgtgccccacatgcagcagcaatcccacgcggttttcgcaagcggctgggaggcaagcgggcgtccccccacaccccccccccactgcgccctggacccacgccacgcaccgccaaggagtagctatggtggcacgtggaggaggggcgggtaggcagggcggcaccatcaccgggaccagcatcttggaacggtcaatctcactgctcatactctcctccctaccggcgcgggagccttgctgtaatcccctgccaccccatctccgactgtgaggggcgcaccgggtgggggaatgggtaaataactggcccaaggcccagcttccaggtcctccctccactttcccgcggcctgactgcgccccgggcaacacagccccttgggaacctgcgaccaggtaatgtggcctccgccccgtcccgggtctggctgcatcccctctaacccctgcctgcccgggtccaagtgagggttttctcccggaaggttaatcaccacccccatcccctagccgggtcccgggaggaagagatgccccggctctctcgttgacccggcctcgaacgccgacctcgagcgcagaatactcccgagtgctgggttcctgatacccagcccgggagcgaggggagtgaaggagggaccgggacaggaaggcggggacgcggtgggtgaacaatcaatggcttagcctagtttccccgcaggagctaccgcccattcaccgtctatgcaagcaccagctggcggcagcatcttttaggtacaagctgcagggaggcaaaagctggctggggggccgggagcccagggcacgccgcgggactccagtccccctgctgcgccccagcctcaagacgctctgggctttatgaggttcagttaccgccgagtcctccattaacacctcctctgattattgagaggctggaagggctgaacgcaacctcagagcgtttctctgggcac

SEQ ID NO: 227777 - DNA, 476 bp, Homo sapiens
  chr1:197881312-197881788
  hyper
ccgccgcctcccgccgagaaccgagttctagttggggaaacgtctgacatctggacatcaaggtaagaccctgatggagatattttagtcggagcagttttctgccctcggagtgcgcccggacgcccgggagtttcagggacttcttgggagcctaccggaggaaggcccggctttgctccaagccgcgtccctacctgaggtctccacgggaggagcggtttggacgcgccccaccggatgggaggaggtgcttggggaagccgggccgtaccgccggtctgactcccggcttttctctgccagtgcaaccaccattacggcgtgatccactccttttcctctaagaatgctgaacggtaccactctagaggcaggtgagttatgtgccaggttccttctgatgttctctgccccttgggccagtgcgtataccatgtgagtgtgtgtgcgtgtgtgtgcgccttcgttgggtg

SEQ ID NO: 227778 - DNA, 882 bp, Homo sapiens
  chr1:197881990-197882872
  hyper
tggctccagggacgcgctcctgaccctccggggagctgctgggggtgtctctttcttggaagggatggaaggggggccgagaagacactgtttctcacacgtgtaggggttaactggaaactggcttcacccacatttttttgttgttgttcagtcctaacccagcgcagccgtttctgcgcctgatctcagcggacgcagtgcgggacttctccctttatttctgcagagctgagggcaggcggcgcaacaaatctcaggtaaaagagcatcagatttcagaagagctgtattctagacttggcgcaggcccctttggggagaagagcccaggggctatagagaacagaggtttgaaggaagcaaaagctggcgagaggttttttttttgtcgcgaagggtgagggtaggcagagaacgcgcgaaagggcagggccttggccgggaagtaccgcccagcgaaaggctggcaagggtgcgcagctggagcgtggcctcgggtacccctttccaggcagccgaactccccgtatcccagctctgcttggctgactcccatttgtcttgagggaggatcccctagtaggactgaatcagaagtgcgcccgtgcagcagccccagtatggatctgccaacctcagtgtagggggaaattttccacatggagtatctcagtctccactgtctggagaaaggccccagcgtgtcccggcaatccgctcaccttccatccagcgcagcccgggcatccagggccaggtggcgcggcactgaacgcatggttcccagcctcaggctgacgctgacgtttcactgggccttgggtgctcaggacagtgccagacgctggatactgttttaagagccgcgcctttcaaacc

SEQ ID NO: 227779 - DNA, 1164 bp, Homo sapiens
  chr1:197887320-197888484
  hyper
tgcagctggctatcctccgtcgcagctgattccgaaagagcagggagaggaactgggaggaggtgggatggggggtggtggcattctcttctacagacctcaaggttcccttgattccggggcaggcgtctccccggcgaggatccgcagctccgagggcaagctgggcataagcaataggaggacggcgcgctgccgaggcgtccgagccaagcaggagcccaggtggccttagtctctgggcctgatgaccggacctgtggagtagattccgacgcgactgggtcatttccagttctctagacgctcggggcttgggacccctaaccgagagaatctcagggtttctggcatcccgactcagtccctctaaggagacagcactacgtttagcgccaggacccggcgggtgtcatgtgtagggggaaatcaaataaaacatacggaggagcgcggcacccagtcgaaacgcatgaactttataaccaacccttaaacaagctaatcaaccaccactgtttctactatccataataataaagtcatgtcctcttaataaagaaaactaattacttatctaagcgcttccctttccagattactaacggggggggggggggactacagaagtctccggaaattatttcggccaaacatagctgtgtagatcctttggtaccacagtaggacttgtagcccaaactaatcaggagactgctctagcccttatcagctgggttttgggtccggccaagtagcccaactggtgaacgtgtctatatttgtaacactcattcagtgccggggcccctggtcggagtaaagggctaaactttactttttcaggcccgctgaagtttcgtggggaagatcaacccatttctgctagtcgtgagggaaatgtccggaggttaactccttttccctttttctggtcatcacttttaaaaacaaatagtagcaacccaaacccaaattttgcagcggggctgggctcctcaaggtggggccactggggcatcccgagtcgggtcagtgggacccagagggaagcataacttgggcactaaacagattttcaagacaaaggtctcagtacgcctgttgatgctagggaaagaggggactgtatacagcgggctggacagcggaccctctttggga

SEQ ID NO: 227780 - DNA, 1008 bp, Homo sapiens
  chr1:197888735-197889743
  hyper
ttttattttgtgtgcgtcgaaaaccacaatttttagcttgtaattatttgaattcggaaacgatcaccaaactgtagtcaatattttcctagtcctttttaagcgaggctccggatggctgggatgtctttaggttagtagtcccgggaggacgcgaacgccggttcaggcagacacggaagaaagcaagcgggccgcaaagagagaaatcacaaatgtttcccctgacttttgcctttgtgcagtggaccctggcccctgccgctctccctgcacaccctgggcttggtctgcctgggggagaaccccgcgtcgtgcggctacaccgcgcgccctcctcagccttgcggtgtgctttctttgcagggcatgcccccgctcagcccggagaagcccgccctgtgcgccggctgcgggggcaagatctcggacaggtactatctgctggctgtggacaaacagtggcatctgagatgcctgaagtgctgtgaatgtaagctggccctcgagtccgagctcacctgctttgccaaggacggtagcatttactgcaaggaggattactacaggtactcccctacacccccacttcctacgcccgagtacacctggaggggccatctgcctgagcccggaatcccctctccgtcccctaccttttgccccattccgggtgctgttatcatttcggagaccaggcaaacccactgcatatgccttcaagctgtaatctccctgaccgacggtgagggtgggtgggagggacattaaaaatctagagctttatcagcgaataccacgcactcccatcacttctcagcttggctggcggaacttggggaaatctggggaagagtaaatggacgtggtctccgtctaccgagacttgattgggtgtttgttttccgcttgctacgaattgggcaagttctgcgccttgaaactgaactagtggctcgggcagcagcaacagagtgttaggttttcgtaggtggcaggagactctgt

SEQ ID NO: 227781 - DNA, 100 bp, Homo sapiens
  chr1:197890554-197890654
  hyper
actctgaccacgggcgaccatttcggcatgaaggacagcctggtgtactgccgcgcccacttcgagaccctcttgcaaggagagtatccaccgcagctga

SEQ ID NO: 227782 - DNA, 37 bp, Homo sapiens
  chr1:197890684-197890721
  hyper
gcctggccctgccttacttcaacggtacgggcaccgt

SEQ ID NO: 227783 - DNA, 568 bp, Homo sapiens
  chr1:199998194-199998762
  hyper
agagcagcacacaaccatttcgcatctttttcgtcgggcagaaccgccgcggtgcgcaggcaaggagtccttcccggcagctccgcgcagctccggttccgcgtccggggccgcagctagagcgcgctcgggccggagacgcggactgcgcgcgcacgggggacgcgcgctcgggggctcgcgcccgcgcgggcggtcttgggctcctgctgcgcgcagccccagctggccgctgccaaaatagagttgagctgggtcgggagaccacgcacgccgatccctcacagtctcccccacaccccatgggtgaattaaagagggtaaggtaggggaaagagacgctgttgcacttttctctgcaaccctggaagaactgtgtttccagctaccgcacgcgcaactcacatcgcaagggaccgaggcggtacactctgagcgtaaacagagaacacctgcagctctggaatcggtcccaccgcagagggctgggaaccggaggactgtcggtccagcccataaggggctgctggggactaaacctcaagaaaagtaccgaagaaggctctcc

SEQ ID NO: 227784 - DNA, 789 bp, Homo sapiens
  chr1:200008278-200009067
  hyper
agagagatagggggaaggggcggagaggaggggagagagaagggaggcgagagaaagaggagagagacccctgccgatcctgagccagagggcggtggagggaggggaaggagtcgcccgagccgtccgggagcagtggcagcggcacagccggggcggcaatagcagccccgcggtcgcctccgctgcccgccgggagctcggcggttcacggctccgcgccccgggcagctgcgtcctcgccaccgccgccgcctgcgcccttgcggagccgaaccagagggccgggacgctgtcttcctcgcctccttttttaaccctgacctcctcctcgcagcttgggggcggctccggagctgcgagaccggacagggctcagaggtcctgcccggcagccccgaggaggcggaggcacgctccggcgaggcgagagggttgggttagcaggcatcccggtcgccccttccttcttttcgccggagttgaatctgtgctgcccgtgtccaggtgctgggcttccggaccgacacggatcccccatccccgcccgcggtcgccttgtcatgctgcccaaagtggagacggaagccctgggactggctcgatcgcatggggaacagggccagatgccggaaaacatgcaaggtaaggaggcgccgcgcggcgctccggctcccgctgcttccccacccccgggctcgccctgcaggcttcagcctcccgccccgcgcgggcgcgggagtagccccgctgggcgctcgcagccgcgggagtcaagccccctcccca

SEQ ID NO: 227785 - DNA, 173 bp, Homo sapiens
  chr1:200009359-200009532
  hyper
aagaggtgacctccgaaaggattgtcttagcgctattagaatacatgtgaccacaccaaaagcccaggcggacacccgcagccagctcggatttggacaattcaacattgctggcagaactgaagggaacaagttaccccaaccccatcccctgtacgcgtagtgctgagtga

SEQ ID NO: 227786 - DNA, 407 bp, Homo sapiens
  chr1:200009745-200010152
  hyper
acaatgctaggaaaagtcaccggtgctcttccatcctcgccccttccagggtgcaggatgtgcgggccggcgggcctgtgatcccggaacgcttcctgccatccccttgcgcgaacttgaaaggactgggaggtgttgagagcagagttcagggctggtgcactctgcggtgctgagtgggcggcgcgcccgggcgctcaggccgggggacctgtagtcgccctaccgcggaggggaaaatacgtagctggagggcgtgcgccgtgcgggttgtgatccgttaccccatcggtcatcctggggtctccccaagcctctaggtagggctgtgagagtcccctagagctgaagccccggaggctgacctgtgggtctggctgctatgggaacccggttggtccaaagaa

SEQ ID NO: 227787 - DNA, 939 bp, Homo sapiens
  chr1:200011380-200012319
  hyper
catcctagggctctgtggcccgggaagagacgcgtcaactccgcgggtctgcgcgcagtccttagccgcaaagtgctgcaagtgacccccctgacggccctttccgaccgaagagctcgggaaccaaagagaaaaaaaataactttattttcaaaagaacaagtcatcactgcggcgatactgtggcggaggactttggcgatggggtgggggctatttctctttcctttttggtaaacaaatcagaggaaacttctgcccggccgtggctttccatcccccacctgccccaccccctgcaaacgccactgattaacttaaaacaaactcggctgcgtgtttgtgcgccgttgggtagcaggaggtagagcctaggcgagagcctggtgcgcccacgggtttcgccgaagagtgcccgggggagtgcgggcagggtcccggctgcgcagacctgcgggtgcccgcccacccgcgccccgcgctcccatacttgacctgtgtggatgtggagtctccgggaaataccggatcaggcacttcctggggtctcctggtcactgcccttcctgtgcatagtttgtcatctttttagctgcgaagacgccttcgtgggtctgcgtccggagcaaggcggttacccgatcccggcagtgagccgcgccgcgcgtcgtggcggcctgatttctgtttaactttaatagggcgatctcgaggtgtttatattttgctatgatgatcggaaacatgtgaggttcattacagggcttcaatactttgaaaccaaaacccttctgtgtgtcttttactcttctggtatttttccccgtacgggcgtcctctattttctttttccttctttttattttcacagattttcaaacgtaaggagatgaaagtatccagaatagaaaagtactgtcaatacggaactgaatgttt

SEQ ID NO: 227788 - DNA, 721 bp, Homo sapiens
  chr1:200271192-200271913
  hyper
taaaaaaaaaaacgcgtaccaaacaacgaagctcctgcccttgggagtttatacacaggctatgttaatatttgcaaagggccccgagtgtctaagcggctaatgaacgtcttgggtcggtttcctcaaaatccagcccattgtttccccggtgagcacgatccgaagccttatcccataacgcactgtagcccgaatctttctgccaacaaccgctgaaactaccagaggttaaagcaattaacatgagatgcaacctcaccgtggcgcagctccgcgcgcccccggctgctgcgacccgggaggggggagccccggagcggctgcgcccggccccgcacccccggcagagcaggttagctccccctgggtggcaagcctttgcaaaacaaaaccgaaaatgagcgttcgctctcctgacagtcttgcctaaaagaacctcgtctatactgcaaaatcccattaggtacacaagtccggtcggcattgtcacttttagcgtgacttcaatttacacattcaaagaatacctgtccggagcatgggacctggtagaaaggttaggctctctccgaaggaagttcaactcaggatttccctcccccggtgctgcacacaccatcaacggcaaaacctcccctcccagttgcagatctagacttgctgagaaaggtgctggagatgtttccaaggtcatccccagcaccgcgagtccagcctt

SEQ ID NO: 227789 - DNA, 118 bp, Homo sapiens
  chr1:200589896-200590014
  hyper
attggctgctgggcgtcgcgtcgggtgccgcgcctttgcttccacccgccccccggaagtgccggtggttgggctccggtagccgtctctgaatgctggactcgccccaccctcatct

SEQ ID NO: 227790 - DNA, 125 bp, Homo sapiens
  chr1:201083266-201083391
  hyper
caggaagccagagaacgccaccggggcacacaggtcgcctctgctgagtctgtaggttcggtctgggctgagcgccagcagcaatctggcctcccatcccttcctctgggttcctttctcgagga

SEQ ID NO: 227791 - DNA, 323 bp, Homo sapiens
  chr1:201228892-201229215
  hyper
cccaggcctggcctcgcccagagagccgccctcttccgggaacctcctgctccggagccaggaagggctgccctttccccaccaggaggccaggcacgagctccaccagggtgtggacccccagggaaagtgcgccaggtgcctgggatgctcaatgggggacttgttccaggactgggaggctggcggggtgggggctgctgcttccctggagcagcacctgtcccccacccccacctcccgcgtcagtggagctgttggcgcttgcacccggcttcccaagcgatgagacacggctcccagccagccgccccaagccgctg

SEQ ID NO: 227792 - DNA, 510 bp, Homo sapiens
  chr1:201252438-201252948
  hyper
gagaaaaaaaagagcgagcaggaaggcgcccagcgtcccacacaggggactcgcagccctgcccccaagagcgctggctccgcagcagcagtgccctgcagctccgcgtctgagcagcagcagcgcgcggcccggtggagtgggtggtgcagggcaggggtggtatatcctgtctgacggagggcgggcctcgccagtgccagagagggacgaaccagggtggaagcgccaggagcagctgcagggagccctcacgcggaccacgcactctatggccgtagggagccgctgagagcgagaagagcacgctcctgcccgcccgctgcaccgcacctcgcctcgcctctctgctctcctaggccccggccgcgcgccacccgcctcccgccaccatgaaccactcgccgctcaagaccgccttggcgtacgaatgcttccaggaccaggacaactccacgttggctttgccgtcggaccaaaagatgaaaacaggcacgtctggcaggcagc

SEQ ID NO: 227793 - DNA, 483 bp, Homo sapiens; identical to SEQ ID NO: 1032
  chr1:201368375-201368858
  hyper

SEQ ID NO: 227794 - DNA, 233 bp, Homo sapiens; identical to SEQ ID NO: 197903
  chr1:201437933-201438166
  hyper

SEQ ID NO: 227795 - DNA, 684 bp, Homo sapiens
  chr1:201449631-201450315
  hyper
ctaatcattagaaccgttcagaggcagccccagctgcggggcggggcggggcggggcggggcggggcggggcgcggagctgttggcagctaagtggttgaggttgagcggccgggtggaggccggcacctactaggaggctgggctggtccgcaggttctcaagcccggctgagcccgggcaagcgtcagagaatcaccagagcagcttgtcgaatacagattcccaggccccacccaggccaaccgaatcagaatctctaggggtggggctgggaatccatttttaaaggcttccccaatgattctcagaataaaggttgggcttggaggcggggccggggctgggcgtggcacggaggcgaggcgcggggagggccggaccttccagttgttaatccctgtgttcctcactccgccacactcacctccactgatctaagtcgggggatcgttcctcgctgggtgcccccctcacttgatcttagccaaaaggtcgagaagcgattgggagcccctctcgaataatttctgtggcccttgattcagggatcactcccacacttaatagcagctctaacgccccccaacccccgctacccaagatctctatcctcaccctccagtcggcctcgtggtcttcctgtccctccccagcctctcaggtgacccggacaatttgctaa

SEQ ID NO: 227796 - DNA, 275 bp, Homo sapiens
  chr1:201476297-201476572
  hyper
gtgtcccgggccacgccaaccagtgggctttgcacactgcaccactccagggctgatgtcatggcgcgaagcccggcggtgctgccctcctaggccccgggaaggccggccggcaggggcgggggcaggagtcgccgactctgggggtgctccgagctcgtgctgcggtcccactgtgcgccctgtcgccgccaccgcggaaaacgtcttgcacgtgcgaggggcatttcaggagtttcctgtctgtcaggtgagaaggcggagatatgacctta

SEQ ID NO: 227797 - DNA, 453 bp, Homo sapiens; identical to SEQ ID NO: 197905
  chr1:201857901-201858354
  hyper

SEQ ID NO: 227798 - DNA, 428 bp, Homo sapiens
  chr1:201915621-201916049
  hyper
gtgctgaagtgttcactggacgcagcagcctccctgaagcccagggctagtggaccccggctggtctaatcagcggccaataagacccgacaactgccaggcccggagaggagaagccaatccccaagctgggggcgggcctacctcgctgtcagagctgtttgaaacttgaggacattccagggaatcttggagcgctgcgtgaccaaatttagtacagagcagtttagccttttaaagacaaggggccacgcaatgagaaaaagatacaaaaatgcgtaggctggcagaagcagatcacagccacggagagccagacaagcagggacgaggccatgagggccggtgaactcgccagcccggggcacgttcaagagcgtattttactactccatcaccgggtggacgtatcactgtggtcaatgtgt

SEQ ID NO: 227799 - DNA, 264 bp, Homo sapiens
  chr1:201924323-201924587
  hyper
ggaaagaaagaagcgtatttaggcagtatcgcgttgatttcagtccacggaacctctggtgaccgggtagtgtgactccgtcattggtagccccccgcccacacagccgggactcgcggcctttgaggacgtgggcagggccagtctcgccacgccgcggccaatgccccgaccacacgctggccacaggagtcctggctcccattggctgcagcgggaaatggtgaaccaatgctcatagaccttaacgccctcctctcggga

SEQ ID NO: 227800 - DNA, 188 bp, Homo sapiens; identical to SEQ ID NO: 197908
  chr1:202112266-202112454
  hyper

SEQ ID NO: 227801 - DNA, 429 bp, Homo sapiens
  chr1:202183289-202183718
  hyper
tggagggagagggccgctcagcgagggcgggacagaacctctcccgggctgggagtgcacggcgcggtgcgcccaggtaggcttgggggaagggtgccgagctccggaaagttccacaggtcctccgcagccctggggagcaggacccagaaaccgacgcgacgggtggggcgctacccgggccggccctaatccccttccattgttctgggagccgaggccgcctccccacttccggaccctttcagccatggagcgggcggcgcgggcaggggcgggcaggggcacggccaggcgggctggggtgggcaggggcgcgcgcgcgaggctggtccccgcccccggggccgccgcttagctcccgggtacgtgcgtgcagctaggggctccactgaaccacctggcgtgggttcgcgctgccaattctta

SEQ ID NO: 227802 - DNA, 205 bp, Homo sapiens
  chr1:202317590-202317795
  hyper
aggaagaggctgacgccagtccaggagacagttccagctttagggcaaaggtgaccccactgggtcccgtggcgaaagagagagccgccggtcctcgccttttttctgatgcatccagggatttgtagttcccttacggccaccaagtgcacttagggcaggcctcttactacgagtcccgtgatgacccgaggccgggcagcgc

SEQ ID NO: 227803 - DNA, 548 bp, Homo sapiens
  chr1:202612284-202612832
  hyper
tggcgaccccgcgtccgcccacgcctcaggccctagaggtggccactgtcggtcgaggcacggcttcgctcgggactactggctgccctcgtggggtgccccgcctggggttccctcttaccctgggacgttccgggcgcgttcagcctgagctggtggagagggcgggggcgggggcgggggcggggacagctggggtcccgaagtccaggtccctcttcccacttccccgccggccctgccgctgcggccctcgctcccgcgctcgctcgctctcgagtctctccctctctctattctcttcctctctctctctctgcagtagtaacaacctgatcccgcttcccccgcccgcctattgatatgctcctcacattcgcctgcacacagcgcgtgcggcccctccgagggcgatccccgcaaaccacgacgcagggcccccgccccaggcaatccccgctgctggggaggctgcctccgcgcgcccacgcctcccttctccagtccggactgccagcggaggggaaaatgggcgacaggagaagggg

SEQ ID NO: 227804 - DNA, 152 bp, Homo sapiens
  chr1:202613487-202613639
  hyper
gaggctgacacccacggtgagcaccaggaggggcagggaggaccgagagcctgggcagcactcctgtgcctcagtgtcacccttgggcctcaccctcaacccccaacctcacccgataagacctcggggccacagctcgccaggtggaattt

SEQ ID NO: 227805 - DNA, 1053 bp, Homo sapiens
  chr1:202678717-202679770
  hyper
aagcagggacggggcgtcctaggtcgtgctgagtcatgagatttggagagaggggaggggcgcctccagccccttcttgggcccctgccccagctcctcgtgcccgttgcttccagatggcccctgcagtctgtctccccaacctctccctgacccagggtctccggctcccagcgcccagaccccaccccccgccccacttcccacgacggcggtgccaggggtccccgaagcttgagactggggcaaaagaaccttccttggagaccgctagggctggcgggggctgggctagacgcgagtgggttcgtcccagggaaaggagagagggacgggggcgcagagccggccggtgcaggggacgcgtggcccgcccctctctgcagcaacccgcgggaggaaatctgcccccagcccagccccagtccctcagaggagccggctcctcgcccctcgggtccgactccccgagacgaaccttccatccggacgcttccaaactcccccaaaggacggggcagactcccggcccccttggcctcaaacttccccaaccctactcacctctcgggacccagaccaccccgtggcccctcgactcagtagcaggaaaggagaaactttggagagggaggtccgtgcccccaccggcgggggtatggacttaccggagagcgacccgaaggaggcgggagagatccggggtctccaatgtgagggggcgtcggacggcaaggacgcgtggctggcgacggtttcgcaggggcgcccgttcccctgggggcgcgaagtccccgctccaccgctgccccaactcggctccgaagtgcctttgccgcaagacttgctgagcttagcagtctgcgccgaggcggcagagggagggggcctgatcgatgggcgcgcgcggcgagcgctgcagtgaggggaggagaccaagcggcgtgggagggcggggaccgaggcggaggaggcccggaggaggcggagggcgggcctgccccccgggacgggttctttctgcgcagccccccaggcgctcggcgcccccgc

SEQ ID NO: 227806 - DNA, 51 bp, Homo sapiens; identical to SEQ ID NO: 197910
  chr1:202830113-202830164
  hyper

SEQ ID NO: 227807 - DNA, 88 bp, Homo sapiens
  chr1:202830481-202830569
  hyper
ccgttttgcgctgcgggcccttcccaccgaccccccgtgcgcccccggcatcctccccatcgtgcgacaccctcccccgcacagcatc

SEQ ID NO: 227808 - DNA, 64 bp, Homo sapiens; identical to SEQ ID NO: 197911
  chr1:202858344-202858408
  hyper

SEQ ID NO: 227809 - DNA, 280 bp, Homo sapiens
  chr1:202936076-202936356
  hyper
cttgggtggtgaccgtcccaggggtggcgatcccgagctccagcgcggaggcatgccaagggcagaggggtaacctggcggagtcccgagcccggatgtgcgggatcgggaccccagcatccacggtgggcccagagccctgcggggcggggtcggcagcgacagcccctggtccggagctgagtggccagaaccagatggggaggggtcccccagtggaggatactgaatgagggtcttaccgtctggatccccatgacggagcgccttttcctccacc

SEQ ID NO: 227810 - DNA, 148 bp, Homo sapiens
  chr1:202976330-202976478
  hyper
aggtacggcgatacgcgacaccacccagtacaacagctctctctccacctggaacccggacccagcttgattcgcgggtgccggatgatgacgtatccttgcacctggcgatgattggttcgcgtggagaggcgtcgtccgacaacgc

SEQ ID NO: 227811 - DNA, 222 bp, Homo sapiens
  chr1:203086994-203087216
  hyper
ctcctccttcttctcccttccgcgggaacccagcacctagcgcggcggagcagggaactcaggctgcgggactggggtctggccctgcccagctcctcgcccacgcccaggcttccgttaggccagcagggggaccccgagccccggacaacagccctgagctgggcggctgcttctggctctagatcccgctgctcagccgatccaccttccccacctccc

SEQ ID NO: 227812 - DNA, 87 bp, Homo sapiens; identical to SEQ ID NO: 197912
  chr1:203242476-203242563
  hyper

SEQ ID NO: 227813 - DNA, 210 bp, Homo sapiens
  chr1:203296275-203296485
  hyper
cccgggaccgttgcggccaaggcgatcccacacgggctgcctggagtcagacctgtccagcaaggaagcttcggggaggagggagacagcgccggctgggcgtgcaaaggcaggcaggtgaccctccctccgtcccggatatgggccctcggccgctcaccccccagccacccacccacgtccctcaatccccacgagcagctgactggg

SEQ ID NO: 227814 - DNA, 412 bp, Homo sapiens; identical to SEQ ID NO: 197913
  chr1:203595793-203596205
  hyper

SEQ ID NO: 227815 - DNA, 174 bp, Homo sapiens
  chr1:203596926-203597100
  hyper
gaaggagagtgcacgaattaaatttctttagctttgcagagaaacctcagcagtttctctgtgctgcttgcaaaacatcctcagactttcacatgtataattagctgtggaaaaagctgggagttacctcgtaccgctgttgtttgagtgtgtgtgagcgtccagaaccaactg

SEQ ID NO: 227816 - DNA, 49 bp, Homo sapiens
  chr1:203764621-203764670
  hyper
ccagcgcctcccccgtcacgtgaccctgtgacccggagcagccatctta

SEQ ID NO: 227817 - DNA, 219 bp, Homo sapiens
  chr1:203830671-203830890
  hyper
atttcccaggagccgcccatgccgccgcgtgaccttcacacttccgcttccggttctttattccggaagttgctctcagaggcagcgtgcgggtgtgctctttgtgaaattccaccatggcgtaccgtggccagggtcagaaagtgcagaaggttatggtgcagcccatcgtatcctacgcaggatgtcaggactaggaggttcgggtcagaatacggg

SEQ ID NO: 227818 - DNA, 823 bp, Homo sapiens
  chr1:204042251-204043074
  hyper
gcagcagcgagccgcgagcgcccttctccagtcccggcttggaactgaactgtgtgagcacgggtcctggaacccgggcccagaaccggcgagcccaggtctgagcccagagctcagcggtcagcctcgtaggccctgactcggaatcgagccgaggcgctgaggttggagccggagagcgtgagagccgaagagcagggagggcgggccggctgcgcgtccgacgagtcgcagagcaggaccgcggaaggcagggagacggccgcaagcccagggcagagggcagagggcagagagcggcctggctcggcggagagggcgccgcccggccggaaccaagctcgccgcccgggacggcgggccccgtggggcgcggacccagggtggccgtgggtccgcagcgactccccggccgacggcggggggcgtgccccctcccagcccagcctccccaacccggcccgcccgccgcgtcgcgggggcatgtgagcgggaagcctaggctgccagccgcgaggaccgcacggaggaggagcaggagcgcggagccgcgagccccgagccccgagcccggcgcctggctgagtagtaagtgcacccctccccgccatgatcgcgccgtcgcgcccatttccccagctctctgaagtttgacacttgcgcccctacgtttctgggcacccaccggctctcttccctgcgagtttccaccctgtgcaaagtttttcgaggagagacggaccctcacctacccccaacaacgctgggcagtggcggctcctccctggccgacttgggtccttgtggagagggatggcagcct

SEQ ID NO: 227819 - DNA, 291 bp, Homo sapiens
  chr1:204043134-204043425
  hyper
gcgcgcgcgcgcgttcaccacgcgggtcgagcttagggtgcacccccaacccgctcctcgccgaccgcagaggactaggtctttctcatcagcccgactatgcgcctagtttaaggatttctcagcgggaagccgaagcgacctgcgcgcgtcctgcgtggggctcaggtgcctgcgacgaggcgcagagctcctccaccatggttgcgtggggtgctgggggacagacgcgctccccttgccacggtttcagggtcgttccccagcggaccagaccagcgcggcatcctg

SEQ ID NO: 227820 - DNA, 472 bp, Homo sapiens
  chr1:204043665-204044137
  hyper
gttgtgtgtgtgcgccggctctggctgcttcccgtccccaggcgcgcagggatcgcccgcgggattcgctcagctgcccgcatgggtcttcaggctggaggcgctccaggacttaactggagctggagaggacaagagacgtgggggttgccggacagtaccgggcggggcggtgagccgggcctgggcgggaagtgaattttgaacttcagccctggacctttccgggaggaccccgagcgctggagcggcggctcccgccctggagggcccgcggcagctgcaaagactccgctggcgctcttggcagccgcctcggtgacagaggcttggaggaagccgaagagttttcctgggaagtttgctttgactctctgggaatttccgggcaggacgcctcggcgctggcgctggcgctggcgctggtgaaggggtctggccaaagacggccagagacgatgctgctggctct

SEQ ID NO: 227821 - DNA, 31 bp, Homo sapiens
  chr1:204044374-204044405
  hyper
gtctccctgcctaccgcggttgtgctttcgg

SEQ ID NO: 227822 - DNA, 188 bp, Homo sapiens; identical to SEQ ID NO: 197919
  chr1:204332591-204332779
  hyper

SEQ ID NO: 227823 - DNA, 122 bp, Homo sapiens
  chr1:204347486-204347608
  hyper
gccactgaacggaaaaggggaagtgattaaacctggttctacttggtgggaggttaggagaggaacaaaggtcaaaggcacggaagcgtggcggggctgtgagcagcgaggggcccggggag

SEQ ID NO: 227824 - DNA, 205 bp, Homo sapiens
  chr1:204379620-204379825
  hyper
cctgttgaaggaattccagccgtttcatgcgaagatggtgaatttctggtaggccttccgtagaaagaggtggacatccctgccacgaggccggaatgagttctgcactcagcggctggggatgacaatggtcctctctcaggcagctgctctctggggttagtgtctggaagccgactacctcgctatttccatcactgttctg

SEQ ID NO: 227825 - DNA, 178 bp, Homo sapiens; identical to SEQ ID NO: 197921
  chr1:204380935-204381113
  hyper

SEQ ID NO: 227826 - DNA, 451 bp, Homo sapiens
  chr1:204485346-204485797
  hyper
tcttcaaatctgacgactttcaaccgttcgggccccacgactctctccccggactaggatctactctatggtagtgagctcagcctttctagctctctagtcctcccattgctccatctatggtttccggaggcctcaccggaagccctcgtgtgaggccgtgtgggaggccggaagttgcggcttcattactcgccatttcaaaatgctgccgaggccctaggatctgtgactgccacccctccccccacccgggctcggcgggggagcgactcatggagctgccgtaaggtgtggctcttggccttcgtcggcggggtgccgggagcgggagctggagagtgaggagcaggcggccgtaccgccagttgtgcgggtagcgggcgggaggagcttgagaggtgggtcgggcggcgtggggaaggccgcgccaggcggaagaagggctcgg

SEQ ID NO: 227827 - DNA, 901 bp, Homo sapiens
  chr1:204653942-204654843
  hyper
caccttgtccctccgcacagactcgcgagctccaaggaggagaaagtccccaggctctggagcgcttccagcctgccagtccgcccgtgtcacgccctccctaacctcactgccacctctcggctcctccacatctccagggccccactctacccagcaacagtttgggggaggttctggcctctccaggcgaaggcccaggcgccctctccctggccgcttctgggcattctccagccctccgtccctctgcccctcggccgcctccctctcccaagtctccggctcccccgcaggcgtctcggcggaaggcagcggccggccctcctctggcccccacccgggtcaggcggagctgcggtgccggggcaggagccaggagccctgaggcggctgctccggccgctcccgccgcgtacgcctcggccacgccagcgacctcggtgtccacgattccccggcggcggcggcgctgcccaggtcagccccgaagctgcacactcaccccgtgggcgccgggcaccgtctgccgtctgctgcccgcgcggccgcgctccgctcgccttccgcccggggccgggctggggacgctggtccgcgccctcccgccgcgcgcgccgtctgcacaggccggggaggctcggcgggcgccctccccaacgtggagttatcctgggagcggctccagggcccagccggtgagggcgatggcagaatcccaatccgtccccaccccctctccgcgccctgggcgcgtcgcggccggaggctggcgggcgagagccaggcgctccttgagagcgccgcgcgttcgcaggtgcccggagcaggccctcgcggcgcccggcaccccctccacgcgcgcccctcttcccggcttcgcgctcgccctcctcactcg

SEQ ID NO: 227828 - DNA, 226 bp, Homo sapiens
  chr1:204797786-204798012
  hyper
ggctggtctctgccctaatgcggcggctggcggcgagaggcgctgcaggggacgcgggggaagtggcggcgccggcagcggacagctcggacagcgcccagggccggagcccgagcccttggaggtaggcgagcgcgaacaccggagagatgggggtagagagtcatggaaacccacctagcgacacccccttgttcccgccctcgtctgtctccatcccctgacc

SEQ ID NO: 227829 - DNA, 117 bp, Homo sapiens
  chr1:205091310-205091427
  hyper
agattatttgctccgggaacatgtaggtgaggtagaaattccaggcatacagttaacctactagttcttgccctgttgtgtgttcagcggcgttgtccgggcgggctacctcagact

SEQ ID NO: 227830 - DNA, 243 bp, Homo sapiens
  chr1:205196742-205196985
  hyper
ttgtgctccttctcgccaaataaagcgaatgggtggaggaaatcctgggcgagccctcctcggcagggtccctcaagctggagccgaaactgcgactcccacgcccgccgcccccgcccctgaactgcagcccgctctctgcaatgcaaaaacgcagcagcatcgtcctccagccctctcctgggggatcgcacggtgcaaccaaccccaaaaacgaagctgcgcgacgccccctcagccccg

SEQ ID NO: 227831 - DNA, 65 bp, Homo sapiens
  chr1:205290855-205290920
  hyper
agcagtaccagagcgcgcagtaaagcacagcattccaagttgttataaacgccctgagcccgagg

SEQ ID NO: 227832 - DNA, 60 bp, Homo sapiens
  chr1:205312591-205312651
  hyper
gtccatggggacgccgttgtcgtcacatcccccgatggcatagacctggcccccggtctc

SEQ ID NO: 227833 - DNA, 33 bp, Homo sapiens
  chr1:205313071-205313104
  hyper
tggtccccgccccctccccacccgctgctcgga

SEQ ID NO: 227834 - DNA, 209 bp, Homo sapiens
  chr1:205313284-205313493
  hyper
cggcgaggcgcagacgacgcatcactggggagcccggagcccccgccccgctgcacgggagccggggagagggcgctctgtccttccccagtccgcgcgccgctgtcacacatgcagatgaggagatgaagtgaacagcaggaaggagaagcggagccgccgccggggaggaggccggcgagcctgctccgctccgtccccatccgcag

SEQ ID NO: 227835 - DNA, 135 bp, Homo sapiens
  chr1:205400076-205400211
  hyper
accccagctcaattcggctgaggctgagatgatgggagagcgccgtctgcaggatgctccctaaaatgcagcaggaggaagagacttgtcctagagagcccagcgagcttgggggtggggcggaggacccccagc

SEQ ID NO: 227836 - DNA, 416 bp, Homo sapiens
  chr1:205424702-205425118
  hyper
ggggacaggaggatcggctacctccggagccaaggctccctctcacactccccccaatcccaccagcggcaaaatcctttaaaaggaacaaaggcaatgggggcggggagggggcttcctctttggtcgacctagggcggcggctgacgcagcccgccgccggtcagctttcaggtgagtgcctgaacccgcatcccgcccatgccttagggacccctcttcgcccagccaagcccggggcggggaggaaagtccccctcagccgcactcgggcccccaacccggccaaggggtcgccaactcgcggcactttctgcctgtttgttttcgctcagtactcacagtttagatgctaagccggctcctcttgcactcacttcctttgtgtctctctctctctttctctctctctcccc

SEQ ID NO: 227837 - DNA, 63 bp, Homo sapiens
  chr1:205425478-205425541
  hyper
cgcctatcacaagcttctacccgggtttcagggggcccctgtagtggcgtgggcgccgcgccg

SEQ ID NO: 227838 - DNA, 60 bp, Homo sapiens
  chr1:205425841-205425901
  hyper
tatgcaggcatttgcacacacgcgcgcacacacatgcacgcacatgcacacacacatatg

SEQ ID NO: 227839 - DNA, 87 bp, Homo sapiens
  chr1:205426021-205426108
  hyper
ccccagccccggggccggcgtgcccggcccaccccgccctccgcgccccccgacggccgcggtcagccggcattccggagcagcgcg

SEQ ID NO: 227840 - DNA, 59 bp, Homo sapiens
  chr1:205426288-205426347
  hyper
cccacccctcctacccccgccactcgccagcgccgggtacccgaaccgggattagagaa

SEQ ID NO: 227841 - DNA, 33 bp, Homo sapiens
  chr1:205537819-205537852
  hyper
gctctaaaatgggcgctcggtccctgggggctg

SEQ ID NO: 227842 - DNA, 288 bp, Homo sapiens
  chr1:205538140-205538428
  hyper
cggcactcgggcaccgggctcgccgggaccagatccgcgagcccgtcagcctgcgccatgggctgcgacggccgcgtgtcggggctgctccgccgcaacctgcagcccacgctcacctactggagcgtcttcttcagcttcggcctgtgcatcgccttcctggggcccacgctgctggacctgcgctgtcagacgcacagctcgctgccccagatctcctgggtcttcttctcgcagcagctctgcctcctgctgggcagcgccctcgggggcgtcttcaaaaggacg

SEQ ID NO: 227843 - DNA, 34 bp, Homo sapiens
  chr1:205560983-205561017
  hyper
ccccaaatgcttacgcagcgtgtaccgtagctgt

SEQ ID NO: 227844 - DNA, 115 bp, Homo sapiens; identical to SEQ ID NO: 197927
  chr1:205561301-205561416
  hyper

SEQ ID NO: 227845 - DNA, 85 bp, Homo sapiens
  chr1:205719206-205719291
  hyper
tgctgccgaaccccgagctgctggcttctcaaactccgctgctctttggttcagggctcctggaacagacgagccccccgctccc

SEQ ID NO: 227846 - DNA, 33 bp, Homo sapiens
  chr1:205744399-205744432
  hyper
ccgggacttcccccgagcggctccaagtcagtg

SEQ ID NO: 227847 - DNA, 88 bp, Homo sapiens
  chr1:207223723-207223811
  hyper
ctactttatatttttgtggacgccgagggaaaacaaaatgggatagtttcaaagccgaccagaaagcggaatggggaagggggtcttc

SEQ ID NO: 227848 - DNA, 773 bp, Homo sapiens
  chr1:207627527-207628300
  hyper
tccccgcccacctcgtgccgggccgtccctcccgcttgtcccaccctcaccggcgccgcgtcagcccccaggccgcctgcaggtgtgcgctcagaactagcacgtgtgccggacactatttaagggcccgcctctcctggctcacagctgcttgctgctccagccttgccctcccagagctgccggacgctcgcgggtctcggaacgcatcccgccgcgggggcttcggccgtggcatgggcgccgcgggcctgctcggggttttcttggctctcgtcgcaccgggggtcctcggtgagctgggagggggagcacggaggtggggacgcgtcccgggcagggaaagtttctgtgccgcgatgcaaagcagggggccaaaagcgagacggtgggggcagtgctcgacgcgtgtccgcctcccgctagctttgagggaccactgcaataaaccgcctggtcctgattgtccccactggcccctccgggagctgggacctccagaattggaggctgcgccacagaggggcgctgtctggtcggcccggtgtggctggcggcgtgcgggtgctcgcggtctcctgccgggctccccgcccccaggattctgcaggtgctcatcgctctctggccggcggtcagcgctaccgctcgccacgggaaacctacccactgcatgaggcaccagctagccacgtgaggctgtttctgtacacccgaaccgcgctcttgcccagcaaaagcggcagaacctcggctcccttccctaaataaga

SEQ ID NO: 227849 - DNA, 42 bp, Homo sapiens
  chr1:207670081-207670123
  hyper
tgaaagggaacttggggatccgacaaacctgagttctggtcc

SEQ ID NO: 227850 - DNA, 147 bp, Homo sapiens
  chr1:207925329-207925476
  hyper
aggctccgccccgcggcccgccgattggccccagccgccctggtgactcgacgcacttccgccccgggcgcggctcgggccacgcccacctgtcctgcagcactggatgctttgtgagttggggattgttgcgtcccatatctggac

SEQ ID NO: 227851 - DNA, 133 bp, Homo sapiens
  chr1:208417029-208417162
  hyper
ctacctcggccgccgccggctgctgagggcggcgcgaggcccctctccctgcccgcagctcggaatcagggagacgaccaaatccacatggagtccaaattcattaaaatccacgtcaagccaccagacactt

SEQ ID NO: 227852 - DNA, 67 bp, Homo sapiens
  chr1:208417894-208417961
  hyper
tccggaggccgctcggctgcctgtcctgcgcccagctcagcccggacccatcggccaccttaagtag

SEQ ID NO: 227853 - DNA, 95 bp, Homo sapiens
  chr1:208418636-208418731
  hyper
acggctttccggaagcggcctgcaagctggaccccagcgagttcgcaggatctgcgtagtccctgctcgcgattagagcgcacacgagtttactc

SEQ ID NO: 227854 - DNA, 218 bp, Homo sapiens
  chr1:209364148-209364366
  hyper
cacggcgcctgctgcgccctctagtgtcatcaacggtcttgtgcagttctttgtgggaaagggaacaaggcttagagttattcaaagcctaacctccagcgattttcctttctggactccttggttcatagagagcgccctcaggggtcatggcagaggggagccctgggtatcctgtgtatccgtgtgtatacccaggaattcgggtcacttaaaat

SEQ ID NO: 227855 - DNA, 433 bp, Homo sapiens
  chr1:209381129-209381562
  hyper
tgggctcgggaggccgcccgccgtcggcctgactcacagcgagctcggcgctccctcttgtggcttctgtgttccccgtcagcctcgggaagctgccggccaccacatacaaatggactccgcgtagttaagctgtcaggtctaatgtatttatttgactctctcctgttaaaatgatttctctacagcactgcggttatttacgactattgtcagtacaaggcgatgagaaggcagcagcagaggaaaacaacaacagctgaaggaaaagttctgtctgggagggctgggtggctgggtggctgggtcccgggctttcccgcggctgcagcggctgtgtgtttactttatctgcagcgggggcttcggagctcatccatccataatgcagagcccattgccctcagcccgcagttcacggccagccccagtg

SEQ ID NO: 227856 - DNA, 103 bp, Homo sapiens
  chr1:209743000-209743103
  hyper
gtaagctacaggtccgccctcaaaggtatctctcggggaatgtttccctcatcaagaagaatctgtttaatccgaaacacaggacgctcgatggttcttgtta

SEQ ID NO: 227857 - DNA, 142 bp, Homo sapiens
  chr1:209849317-209849459
  hyper
tccaaccggcagcacgcctcctaggaactgtgggagaccagcggagtgggagggagacgcagtagacagagacagaccgagagaggaatggagagacagagggggcgcgcgcacaggagcctgactccgctgggagagtgca

SEQ ID NO: 227858 - DNA, 603 bp, Homo sapiens; identical to SEQ ID NO: 197934
  chr1:209957603-209958206
  hyper

SEQ ID NO: 227859 - DNA, 257 bp, Homo sapiens
  chr1:209979378-209979635
  hyper
tcttagccaaggggcgcctggctctacccaagtagggactgcaggttcctctccccgtcccgcaccagcccttacctgcccagcccaggtgcgccgagctcacgtcagcgcctcgccccaggacgccgcagccttcgcatccgcccggccacgcctcccaggtgtggccacgccccccggcgttcgggattggcgagttgcaagaaatatgacactccgcgtttctgggctgcccggcccagcggcgtccgtccagc

SEQ ID NO: 227860 - DNA, 229 bp, Homo sapiens
  chr1:210001204-210001433
  hyper
tttcaaagagctgcggtagggggcagaaccgggaaccggatgttctaagcctgtcgtacgagcgcgacgtaaagcggatctgctttatggcaccttgctttcgccgtaaagcgcagtcagcgagcccacgtgcttgtgttgactggacaacttcctggtggaaaaccgcgactcttgcaagtgggcaaacttgacgttttcgctatgggcaaacgcgggagccggagcc

SEQ ID NO: 227861 - DNA, 167 bp, Homo sapiens
  chr1:210110984-210111151
  hyper
tgtttctccacagcggagatctgagacgagtatgtggctgattcgggcaaaacaaaacaaaataaaaccaaacgaaaccaaaacagacttactattaccaaatctgagagtcagtgggtgggaatccttttcaaccaaggagacctgtccatggtcctgaccacatc

SEQ ID NO: 227862 - DNA, 42 bp, Homo sapiens
  chr1:210405541-210405583
  hyper
aggagggaaacgggcgggggcgggcggcgagggagaataact

SEQ ID NO: 227863 - DNA, 1296 bp, Homo sapiens
  chr1:210405793-210407089
  hyper
ctagggcgggagcccgagagcgcgtggggtctgggctgcgggctggagctgggcccgcgtgtccccgggcaccgggaggggaggggaggaaaaggaggagggagggcgggaagcagggaaggaggcagggggcgggctggggtgggggtgcgggaaaggcgccccgtgtgcagcctgaggagcggcggcggcggcctgagcagagggagggagggagagcgggcgcgcttgtcatgttccctctctcaccctgggggcatcctgcagaacctctcctcggaaatccacggggaaatggcaaacaggattgacgggtttcacacgctcctcgctagacagagccgctcattaccataaccgtctgcagcgacggcggcgcagcgccccagtcgcggcggcgggacctgccgggacccttgcccgccgcgcacccgcagtcaccgccgagcgggcggccgggccgggacccgcgagtgtgcaccggcggccgggctggcgccgagcccagagcggaccagcagcagctcaagcgctgcggccgccgcctccccgctgaccccgcggtaagagccgggctgggcgcgggccgcgggggcgggagggccgggcagggtggagggcgagggccccccggggctcctgccctcgcagacgggcacccacgcggcctcccgcgcgccctcttggcaccagggctgtgccgaggtcaccgagtggactcgcagcggccggagcggagtcggggcggcgtgggggccaaggcacagctgggcgcggaggcggcgcgggcttttccctgggctagcgtgcgccgcggcgccttcaccagggcgggaaccgccgcctcctctagggctgctcgggctgccacccgcgcgcaccgagacaactccaggggcgggtggggtcagaagctctggtgagacctcatggtcctccgtggccgcttagtccctcatcgtaggggaaggggttaagtaggaggggtgcccccaggtccggatgccgcggcgcttggcaggtggggagagagggattgtggatgtcaggagcgcgcgtttgcaagaaaaaggaattgatgcagtagctgacaccttctgtcccccgccacctccgcccccgcaccctcctcccaggcagcagagctgcgctgcgggcggcggcggctcctctgtcctcagctcacctcctcggcgggctgaggctgctgcccgcctggtccacgcctccgcctctcgcttcccttcctcccctcccgcctcttcggccctagcaactttccgagtgcccagctgt

SEQ ID NO: 227864 - DNA, 144 bp, Homo sapiens; identical to SEQ ID NO: 197935
  chr1:210407459-210407603
  hyper

SEQ ID NO: 227865 - DNA, 497 bp, Homo sapiens
  chr1:210424844-210425341
  hyper
aggtggcccccccccgccccgcccccactccctggctggcgagggctggcaagggctccgggcgctcattgtgcaggcagctggcaccagctgggaaggggaattagcataacaaagagccggagcgagcgcggcgcggcccggcgggggctctgccgagcgccccgggctcggaggagccgcgctgtcagcggctgtggcgcgctcgggcctcctggcctgagaccctcggagcagcggggcccggcccccagcgggcgcgctctgtctgggttccggccgcaggactcgcccggagaatgcagtgggtgtgggtgtgtccgggacagcgtgaatgggcgtgggtgtgtgtgttcgggtgagtgtgggtgcccgtgtgtccaagcgtgcgtgtaaccgtgtccctgggcgtgggaatgcgggtgtgaaggggtcacctgcacacgggtggggacccgccagccctcttcccttccgccccaggaaggcctctttgt

SEQ ID NO: 227866 - DNA, 89 bp, Homo sapiens
  chr1:210465689-210465778
  hyper
gagacaaagaggcctgttcccgaggtgtccgacctcctgcccccttggcgggccccgcccgggttcctccagcaggaatcgccccaggc

SEQ ID NO: 227867 - DNA, 127 bp, Homo sapiens
  chr1:210466018-210466145
  hyper
gggggcgccctgacttgacgcgaacgggccacctgtccctcccacgcctgcgctgccacccgccctgctccgccatcgcctcctccaaagctccccggatcctccgaggcgtcgtcgtccgagttgt

SEQ ID NO: 227868 - DNA, 933 bp, Homo sapiens
  chr1:211306756-211307689
  hyper
gacctggagttgcccgtctctactgctggctctccctggggagaggcggcgcctctgggagcagcccgggagccccagagccttcgcggaagggtgggcagtgccgatggggcgcgcgctgccgctccggctgcagccagctttccatcacttttcccagtactttgctcagcagctgtcacgcatccttggagataagaccgagagggcgctagaaaggcccaaaaggcgtccccagaagagctctcctgttaggatggggacccatcagaccccgccccgccctgcccacctttctctgcctcggggaggctgccctgggtgcccgcgccgcggctccttagcagagctcgcgggttctgctgcatctgctggctccgagcggcgagaggttctgcaataaaggcacggataaaacgcccgggtaatcgaaatccgaatgcacctcttaccattggaccgccgaacaatattctccagaaacgtgttttgaggggccactagtcccctcctgcccccagccatggtcatcctcccagcagctcggggtccggcgggcgtcctggcgcggcttcttacgacagcaggaaactggcctcggggcccgcacgcagtcccggctcgaagcgccccatgcgcccggcggggatccgcaggcagggctggcggctccctctggctgctaccctcgcgccctcttcgcgcctccctccctgcggcccgcctcgcagtgcactcgcgccggcctcggctagcggcagccgcctccgggtgggcggagggagcagcggcgcctgggccggcggcgccccctaccgggctcgtgccccaccgccggcctgcgggagaccaagctggggggctcccgcagaggcagggaagtggcgggcggccgtggaccaaggctgggacggcagcgccaccctctgggtt

SEQ ID NO: 227869 - DNA, 198 bp, Homo sapiens
  chr1:211431628-211431826
  hyper
caggcagcctggcacgcagcagatgccctcaaatctggtgaaggaataaacgcagtttcctactcctttcgccgaatgcaattcagaaaagcattacagagcacaactccttccaggctggaaacgctgccagaaagcagctctcgcttcacctctgccgggggactccgccctctcccccagcgctccaagcggaga

SEQ ID NO: 227870 - DNA, 117 bp, Homo sapiens
  chr1:211434031-211434148
  hyper
gtgtagctttggtcgcggcagctctgcggagtgcaggagccgcggagagaaaggggtgggggaagggggtggggagacgccagcggcaggcacacctcgctcgccagccagctctgg

SEQ ID NO: 227871 - DNA, 135 bp, Homo sapiens
  chr1:211496969-211497104
  hyper
attccagtaggcggcgtcctcacctctccatcagcaccatctttacattggcagccagggctgcagtctctcaccctaatttatacagcaaattaaacagctgaaatccatgtcttcgggcgtctggggcaatct

SEQ ID NO: 227872 - DNA, 118 bp, Homo sapiens
  chr1:211499931-211500049
  hyper
cggaagagcaagacggccacaattcagacgcacgtgagggaaatcagatgactggacttgtagatactaacggttctgaagcgggtaggttagctttccaaccgcctggatgacggtc

SEQ ID NO: 227873 - DNA, 149 bp, Homo sapiens
  chr1:211689002-211689151
  hyper
ggcggtgtcagggcggcaaggcggcgcctccccaaagccgtaaaccttcccgcccggctgactacgccggcccagccacgcacgcgcaccccgcatgccccgtggcctgtgaggttattcaagaagccaaggtcgggagtggggaaggt

SEQ ID NO: 227874 - DNA, 189 bp, Homo sapiens
  chr1:211750953-211751142
  hyper
gaagcatttctgacgctgttataaccataaccagacaagtctccagcaaagttgctgcagcctgtaaagacagccaagtgcgggtgtggactgcagcgggatgatgatcacctcctgaccctttttcttagggtctgacccacagcccccacctacaaatatgccagacgcgtcgccggctccttgcac

SEQ ID NO: 227875 - DNA, 363 bp, Homo sapiens
  chr1:211848590-211848953
  hyper
gacccaggaaagacggtttagtcttccgggcacccatttcctcagccctgtcggttcccttcggtggcgcagggcgctcgccccgaggcgacgaaacctaagcaggggcaggcgcagggtaggtcccacgctcaccttgccatcactcttcctccggatcttctggcagcggccgtaggagcctgtgccaatggtgtacaacacttcatagtcctcagcccgggaaggcatggccggccagtcgccagagtcgcgctgcctcacgcaggttgcgccgccaagtgcggagctccagggaccaggaactccagggacctggatggagaagcccccgagcagcactgacccgccacccctgccttg

SEQ ID NO: 227876 - DNA, 149 bp, Homo sapiens
  chr1:211872028-211872177
  hyper
gctgaagggacagcgccgccgctcacctacctggacccgcacgctcttttttgcagagggagggaggtgtggtttatgagtctggactccggagaactcaaaccctcgggaggcctagagactgcgcagtgtccggatatagaaatatt

SEQ ID NO: 227877 - DNA, 32 bp, Homo sapiens
  chr1:212004151-212004183
  hyper
cggagccgctcccacagcgccctctaatgaaa

SEQ ID NO: 227878 - DNA, 155 bp, Homo sapiens
  chr1:212209085-212209240
  hyper
gcgcggagtttggcggccggggcttacagtggcgggagttggaggcgataacgatttgtgttgtgagaggcgcaagctgcgatttctgctgaacttggaggcatttctacgacttttctctcagctgaggcttttcctccgaccctgatgctctt

SEQ ID NO: 227879 - DNA, 74 bp, Homo sapiens
  chr1:212588336-212588410
  hyper
ctcacccctgtggcggaggcctgcatgtgaccctgggccagctaagctggtccttagacgcgtgcctctgcgtc

SEQ ID NO: 227880 - DNA, 119 bp, Homo sapiens
  chr1:212781881-212782000
  hyper
gctggctcctccccgaacttgcatcaccagtgccccctctctccacccgccttcggccccgccttggcccctcctccaccccccttcctccgctccgttcggccggttctcccgggaag

SEQ ID NO: 227881 - DNA, 202 bp, Homo sapiens
  chr1:212838653-212838855
  hyper
gactcactgcgggccggcgggcacctgtcactgatgggaagagctcctgtttccttgccttgtgccaagagggcccaaggcagacctgccagcagccacgagatggcgctgcgatccaggcgactccgggccctgcagccaccctccccgaggctgccccgcggaggacccaagcggtcgtggaggacgctctcccactccc

SEQ ID NO: 227882 - DNA, 166 bp, Homo sapiens
  chr1:212873456-212873622
  hyper
ctctgaaaccccggagggaacgcgaagcccacccacgcgaggcgacgcccgggggggtggggaccaggggggcgccatgcagcctttggggtccttcggcggctgccggggaactcaggttgagaaacacagtgggtgttttggggtcggtgttttttcccggtcc

SEQ ID NO: 227883 - DNA, 441 bp, Homo sapiens
  chr1:212874102-212874543
  hyper
gggttgaggtagggcaagtccctgtccacctgcctgccagtcaaaagatgcgaagccaagacaattacccgtggtcctagcgaaggaaacactagcggccacaggctgtggtctgcatgctgtgagcaccgggaaagataaccgcgattcgggatgggcgggtgggaaccagaccagaagggcagaagtgcctaccaagtgtggtcgcttgggtcttcaggtttgtgggcagcagtgggcatggggacagtcatttccgattcctttttaagtcttaaatgagtgcacgtgccccccgccaggatttaagacccactcttgcaaaagctttgagagagcttgagtgaacttggctgcctggaggccagcgggaaagcgagcggagattcttgtctgtgtgatcagaagcttcggccaactgagaggcggggaggaagacgg

SEQ ID NO: 227884 - DNA, 1375 bp, Homo sapiens
  chr1:213123590-213124965
  hyper
gcggggtcacttctcgggtggttttgtttctcctctgcttccacagttgcaaaccctcgaagtgccacgacccctggggaaactcgatcttaagtcccatggccaaacgctccagcccgcggggctctcaggacaccacagcgatcggatttcgcgtggccgccaggctccccctactcctgtcccctcccgccagagaacccctggagccaatcagagcgtcgcggagcccggggttgtagagtcccgagcccgggacccgcccctctttgttgcggtggccaatagacgcattcggaacatcggcggctgcccgggtgacttggttatatgtcacagaataacattcgagaatgggacatggaatgaggcgacggccccagcaagccccagcagccccagccccagccccaggcccagcagcagcagcagcagcccctgctctcccgccgcccggagaggctctgcagccatgaagccaaccgtcccgaggtaggatcttggagctgccgcgcgcccttcctgcgcgccgcccgcctgcagccagtccctcccggtgataggcgctggaactcggggaaaagggggcggatggagctctttccactagatccccgccggggtccgggagggcttcctggaagaaagcgggccgccttgcaagccaaggctgctgcagcgccctcgcgccagctctgggcgctcacatgccagcacgttcgtggctcccctcctctcttggccacatctgaggacccaggaatgtgtggagccttgcgggaacctcctgttccttcatgctacacaagctgtctttcttctccccacatcttgcgctccgcatcccccaagctccttgtgcccctccatccccaaccccccgggtttaggtgtgtgtgaagcttcgtggcacattttgagctgcctttctaggtaatcgcagggctggaagcccgtcatcgattctcagggaggctgtcagcgtgcaggggggagcggggagtgtcgtggagacactccgggacccctcactcggttccgctgtgcgtccacttagctgtggtgtcagctgtgtctccgctgatttcaggcaccgccggtaagcagggagcctccgcggagctcccgccgccgctcccccttggtgagtcctgccgcagcgagaggcatggagaaggccgcccccgcggggcgctgatcccctcgccgcgcccgcgcgcacacgccccccgccgccgccgccgctgccgccgccgcgcgcccccagtacctcgctccccgcccaggccccaccatgaccggctccgcggccgacactcaccgctgcccccaccccaaaggcgccaaaggcacccggtcccggagcagccacgcg

SEQ ID NO: 227885 - DNA, 43 bp, Homo sapiens; identical to SEQ ID NO: 197942
  chr1:213189228-213189271
  hyper

SEQ ID NO: 227886 - DNA, 1085 bp, Homo sapiens
  chr1:214155980-214157065
  hyper
gagatttccatcccttcaaacgtgcacgcccctcccgcggtcccgggagggagtcccccctcccaggtcgagcgcgtccaccggctgtccccacagcaacaggcgggcggcgggggaggagaggccgcgggggcagcgcaggcctggcggcggccgaaatcccccggccaccacgacgttccccggctctgcggcgcgccgggagcaggtggttgccctctgcgtccagggcgtgtactgagcccaggctagctgagcgaggctgcagcccctgcgatggcccgggaagaggcaagtgccgcggggccagagcgaggagggaccagcagggcggcctggacccccacttggccgcgcaggcaggaggggcgcgccctctgcggagcgcggcgccgcggcagccgcagcatctggcgctcgctctctctggccggagaggccgcgacacctagcgcggggccgaggctaggaagggcgggccggggagggaggagggcactgggaggaagccgcgggcgaggaagccccgctcctgccgagtgcctggagaggagattcccagccttcctgcccaacccgaaacttttccaacacacgcaggcgtattcctcgcaggattcggcggtcccgagtcgcagtcagggaggaggctcgggaagcacacgtgccctggcacactggaggaggtacacaggcacaccaggagggacagggcctcttgggaggcggctgagggcgtgaaggcagcaggcggccacacatccgaaagggactccctgcgagcgggatcgagcgcttaaaaccctgccacagcttggaagtgtagcggtgcccagaggctttgcgtaactttgcccactgcgcccccgcgtgcaaaggtgtccccttcacactcacaccctcaccccatctcactccccttgagttgcggcccgagactgcctttgtacttaagcgacagcaaaagatatgtggatttgaaccaaagatggtgggcaagagtgttgtaaattgtgtaaattccactcgcgggaacccccagatacgtagggagagcacccctttctcgccgaaggcatcccctc

SEQ ID NO: 227887 - DNA, 593 bp, Homo sapiens
  chr1:214158625-214159218
  hyper
cgagatagggggctcgggcctcaagtcttgtccagggcagcccgagacccaggagaatgccgcagctctagcaagagaggttgccaggagcctggcctgtacgcctccccgacagtagaggacaggacacgggacagggctgcgccgaggcagctcacggagctgggctgcgaaccgatctcgctcgcctagcgtggcgcgcgctcctatttcaagtcgccgctcctgcgccctaatgcgggctgcgaaccgccgcggcagagcgtcgcgagccgggagcctctgccgccgaggctgggggtgggagagcttccttgttcggcaagcgggttaccccgacttcgactcaggcctgcttttgcccacggcgtgacacaggacttactggggttctcagggaacttttcccgccgccagttcccgggcgtggtgtgtgcaaaacgtgcattcaagcgctatgtgcaattgacacaaacttgtgggctaaagtgcaagccatttttttcgcgtttgaatctttttctctgtccctgactcctttcttccccctactcccccctcctccttctctgctctccgcccttttaaatgtc

SEQ ID NO: 227888 - DNA, 851 bp, Homo sapiens
  chr1:214159483-214160334
  hyper
cagcctcaactgtcacatcccggttagaacacctgatacaacagtcaatagttggaggtgtgagtggtgcgtgtgcgctcctctgtgttgcttccgtgatagacgcgtggggggagtgtgtgggggcggcaaaaggggaaagaagaaggctggggatgctcccgcaatctcttttcttatcgccgacacctaacctgaccgacctaattttttttctccttttcactgtttgaaattcgtgccaaaagtttcctgccgggatagactcggacatactaacatcgctattcttattcaaagggagggcttaatatcctctttacggtttggtgaatttgaggctgaaattgtaaattccctaggaaggagtgtgtgtgtgtgtgtgtcgcagaagacattggtagtgtttggccagtgtacttgtaacacacctcataaataccctgttgtcacgacacagcatgattcaacctttgatctgattaaatttgagggacacacgaagactacttgtcctcctcctacttacaaaaatgagtgtctaatagactatgtatgaatgtttctgcttcgcagctcttgcaagtcccagcttttataggatctttaggtcataaacgcggctgctttattaaaagccgtttactgtgcccggtgaaagggacgttctagctgcggctgaggctcgcttgcatttgtaacttgcaaagcccaaggagatctttaagagccacattatctaaagaaattttgctggttatttttcaagcaagaaatgtcaaaccaaagtaaattttctagggctttattttagagcctgcgatttatgcgtttgaaatttcttgcctaat

SEQ ID NO: 227889 - DNA, 41 bp, Homo sapiens
  chr1:214160834-214160875
  hyper
aggagcgctcactcgctcggccactcggcgaactcgatcag

SEQ ID NO: 227890 - DNA, 149 bp, Homo sapiens; identical to SEQ ID NO: 197947
  chr1:214161237-214161386
  hyper

SEQ ID NO: 227891 - DNA, 581 bp, Homo sapiens
  chr1:214162294-214162875
  hyper
gatccccgctttccgccaaaccccatccttccgatctccccaggctaaaactccggggccggtccccttgtcctttctctttgtcttgtttattatagctgcctttcttcccggctcttccaatttgcttgtcatttgcatacctttcacttctccttttttaaccccagcagaggaccgggaactgggaggaggagagagggaggtgggggggcgctctgttactttcgtctcaaaacgctgtcgaagccgaattgtggaaatccggcttggaggggagcggtgatgggtcccgggaaacgcgcgcggcgcccctcttccgagctcctggacccagggctgggtcaagttgagtagggtaaggcggcaccgggaggctcggggggtcgcgtggcggtgggattgggacaccagcacgaggaggaccggaggatcgcgggccgggtaagagtagggggttcttgggcagcagaaatgggaggcgatgaatctcccagccatcgctggcagactatggtgttgggcagcttcggtctggtctcgtctgggtggtacctaccgttttgccccagttaggagga

SEQ ID NO: 227892 - DNA, 549 bp, Homo sapiens
  chr1:214360413-214360962
  hyper
ctatttggattatttttcagcgtgtctatttggaaacattacctcgtaacatttgctgctgtaattctgcgatcccctgacgctggtatttgagaaacacactctggaaacgctgtggttgtttttcacaggaacccagggagctatcaaagtcggagaacgtgcctctgtttgcaggagaggtgggcaggcagcgagatccccgcgcaccgctcgctcgggctgcgggcaggcagcaatcagctaattgcctaatcggagtggggagctggtgcccgctcgccgcggtcgcctcgcgggtcacagacaagagagcggcttgttttctctctgtcacatcgtcgtcttgaaccgtgtggtctgttgcaggggaaggggccgagctggaggagcgagcgggcgggcggcgcttggcacatcccgaagaacgctgcctcggttgcctgcgaacgctcagggcaggcgccaagggggcttcagggggacaggagcccgtgagaaaacttagctcgccgcgctctgctcagctctacccggctccgctctcag

SEQ ID NO: 227893 - DNA, 239 bp, Homo sapiens
  chr1:214387629-214387868
  hyper
tctccttcctcaaagcgagctccagagtagaaactgcaattgtgtatttgaaattctccagtcaccaaatccaagaaaggtgaagaggaactgccccagtggcgtctgcgaggcgtttcctctataaagctgtcgtccctagctctggtcagtgctgaccaagtcaccctggcctcctccccggcccctttttctactgcaggaaaggctggagcttcggaagagataacatcagggaa

SEQ ID NO: 227894 - DNA, 1603 bp, Homo sapiens
  chr1:214724212-214725815
  hyper
tctcgttcccaaaacgcagaagggaatggagagaggggaccagggtgtgggtttaaccacaaactccccagactgcgctcaccttccagctcgctcccgggaccagctttgcgcctcaccgcgggcagctcccaccgcgagataacacccctgcggcccggccaccccgcgccccaggctgccctgccaggcgtcccggggcgccaatcgcaagttggcgttgccagcgtctgcccaagtcatctgcagggcgcccggagcgccaaggcggcctccaacctcgggcccaactcccggcttggacggggcttacctgcttacatggcccccgtggcgccccggagtcccgcgcggaaaggctgtccttcgcggcggcggagccgattccccacggaattgattccagtgactggcggaggaggggcgaagggaaggagccgcaggaggcgaaaggggagggaggtttccgccgcgatcccggcgcgagagtccgagcagaggcgcaccgggggagaaaaggagaaaaacctaagcacggggctgtcccgcccgaggaggccggggaggatggctcagctgggaggggaaggagcgccagtggccacttgatgtctgtctagggctccccgaggacctgagccaggagagcaggcggctgagcccggagaagcacagcaacctgcccccgagtctgcgcccgctgcgctcactccgccgagaaaaagttggaaagaactttgaggggccgggagagccagagcggcaggaaatgcgagcggccgggagaggagggaggaaggggccgtgcgagtgggaggggacggagcaggcgccggcggccacggctcccccaccccagagccgggctccgcggccctgggggccgggaggcggagggagcgctgggcgcgcggccgggggcggggaggaatgcggcccgggagggcgcgcgccgggggcgccgcgggcgcgcgctgaaacgtggagccccagctcccgagctcccgagctggaggcgcgccgtccttggggacgtcacagcgctggaatccgaggaatgccgggctgcaggagctccttctgcaggcccggagaagtcgcacacttttaatggggtagttttggaaaatgttttaaaaggtgggggccgaggacggaggaccggatgaaactccctggagtaagagacgtggaagtggagagagcaaggcgaccgcagccaccccaaccctgggctgctcccgccgttggggagaaagaggcaaggcaaggaagagcccacctagacttccgaggaccgcagagacggggcggcggcaggaacttgctcaccccgacctacattcagaatagtccaccttatattggggaaccctccaagcaggacgtttcatgcagccaccccacaggggaaaacagaccaggagaaagtaaggtggcctcaccaagtaggcaatctcagagatctctccctagaatctctgggtactggacccggtgtcttagccttctctccctgccccctcccgccccgtaggaatgataaaaagcagcctgtgtgctgagagttggaaaatgtcgttttcccggtttgttccatgcc

SEQ ID NO: 227895 - DNA, 1938 bp, Homo sapiens
  chr1:215255055-215256993
  hyper
ggaggtcatcaggggattcccgctgagaaagtgggaaggaagagagtttagaaacggattgaagttccactacatcacgtgtgttgttagagaattcgcctattacgacgacagcaacgtctgatctcctggctttcttcccctccttggtgggttccgttccgtccccctgtcgctgcgagtttggctgtccctacgccggggtcttggagtttgggcggggtctggtacctgccaaatacggatcctgatggggaggaggtcggggagcgctaagttcaggctggagtctgagttctcccaccctgctgctcccacccaccgcgcttagaaacctatgtttccagcaaaggggtcttgctctgagagaacctaaccgggttttcttccattccctttgcatctctagatgtcttcgccctggctccaggtgcgttccccatccttttcggtcccggacgttctgcagattatagcgcccagctcatgtccagcaccgccggaggtgaagtggggcgagctggtgactccttaacccttcccgaaggtgtagactggaagaagccagggtcttcattacctcccctactccagggctctcaaggcgccaacggggacacttccctgtacaggtctggggggccacgagggcgaggaggacgccctagtgcaggggtccaaggactcgcgtcccagagcttggtcccacacccggtcccacaccccgaacgctggtcgggaaggagataggatgcagcgcagtgtgatgtggatgccagacagcgagagtgaggattttgcggggtggggatgggggttagtggaaggggctgagaggggaggaggcagcaggtgagccaaggggttgtgcccccaggaagagggaagagaggatctttagaagggagcatcttgcaggggcgacgcaggcaagggtagggctaggaggaggtgcggggaagcaagccctggcggtgagacaggagggggaggaggcgaagaggagggagttccgaaaggagggaaacgagccggcaaggggcgacaggagcgagccgggaagggagagcagcggagggctgcagagctgcgggcgcccggaccgtgccacacaccccccgcggggcacggagggcattgcggggggagacacacaaagacatgcgaagaggggctgaacgaggctcgcgcacaaagacgccggggcgcacggcagctggggctgcacccaccgcccccgcgccgcgccgtgccggggccgggccagcgagcagcccggggctgagcgcgtggcggcggcggcggcggcggcggcggcgggcaggcgcgggacccgggtcgcccgcgctctccgggtgacccgggcccggcagcaggcgcgcgcgggggcggcggcgcccaagcccaacttggcctccgcctcgccctctgcccagcccgccggtgtcccctccttcccgcgatttcgtttcttctcacgctcccccccccgccccctcccgcgtccagccccgctctccccaccttgtaaaacaaagccggggaaaatgcctgcccgtgcagctcggagcgcgcagcccgtctctgaataagaagtgagtacaatggcgtgtttgtaaaaaaaagcttcaagtccgtctttttcaaaaaacattttgaatgctgcatgcctcatgcttcccagcgcctcgcgggagagacccggctatagagcaggaggtgagaccccccctccggtacccccacccctctggccgcacgctctcctgccccagccttttctgggaggactgcaaatgccccctctcagcaagcggccgtttcccatcttcgcttcgcgtccaaagtgttgggtcataatctggatttggaggcaaacccttgccagatcctctccacgccgcttctcccccctctcccgccggtgcccggggtttt

SEQ ID NO: 227896 - DNA, 146 bp, Homo sapiens
  chr1:215740687-215740833
  hyper
attttgtcccgaacggtgacccctcctcccaggcaggctgcggcggcgtcggtggcagcggagcacggagaagaggcccgggcggcccggcggcctggaggccgcgaaaggtggaggccgggccgcccttgtgcaccgcaggattg

SEQ ID NO: 227897 - DNA, 140 bp, Homo sapiens
  chr1:216774194-216774334
  hyper
cacaggacacaaccgccgcgctctggttggacgcaggctgcatcctgtttcccggacacatttattcagcccaatctttcctgtctgaacacagactgttgatgataaaatagcatctcaaattatgagggagaaagagc

SEQ ID NO: 227898 - DNA, 72 bp, Homo sapiens
  chr1:216774514-216774586
  hyper
ggcgctcggccaggggctctgctcgctccatggacagctgggtggaaaggacgccccgtgaaggacacccgg

SEQ ID NO: 227899 - DNA, 512 bp, Homo sapiens
  chr1:216896525-216897037
  hyper
tccgcccccacccccgcacccccacgacgagtttaaaaaggaaagaaaaaaggtacctactcttcctcgtagtgcagggaaaaagattcaggaaggcaaagttctaccgaatccatgtgcgaccggcaaccattatttgtgcaccccagctataaatcaaagtttccttgacagagcacagtgcaattaacacaaatgttctcctagtgacaagcctataggcacagccagttgggaccaaagctctcacactctcctaatcaaggacttaaagccccgattggagcttattaatatgaagtagggctttacatatgcagtcccaccggcccagccgcgcagccgattggggggcctctgcccaatcaggagggaggcgacgggaggctgcacggagcgagaggagccaggcaggtaggcagggtgcagagagccgaagggggctggaaactgagagtgggcagagaaaaagggagcggagaagggagcgattgaaacgctcccaatacaca

SEQ ID NO: 227900 - DNA, 32 bp, Homo sapiens
  chr1:216897276-216897308
  hyper
attacaccgggggccgcggcttatttggtgct

SEQ ID NO: 227901 - DNA, 644 bp, Homo sapiens
  chr1:217262878-217263522
  hyper
tcaggtgagtcgtcggggattttaaagaagccgaagccggtttctttggctatgaaagtctacaaaacccccatgcaggaacattgcacatcttacacacgcctcctttaactgggctcccgcgacctcggcaggcgagggggtgctggccggccctccggtggcaagggcacggccccccgctctgcccccgcgggcgcggggccggcctggcacccggggtccgcgtcccgagcggctgtgcactcaccgagccgggctgcgaggggcagaggggcgcccacggctagccggagcgccaaggcgcctcccttttctcttggtagcgtcggtccgcactccctgtgacccaggacgtcatgatgcctgtctgttttctcaatgataacttggcagaagaagagagaggctgccaggttctcctcgggtggttacgtggtatgtgcacgattctgtttgcatgcgtttctctttttaaaaataaatatctatatttttctaaaaaaaattcccggcactgtcatgatttgattgcattattgcgtttgcataattgacgcctctgggtgtgtatatatgtgtgcatatgcgtgtgatttttttcccctttaaatcctgctgctcctgccgccgccgcagccgct

SEQ ID NO: 227902 - DNA, 1885 bp, Homo sapiens
  chr1:217307428-217309313
  hyper
agatgcgggcgccccgggtcctgtctgaaccagactgctgctgcaatgtgagctcgggagggaactggggatgcgagctgggaacagaccgcgctccagcccccatggtttgtgacggggaacttcgggcgcacacaccctggggagtaggtctcctccaaatggcaccgacacagactggcgctggatcttctctccctgctaatctatccgcaaagaccgcctgggcacttttgggggaatgtggccaaaaggggactctaactgcgacatctacagaggaaggagaaactggtggtgcctaagaagttgatctcgatgcgcgcagtgagggcacagggccctgcgcgccagagaagcgaagccagcggtctccacttacttgttcttaattcctccctacccccgctctggcctctcattttcggcctcatggatccaagacccgaggttattttcagtcacaactttctccacaccccgtacccccaaaagtgtacctcagctcaggcgggaaagggcactttgacccgccgtgcgcgagtttccagccagccgctgcgcgcctgagagaaagagcgcctggctgcggctccgagcgcacagctcttccccgcgtgtttggcgcggctacgtttctcttgctccgggctgaggctcgaggaacctcgccagcctgctgtggtcccgtccccttgacgtttgatttctaaaaccgcatagtctgcggctctggcatttagaaaaagaggacaaggtcaaggcctgtggaccgaccgccgcgatccgcttgcacctttgctctcacagcaagcgagtcctggccgcagccgctggaaaaaggtgccgcagcgcccagtttacctggaattcagggacctgaccctgactctatttccggctagtcccagcctctccttcctctcctttccccgctttccgcccagggcggttctgagattttgattaagagagatctgtccccgcaccgcagagggatggtgccaaatggccaggcttcctgggcactgcgtcctcattcccaggtcagagctactgcgaaaggaaaggtctccatctggacgcacctcgtcccctcccccagcgcgcggggcagccctctagggccagctcgggcacgcgcttttccccctcctcaccccctgctccgcccagccccgtacagttttattctttatgaaacacacacgcccaccccgcctcccacgtaaaggccagtcttgactcattttgcgcccagatgcaaactcagctggaagttgagggtagggccaaagaggtgaggggagggtaagagatacagcgaaatagagaatgagaagggagaaatcaaagggggaggagggacaagagaaagcgtgtggagctggaggttgaaggggcagaggcggaggccaaggactgagcaaggggcgcgcgcgcggcggcggcggcggcggtgttggcggcggcggcggcagggcggctgcacctcctcccagccttttcgcccgcgcgcgcgaagcggggtcaggcgcggacccacattcaccgactgcagaactgttttctttgccactaccagagggtgtttcggggctccccacggtcttctccctggctgcttgccgcgtgagagcagaaataaaacaaaacaaatcacgggacacgacggagtcgggccgctgggcgcctccgggatcgctctcactttgcactcggaagcgggcgcggggattcgggctgccgcgtgtagcctataaatagcaaactttttgaccgaagcaactaacaaataagaggagcaggcgtgcattttgctcaagatccccccttttctggggacgaccttactcccacccccgccccctttgcagtagttgtg

SEQ ID NO: 227903 - DNA, 977 bp, Homo sapiens
  chr1:217310809-217311786
  hyper
ccccgcgaagaccgcgcctggggctcgagagctgacggactgccctttccaggctgccccaagggcctgggaggctgcggtaccgcctgtcggtcccggtcccgagcgcgcttgcttaagagttctcaaagacggggttggaagcagtacagacgtccccggttatcgctgccgggcttgtgcgccccacgccacctacctgtccggccttcccgctccaattgctgacccgtttagggagcccggcctggagcccgccgcctccagaggagcccgccctcgccctcccccgcgcgcctccgctctctgggacgcctggccaaatgcggggcggtctctcgcgggccattggcttgggccaccgttccgagtcagctcctaggatttccccaggctttgcggcccctttgtgggtctaggccagcgcctcaccttgcaccctattccacctccagtccccttaggtgcccccgcatccctcctccagagtccaggctttgaaactgcagcaactccgcaaagaaagcctttgggaaaacctcctagagggccgaatgtggaggtcgggtgggtgggtgggtgggtactcgcggcatttctcaaggttctgggtgttcgtaactaggggaacaggccctatgggggcagaaatgacagacgcacgaacagcgtctctgtggctgtctgcagcgcgaggttcacgtctattgttttatgcctccgggagagctaccccgcgtgatagatcttttcagatccatcactggaagaaaaaccctggtgataacgattatctcccgctcgcgctatctcgccatcgccccaattcatctccctctggctctagccccttggggagacgaggagggcgaggcgctggcaggaggaccggccaagccgctgtcctcggatggagaggagagggagaggcacgaggccacctcattcgtccctttccgcttcgggctggggagaca

SEQ ID NO: 227904 - DNA, 634 bp, Homo sapiens
  chr1:217313026-217313660
  hyper
ccctctgcaattgccggcggcggcggcggtgcgcgggcccgcgcagaggccggggacttcgggcgcttgctaggtcaccgcgccgggcgaccgccgctcgccggctatttaatatacatggggtgggaacggagcgaagcggatctccgagcctgcctgtcctgcagaaaaaaaaaatcaatttgctatttatttttgaaatatatagatttagggaatgttttttccagctcgacccccttcaagaatggcggcccacatttaattacgtcttttaatgacttttcccttatttgccatcgctattccacgttaagggcgggggcggggtggagtttctttggggggttttcaattctggtatcttcaaaaagatttgccttatgtgttaattgcatgctgttaagcacatctgggactgtgtgctgaccaactcagaccaacttttaattaacacattgacccggagaagaagcagccgcccagcctccccctctaaatatgtatattagccacgcggaggcggctcggcccgcgccgccagatgcaagcaaggaattgcctgcgtcgaggggcgggagggggtgcaaattgcaacggttctctctctttctgtgagcgttttttctcgcct

SEQ ID NO: 227905 - DNA, 1639 bp, Homo sapiens
  chr1:218337471-218339110
  hyper
gtcctaggacaatcggatttcaccgggtaacgtatatgcaaacagacacgtcccgtttatttcattgtttgcactgcggagactctccgccgctctccacgcctttgttgacctaccgccagcaaagttgtgtggttataaatagatagaggcagctgattaagaagcggggggagtgactttctctgggctcttacggatcaatcaccgctaaggggatgcaggttgaggggaaggaagaaagtaaatcgcggggcagtttgactaagtgaaacccaattccttcgccccaaagctgtggtggccagacgtgcgcgaccctctagacccaaaacagttttagtcagcaacgggtcatcagcaggaccgagaagactgggtgggaggtctggccggtccgaaatagggaagaggtgcgggctcatcaccgaggcggtagggctcggcttatggtctagagccttgaggcgctcccgcgtgagccccgctgcttccagtccgccctcgcctggcccggcgcgggtcgctccctcctccccgtcctgttccgcactttacccagcaggggtcccaggtcgagcagggccaaccctgctcgcgcagcgccggacccctccccgctgcccggggtgcggcggcttccctccgcccaaacggggggtgtctcctccatcacccctgccgcggcttcccagtcggagtcgcgctgcggggcgagggaggctcgctcctccgcggccggggcctgggggtgccagtgcgcccccgagtgagcgggtagggaagccgaagagccgccgacccgctgcgcgccctccagtcccgggcggcgccgggacccagagcggccccagcccgcgccccagcggggacgcgaacggcgtctcgggacggcacctcgccggggccttgccctgtcccgccgcgtcgcggcctctccgcaccccacgtcccgggagccgaccgggagactctcacggcggagttccacagacctcgttaggttaaaggaacctcgccttgccccccactaatcggctagagagggaggccggcgaaacaaaagccgtagaggaaaattaagcgacttccccctcggcggggaacttggaggtgggggagcggggagcggcgcggggcgcaaggagaaggaagtgctgagctgggttgccgacgaaccccgggcagggggaggtggggggctgcggcagaagaaagacaaacatctggggatcggaccatatgccggagctttgtcttgtccttcaaagttcggctgcccttgaagtgatttgtcaggcggcccacgggtgacagggaggatgtgcagcggggagcgggggcgggacatgccggggggagcggagagggctagaagagaggggaggaaggggggacgccaacaagagggggagcaaagtgaccccgccgcccgaggaacggtagaaaccgggatcgcggaggtgcgagcccgagcccgggagcggagcgcttcccggggagacgccaagacggcgagaaaggaggagcgggaacgcagaggttaagcggagggaaggccgaggagaaacagccagaggacgggaaggaggaaatagacggggagaagaaactgaagattagtcgttgaggtgtatta

SEQ ID NO: 227906 - DNA, 489 bp, Homo sapiens
  chr1:218519310-218519799
  hyper
ctgcggcacccgaccgagtaccgagcgccctgcgaagcgcaccctcctccccgcggtgcgctgggctcgcccccagcgcgcgcacacgcacacacacacacacacacacacacgcacgcacacacgtgtgcgcttctctgctccggagctgctgctgctcctgctctcagcgccgcagtggaaggcaggaccgaaccgctccttctttaaatatataaatttcagcccaggtcagcctcggcggcccccctcaccgcgctcccggcgcccctcccgtcagttcgccagctgccagccccgggaccttttcatctcttcccttttggccggaggagccgagttcagatccgccactccgcacccgagactgacacactgaactccacttcctcctcttaaatttatttctacttaatagccactcgtctctttttttccccatctcattgctccaagaatttttttcttcttactcgccaaagtcagggt

SEQ ID NO: 227907 - DNA, 483 bp, Homo sapiens
  chr1:218520043-218520526
  hyper
atgcactactgtgtgctgagcgcttttctgatcctgcatctggtcacggtcgcgctcagcctgtctacctgcagcacactcgatatggaccagttcatgcgcaagaggatcgaggcgatccgcgggcagatcctgagcaagctgaagctcaccagtcccccagaagactatcctgagcccgaggaagtccccccggaggtgatttccatctacaacagcaccagggacttgctccaggagaaggcgagccggagggcggccgcctgcgagcgcgagaggagcgacgaagagtactacgccaaggaggtttacaaaatagacatgccgcccttcttcccctccgaaagtaagtacttattttgacttccatcccctgaggtttagctctgcccggagctctcaaaaccgcagcagctcccgggatcgcccttccctctcgcggttcccgttcgctcttttcccgttctcctgtccttcacccca

SEQ ID NO: 227908 - DNA, 108 bp, Homo sapiens
  chr1:218520765-218520873
  hyper
tttgctccgattggcgtggagcgcgccgaactggtgcacgaagggttaaaaaaagtgtctcaaaactagcctctccggaaggcgccccctttccgtgctgacctatca

SEQ ID NO: 227909 - DNA, 362 bp, Homo sapiens
  chr1:219346993-219347355
  hyper
tacagaagtccacacgaggctgacacacgtagaataccattattagcaaaactaaactcagtacagttacaactgcctcaaacttgaccccaaagtattgaaagctcctcagagagcgggccagcagcgctgcgcatgcgcgctcccgggcgtgctcccgcgcgtgcctgcgtatttgcgtgcgcggccccgcgcggcaacgcaggggcggaaccgcatgactggcagtggcatcagcgatggcggctgcgtcggggtcggttctgcagcgctgtatcgtgtcgccggcagggaggcatagcgcctctctgatcttcctgcatggctcaggtggatttcaattttacgtcctggttttctac

SEQ ID NO: 227910 - DNA, 334 bp, Homo sapiens
  chr1:220267776-220268110
  hyper
gaagctgctgggccgccagcagccggacacggagctggagatccagcaggtacgggccccgcctcggcgcggggcctccagagaggcccgatccggccgcgggcaccgggcgctcgcaggcgccacacctctaggctccacgccggtgcgggtgggcgggggtgtgaccagattggtggaattcgtctgcttcgcacagattttgtgggctgaaaacctaagtgaagaaatctctagatgagcccctcctttgtaccaggttctggagcgggacattaaggggtcactagcgatgcccagttaccagcatgtatcgcacgtatgtcccatgtct

SEQ ID NO: 227911 - DNA, 353 bp, Homo sapiens
  chr1:220700605-220700958
  hyper
atgcactacagacgcgggtgcctacaggatgtcttgaggcaggtgggtggaagtgtgaggaagccacctggaagagggaggacagggcccaaatcagacacagctctccatcctccctaaacaggctcgcctaagtgacacttccttgtgtcccaggaagtgacgatcagccagtgtagatgttgtgactcgcgggtctcacccactccgagggtgctgcagggcgcccagagcgagacgtcttccgccggccccattcccgaagaggccgcgccgtcgggggctgagacccacttgtactgagtctccagccgcctccctaggctgctggcgcttctaggggcttctgtgct

SEQ ID NO: 227912 - DNA, 286 bp, Homo sapiens
  chr1:220701527-220701813
  hyper
gctccgcgcgcagccggctcgggccgctcctcctgactgaggcgcggcggcggcggtggctgtgaccgcgcggaccgagccgagacattcgcgccgggggatcgggcgccgccgccgctgggccccgggcgcgtggatgcggctgggtcgggcggcgccgtacacctgaggcggagaacggggcgcggcgcgggtgacgctgtcagggccgcggttcctgacgcccaggcgctcgccaggacgagccaggcagtgatttgaggcaccggcttcaccttcacccatg

SEQ ID NO: 227913 - DNA, 736 bp, Homo sapiens
  chr1:220863499-220864235
  hyper
gtgcagtgcgcgccgtagtctgcacagtttggccggcaggtgggatgaagggcggggctggcggagcgcgcccgccgcctggtaggccagttcggagcggagccaacgctatcccgggccccacggccagggggcgctgcggcccccccaatcccccgccccgtccgggctggggcggaggagcgggcggggaccaaaggttggtgtctttgcgctcggaccttcgccagaggggccgggacatcatgacggtgggagccaggctccgaagcaaggcggagagcagcctcctgcgccgcgggccccgagggcgagggcgaaccgagggggacgaggaggcggccgccatcctggagcacctggagtacgcggacgaggcggaggcggcggccgagagcgggacgagcgcggcggacgagcggggcccggggacccggggcgcgcggagggtgcacttcgccctcctgcccgagcgctacgagccactggaggagccggcgccgagcgagcagcccaggaagaggtaccggaggaagctgaagaagtacggcaaggtaggggccctgcgccaccactgcccggggggcgcgggtgtggtgtcccgcgggggagcgggagccgggtccttaccatcgactcacccagtttctccgggctgcacctgcgacccctccgcccccgctcccattccctcgccggagggaagccgcgagttgcgagtcgtgatagaaactta

SEQ ID NO: 227914 - DNA, 339 bp, Homo sapiens
  chr1:220921848-220922187
  hyper
ggtccgcgcccgccctcgctctgccatgggcgcttccagctcctccgcgctggcccgcctcggcctcccagcccggccctggcccaggtggctcggggtcgccgcgctaggactggccgccgtggccctggggactgtcgcctggcgccgcgcatggcccaggcggcgccggcggctgcagcaggtgggcaccgtggcgaagctctggatctacccggtgaaatcctgcaaaggggtgccggtgagcgaggctgagtgcacggccatggggctgcgcagcggcaacctgcgggacaggtacagcacagcgcgggcgcggggcagcgcggagcctgcctg

SEQ ID NO: 227915 - DNA, 83 bp, Homo sapiens
  chr1:220950173-220950256
  hyper
ccagggtccattcagcacagcgcggctgggtcggcttccattcctgggtccgcagcgccctcgtgtggtaggtgcccagcctt

SEQ ID NO: 227916 - DNA, 567 bp, Homo sapiens; identical to SEQ ID NO: 36838
  chr1:220959916-220960483
  hyper

SEQ ID NO: 227917 - DNA, 205 bp, Homo sapiens
  chr1:221051885-221052090
  hyper
aacaacgaaccccacgtgatccggagatgtggtggaggggtgaggctaacatttcctacaacctcctgcaaaggatggaagcgcgtgccgctctcccgggtttcgggaggcagcctgttttgtagcctctgaggctccggggaaaggtttggctgcgtctaagagagacgtttggagccatccgtcttattttgtttgaaaagtc

SEQ ID NO: 227918 - DNA, 44 bp, Homo sapiens
  chr1:221052870-221052914
  hyper
gcggtgtccggctcccgtctccctggctcccccgcccgccctgc

SEQ ID NO: 227919 - DNA, 72 bp, Homo sapiens
  chr1:221053094-221053166
  hyper
gtcctcggctgccgccgccttctccgggactcgcgcgcccctccccgcgcgcccacccacccagtccggctg

SEQ ID NO: 227920 - DNA, 229 bp, Homo sapiens
  chr1:221914261-221914490
  hyper
tgcacatagcaaagacgccaaaccccacgccaagagacgctcacctaaacgaactttaagagctatcaggaaaaatgccatctatcatccgtctacacacgaccgtcaccattctcatccgtctacacacgaccgtcaccattctctgacacagaaccaaagtgtcacaggcggaatccacactcacgcgcgcacacggggcacgcacccatcacgtcggcagatctcc

SEQ ID NO: 227921 - DNA, 208 bp, Homo sapiens
  chr1:222792068-222792276
  hyper
agggctcggtgggcgttttcccagtggcaggttgatggtggggtttgtttggaaaggctccctggcgctgctcctttgcccttctgctttattgggatttgggcttgtaccgccttttgaacaggaattgggagtttaggtttgggacgagtctggagtccaagcactcattgtattccgaggtctctgccccgactttgatcaatcc

SEQ ID NO: 227922 - DNA, 222 bp, Homo sapiens
  chr1:223254692-223254914
  hyper
aggctcacagacccgtgtcacctctgacgtcaagtggcagggacacgctaaaagcctttgagtctattgattgagaaggctccagaaggttttggagcgctggaagaaggccaggcctggaatttacgcgtcggcctcttggtgtctcctcccgctgaagggagtaaatccaggcaggtctggggctgccgggcgggcacctggggcggaggagcctcgagg

SEQ ID NO: 227923 - DNA, 74 bp, Homo sapiens
  chr1:223297159-223297233
  hyper
gagttcaagaacggcgtccacgctgttgaggttgccgctgcaaaggcgcccgaccccagcggaggagtgcgcca

SEQ ID NO: 227924 - DNA, 327 bp, Homo sapiens
  chr1:223302695-223303022
  hyper
ccaccggttcaccacgttgctcttgcccctagcccaccaggccctggccctcagcagcggacctgccgcggtttctggactaggaaggccctgctcccgaccgacccggagcgcgctgctgccctctaccggtcatccgtgcggccggacaccgtgtcaggcccgcgaggagggctctgccgcagtcccggggaacagcacccagcagcgccactgggagaggaaactggggtcagggaggtgtgactgggccccaggcagtcacactcaggccaacaaggtcagggagggagggcagctcactcgtgcaaacgtgagtgcaaaatg

SEQ ID NO: 227925 - DNA, 315 bp, Homo sapiens
  chr1:223537348-223537663
  hyper
tgcgcgcgcctcctcggaatggaagacccttccgggactgtcggtcttacctgtgggtctcatgcatgcagcttccttccctcctccgcctcctccccccgccagtctaacccgcatctgtgcgcgacctctgctgccgccgctgcgcgagcgagcgagacggaagcttcggcggcggcgctcggctccagctcccccgcccgcgcgctccctccccaggcgcccccgagcgggcgggtgttgggggaggacgggagcccggccgcgcgcccccgcggaggcgcccgcgcgcccgctacctgaactcgcgagcgc

SEQ ID NO: 227926 - DNA, 289 bp, Homo sapiens
  chr1:223537693-223537982
  hyper
ggtggggacggggtgagtgggggggcggggacggggcgaggggtgcgcgggcgcgcgagcacgcgcctctgccaacccagccggcgccgcggcgtggccggagactggcgagggcggggacggggaaaggggcccgccgccgcgaccaatgggaagcccgcgcgcctgcacctgtcggggcgcgaggcgccggcggccggtcttgcacacgcacgcagctcggtcgccccttccccggcgctggactgcagcccctgccccggctgcgcgccagctcaggtgcccgccc

SEQ ID NO: 227927 - DNA, 84 bp, Homo sapiens
  chr1:223899911-223899995
  hyper
cctctgctaactccccgggtgttttccggacggccacaactatcctagccttcttccctatgggctgcaaaggtggcctcgggt

SEQ ID NO: 227928 - DNA, 271 bp, Homo sapiens
  chr1:223900415-223900686
  hyper
tcaagtacctcaaccaggactacgaggcgctgcggaacgagtgcctggaggccgggacgctcttccaggacccgtccttcccggccatcccctcggccctgggcttcaaggagttggggccctactccagcaaaacccggggcatcgagtggaagcgccccacggtaggaagcgcgcggcaggacgcgggcagggcggggtgccgggcagggcggggtgcaggccggcccgcggcgcgctggggcggggggcagcccgggtgctgcagtgg

SEQ ID NO: 227929 - DNA, 51 bp, Homo sapiens; identical to SEQ ID NO: 197971
  chr1:223936529-223936580
  hyper

SEQ ID NO: 227930 - DNA, 53 bp, Homo sapiens
  chr1:223937145-223937198
  hyper
gtgttttatactctataaggtgctttctcttttgatctcgtaaaagtattcgt

SEQ ID NO: 227931 - DNA, 53 bp, Homo sapiens
  chr1:224301981-224302034
  hyper
cccgcgctggctccggaccagctgcctcaaaacaacacgcttgtggcgctgcc

SEQ ID NO: 227932 - DNA, 150 bp, Homo sapiens; identical to SEQ ID NO: 197972
  chr1:224302336-224302486
  hyper

SEQ ID NO: 227933 - DNA, 168 bp, Homo sapiens
  chr1:224528768-224528936
  hyper
gtctctgtggagcgcggcaccgccttggatccagctccacctcctccccgtgccctccccacgaggcctgggagcgggtcctgcccggctgcgcaagggtgggggtcgcgcagttagctgcctttgggatgcagagcacaggggacccaccgccgccactgctgctcc

SEQ ID NO: 227934 - DNA, 204 bp, Homo sapiens; identical to SEQ ID NO: 197973
  chr1:224622416-224622620
  hyper

SEQ ID NO: 227935 - DNA, 52 bp, Homo sapiens
  chr1:224691378-224691430
  hyper
aggtggagtgtggtcctcccccaggagaggcagcaggcgacttccctattga

SEQ ID NO: 227936 - DNA, 272 bp, Homo sapiens
  chr1:224803454-224803726
  hyper
atgcaacggaaggacgttaatggagaattttgcagggtctgggagcagagcagtaaacgcagccctaagcactgagtatgctacagtttggtaaaatccatccaagcagctttgggatccaaggcttgcactgtatccccaaccaacactaggcaacgccccaagtccccacacttcccactccgataggcgaaactgcaagaaccgggaggggcggctgcggcgtttaggcgcgaggcacacaccatacccttccgcagcttcccacctcc

SEQ ID NO: 227937 - DNA, 1122 bp, Homo sapiens
  chr1:224804686-224805808
  hyper
ccggagcctgcgggaatccagcgcttattcgctgaccctcgagtcgcttcgctagctgtgcgccctcctgggcactagcctggagaggagcgtgcagacgcggctccttggagggagtgcggtcctctagggaggcatcgggctcctaggggcttcttggcgtgtgtggtgggattggggtccgccggccatggccttcactttcgctgcgttctgctacatgctgtctctggtgctgtgcgctgcgctcatcttcttcgccatctggcacgtgagtaacacgctttggtctctcttctttcgccccaatttcgctaaatttccccgatttcaccccactttttccaccttgcgggcgtgggcgaaccggaaggttggaccttctgccgctccactgtcccggggcaggaggcagttcgctgcatcccgccgggcgcgccttcggtgccctggctggaggcgaggggccgctggtgcccaggtaggacaccctctgcagggcccgactgggcgtcccgggtcccgggcgccggggagtggcggctacaaccacaactaaccccttcctctcccgccccgtcctctcctgccggcgggaggcgaaggagaagcgccgccgtcggtcccggcaattagtcaagtagctataataactaaacatttaaaatgtcagcatctgtggtgggttgcatttagatataattggagacaaagtggaaacacgacgggagcgccttgtaagaggtagggagaagccgagcccacggagaggaaggagaccaggcgatgggggtcgaagtggaaggcggtgggggaaaggcgagaaggagaagagcaaggaggcgagggagactgggaagggcaggcatcattaaggccatggaggaaagtcacgaagagagaccgtggagagcgacgacggtgtcctccatctgccctcttggcgtctgaagtccgactcctgaagaccccctgcaggtggcgaacctccgctaggcccccagcgtccccagcccacacaagcttcctgtcacccttcccggggctacgccaggtggagggcagccgtggatcccagttctttaggtgtgggtgggaatagaggagcgcaagcttctgaat

SEQ ID NO: 227938 - DNA, 297 bp, Homo sapiens
  chr1:225117200-225117497
  hyper
accccccttacccccagcaccgtcggtgtcacatcgggggccgccgcgtacccgcggtggaatctcgcaagagccagggcccctcctcacctgcccggcacccaggatcccttgcgccgcgttcgggaccccacccccattgtggcctcttcgccagggcgcaggcgtggctcttggtcaggcggttacggccaggaggcgtcggagcctggcgtggtagggctgtgctgcgcggtccttcccattcaccctagtctggcgctcgccggcgtgggcgggccggaccttcgccgcttc

SEQ ID NO: 227939 - DNA, 618 bp, Homo sapiens
  chr1:225614336-225614954
  hyper
cttctccaaattcatctaaacgtggcatagagcaagacgctcgaatgacgttggacagcttccttttcacacctgagccccggtagccccactaggcaaaatgcaaacaggaaccccgggccttgctccgcgccctttgcttcatgaagcaacagaaaggccaccttcctggctgtaaaggcagaagcgccttcttccccataaacatccttgggcagctcatcattcccctcctgctcgttcttctccctcttcccaggcagcctgagaaacaaaacttaaactggacttgttgcctaatctaaattaggatccctctgctcttctccgtagctccatcttctcccacacaccagttactacaatgcgtaactacagatctacacgtgtttacgtgcaaggtccccgggggcctgttcaccctggcactgcccaggcgccgcgcctcgcgctgcaggtgtccacgcgcggaccacggtatctaccgcgccctcgtgtgaacacccgaccgggccccgtaatcactctgggaaagcgccttcaacaaagccctccgaaagcaagtgctttactaagtgccccttgaggctactggcagtgcgaggctggctgtcatta

SEQ ID NO: 227940 - DNA, 203 bp, Homo sapiens
  chr1:225632702-225632905
  hyper
ctgaaataaatggtcgttgcagaccaggcacgtgagcaggaagtgggcagggcttaaaacacagagaagtcataacctctgcggtttggttcatgttgtaatatgaaaaccaggaagcttatcttgcaggaggctgatgtgtaaaagttcagaatggagtggagccctccctcttggcaccctatgcgcggagtcaccctttg

SEQ ID NO: 227941 - DNA, 31 bp, Homo sapiens
  chr1:225965662-225965693
  hyper
ggaggagttcagccgcgctgccgagaagctt

SEQ ID NO: 227942 - DNA, 924 bp, Homo sapiens
  chr1:226069175-226070099
  hyper
tgttagagcccaacgaacagctaggagagacctttgcccccacactaaacaaaggagaggggcgtgtgaagggaaaaggagcctcggcttccgttcatatcccccttgaaggcacagcagacttgaggatgacctgagaggtgtcaagggagggtcagtgggtccgccacgctgtccacccctgcccttgaagaggacaccacctgcctggggctgaatgaccaaggcccctccagggcctcaggtagctagtcttatcaggtgctggaacctttgcggatttggtttcttagcagagctcgcctcaccctttccgcccccgcccttccccccagtccccgagtccccagcctccctcctcaggactccgccaaggctgcaggaagtggtcacccaggaacagcccgaggggtggcctctgccttcctggcgtcaggagagtcggacgcttggccctttcccagcccggcctcgtatagggtccgaggagcccatagctgcactcctagttaggtgggaggtcggactccgccgacaaatcccaaagagaggggtggggaagaaggagataccagccctgaaagcgaaaagccggagaggaaagtcctgaaaagccgccaggaattcccaaggagcgcagggctggaatggaggcgctgcccggaccctctcctcccacccaatcccgcgtcgtcaccccctgcttggggtcgggggctctggggtctgcgtaggctgggagccgttccggaaccggacacctggcgcgcacgtcccgggaaaggcggagggtgcattgcccctcctcacgccccctgtcccctgtacctgcggcggcggcgtgtctggcgggacccagcagcgcggggcgtgttccgaccacttaaaagttacaaagtgaaactccggcgcctcctgcacatg

SEQ ID NO: 227943 - DNA, 289 bp, Homo sapiens; identical to SEQ ID NO: 197981
  chr1:226070382-226070671
  hyper

SEQ ID NO: 227944 - DNA, 34 bp, Homo sapiens
  chr1:226249797-226249831
  hyper
ccgacagcgggcgcgggacgctggattcctattt

SEQ ID NO: 227945 - DNA, 35 bp, Homo sapiens
  chr1:226250417-226250452
  hyper
tttcaattgtgttcgcagccgccgccgcgccgccg

SEQ ID NO: 227946 - DNA, 173 bp, Homo sapiens
  chr1:226374595-226374768
  hyper
aactcccctcccccgcaccccatcctttcggatcccagttgctccaggtgggcgggtgctaccacccccaccgctcggttcggtgctgcggctgtcagtgcccagcaggggcggggtcagtggagccccgcgcgggggtcggagtagggaggattgacgaggtcggccagcac

SEQ ID NO: 227947 - DNA, 42 bp, Homo sapiens
  chr1:226411519-226411561
  hyper
ccccggcccagcgacctttgcgggcttcctcggccgggaccc

SEQ ID NO: 227948 - DNA, 86 bp, Homo sapiens
  chr1:226497226-226497312
  hyper
tccgagtggagaacgggagggaggccccggcggggggaaagaagccctcggttctgggtcgcattgcccgagggggctctacgcaa

SEQ ID NO: 227949 - DNA, 275 bp, Homo sapiens
  chr1:226736491-226736766
  hyper
cggccgcctgagctcggcgcggagcccggagcccgcagccgacagtctcctgctcccgtacgctgggcgccagctccggccgtgctgcccggctgcctgagagcgcgcccggccatggagccctcgcacaaagacgccgagacggcggcggcggcggcggcggtggcggcggcggacccccggggggcgtcctcgtccagcggggtggtggtgcaggtccgcgagaagaagggccccctgcgcgccgccatcccctacatgcccttccccgtggc

SEQ ID NO: 227950 - DNA, 152 bp, Homo sapiens
  chr1:226814281-226814433
  hyper
ctgagctcctgacccgtcttccttttcttcgggcaccttgtaatgcacccgaccgtccagaagggggcagcctctgcaggcggcgccaggctatttcagacgcctctgtaggcggccctcttgatctcactccagcacgtgttctcagaaag

SEQ ID NO: 227951 - DNA, 1400 bp, Homo sapiens
  chr1:226924724-226926124
  hyper
ctggttcacctgcacgttctgcaactcgcgctgcaagatccgcagcttcctcttggcctcctccggccctggcggggagagggtaccggctgccaccacctgctgccggtcccctcgcaggcgaccagcccaacttgggctgctcacgctactgccgctgctgccgctgccactgccgctgctactattcagcctgcgccggccgctccgccagcccccggggctccggggctcctcgggggacagcgactcggctggggggaagaggaaagaggcgcctctcccggggctgaaaacgctgccggggctcagcactgccctcctcgggggcgggggcgtctcgctgccactgggccccgggccgccgccgctcttcatctcgttggcgctattcatgatcaccaggctattgagcgcatagcagtacacagccatagtactgggtcccgcgctgcccgccgccgcggctcccgctcctgctccgccgccggcgcctcctcctcccggcgctcccggctcagccccggaggcccggcagccgcggctccgcgcgcagatggggcggcatggcctgggcagcgggctgggggcacgaccgcgggctcagcccccgcccaaagctccataaacaaccgtgcggctgtggagatacaaggagaaaagtcaggaccctggagggcgcgcggggggagttgggggtcgcctgcagaacccagagagagccccgggaacacaatctatccgggacccagcgccaccggacatctcacctatggggacggcgaggctcggcgagggcatgccccggctgcctcggtcgccagcgcggtttcgggtgtgcttccccgccccccacctcgccccaggctgcgatgcgctttatgaggtcccttcaaatcccaatcctaatactcgtctcgcggaccggcgagaagcgaggtccaagtccttggctcctaagtatgctgtgtgcggggcgcggctgactcagctctcccgggctgaggacaccccagccaccgtctccgggtctccccagcctgagcaaacattggctatccagggcaacccggcagccctcgccctgggcttcagggtctccctgctccaccctctcggggcatcagagaccgaccggctcggagggaacctaagcgggacctgccttgcccgagccgctgccagcgcccggatctgggagggcgcccgcgtgcccgccgtttaccttcctgaccctagccttggggctgtgtctctcggcctacgaaggcctgggcgggcagcggggccgcagccgaagcatttttcagggctagccttgtcgcctatccctagacaagtgttttgtgagtgtgggcgcaccgaggttctacacgttctctttaccggaaccagtactt

SEQ ID NO: 227952 - DNA, 33 bp, Homo sapiens; identical to SEQ ID NO: 197986
  chr1:227058123-227058156
  hyper

SEQ ID NO: 227953 - DNA, 1516 bp, Homo sapiens
  chr1:227505242-227506758
  hyper
ttcaaaattcaactcgtgcaacgtaatcctgaaacgaatccggttgcatcattaatgaataaagtccgatttgcatcagcaattcacttcccgggaagaagaaaaacagaaaagggaggaaaaaaacagaatgcatagaagggggagggaaaaccaaaaatgttgctgcaaatcctcccaaccaccacttggataatgcatcagcggcaatttctccagcgggaaagggagggggcgaggtccctgaagcagcccctcggctcggagcacgccaagtcttgcccggaggcggcttttcgtttctcctcccgaggtccttctttctttaaggctttgcagtcagtcctattttcaacggattccggtgaaaactcttcattttcctcccggcttcaccctagggcctgaccggcggcgcggccgggggtggaaggcgggctgcgggcggcactggcaccgggctccggagaagcggctacttggccgcccgagcccactccatgtcggtggtcgctcgtgggccgagccgcgccgcgccgcgccgggcagagagcccggtctccccgacacccgcaccgggccgccgcgccggaggctcccgacgccccaggcgggggggtgcttctctgaattcaaaggacacaagcagcagcagctgcggcggcggcgcgggcggctctggcagctacttctcccccttcttcacacccctgggctaagggcatctttccacagcgaggagggaggcggcccggcgcaggaggaggggtcgcttccgcggctgaggagactagaggctgcggcagcccggctcccaaccactcccttcctctcccttccagccctcccccgccttccctctcctctcgcgctcgcgccctgggctcagcgaggctcctccagtcccgccgcacagaggcggaggcttgcggacgagtctggatccaatatggcggcctggccccccggccccggcacacgcgcgcgcacacgccctccactccccgcccccgccctgcccgagcctcagccccagccggcggccaagccgggcggggtccggccggcgcgcccagcggaggcccccaagggggcgcgggctcggggcccgagtggctgcgccagcccgaggggaggggtgtggactgcctaggcggcgaggctgcggctgccgcagcgtggaatgcggagctgcgggagggctgagggaggcccgggcggcggtggcggagcatatggaggcgggatgaccgggccgcgccgggagctgcggcgggactgggcgcaggctgggaactgcgccaccgccgcgccgtggccccggctccccgaggcttctggtgcagatcgcgaaggggggctcctgctcgtcctcggagacatcacctgtctggcgcgtttgttaagggcgcccagaagcagagggctttaggcttccgacagagctggaggagacggtgcctttcagccccttacctgctccccaccggccccccagattcggttcgcgcacact

SEQ ID NO: 227954 - DNA, 477 bp, Homo sapiens
  chr1:227975252-227975729
  hyper
tgagtgggaaggaatcagagcgcaggagggaggaggggggccccgcagagccgggccgggacaggcagggcgagcccagcagaagcgcggtcctgaggccgccggattccgatccaaggcccagagtgtccgcgacagagccgggcttcaccgaaagcacacgctcagcggccttcccggcgagcgcgcagccccagtgaacctatggctcagcattttcagaagaaagcctgtcggcatagactttccgtgatttcaaaggagacgcttccaaaaccaaggtcttgacctagatttggaagcgatccctccagagcttacatttggagaccggtagagaccgggcctgttgggacaacagctccgagggctacgctgcgtggactaggttccagacgcgctctgaggaggcgcctcccggctagttcctgagcgcgctcgagaggagcgtgccccgcaggtgcaggcgccgggact

SEQ ID NO: 227955 - DNA, 435 bp, Homo sapiens
  chr1:227976220-227976655
  hyper
agcagggcgtccagcggagaaggcagaggaggggagatgcgggctcctccaggtagcgcaggagcccctccggctgccggagccccgcgagggcgcgagtggagggcaggagcccgggcggcggaggagcggaagggatgctgcgttgccttggagtgtcagggtgggggaggaaagaccaagggacccacgtccttcgcccccgccgcggagtcccgggccggcgagacttccgcagcctgcccagcgccggggacctagggctttgcaggagtccgcccgggagctctatcagagcgggcgtcctccccgccgctccaaaggtggcttggggcaggtggggcgtcccggagggaatggagggaccctgcctagggaaggtgagtcgtgtgtggtcgggtgtgtgtgcactgcgtggtgtgtgtacactcaggt

SEQ ID NO: 227956 - DNA, 110 bp, Homo sapiens
  chr1:228074792-228074902
  hyper
acattttttccgacgcagcccgcagcgattgtctccctcagaagcagcgctggggacgccctcctgggccgggcagggggcgggggactggggccggggctgcagccagc

SEQ ID NO: 227957 - DNA, 329 bp, Homo sapiens
  chr1:228134409-228134738
  hyper
ctgcagggctcctcggcccaggcggcctctccctgcccgggcgggtgccagattcctggaccaacggggccctctgccggccagcccgccgcgcgctggcgctcaggccagagggccgggaacaggtgaccggcggagggcggcggcccggctgagggagcggcccagggcgtccaggtcgggggctgggatccgaaggccagccagggctcccagcggcggcgctcggggtaggaggctggagggtggcggggaggcccggggcgctgcctcgcacggcgccaccctgcacctcagcgcgcccaaagcgcagcgagggtccctgtaaa

SEQ ID NO: 227958 - DNA, 54 bp, Homo sapiens
  chr1:228135038-228135092
  hyper
aggaacatctggattttgtacgtatttttgttattgttaaattaacttctcgag

SEQ ID NO: 227959 - DNA, 31 bp, Homo sapiens
  chr1:228193571-228193602
  hyper
caggaggaccagccgcgatgggagagtgcct

SEQ ID NO: 227960 - DNA, 204 bp, Homo sapiens
  chr1:228194534-228194738
  hyper
tcgggctcccgtggccccgcctgcccctgcctgccccgcccgggccccggccccggcgggcgccccccgcggcgctgccccgcccccgccgccccgcgccgccccgggcctcggcccgcagcccggccgccggcccacctggcgcagcgccgccctcggagcccgcgcacacccgcgcacccgcggccgcaggagggcccagcg

SEQ ID NO: 227961 - DNA, 325 bp, Homo sapiens
  chr1:228194918-228195243
  hyper
gttcgcccctgcccctgtgcgccgcgcccgcagcagacggtcccctcgggcagggaccccgcggtggcccgagcccgcgcccttctgctccagccccgcgtgcgggccgcgggcggttggttttccttgacggccactttggacctgttcaggccgctgggacgcgtgggtggcggagtttccggagacattgattcccgagcgggggagtaggggaggttgcggaggtcctagctgcccctggcgtcggacagggcgagcagtgggctggggagaggctgaaagaaggtcggcacgcacggtcaccgaggggacaggcagctcg

SEQ ID NO: 227962 - DNA, 1033 bp, Homo sapiens
  chr1:228195543-228196576
  hyper
ctggcaatgaggggctgctgtagagagagttaagggtgagttaagcacggggtgtgaggggctccaggaccctcaatcagaaagcgctgtgctgcgccctccacaccagaaaaggcgcgttccgtgagaccctccccagcctggcgatggaagtgcagataaaccaaaggaagggtcccgaaaggtctctctcaggcctcccacctccactgcacatatcctgtgggagggggaacggtggccacactttcgccagggcttgtgatccctcagagccctcaccaagcaaggatcaccccagttccgaattaagggcgctctgagatgcccaagattgaggaacacaagtgggaggaatgtgggcgcgcagggccgggcgcagcgctggtaggacccacagttggagagaagcctccccacaagcatgcacactcccccccatccttctccgacggcagcctggaattataataattacgccgaggggaaggggggagacccagcgagccgaggtacatctaatccgataataatttttctcttcgagatggttcaggagcgggggctcccgcggtaggggcgccgggccaggagcagcggggaggggaaggggcagccctaggcagctgaagggcctggaagaggccacgaggccgcggggacgcgcttcggggacccccgcgcgcccctatttccgcgtgccccatttcccgtgcggcacctgctgcgcccagtggcccacctgagggtcaggctcggggctcgccttggggtgcggggatactgacgcgcgtccagacggccgcagggagccaggggcagcgcgtccgtccgagagagccccgagggctgccggcttacgcaccaggcttctaattagaacccgccgccgcgttcctgagcgcaaaaggaagctccttcgccccgcgcccttcccataaatgtcgccagcctcctggcaaccccgcgccctaggatctttgtcttgtcggccctgagggttcctagcctcggtccccatccacctcatatg

SEQ ID NO: 227963 - DNA, 580 bp, Homo sapiens
  chr1:228225422-228226002
  hyper
ccccagtgggaggggaaccccggccgactccccgccgcgtccggctgggagcacaatatcccagcgacggcgacaagattaagcacaaggggagagtgcaaatgcgcgggcggttcacacgcccttcgcggtgctgaattaaagcgtctgaatggggatttcccctcgcgccggacggcctggcgcgcggcgcatacttccaggttgctatgactggcctgcgctcgcctaatcaccgactagggggaaattcatataaaatatcgccggccattgtgggcctaactcggcgtgacagtggcgcacaaagccggattcaagcgccccagcgggtcagcacggcgcccggccgcgcgggccgcccggcggtgtcaggggccgtggccgcggtggggcgcgggccgcattccgctctcaggtggctccggggccttttgtgcaggccatgattaccaaatgccaccgcgacaccccctcccggccgcctggctcctcctggggccgcaggaatgagggaaggtgggcagcccccgaggggaggcgcccgggcgtcggctccggcgggctccggcggggaccg

SEQ ID NO: 227964 - DNA, 183 bp, Homo sapiens
  chr1:228247857-228248040
  hyper
tcttccctgggaaccgccctcctgattaaggcgtggcttctgcaggaatcccggctccagagcaggaaattcagcccaccagccacctcatccccaaccccctgtaaggttccatccacccctgcgtcgagctgggaaggttccatgaagcgagtcgggtccccaacccgtgcccctgggatc

SEQ ID NO: 227965 - DNA, 499 bp, Homo sapiens
  chr1:228248269-228248768
  hyper
ccgggctcccacaccgtcaggtactcctgccagggaactggcctgctgcgccccaggccccgcccgtctctgctctgctcagctgcgcccccttctttgcagctgcccagcccctcctccctgccctcgggtctccccacctgcactccatccagctacaggagagatagaagcctctcgtcccgtccctccctttcctccgcctgtccacagccccttaagggaaaggtaggaagagaggtccagccccccaggctgcccagagctgctggtctcatttgggggcgttcgggaggtttggggggcatcaaccccccgactgtgctgctcgcgaaggtcccacagccctgagatgggccggcccccttcctggcccctcatggcgggactggagaaatggtccgctttcctggagccaatggcccggcccctcctgactcatccgcctggcccgggaatgaatggggaggccgctgaacccacccggcccatatccctg

SEQ ID NO: 227966 - DNA, 117 bp, Homo sapiens
  chr1:228270662-228270779
  hyper
cggacgggcgggtcggtgagctcctcgcacccctcacaggttcccgaagtcgctcgcggccgcttgtcctcctctgcctgtccctgcccccgcccgtcgcccggaagtccgcttgga

SEQ ID NO: 227967 - DNA, 583 bp, Homo sapiens
  chr1:228463165-228463748
  hyper
ttcgaggcacaagggcctggcgtcttgttcagagcaggggagctggaggtgggagcggggcttaaggaagcttcctggtttcctcgcttaaagtcgcacccgggagggtgcgcagctgcggcccgcgtgtggccagggccgcgctgtttggattgggatcccggggcgcggtgccggcagctctgcctgggcccggctcagggcaggcgccggggctgtgcgggccctctgtaccttggcttgtccgtggaggagggcgagggccgccgtgacctcccctctcctgcgaccccagaggcgcctgtgctgttcaaaaagaagctggagccgcagacggtggaggagcggagctcggtgaccctggaggtggagctgacgcggccgtggccggagctgaggtggacacggaacgcgacggccctggcgccgggaaagaacgtggagatccacgccgagggcgcccgccaccgcctggttctgcacaacgtaggttttgccgaccgtggcttctttggctgcgagacgccggatgacaagacacaggccaaactcaccgtggagagtgagccgcgggcgggaaggg

SEQ ID NO: 227968 - DNA, 437 bp, Homo sapiens
  chr1:228566260-228566697
  hyper
tgccttccccacacccctcccgccgctgggccacgtgctgagcctatgtccgtcccaggggccggccctgcgcgtccagctgcctgcagtgcccgtggctaacagaggagggcccggcctgttcgcggcccgcgcccgtgaccttccctaccgcgcggctgcgcgtcttcgtgcgcaatcgcgagaagagacgcgcgctgctgtacaagaggcacaacctggcccaggtgcgctgagggtcgccccggccacacccttggtctccccgctgggggtcgctgcagacgcgccaataaaaacgcacagccgggcgagaagtcttccgtctcgttgcattattttcttttggggaggagagggagtgagggctctgtccccgcctttctggctggggcgccgatcaggctgccccgctgtgtttgggcctgtgagcccct

SEQ ID NO: 227969 - DNA, 250 bp, Homo sapiens
  chr1:228594015-228594265
  hyper
ggtgcaggcgccgcgccatctcggccatcttagcaagcgggcggttgggccgcaggttcctctgcggggacagctcgcggcactcggggcacgcgtacgggccctcgggctggccccagcagcgccggatgcactcgcggcagaagttgtggccgcagtcggtcatcaccggatccgtgaagtagtcgaggcagatggcgcaggtggcctcctcctggaggttggtggacaggtcgggggcggccatggc

SEQ ID NO: 227970 - DNA, 835 bp, Homo sapiens
  chr1:228603725-228604560
  hyper
gatctacagactttcgcctacgccacggggttgctatggggaccgagttgcagaaggagttgaaaatcgcgtctacactgcaagcacgattctccccttccgttctgccatcccctaaagcgagggcgtctaggggtctcagacttccccggctctgtcccacgtccagtttctcggagctttctgcacgccaaccacccggcgccagccctccgactccccccaagagccctaacggaggcacccagcccaccctgaccgaagccgggcagggacagcggcagcgggcctggggctctggctctggctgccgggatggctgtccttcccgctctggtccgctagggtcccggtagagttaccttgttgaagcgcgctagcccctccagggacgcggcggccggcggaggcgggaaggccgggcgttggagggcgaggaggaccgggttaggcttaggtcgtggcccaggcgccacaggagggtagcctaggcggcggggtgggggctactcaccgcggggaaggggggcccgcacagcgcctagtgcacctggccgagcgctcgctgccgggaaaggctgggtctgcccccacgaagcccaggaggctgcggcccggcccggggcgtggggacctggggtcgggaggcctagggactttgtggcgtcagcgggggctggggggcggcgggggaggggaatgctgggcgagggagtgttcggcggccgggactggggcggcgcctcttaggagaggttgggggtggcttggggaaggaaggcggcagggggtggaaggctctggacgagccggggacaggcgcagcgggtgctga

SEQ ID NO: 227971 - DNA, 571 bp, Homo sapiens
  chr1:228633576-228634147
  hyper
gcccatgtatctagggaacacgtgatgctgcaagaaaccagtgacttaacgcgtgtaaaagcaggagagcgtcagaggttctgaccccgggggaggagcagacccgcggcagcgtgcggagacttagcgggcggaatctgccaccaacgcaacctggcccagaggttttgaactgaccaactgggagacgtccccgagcttgaataagggcctcaaaagcttagcgttttatgcagagtcgcaaccacccagcgctgggaacctgagcctgcacaacccactagaaagcacccgtgaccgtcccctgcgcccgttatccctgcgccccgcacccctgtatccccggcttctctgcagctgtacaccctgcactgcggcgccccccagtcccgctgtccgctccatcgcgcaggtctccaaaacgaatcccggcttggaggggctcagcggccctgggcctgtgcgccgttgcggccgggagggtcattttcatgcctaaggacccgccccttgcacgcaacctcgggtagccagccggaaacggcgtcccgggctccaaaggacatctctt

SEQ ID NO: 227972 - DNA, 86 bp, Homo sapiens
  chr1:228644857-228644943
  hyper
aaggggtggccacctgtggacgagggttccctgttgttaacagaacacgttgcccacctcgcaagtatgcagcccaatcagtcccc

SEQ ID NO: 227973 - DNA, 120 bp, Homo sapiens; identical to SEQ ID NO: 197999
  chr1:228646026-228646146
  hyper

SEQ ID NO: 227974 - DNA, 360 bp, Homo sapiens
  chr1:228646206-228646566
  hyper
agtgaggcgttcctcggcgtcctgaacccaaaggctcttttcagagccacccacacgatcaagaaagggtttcgaacacggtgaagggttatgtaacctaatgtgtctccatgcaccctagcggttgccgggtgcggccgaatctgagccgtgtgtgtgtgtgtgtgtgtgtgtgtgtgcgcgcgcgcgccggcacagaacgagaaaaactgctcgttacagaaatcggggtagaaactgctcaggtgatgtagctcagtaatgttgggaggcgatcaaggaccccctctccatcccctccctccgcgcagagctattaactcacgacgagatttcttttttttttctttctttcttttt

SEQ ID NO: 227975 - DNA, 282 bp, Homo sapiens
  chr1:228646866-228647148
  hyper
tgtcttttataagcaagtggtgcattcctggatgttgagcgcttgcgcccggttcaggaccgggtccaaatgaggttggcgtgcgccgtgcaggtgaggagtgcgggtcacctccccccaaaagaccctgtgccaacctccccaaccctacccgccccccatgggcgaggccagacgtggcgcaagaccacgggctctgaggccatgggtgttgtcactttcccctggcggtggtgcctggctctgcatttgcttaagacttttccatccctgcctggacca

SEQ ID NO: 227976 - DNA, 106 bp, Homo sapiens
  chr1:228647328-228647434
  hyper
ggggtgggggaaggggttaatttaggaggaaaagaattccctttttctgagcaaatgtagctgcctccctctttagccacattattttctgcgaggcgttagcaac

SEQ ID NO: 227977 - DNA, 573 bp, Homo sapiens
  chr1:228651339-228651912
  hyper
tcaagcaggaaggcgtggcataaagagctgcttaggcgcaacgctgctgaaatggttttggctagaagctcacagtgtctagttgtggctaaggagggaggaaaggggcgggagaagaacggacccaagcgcctccgcccagacggcgcgataaccccctcacctccaaccccggacctcagtgagcacgtcctccagtctcagccgccaggaggcactgggggcggggacgtggcacaagatcttcccggaggtgacccacgctcctcgcgcgcagggcgtaagccacacacagatctttggatgggatccatggcgcaatcgcctgtactgccccctctctgactttgcctgtggccaacacaagacgaacgcagcctttctaagggaaatatgccgttacaaacaagaagcctaattttgtctctaagacttgcgcccccacggctcagtctactttccctcattactccaattgaatcacaggtcacaaccagaccaggtggcacgctccttttggagcttggaggtggctctgaaaagagcctttgggttcggggcgccgggacgcac

SEQ ID NO: 227978 - DNA, 120 bp, Homo sapiens
  chr1:228651972-228652092
  hyper
ccagctcgccgggcagcagcaggcgcacggccgtctgcacttcgcgggacgtgatggtggagcgcttgtttgtagtgcgccaggcgggaggcctcgctggcgatgcgctcgaagatgtca

SEQ ID NO: 227979 - DNA, 573 bp, Homo sapiens
  chr1:228652212-228652785
  hyper
ttgccgtccttcttctgcgccttggtaatggccttcttggagccctttttagaagccggagccgcccgcgatggctccggcatggcgaggtgacaagagcgcctagacgaacgcggatgcggggccggcagggctatttgccatctttatattcaaattaaggctccaaatttgtagtgtctgattggacggcctgactccgcggccgccactgggaggaatttctgtaaatagcagagtccggttcttctttcctattggacggcggtccaaccaatcccaaggcatatccgccgcgcgccggagctgaggttgcgcatctttgttcaaagcctttgttttaaacctggagatttttgtgtctgcagcggatctggaggtagctaaagagaaactgaaaaacggttgcaaccccaaattgaggtcttctctggctgtgaggcacatacatgggggcattttttttttctgaggcccacagctagggaggggtagttagtgcttatttagaaggggaggtggcggtgggaatggcagtttgcaacgaccttaacccttcgtttcttgcccttc

SEQ ID NO: 227980 - DNA, 178 bp, Homo sapiens
  chr1:228674803-228674981
  hyper
cggtgacgtgcgccgctgccaggaccttgcaggtggagagcatagttgccaaaatcaaggcggaggagcgcaccgccgctaggatccaggcggagaagcccaccgcggccaggacctaaggatgcagtacactgctgccaggatcttgtctgtggagcgcagcgcggccaggacctcc

SEQ ID NO: 227981 - DNA, 94 bp, Homo sapiens
  chr1:228783178-228783272
  hyper
gggcaataggaatccgggtgcacagggactgttttcctggtggttggcgaagcaatgtccttcctcccgggtaaagcagtccatgcgttctgga

SEQ ID NO: 227982 - DNA, 814 bp, Homo sapiens
  chr1:228783332-228784146
  hyper
tataaggttgcgactgcgccggatgagtgaattgaattgcctggtggatccgggagcgggaaggcaccgcgaacggcagggaatcctggcctgcaccttagtgatctgaggcgtggtgtttctgctggatccggtttcatcgtgttgcgccgcccatcctgaatagttgtgatgttgttgcctggctgtgctgcaggttagcccacactaagcggtcccgggctgttgtgtgggcttgggcgtgtgaaaagagggagcagatttacggtgcggttgagaagtacggcgaccaaacggtaaagagggaggaacttgaagtctaaacaagcctgcgtctcctggttttctcaagtggcgtttcatctaagtagcggtctggcccagaccctgcttatcttcacgagatcagaggagaccggacgccttcggggtggtatggccttagacgccggtagtgcagcctgtctgccccaaaggcgcggctcagccacgcccgtccgactccatgcgccacctctaatccagtgccatggggatcttatcgggacccgggagccgctcgccggaggtctggctgggttgctctccgtgtctacgcccaagcaccgttgcccgccgccttgcgccttctgttggcctcttagagccttccgtgattgcttgcgcctaggccactcgctggacctccgcggcgccaccctgtttcctcgcgggagtgccagaggccttttcccctgcccaagctctgggatctccgggcagcctccattccgccgactctccaggccttccccggctccggagctccagagct

SEQ ID NO: 227983 - DNA, 381 bp, Homo sapiens
  chr1:228870693-228871074
  hyper
tgagaaaaaatcacacgatcagctgcagttagacttaaggaaaaaagctgtctgttaattcaatctcattcgcaggacaggcctccaggacacttcatttttccccctgggtggagccgtggccagccgggggctccacggagtgaataggaggcggctcaggcttcctggctcgcgtgggcgccagaaagcggaacctcccgggccagtcgcgcggtggtcaccctcttgggagctggggaggaggctgcggaggctggcccggctccttcgggcgtcgcttcccggaccgggtgcgcggggtcccccggaacgtgtgttccaggtcctcccgcgccagtgttcgcagtccccgcctggtcgcggcggcgcctcgggcgc

SEQ ID NO: 227984 - DNA, 1004 bp, Homo sapiens
  chr1:228871254-228872258
  hyper
cgctgtcctccaacagcgcagggcagagcggctggcgccgccggagcgcggagccacgaccctccctggccgcctttgtctactggccgtgcggcccggaaccgccactctccagggccggggacgcgcccgcagctgtcggtgacagctcctccctaccgcaaccctccggggcggaggggcggtcgggccgggccctgctagcccgcgaccgcaagcccgcgctcgcggatcgatgcccccgcagcagggggaccccgcgttccccgaccgctgcgaggcgcctccggtgccgccgcgtcgggagcgcggtggacgcgggggacgcgggcctggggagccggggggccgggggcgtgcggggggtgccgaggggcgcggcgtcaagtgcgtgctggtcggcgacggcgcggtgggcaagacgagcctggtggtgagctacaccaccaacggctaccccaccgagtacatccctactgccttcgacaacttctccggtgagctggccggggggccggggccgggggcgcgtggccgcggtccacccaggggaaggaaggtggcgcgagggtcgcgaggttcccaagggggctgcagggccccgggcgcggctccagctgggaagccggacaaatgaggagtgcaggacgtttcctgagtctcagggaccgggcaagcgcggagctaacacgaaaggaccacggcggagtgggcttggagagaggagggcggagcggcagtcagagccttgccaaaaaaaaaaaaaaaaaaaatctcacaatttaagcaacagataagtaggagtgaaacaggttgagttcagggtgcccggtcagtttgttgcatagagcaaagtttcctgagggcgacgtcgctggcgccgctgcagagtttcaatcagaaggtgacgcgcaggtgcctttacctgagcgtcgctcctttgcttttaggcggctcagctcacaaggggcgtctccgctttaaagagccgcggagacgccggg

SEQ ID NO: 227985 - DNA, 857 bp, Homo sapiens
  chr1:229542853-229543710
  hyper
cgcagtccatgccacgggggataagtttttcacaagtggctttttttccccacagtgaagagacgtggcctgggtctggagttcctcaaccggcaaaatacgacgtgaacagctcctgcacccaaaaaggccccgagttaactctgctgcataggcgaggcaggcaccgcgccgccagtcggggacgcagagcgagcgcgtcctctgggatttgaaggccgcccccgtcaaagttggcattcgggggcctgcgtgttccggagctacggagcggcaactgaggcaggagctcaggactggggggagaaagagagaccctggaagcgattaacgtgccccttgctttacagatgtggcagataagacacgagagggagctctggtccccgaggggctgtcccgggagggagcgaggtggggagggggagcaggccctgccccgagcaccccgcggactgagcgtctggcgtgcacggcggaggggttaccgcggggaggtgacaccccagggtggtgagggcacgcagatgaggctggcctgaggggtgcctgctttggggaaagcagtctgtggagggagggaaggagggcgatcgcggccccacgcgggttgtgctgctgaggctccgcgccgcaggaaaggcaccctagccggattcgccctcggacgccccagctgggcacactcacgcggctctcccgcggcttctcgggaattcgcctccagggcaatcagctcttcgcacaaacgttcaaaccaaggtaagagctatcagatccagccagatctgcttcctaagcctggccagggccctaagcacccccacccacacgctcagaggcgggcgacgccgagg

SEQ ID NO: 227986 - DNA, 636 bp, Homo sapiens
  chr1:229566658-229567294
  hyper
agcaccatggtcagcgcccgctgcctgaggggacccagggccaccagcggaggccgccccggcagtgctggcaacactcgggagcgctgcgcagaggaagaaagctgcctcgccacaccccagagggtcaagtcaggccaccactagctgccagtgatctggaatggatctgatccactgcagaaaccggcaggggagcatgggaagatgtaagttttgtcttccaaggagcccattcatttggggtatcgtgaaaagtgacttaagaggatgtgggggatgggaatccctcttcctgctccactcccgccccaagcaaataaacacgaccactttacgcagcttaacagaatgactttaatgcttcttcaagttttccattttcttccacagggctttgtttcgaaaaataacaaaatgaggtaataagttaatgtatgtacacgttataaacactgtgtcagtttacgatggcagcaacggaagttgttacaaagaaagtgactgcggggtggctggagctcagccgcccccccattgagaagattcgtcgtcctgagaagtcgcgtgctggaggtggagtgtgtctagaagcatttgcggtggacgatggaagggccggcctcgtcgtactcc

SEQ ID NO: 227987 - DNA, 996 bp, Homo sapiens
  chr1:229567354-229568350
  hyper
cacaccgagtatttgcgctccggcggggcgatgatctgcaagacagcgcgtgaggtggggagacctcaccctggagcccaccccgccgacagcccgcgcaggccaccacccaccttgatcttcatggtgctgggtgccagcgcggtgatctctttctgcatgcggtcagcgatcccagggtacatcgtggtgccccccgacatgacgttgttggcatacaggtccttcctgatgtcgatgtcacacttcatgatgctgttgtaggtggtctcgtgaatgcccgccgactccatacctggggaccgcggcggggagcgtgagcagaagctcggggcgccgggggccggcggggcctgggggccggggcgagggcgagcggggctcaccgatgaaggagggctggaagagcgtctccgggcagcggaagcgctcgttgccgatggtgatgacctgcccgtctggcagctcgtagctcttttccagggaggaggaggaggcggccgtcgccatctcgttctcgaagtccagggccacgtagcacagcttctccttgatgtcgcgcacgatctcgcgctcagctgcggagggcagaagcaggagaggagccctcactcaggggccgccgccggccctcccgcccggggtgcaggggcgccgcgcacctgtggtcacgaaggagtagccacgctcagtgaggatcttcatcaggtagtcggtgagatcgcggcccgccaggtccaggcgcatgatggcgtgcggcagcgcgtagccctcataaatgggcacgttgtgggtgacgccgtcgccggagtccagcacgatgcctgtgcgcgcgcgggagagagtgagtggctgggggcgaggccgaggctaggctctcagcgctagcggcgggggcgggggcgggggcgggggcgggagaggggactgggggcagcgggcactcaccggtggtcctgccggaggcgtagagggacagcacggcctggatggcca

SEQ ID NO: 227988 - DNA, 611 bp, Homo sapiens
  chr1:229569692-229570303
  hyper
cttcaggttcccctcggtagtgccctgtccccctgtcccctcccaactcctgccctacctgggcgggtagctacaactgctactctcggctcgggccctggtcgccgcggaggggaagcgaggcttcacttggcgctgtccgctgcggtggccgcttgtccctctgctcaggttttatatagcccgcgggcattccctccgcgccaccccgcaggaatgtcgctgcccttctcgagccatatttgggtgttgggcactagagccccctccctcggccggttcgcggcctgggcccccgcccgggtcccctgcgttgaccaaagaaggagcgggttggcccggtcccaggtaacgcgggccgggccgtatatggagtgtctccctagcgggtttgcccctcctgacccgacccagttgcccgccggaggggatggggtggggcgagggtcaccgcgttcgccggtgggtgcatgtgtgcgcctgcgctccgggaaccgcacctgtcccaaaggcctccccaaccatgtccactctgagcgccctgggcgctcgggaaggtgcctgactgctgacttccaatatttcaactcctcttcgggttctttgctcag

SEQ ID NO: 227989 - DNA, 477 bp, Homo sapiens
  chr1:229643803-229644280
  hyper
agatcacttaccgcgagcttagcgagctacgccggccgaccggcgagaagagcactggggagctgactgcagaccccaggggcagacccttcctgctagccgtccggggcgtggagccgggcccgagtccggccagcgggccccttcgggacccggtacccggggtccgcggagaaggggcggctgggaacatgactccaaggagcagcgactaggacagcgagggatctggccgtcaggttgcagcctggcctgcgcgcggaacttaaacacctaagggaagagatggcgcgcgatgatgacgtcaaacgcaatggctcccgcgggttgtggtcggagcgctggcgggggcgggatcgtgacgttaagggcggtgcccagtcagcgaggtaggtcgggaaggcagccggcggccccagatctagaaccgctgcagtgccgagcttccagggacgtgaagccggaaagccaggcgcc

SEQ ID NO: 227990 - DNA, 156 bp, Homo sapiens
  chr1:229694643-229694799
  hyper
ccacccttccgagcgcccccaacccgctcgggtgccctccctgcagcgcccccaactgcccgctggcggaggagcgccgggcgcgccagctgggacgaggcccgggaagcccaggagcacggctgcgcctgcgtactgggcgcagggaactttttc

SEQ ID NO: 227991 - DNA, 94 bp, Homo sapiens
  chr1:230202416-230202510
  hyper
ataagagcaagcccgttaagggtctgaggtggccccaaagaccaaggctgaagaggtgacagtctgggcaggaagcaccgaggccactaccgcc

SEQ ID NO: 227992 - DNA, 1397 bp, Homo sapiens
  chr1:230561209-230562606
  hyper
gcctcatttgtttccggagagacacccacaagccagcccacggagagtctggactcgcccgccccagcacccacgcctcccccgcgcccggttccagcgccgcccccgacatccacccgcgggcagccccttaccgccggtatcctcgaagcgcgggggcgggcggtcccgcagcgctgcgctccagcccgcgccggcctcgtcctcctccggctcctgtgcgtccggggcgcggggcggtggcggggcggcccctgggggtcccgggggctcgcgctcgtcgtccgaggaggcggccgaggaggagcgcgaggcggccgaggtgctgtagaaggggttcccgccgctgtccgggccggactcgccgaacacgtcgtccgagatgtgcaggctctcgtagcgcgcgcgggcagcctcgagcagcgccggcgccctcctccgcgcgcccccgccgccctcggccatggccccggccgccgcccgcgcgcccgcccccacagtgcctcccagccgcacacgccgggccctgggcccgcgccgcggcccgccgccccccaccagcgcagcccgcagcacagcgcccgccgccccgtgcccggccggcccgccgtcttggccgcctcgggcccagcgcccggggaagcgccctcggagctcgggcgccgcaggctgcgggccgcggcgggaggcgagccgcgcgcggggctggcaggggcgacccagagcgggcgggacgcagaggctgcggccgagaccaggcgccgccgccgccaccgccgccaccaccgccaccaccgccgccgctgcgtctcctcggcgcccgccgcctccctgcccgccctctccacggcctccggcgctcggctgccgaccttcccgggcgcgagccgccagaggcgggccctgccgcccctcacctcccgcccgccggccaatggggagcccggcccggacagccgcgggggagctgggcgggcccggcgcggggaacgcccccaccctcctccgcggggcggggcggggcgcgcggccggggctggcggttagggggagggccgccggcggcagtgccggtctcctcctacagggacgcgcagcccgggaccgccacgcgcagcgcgggagggggagggcgggaccggggaacaggaggggagggggacccgggtgcttccagcggtccgggcccgcggacggagtgcgggccgatcccgctcactgtccccttccgcagtccgcgtgcagctccagggagctgtccgccccggtggttctgaaccaggcgccgccgaaacgctccaggtaggcggcgggcccgaggtcaccacacccgcggcggcggctgctgccgaggtttcctgggggtcactgccagctgcgccgcatgctcccataaa

SEQ ID NO: 227993 - DNA, 163 bp, Homo sapiens; identical to SEQ ID NO: 198011
  chr1:231053145-231053308
  hyper

SEQ ID NO: 227994 - DNA, 32 bp, Homo sapiens
  chr1:231114517-231114549
  hyper
gcggcggccacagcgccgccccagaagcagca

SEQ ID NO: 227995 - DNA, 925 bp, Homo sapiens
  chr1:231296814-231297739
  hyper
tggcgctacgactccggtctttagtctttgtttggagcacgggagaacctgggacggagggaggcatgacttcaatattcatatcgttgttaaataaacgatttcctaatttgtatctgtttcatgccagcgtgaaacttctgtaggcagagccggctgcgctgccagcactttcttctgctcgtccccacccacctctgcctcccccacccagccttccctcggcagcagcggggaagaacagccgagcagaccaaacagccggggccgcgggtgggaggctgttcccgcagctcgtggctggcgttggagaatgtggagattttcccattcataaaaggaacgtctccgcttgccgccttcccgtccgccgcacaccgccacatccgcagcggggtagggctgggtctgggggcgctgggttcccaggggtctacccgggcgcgctctcgcctttctcaggaaaccccattttgtgagcggcaccgcgtgtcctctctcagtccgtgcacacagttgacctggagcgcggatgagcacccttggttgaaaggaagagacaaaatggcttgtggttcaattcataaataaaacctcacccttggacttcaggctgcccgacattttgggacttggatttttttgctttatcgtagttttaggaagcgactgtcaggccatgttgcctatccatttctaaacgactggctttttaggatcccgttttcacccttctatggcggtgggttgggggtggggtgtggaactggagtggcccagggagacgatggcaggggcggggcggggcaggtcgttgtactgattcaagatacaatctccatccaaataatggattgttattaacaatgatcctccctgcaaaacccttaaaattgccccttgattccctagcagcaagaggcga

SEQ ID NO: 227996 - DNA, 416 bp, Homo sapiens
  chr1:231298759-231299175
  hyper
ggagcctatcatcctgccctgttcccacaatgtctgcctgccttgcgctcgcaccatcgcggtgcagaccccggacggtgagcagcacctgccccagccgctcctgctttcccggggatcggggctgcaggcgggcgccgccgccgctgcctctctggagcacgacgctgcggctggcccggcctgcggcggtgcaggcgggagtgcagctggcggcctcggcggcggtgcgggaggtggcggagaccacgcggacaagctcagcttgtacagcgagacagacagcggctacgggtcctacaccccgagcctcaagtcccccaacggggttcgcgtgctgcccatggtgcccgcaccacccggctcctcggctgcggcggctcggggtgccgcctgctcctcgctgtcctcgtctt

SEQ ID NO: 227997 - DNA, 411 bp, Homo sapiens
  chr1:231376707-231377118
  hyper
cacaggagacccacgttcctcaaatctgttctccacgtgggctcctgggaccccgcactcaccaaagtcgtaaaggttctggagcagagcgtcaagaagtgtcggagaactgggaggcgtggaggaccccggcccttgctcctgcgacattgtggggtcagccgaggaatcaaccctcattctgccgcgctgcacccccgcttccgggttccgcgactgcgcgcatgcgctgcagggccctgcgcggcttccgtcctggctgagatggcggcgcccgggatcctgtgtagcggctgcagagggtgccgccgccctaggcgaagtagggccgtcctgagcgaaagaaccgcccccagcaggagcaccaccacggcttagcaaagaatcccagaccccgcccgggaaggcagc

SEQ ID NO: 227998 - DNA, 34 bp, Homo sapiens
  chr1:231473772-231473806
  hyper
cgcatgaaccgagcgtgacgttgaggtttgaaat

SEQ ID NO: 227999 - DNA, 91 bp, Homo sapiens; identical to SEQ ID NO: 198013
  chr1:231664200-231664291
  hyper

SEQ ID NO: 228000 - DNA, 102 bp, Homo sapiens
  chr1:231762650-231762752
  hyper
ccggcggcggcggcgtgagccaccgcgcaggtaggggagctgccacagagtcctagcacgtcctgggggggtcctggcaaggagggcgcgctctggccccca

SEQ ID NO: 228001 - DNA, 108 bp, Homo sapiens
  chr1:231763012-231763120
  hyper
tggggtttggatccgtccccgtcctgggacacctgcgccgcctgcactctcgttgcggtgcgccccagcctgcgccccctcgggacaggggacgtcccgcccgcctta

SEQ ID NO: 228002 - DNA, 831 bp, Homo sapiens
  chr1:232765026-232765857
  hyper
taccctcactgacacgggaagacccggagaggcccaggagctggcaaagtgggaagaaaggtcgcggtgagtgagaagagcgctcgccggaggctcccggtcttacaaagagggatccgtcccggtgagggcgcgcgctccgggcgcaccccctctagaaggggaattagccccgcagcaagttcggcgtcagctggccaggcgcgccggggaagctgcgtcgggcaaccgcgagcccttccagagagcgttagtcagagcgaagttctgggcacctggagaagaccctcctcagtgcctgtgtcgccgagacgggaataacctttcagccgatcgataacttggagagaacaggcggcggcggctcctcttccagccggggatcgggagcgcgggcgcatctgcgtctacaagccggaccctgcgccgcgaccctcgcacccccgcgcccctcgcacccctcgccgccgtcagccccccaaagcgccccgaagggcatccccttccccttcgggacagtccccgcctggccgcaggcatcccgaaccgaccctcgccacgctgcccgtcggattccccgacacgaaccttcgcaacgccgtccgccggaacctgctacagcctgtgcgcgccgggcggcgcgtacccgggctgccgcctcgccgcccgccgctgcccggggctgcccatcggcccggactctccccgcgccgggctccggcggaggcggcccggacccgctggctgcggctggagctctcggcctgcgctcgggcggccggcgggggcgcggtgctcctcctccgtcctcctcctcctctcgctccgcca

SEQ ID NO: 228003 - DNA, 144 bp, Homo sapiens
  chr1:232766097-232766241
  hyper
cggacgcccttcttggggagggggctgcggggcgcatcatgagcggcgctgggcgagctcgagggccgggcagcctacctggaccccggcttctagagagccgtcgccgtccttgtcgagactcgctttcgcccctctgaggaa

SEQ ID NO: 228004 - DNA, 63 bp, Homo sapiens
  chr1:232766421-232766484
  hyper
cgcccaaacggccgcaagtcgaagtgatcccatctgaagaagacagcgcgaggaagcgagacc

SEQ ID NO: 228005 - DNA, 580 bp, Homo sapiens
  chr1:232941034-232941614
  hyper
aaaacccccaaagcagacaccgcccgagacccgctggagcgcttccgcaaatctcgcgagatagcaggcagcgatgccttttgctccggtttctcgtgagaccccggggcttcagcttctcgtttgcggagcccgcggcggcgtttcctggggcaacagcaatggcggcctcgctgtccgagcggctcttctcgctggagctgctggtggactgggtgcgtttggaagcccggctgctgccgtcccccgctgccgcagtggagcaggaggaggaagaggaggaaaaggagcagggggaggcctcgtcgccgcgcggtctgtgccccgccgtggccttccgcctgctggacttccccacgctgttggtttaccctcctgacggccccggcgctcccgccgccgaaccgtggcccggtgtcatccgcttcggtcgcggcaagtcctgcctcttccgcctgcagcctgctaccctgcactgccggctcctgcggaccccgcttgccaccttgctgctgcagctgccccctgggcgcccgacgcccaccccacagctcctgggggcctgcgacatttcgctggc

SEQ ID NO: 228006 - DNA, 277 bp, Homo sapiens
  chr1:233086110-233086387
  hyper
gtttaataactgacgttctcacgcacttatctctgcaaataccccacaaaagccctgaacccagaatgaaacttaagagaccgtacaacccgctccgcctataggaactgccgcggcacaggcgccaatgccgagggctgaatgcgcaggcgcggaccggggactcgggagaaggcgcatgcgtggtcttgagggcggtgcttccggtcaaagcaccgcttgggggcggggcctgcgacacgcggtgggcgggtcctgagtcgcgaccctggtccgg

SEQ ID NO: 228007 - DNA, 353 bp, Homo sapiens
  chr1:233749401-233749754
  hyper
acactacacgcgcgcgaacacacacacacacacacgcacacgccgcgcgcggtcagctagagtttggctactggacccaggaagggagggagcgggaggagctggtggctgtcgggtcggggtctgggcgccaccgagcgcccgccccacctctggagtgcgcagaaggcggtgcgtcccgggccccggcagcccagcccaggcgctctggccaagtttgcgcgcggtctccgctgactctcgggttacctgagccggcaaccacgtcagcgccacatcatctgggctttttatattgcaaggaaacaggaaaagaaggaagaaaaacatcgcccgagagagccaatcgcagg

SEQ ID NO: 228008 - DNA, 757 bp, Homo sapiens
  chr1:233749934-233750691
  hyper
cggcagctcgtgcgtgcgcctggtggagcggcaccgctcggcctggtgcttcggcttcctggtgctgggctacttgctctacctggtcttcggcgcagtggtcttctcctcggtggagctgccctatgaggacctgctgcgccaggagctgcgcaagctgaagcgacgcttcttggaggagcacgagtgcctgtctgagcagcagctggagcagttcctgggccgggtgctggaggccagcaactacggcgtgtcggtgctcagcaacgcctcgggcaactggaactgggacttcacctccgcgctcttcttcgccagcaccgtgctctccaccacaggtagggtatcctgcgcgccccctggccgccccggccacctcgcccacaacccacacaccccggccccggcgccccgggcccctctaaccctcccaccccaccccccacctttcgccatcccggctcctccagcccgcctcccctcactgtcctcccgaccctccgaccttccccttactggcgtccccggcctctgcctgggtgactcgggagggcaagccctgcggagccggaagccagagaggtgactccagacgtgacttggttgttgccgtccgtaactctggggaagtggtccctaacttcggcctgggtggctgcaggtgcttcctccccttgagttcttttttcgcaacccactaagccaaactgtcgggtttgaatgtgtagcagcacctggccgccgtgcggcaaggcag

SEQ ID NO: 228009 - DNA, 190 bp, Homo sapiens
  chr1:234040258-234040448
  hyper
ggagcggcagggtttgagtcaaaagagaagggtggaggagcgcgtccggtgccccaaggcttccaggcggagcgcgggcgcgaggtgcgggctccggggcggagcgcacgcccgggaggcgggaagtgggcagcagcgcccccgcctggcccctgtgcgccccgacccgacgcctccccgcccgaccagg

SEQ ID NO: 228010 - DNA, 160 bp, Homo sapiens
  chr1:234040628-234040788
  hyper
cgtgccgcacgccgcggaggcgctcgggtacagaccgcgcgggcgcgcacaaagcggcccggggcggccggcgcggcgcagaccctcggtgggcagcgcactccagtcttcccaggctagcggctgcagggagctccggcccgcggcccctccgcctcaa

SEQ ID NO: 228011 - DNA, 265 bp, Homo sapiens
  chr1:234041268-234041533
  hyper
ccgcagtggcatgaggaggtcaccggacgtcagcccccggagactgtccgacatcagcccccagctccggcagctcaagtacttggtggtggacgaggcgattaaggaggatctgaaatggtcgcgctccgtggaggatctcaccagcgggccggtggggctcacgtccatcgaggagcggatcctgcgcatcactggctactatggctaccagccctgggcagcgagctgcaaaagtaagaccccctcacgtcatgtttcccgt

SEQ ID NO: 228012 - DNA, 627 bp, Homo sapiens
  chr1:234349864-234350491
  hyper
gaagacagggatgagggctgcggggctgggcgtcccggggaggagggcggagcaggtgagctgcggggtgggagcagggagtgcacttgtacgtgacgttggagtttgcagcaacctccaagtaggaggctgtgcgcgcgtgtgtgtggagtggctgcgcggccggggaggatgtgcgctgcagggcggccgccgcagtgagcaacgcggcaaccggagcccggcgggcagccggggaggccgggactgagaggggcgagccgctggtgctccccggcggcagagggccgcgtcggccacgggcccgggagagacgcgctccagccggccccaggatgtaggcgatcggcggcagcgctcctgcaggcggccggctcatcatgaagaagcactcggcccgggtggccccgctcagcgcctgcaacagtccggtcctgacccttaccaaagtggaaggtaatgcgcggccgcctcgccccgggggtccctgcaccctagccggggaatgctgccaccctgaggggggctgtctggctgcggggcgccggggctgggggtactgctcccccaggacgcggctccgcagtgcagagcgccgccgcctgcgtggggggatctggcagcttc

SEQ ID NO: 228013 - DNA, 516 bp, Homo sapiens
  chr1:234508999-234509515
  hyper
ctctgtaacactccgtccagctctcgcactctcagatgcaaacttccacacaaactcctcggctcgccttgtcccgcgggactagcatatcaagccttccgggacacaccgtgcgatgatatatacgtatatacccctcttgcccttgaaggccggaagtcggtcttacagataaaagcgaaacaggaagtcccgcccctctatggaaagtaaatggtagctcggaagggtcaaaagagtccgcggtttcgccgcgtgagttgctttttgcggctggggaggtctacgcttctagagcttgagccagcggggcgaccctgcagtggcaggactcggcaccgcgccctccaccgccggttggtggcctgcgtgacagtttcctcccgtcgacatcgaaaggaagccggacgtgggcgggcagagaggtcggcttgctgatgggtccgggtggggcgcgcgtggactatgggcccgggaggtcccttactgtccccgagccgcgggttcctcttgtgc

SEQ ID NO: 228014 - DNA, 40 bp, Homo sapiens
  chr1:234736239-234736279
  hyper
ccattctgaacaacgatacaaagtgaaaaaataaattttt

SEQ ID NO: 228015 - DNA, 138 bp, Homo sapiens
  chr1:234743048-234743186
  hyper
caagggaagcagaacttgtgcgaagggacggacgggcactgcacaaaatgggtgtcctccagccgctcgtggcagagggtgcagcacagcggggcactggttgccagagaggagtccgggaggctggcagggtgcact

SEQ ID NO: 228016 - DNA, 211 bp, Homo sapiens
  chr1:234744132-234744343
  hyper
ttcctctgctctccgtccccttttctcccctagaccccctcacttcacagccgcccctacctgctttagacccgttggccccgttggcctcgaaacccaacaacctgcctgcagtcagggccggctccttcttaaacttgctctcgaagggccccgagtggccgtgctggtgcagcgccagcagcgtgtcgcgcacggtcttgggcctgtt

SEQ ID NO: 228017 - DNA, 190 bp, Homo sapiens
  chr1:234812047-234812237
  hyper
gctggaaattgcttcggggagagggtagagtggtgactggtgggaataaaggattctggatgggaagccccggaggaagccactgaccgcagtgcatgctgggggttgtagttctcgtgtactccacgggtaaacaagtcagagaagcaggcagaggaaccaactcagtaaaacccgagctatgtgagat

SEQ ID NO: 228018 - DNA, 195 bp, Homo sapiens
  chr1:235257187-235257382
  hyper
aaatgtttgttgagcgaacagaagagcgaatgatgcacacgaatatggaggtctactaatatgtgcttaaggaattaaaccggtgatgatagagatgaaagaggcgggtaggtcatcgcagtgcctgcggtaggcactagatggcgcccaagcacaccaagaaggcgctgagaggcgggccgagcagcatgagtt

SEQ ID NO: 228019 - DNA, 284 bp, Homo sapiens
  chr1:235292117-235292401
  hyper
cacacccgacggccgcgggccaggaacacagaaaggccgagcacacgccacttccggtcccagtcaactaagggcctcgaggtcgtccgcggcagagcctgagcagaggcccagagcgcggctcctgcgcctgcgcagtgggcgaagccggcgtttcccctgcgccgctgggtgtacgcactggagtcgggaatttgcacgtgaccacggactttttttcatatccgccgaccatgctgtaacgaggcgtacgcgttactggcgtgcacgtactcagaagacta

SEQ ID NO: 228020 - DNA, 110 bp, Homo sapiens
  chr1:235491613-235491723
  hyper
gttctttagaacccgcctatacactgttcctattggtccctggatacaaacaacgacgccattttcccaccagttctatggaaacagaaagttacgcctcaaggctttct

SEQ ID NO: 228021 - DNA, 344 bp, Homo sapiens
  chr1:235530666-235531010
  hyper
tcgctgacattctcgtctatgctccagcagccgtacctcactccggtggaggcgggacttcctacagcacttccggccagagcctcaagcttcgctgctgggcagttggctggaggggctgctgctgggaacacctggagtctccgcgggcaggtgagcttcagaggttcggggagctttcggaacgagcattcctggccggtgcgtcaccctgcagtgctcttggccttttcttcctttcctggaatcttcccagattgccagagccgggcgttgcctgctccgtgcgctgggaggcggtccagccggctgggttggggccaccctgcgcctcctggaaggcc

SEQ ID NO: 228022 - DNA, 188 bp, Homo sapiens
  chr1:235667334-235667522
  hyper
ttggcccttcccccgcctccaacaattcccggcgaagccccgcggcaccaagccgggcctcccacccccccggcggccgccaacccgcccggccccaggacctcacctgcagggccggccccggaggcgcaggcgggcggcggggagcgcagccgcagccagaggtgcagcgcggccccgagcacaca

SEQ ID NO: 228023 - DNA, 64 bp, Homo sapiens; identical to SEQ ID NO: 198024
  chr1:235667932-235667996
  hyper

SEQ ID NO: 228024 - DNA, 785 bp, Homo sapiens
  chr1:235811920-235812705
  hyper
tccactgtgggaagcggcacacctcactcatgagcagacgacaggactggcacgttttaatggagcacacgggcgcagcctaggcggccttttgctccggctgagaggcacgggcccggtgccagcatttgacagtcctgggaggcgacgggtagaggagagacgcggcagccgcggggccggggagacggtgggaggcccggcgtccatcatccactttattacttgatcaaactttaacattttcgggtttcctaacaccttagccccaaatactcgaaatgaagcaaatcttaaattaaggagtctttccccaccacgctctgtcctcctccccacttcaccctcccgccgtttcgcgttatttccaaggcaatttaaaaaatcaagccaaacaaagctccccggttgctgccgggcgcgcgcggcgaacgaagcacatttcagttcagcaccagcctcggggacagacgccatcaaggaggtgaggaaaaccaccctcagctgcggtggctccagcgtcaccccgagtgctcccgaggcggcgtctgggctgctggggagccaggagggcttcctcaggcactcgccagaaacatttccccaaagaaaacgcccaaccagccacgccatctcctgccactgaggtccttttccacgggggacgtccccgctgggaaaacagcaaacgctctgtgacctacaaatggaagaggggacccccgagcccccgcctgcctcatgccggagggaccgggcgcccccagccccggaagcccctggac

SEQ ID NO: 228025 - DNA, 151 bp, Homo sapiens
  chr1:235813916-235814067
  hyper
gggaccaggggccggcgaggcccccactccggggggagcgaggccgggagggcggagggcgcgtgctggaggcgggggtgcccttcgcgccccggttctaggagcgactgctctccaggcctcgtccctgtggcaccgcaggcttttgcgc

SEQ ID NO: 228026 - DNA, 1249 bp, Homo sapiens
  chr1:236227506-236228755
  hyper
ctggtcccgctcctcgtttggggcctccgtggtgacaatgcctggccacaggaaatgggatcactgggagccctgtgtttcccgctctggactctggactctgaaacgagcccaactggaaagcagcatcactgccaagacacatccggagtccacacacaaatacaggaggctgccggcgaaactctcccgcagccacaagagtcccggggcccgcgcgcagactgcgatccagctccggctcttgccctgcggaggctccgcgcgagaacctggctccacccgggaccggccaggtcctagccccgaagggactggacagccgagggacgcggactgacctccctgcggcgatgcagcccacagccgccggggaggaagctccgcggggtccatgggtgccggggtcacggcccggggcgcgcggagccacccagaccccgcgacccgctcttcggatagcagggaccgggtcgggaagaccttcgcggaccctgcagaggcgggagaccctgcgccgtgcccggtgccccggcggccagcgggtccgggtccccgcctgctacgcccaagtccgtccggctccacgggcgcccccggcccgccgcgccctgcagcccctcgcccgccctcccggggctcactcacgtagactgcgtcgatgtcggatctgtcgtagaagcggagcgccccactcagctccagggcaggagagacgaagtcatccccgtcctccagctccaggtccccctgtccggggccgaagggaaagagctcctggcggctcaggcagcccacaggccccgccagcagcagcggcagcagcagcgcccgcgtccacgcagcccggatccggctgctcgaggccaacatgttcccgaactgcggtcccgcaaacccggtcccgcggccaggacagaggaaggcggggatgtaaccggacgcccctggcagccccctctcctcccgcctcccggcgttcccaccccgggaaataggggaggggagcggaggggagagcggagggccccgccccgtccagcgggcgcgccgcggggcagcccaatggccgcgagggggagggcgaggggcgaagccgaacctcccgccttgggcgccggtgcctgcgattctcgaaaccagcccgactcccagcgaacggcgcctccgggagggggagcagagcgcgggacccgcaccgtggtcctctgattagggttgggtcgtggagagccggcgacgtggaaac

SEQ ID NO: 228027 - DNA, 45 bp, Homo sapiens; identical to SEQ ID NO: 198027
  chr1:236305443-236305488
  hyper

SEQ ID NO: 228028 - DNA, 85 bp, Homo sapiens
  chr1:236305805-236305890
  hyper
aatcatgtggtgccgggggaggaagtgcggcttgttttctttcctccagtctcggggctgcaggctgagcgcgatgcgcggagac

SEQ ID NO: 228029 - DNA, 41 bp, Homo sapiens
  chr1:236444198-236444239
  hyper
acctctctgaaggcgaaaggatctggtcagctaagcctcag

SEQ ID NO: 228030 - DNA, 79 bp, Homo sapiens
  chr1:236445121-236445200
  hyper
ggggccggggaacgacgggcggcccaggcgacgacccaaggggacggttcccagcggccgagcgactccagggtcagag

SEQ ID NO: 228031 - DNA, 71 bp, Homo sapiens
  chr1:236445500-236445571
  hyper
gcgggcctccaaaacaccggggggtgcgggcgggggaagcggggcgacctcttctccgggaaaccaggctg

SEQ ID NO: 228032 - DNA, 203 bp, Homo sapiens
  chr1:238027725-238027928
  hyper
gcctccaagcgccacgtgggggcgctgcctcaccactgcctgacctgcgcacgtgtccgggagagcgctgacctccgggccaaggccactgtgtactggccatttgccaaagcggagctggcctccgcgcggttcccaattaaccaaagccacgtggatttgtcatcagagcgttcaagtgacacggccgggccctgcgcgtg

SEQ ID NO: 228033 - DNA, 2053 bp, Homo sapiens
  chr1:239549364-239551417
  hyper
gggaaaagtcaagtcgtcctctattacactgctctgcagaaacagactcactaaatgtcaaaaagtagatgcatcagactgttccttagagaaaggtttgccatggagtcgtatattgtaactgagctgaagttcactcatcgataagttgtgcccaaggaatcgaattccttccagtccttctaagcagtccagggaaaccaatttaaaagcgaacacaacaaaactaacagaccggcaaaatctatctttgaagcgccgcgggaggcacaatttgggaacaggtgaggccatgctgggtgggtgaggcccccctctctcctgcttggtgttccgctttcagccaacccaccccaggagtaccctgggatctcctcgccccctgccaggcggagaacgcggagcccagcgggcacgcgggaatggagctaggcgccggcagggcaactgggcatgctcagaagccgggcaggttttggtctcaagcacgcagcctgtgcattacaccagctctctcagtccggggaggaggaggagcaggaggaacgcgaggaggaaggagaggaggagcggccagcagtagccacgaccgccaccaccaggcagaggaagagttcgtggggaggaaaagacctctcctcccccttggagcgccttctctctgcttttggagaaagggaatacacgataaagaaggagacggaaagaagagaaaaagtgaggcgggagacagagggaaaagggcgtgaacagaaagggccggagcgtgcaggggagcacagggcgcgggggcggcactgccgagccgggagcgctgccgcttgggcaggtgccgcggccgctgcccggaggcggcatgtgacgcgcggccgcagctgcccgcgggcggagcgctctcagaccccggagcgcacaccgcggggccatcggtgccatcgcggatctccaggctcctcatcagtccgccggggccgcagcagcgcttctgggaagacgggcgatgaactgaagggcggctccgggcaggggggcacgatcttaaggacagtcgctccctgaacgcggagccggaggagacgaagggaaggtggagcggacgccacccgcgcaccgggcaggcgcggagaccggcgtgggacagccacctggagcgcagctgccaggtagggacggcgcccgccacccaggcgctgggcagagcgggtggcggtagcggctgacctggtttcttgccttatctcgttgcgaaaggaggaaaaagttttcggcgcgggtaggagaggtcttgtgtttggagtccaaagaaggggctgggtagggacgagagaggctgttgatttggggaagatgggggcacttgaattccgacagcgcgatctggtgcggagttggagttctgggactgagggtggggaacgcccgctggcactcaagtgccccgaaagggacgggaatcatgcgagcggtggccgggagagagtcggggacgtcccaccccgctctccctcgcttcgattctctcttcgccactgccggatctgaggctccaaagtgcccgagcatgaggagctactgggctccgggtgtgtttgtgagcgcactcgtgtgttgagcgtttgtctcccatctccccatttggtttcctgtcatttctaagaaggctaaagctggcacccgccaacctcgcagtggggccgcaagttcggattgcatttcagggggcgagaaggcaaatttggcacttcgagtaacacttgggcgaaggtacctagcctagtgcgcatctttactgacccggggagagtctgcactcgcgaggcagcggccgctggactgcaccggttctcctctttggaacacttcctcagcatagcctcctaatagcgaggttaatttttgcgtgtttttaaacggcgggggcgggcggacagttgactccagcagcagaattcacttgtctacttcgcggtgtgcgtgctggaattgagatcctgttctgcatgcttgtgcgtgtgtccgactctccttgcacgcatttggaagtggtagaggc

SEQ ID NO: 228034 - DNA, 470 bp, Homo sapiens
  chr1:240161046-240161516
  hyper
ccccgcgacacccgcgatcgccccccaggactggcggccccgggccccgctcccacccacccacctacgcagggggcgtcctgctcaggcaattcctcccgcgcgccccgtcggggaccgggcggggacgggagaaggaaaagggcccctggctccgggaccagggctccggagggtgccgggcggggagcggaacagggaacgggctggtggcggccccaagcgggagggacggaccgacacgcggccccctggcggccttgcgactcgccgacctgcggaacctcgtcgccgccctcacagccccgcggccaccgccgacccgggccggtccccggggcgtcgcgggtgttaaagggcgagtctacgcggatgtcacggtcgccgcgggcaaggaccgcgaggttgcggccctgctccgaatcccggctgcgctggccacgctcctccacgcgcggggcggccgctcc

SEQ ID NO: 228035 - DNA, 1168 bp, Homo sapiens
  chr1:240255836-240257004
  hyper
gtccagggggtcctgggcctgccgaggctagggtcgggggccggccgatcgccgaggatgtggaaactgcagcaggggcgcaggatggacaaaggaccagctcgggctcggacacggacatctatagcttccattcggctacggagcaagaggatttgctttcagacatccagcaggcgatccgcctgcagcagcagcagcagcagcagctccagctccagctccagcaacagcagcagcagcagcagctccagggcgccgaggagcctgcagcgccccccactgccgtctcccctcagcccggggccttcctgggcctggaccggttcctgctggggccgagcggcggggctggggaggccccgggcagtccggacaccgagcaggcgctgtccgcgctctccgacctgcccgagagcctggccgccgagccccgggagccccagcaaccgccgtcccccggcggcctcccggtctccgaggcgcccagtctcccggcagcgcaacccgcggccaaagactcgccctcctccacggctttcccatttcccgaggccgggccgggggaggaagcggccggagcccccgtgcgaggggctggggacacggatgaggagggtgaggaggatgcttttgaggatgcgccccggggctctccgggggaggagtgggccccggaggtgggagaggacgccccgcagaggctgggggaagagccggaggaggaggcgcaaggacctgacgcccccgcggccgcttccctgcccggcagccccgcgcctagccagcgctgtttcaagccctacccgctcatcaccccctgctacatcaagaccaccacccggcagctcagctcgcccaatcactccccgtctcagtcccctaatcagagccccaggatcaagaggcggccggaaccctccctgagccgagggtccagaactgccctggcctccgtagccgccccggccaagaagcaccgggccgacggcggccttgcggccggcctgagccgctcggctgactggacggaggagctaggcgcccgcacgccccgggtgggaggctccgcgcacctgctggagcgcggggtggcgagtgacagcggcggtggggtgtccccagcactggccgccaaggcgtctggggcccccgcggctgcggatgg

SEQ ID NO: 228036 - DNA, 454 bp, Homo sapiens
  chr1:240775035-240775489
  hyper
acccggggtgaaaccggcgagacgtccactcagggctttcggtcctgaccagccacggaacaaacaacgtcaattcattctaagtgcctggtgaaggtagaaatcagaaaccgtgtctgtgtcacgttagtcgtgacaagctgcgtacctgcaatgacgtgatggaagcctcctcctcgggtcccttctctctctctctctccctctccctctgccttctctgagttctctagtccacagcggggtctaagtttggtctcccgccgccgctttcagttcgaccgcagccagactgcagcagacgcccataagagaagcgcgccggctgagggtgcaggagaggcgagagcgcgccccgcgccgcgcggtcccaggctggctgctcctgcagatgtgaaaggagcccggagacttagctctgaatcctctcggcgctgcatggggatattatcag

SEQ ID NO: 228037 - DNA, 486 bp, Homo sapiens
  chr1:241519638-241520124
  hyper
ctctctattcccccgggtctcccacacagagccggagtatatgcttcgcctactttcacctgcctgcgctgccagccaccggctgctctcctttctccccacttcgcttcggaagtccggaggtaatcctgcctaatttttgcaagaagacaccagaatatgtcccggcaacaagaactagtgggaggtcaagccttcaggccattttacccgggtcaccgtgggtaaaagcctaactgcagaagcctccagagcaaccagccaaagaggagaaaacaggcaagcccctgctccccttgctcgctctcacggcagcagcaaatggcaggcgagcctgtgccccgcgccgcggcggccgccggagccgggcagcagtttcagcaccgtggaccgcggggtgcgcgcggcgcccgtagcccagccccggcgcggggctcccgggggcggccgccctgcgcccgcggacgctcccgctgcgcagagcga

SEQ ID NO: 228038 - DNA, 42 bp, Homo sapiens
  chr1:241520844-241520886
  hyper
tagtgaatggatggacagatggacggacggatgcacggatga

SEQ ID NO: 228039 - DNA, 372 bp, Homo sapiens
  chr1:241587078-241587450
  hyper
atgactgggtcatattgatacggcagcagcaggcagtcctgagcggccgctgccatcgcgccggctgcagcggaaaggtacaagcggtggcggcaggagccgctgtgggagcagcagtggcggcagtgggagccctgtgccacgcgtcccctgtgcgccgtgtccccaaggcagctgactacacctcccccaccctcctgcagcagggtggatcccacctagcgggactccccacccacccctccaggccttctccactccggactctggccacttgccaccgttgtcgcccgccgccgctgcagggagggtgcacggagggagcagaccgtctccggagcccgccgccctgggggctgcagtgatggggcc

SEQ ID NO: 228040 - DNA, 306 bp, Homo sapiens
  chr1:241682870-241683176
  hyper
ggatggcggcctgcgctcaccattcgagccgcgttcggaggccaaaacgagggcacggccgcgccacccaagccgggagccgaagctaaggctgcggctggagcccgcacgaggggacgcgagcgcgcgaggagccgaagtgctcggtacatggtgctgagggagcttgggtagaatttctgggcggctgtggccacgcctccacgccggttgtcagaaaccgttccgcccaccggcctccgctcttatccaatcaacagcctcacaccgacaggtggggcaggaccaatcgtgaatgaccagtaa

SEQ ID NO: 228041 - DNA, 185 bp, Homo sapiens
  chr1:242011573-242011758
  hyper
agtgagttaggggcgtcggagcgggtttctccaaccgcaatcggctccgctcaaggggaggaggagagtcccttctcggaaggtgagaggagcgggctgtgcggaggctaatgggtgggttcccttgggggtcgacctgcgcgtcacctccgaccctcctctcgggattcgggtcttccaggaag

SEQ ID NO: 228042 - DNA, 132 bp, Homo sapiens
  chr1:242161791-242161923
  hyper
cggggcacgctctgcgccacctaccggatgatgctgaggaactgggtcatggtcagctcctgcgggaccaggaacttggttttgtccagcgggggcaggaacgtctccctggggtagcgctccactaccacc

SEQ ID NO: 228043 - DNA, 775 bp, Homo sapiens
  chr1:242686695-242687470
  hyper
ccaattcacttcgcgtgaagtcggcactccttgggagtagaggtcccctctcaccggctcccaccctccagaggggaggatttctggggagcccgacgatccgctcgcttttagcctttctccttgcaacgcgcaaatctctccctagttgggctcaagtagagaggatcaccaactgctcatcccagcggacactctgcaaaaaactctaatggcttgtgcgcgggtccacgctggtcgctagcggcgccaactttactcattcgttaatttgctagtttttggactgagtaaaacagcccccaaagacgcgggcaaacgccgctctaaagcccactaccatgcaacgccaggttgctcggagccacgctggtggcacttccccttcgtgctcactctgcacaggcacctccagaaccccgtgcaaatgaaccctaccgggagacgcaggtgggcaggtcgggtcggcagggaccaagagcctgaaagggaacctgccctcccctccccgcagcccggtcattaaggcaagaaactgcaggcagagaagcccccgaatccgacctaggacgtcggcgcctgccaggatcccctcgcctgccccccgcgccccgcgcgcgctcatgccaccaccacggggagggtgcatgcggcaggtgcctggccgaggcccccgggagcgagtcgcccttacgtgctccagcttgtctttcctccgaagccagacgctggcgctgtagtcctgctgcttgacgctgctgtagaagttcgcgcc

SEQ ID NO: 228044 - DNA, 354 bp, Homo sapiens
  chr1:242688370-242688724
  hyper
cgcttgggctgcgccttcccccattctgaaagttcactaacttcccaccccaagggacttagagcagagggtgcccagcattcccccctgaaaatagccgagagacatgtgttttctggagccgtacacgctactttcatccgatggtgtggcgatgcaaatacgcccgggggcagtagcccctcgggcaggcacgcgggaccggttgctccccagccctcggtgtccacctagaaccgggctccccgggccgcacccattccgatcctgggagggtgatccagggctcctctgcaacgctccgcttgtgcggtgactgttccttaggtggacgtggcccaactgctgtgcatt

SEQ ID NO: 228045 - DNA, 658 bp, Homo sapiens
  chr1:243646220-243646878
  hyper
gggcgtgtgtggttcgcaggctgtggggggcttcttgcagcgggggctgctgcctaaacagactccgcgggccccatgatggcaaaccccctcgccccgttcatgacttaatgcctcctagaagaaaaggctaaaaacaagacacacagaacaagaaattgcactctctcaaaacgacagtcgccctgaaacggacgctggaagaggtttccaggcccgtggcgacggtgaggggggtgaaggtcgcaggtggagggcacggggcggcggctgcggagcccggggaggaggcggcgggcgcccgggtcttcctcggagcgcgccccctgggctgggcggcgtgtccctgcctcccgccggcgccctcgtccccgcagcagcgtccccgccgccaccccgctgcctcgtcgcctttctcgcaaacagcggtgccctctacgtgggggatcctggaggctgctgagcacgagcgccctccgcgacccgcccctgctcccgcctccactcttgcctcggggggagggtctcagtcttctgcctaaggcgccctcctcccttgggaagtccgccgtcctctgccgtgaagattgcccctctctcctccagtgcctcctccccagcggcttcggtggctcccaccctccgcaccccgtctcgc

SEQ ID NO: 228046 - DNA, 93 bp, Homo sapiens
  chr1:244012646-244012739
  hyper
taaaaacacagacaagcacgttacccacctcccacacacacacccccccccccaccccaccagtgccgtcttttcctgcgcgccagtggcggg

SEQ ID NO: 228047 - DNA, 999 bp, Homo sapiens
  chr1:244013707-244014706
  hyper
atcaccagaaaacaccgctcgggcgggggccgggtcacgccggcggggcggcggctctgggccccggggcgcgcccggcgcggggaggggttctgcggcctcctcccgggctgcgcctcgctgaggggaccccccgccgcctccccgccccctccttcctcccgctcggggccgccgccgatcggttctcgccgtcgccgcggggcttgttgttgactttgaggaaaactcctgacgtcaggggctggctctcggcgactggcgggagcggcttccccgcgtccccggccctgcccgccgcctctgctcccctccctgcccggccctcgtcctcaggcttccccgcgcccccaaaccagcggtgccccgcgccccctctcctctcgcgagaacatccccctagccagccagagccgggagcgggggcagtcgctcccgggcgggaagttctgggtttccccctcgcccgcgtggcccttggcgggcacccgaggcccgggagcggaggctcctcgcccagccgcttcctcggcgcatccgcccacccgccctggccgcggacgcgcgcgccgccaggccccgggcgtctcctccagtccgccgcggccccttggggagatgggcccggcgcgagggctcgcacctggaagcccacgaagtgggcggtgcccaatgaggtagggaccggagagcgcggagcagtccagaagccgaccccaccccctgcacctcggggaagagggaacccgggtcagcccgtagcaagaatcattcctgactatcccaggagaccacggcagaccaaaaacacctctctgaacagccttccgcaccgctcgctgcaagcattcgtccacacacggtacacagattgcgggcggatcgtaattcactcttgaaatcacaccctttttagggatattcgttttcaatgactttgggaaagccacgaggtactacatttactacgaagagaccgtttctttattttgaagtcag

SEQ ID NO: 228048 - DNA, 96 bp, Homo sapiens
  chr1:244211309-244211405
  hyper
tacctgcgtaactcgcagcagccaagccccactacgttcaaaagtgtgtttgtggttgtcacagtgcacaccgaaaagctcgctccgcacccgcag

SEQ ID NO: 228049 - DNA, 65 bp, Homo sapiens
  chr1:244615535-244615600
  hyper
aggcgcggaagcgcgtgtggagcgtcggactacaaatcccagcatgcaacgctctgggctgcggc

SEQ ID NO: 228050 - DNA, 56 bp, Homo sapiens
  chr1:244893748-244893804
  hyper
cctcgtggctgaccggcggcggggctggcgcgcgggggcggcctgcgcgggccgcc

SEQ ID NO: 228051 - DNA, 150 bp, Homo sapiens
  chr1:244998150-244998300
  hyper
ggcatttttccttcggggacgccggaagacttcgccacacgcgcgccctctccgcggacaccaacgtgctgacgcatgttcattagcgagctgctccctccattttgtccccagtctcctttaggcgaactgcgcggttctatgttaaag

SEQ ID NO: 228052 - DNA, 95 bp, Homo sapiens
  chr1:245028045-245028140
  hyper
aggaaaaggaaaccgcctttcagttcaaccgactcactgcatgatatattggcctttctgggtctttggtggctatactcgtttggcttttctcc

SEQ ID NO: 228053 - DNA, 197 bp, Homo sapiens
  chr1:245134410-245134607
  hyper
tggaggtcacagccgctgcctccgagcttcccggtcctccgaaatgcctgccccgccgccggctagcgccgcgcaattggcctagtgtcttgtcttaaaaaaaaaaaaagacacacacccaaacagcaattttaataacgacgaaaaaccaaaacctggttgagatcttggaaccgctgtgcgccggccgggcctct

SEQ ID NO: 228054 - DNA, 122 bp, Homo sapiens
  chr1:245474020-245474142
  hyper
tgtgcaggcagcagcagcaacgcgggacgatggggagagagcccaggggagggaggatgcctgcagaagcggctgtgatgtgtgggaagccccgctgggccggcactgtggaaaggtgacct

SEQ ID NO: 228055 - DNA, 60 bp, Homo sapiens
  chr1:246730174-246730234
  hyper
tattgctgcgcgtcgcgccaatttctccctccctaggggactagcgccagaagtcgttcc

SEQ ID NO: 228056 - DNA, 580 bp, Homo sapiens
  chr1:246887641-246888221
  hyper
cgccgggtactggggtcgctgcctgaggcgcaggcgccgtggactccacccgccccggggcctgggctcgctgtggactcgtcatggcgaccgagcagaggcctttccacctggtggtgttcggcgcgtctggcttcaccggccagttcgtgaccgaggaggtggcccgggagcaggtggacccggagcggagctcccgcctgccctgggccgtggcgggccgctcccgggagaagctgcagcgggtgctggagaaggcggccctgaagctgggtacagcggcggggcgggacggggctgcgcgggcggctgggccggggaccccgcatcgccccaaacgagcgtttctcccgcagggatgcgccctacgtgtccccgagccctgcgtgaggacaagaagaggagagggagagatgtttcaaatactgccatagctttgtcccacctccttaactatatgtgtgtgtgcgcgtgcgtgtataatatacacacacatttttttttctttccttctcctctttcccgctttttgcatttctgcctcagtttggggagctcccctggcgaaatggtcaagaac

SEQ ID NO: 228057 - DNA, 266 bp, Homo sapiens
  chr1:247171238-247171504
  hyper
tccctataaatctcgcaatacctgcaggccacagggcgatggagcctgcggcagtcacccgggactctccgagaggcagcagacgggaacccagcaccccgccggccgcaaggagacaaaggccccgccagatccccaaggccgccccttcctctctggctgcacgcctgattggacagttctcacgctagcgccgctgactggatggggctccaggccccaccccctcaggtcttgagtgacaggaggtgcgatcagacactggg

SEQ ID NO: 228058 - DNA, 329 bp, Homo sapiens; identical to SEQ ID NO: 198044
  chr1:247241959-247242288
  hyper

SEQ ID NO: 228059 - DNA, 837 bp, Homo sapiens
  chr1:247267050-247267887
  hyper
cctggtttatgaatcgccgtttgctcaaacacacggtttaacgttttaacaaagcctcggcttaattttaggggaagaaaggtgggactggaagccccatgaaccacagctcctcccatgctggaaccccgcacaccgagacaccgagtcggggctctcccgcatcaccctcccgtggtcaccacactacctggataggggaggcgaggggttcccgacagggctccggccggcggaagtggcgcccgcaggtacagacaggatgcaggggttccgctgcccgccccgcccggcccggccctgaacagaagaggactgagccccggctacgccacggcgactcggtccgcaggttccggagccgatggcgtggaggcccgagtcgcgccacagcaggtttcaaccagccctcttctccacttcgggaagccaggcgcagtccactcaccattcctcggcttcccgggtgtcctggcgtcagctagggatgtcccaatactcgcaggtcacagggtggcagaggctgctgcagagccacctgggcctcccagagccaagaactagcagcggagactaacaggaagagccggctccggcgaaggagagacaaagcaaccgccaggcagatcccggaagccgccctctcctttccggcggcgcgcctgattgaacggtccccaccccagcgcccctgattggatggggcttcaggccccgcccctcaggccctgagtgacaggagattgcgatctcacgtgaggctggatgaggtcagaatgaccgcttttggcctagcggtttgtaggcggtgcgtccttcctgcgctgggatccgacc

SEQ ID NO: 228060 - DNA, 82 bp, Homo sapiens
  chr1:247274377-247274459
  hyper
tggtcccctggacccgccggttaaactgtgattctctttctaaatcctttgtctgcgccggactcggggtacccgccgggtg

SEQ ID NO: 228061 - DNA, 1161 bp, Homo sapiens
  chr1:247274519-247275680
  hyper
cagtctccccagtggttgggattacaggcgtgagcccccgcgcccggccaaagggccccctaggaccggctgtctcccccgactacgcaccctcggcccccagcctcgcgccagacacggcgccgcagccccagcgcgcgggggtggagagagccgcggggcaggggcgccctgtgggtcccgcggtcacgccggatcgctcggccgcagtagtggggcccgggcgggcgcagggccgggctacggggaccggcaggcgcgcgaagggcccggggcgccgggaggactcgggttcacagtcgctcccgctccggaaagtttgcggcggctgccccgggagggacttcggcggggaggaggcggcggcgccaggtggccgaagtcggaggggtccgtccgctcccgcagcctaggagcgcgccctccccgccggtgccggggcccgtggtgggggtcgcacccaccgccgcttggccgggaccgtcttggctggcgccgccttggagctcgtaggcaccgcgcgcggtgcggggagcggccggggcggagggacccagcgagcccggggagggccggggtcctgcaggcggaggcgccggggagggtgtggggtcagggcccgcgcggcgctgcttctgctcccgaagactgcggtcggagctggcgcagcggagggtgcggctcccggagcgcgaggccgcagcggggagtgaccggaagtggcctctgcagccgcgtccctgggcccatgtcagggacggctctggctgaagcaggaggacggcgtttggagggtggggtgggcgcgtcctctcggcggcccgcgtggactgacagccaccactgcccccacgctgccctcgtgcccgcggttctaagaagtcgaatgccaggcggaggcgacggggcaaatggcccaggcttgggaggccgctggcggtccaggtcccgcaggatgtggaggattttcgaggagggcccaggggctggagggtgcacaggcccatcttgcacaggagccacggccccggccttagctgggcggagcaattccggtgccgccgccccttccccgcccggccatgctcgggctccaggcgggctgctgcagggggcctgatccggtggacgatcggctcctcaccccggcaagggccccca

SEQ ID NO: 228062 - DNA, 37 bp, Homo sapiens
  chr1:247494236-247494273
  hyper
cccatatgggggccgtggcggcgtcgggctggacgca

SEQ ID NO: 228063 - DNA, 131 bp, Homo sapiens
  chr1:247495198-247495329
  hyper
acacttcctgctccgctctaggactggggaggtctccgcatctcagtggttcgctcccccgccccccggccgaggtgtgcgctgggggtgacatccgacacccccggcccgccccgctccgcgcgcgcctg

SEQ ID NO: 228064 - DNA, 137 bp, Homo sapiens
  chr1:247536197-247536334
  hyper
ccaccagagggcgccgaggacagtacggacgccgtcagcgtctcggtcacatccttccgtgtccagctagaaaatgaatgggaaacccgggcactgaggctcacgcctgtaatccagcactgcagggggcgaggcgg

SEQ ID NO: 228065 - DNA, 34 bp, Homo sapiens
  chr1:248021322-248021356
  hyper
gtacgtctatatcgtaaacttgccataataattc

SEQ ID NO: 228066 - DNA, 205 bp, Homo sapiens
  chr1:248406538-248406743
  hyper
aacaatattttggacgtattagttttaacttaatttttggtgttgaagtttgggctgtaatccagtagatggcgcctaagagtaatgcccgtagagaggctcttgatcggccacttggctctttcgtgtttcctggcattcgcaggcacgctgtccggtgggggttgagagagatgcctccttaccaggacgactcctgagcctt

SEQ ID NO: 228067 - DNA, 375 bp, Homo sapiens
  chr1:249120445-249120820
  hyper
ctttacggagctgcggcggcggctgccggaaagccacttccggcctgctccacggaggcgggcgcgacgccgaaagtgagctggtaaacttccggcagtggctccgggggcaactcgagtccggacgctggcgggcttcgcgggcgaaggcaaagtcgatttccaaaagtgactttcctcactcccgtgaagtcggcggaaccctccactaacggcgtctgagcggacggctccgatgtgtaaatcccactcctcgaggcctctggaccttgcaccttgaacgacgttttggtggggtcaccaattgctccgtgaatactaaccaggaacttagtcaacattaactcagttaattcactcgtgcacccagggtca

SEQ ID NO: 228068 - DNA, 123 bp, Homo sapiens
  chr1:249167654-249167777
  hyper
acaaaagcatccattcgtcacttagtggcaagcgtttttccaactactttccgagtagtaactgcttgccagagtttccccagcttgggccggaaggtgaggcggtagctcgagctttgcctt

SEQ ID NO: 228069 - DNA, 1206 bp, Homo sapiens
  chr2:45390-46596
  hyper
cacagccccgcacacggccagccccgcccccagccttctgggcacacacctcgggtccggctctgctcctggctgggggtctccttggccttcttacaggtgtacagccacttgatgatgcgggcgttcctctcgatgaccgaagtggtgctgggcacctgctctatcagctcctcctcctgcagcccctcgtcgtcgccgccgctgtgccgggagaagccgctgccggaggtggcgacgctcacgctgcgcaccttgagggtcacacagtccgaccccgcggtgaagttctccctccccagggcctccaccacctcggggtccaggccgcagtactggaagaaggtgtcagactcggccaaggcagcggaatagcgggagctgaggtccgactgtgagcgctgcagcccccgacgcctcaccacccgcggctctggcccagggggcgcggccgggacactggagggcgccgcggaccgcgcggctggggctggggtctcggggattgcggggtccgccgcggggccaggagtggtcgggaccgtctccgggttcccggccttgccctcgtctcccgtccggggcaccggcgccttgtccttacccggcccctggaagagcttcttcaccaggcttgccctggggccgtcggcgcccgatcctcgcacgaattcgcatttctgccggtagatgatcagcgagtccggtctcaacggcttccgcgcaatagccctgcgcgccaccggggccggggcgcgggccgggggcccagggtcgttccccgggcacttgatcgcccccgggccgctgccctcggaagcgacgccccggccagtccccggccgaccccgcacatacttggcgcgatccgccgccagcctctccactgcgctcctgcgcgccggccgcgcggcgtcggggtcccgggtagccgcggggtcccggggaaggagccgctcgttcgggggcgcgctcagggccgccagggcgcgcatcttcgcggggaatggaccgaccggggttccgggtccagcggagacgcgctcgagtggtagagccagtcagtcccagggccggttccgaagtccgcgccgggtggggaacggcgccccagtgcccagctgcccaggcccggggttggggagaaccggagtctgcaccgattggcgaaactccccagttcccgcccctcccgacctcatcgcc

SEQ ID NO: 228070 - DNA, 541 bp, Homo sapiens; identical to SEQ ID NO: 198049
  chr2:46668-47209
  hyper

SEQ ID NO: 228071 - DNA, 311 bp, Homo sapiens
  chr2:263891-264202
  hyper
catcgccggttttcccgtcctcctcctcccaccaccgcccagctcttgagaggggagggtgctgccggacaggtgggtccccgggtactcactgctgcccgcccggccgcggcgccccgtcccgaggctgcccaggaagaggaaggcgcgctgccccgccccgcggacaaggaggccccagcgagggcgtacctgcggcaggtgacgaaggaggcggcgcaaaacacccgccgtgtacgtttcgcgggacaaaaaccacgcgcccgccgggccgcgctcaggccttcgccctcagggacttcggaaccgcc

SEQ ID NO: 228072 - DNA, 344 bp, Homo sapiens
  chr2:264740-265084
  hyper
cctgcaggtgacccgcggaccctccccgcccgtcctactaccgtcataggaccgcctccgcaggcgcactggagccgattgcgcaggcgtggctctcacacgcgctgccctgttggcgttggtgcgggactgcgcaggcgcgcggggcaagagggtggcagtgcgcctgcgccgcgtcggcgtgcggaacgccgcggtgtctcggcgcctctgcgcgcgggaagatggcggaacaggctaccaagtccgtgctgtttgtgtgtctgggtaagagggcgccgacttactcatgttctgacgtcctctggagagttggatcgggcttgtgcgctgtaggttgtgcc

SEQ ID NO: 228073 - DNA, 1413 bp, Homo sapiens
  chr2:287344-288757
  hyper
ggaaaccaccgacccgcgccgcagctcacgcgcgccagaaggagaccaggcgcttctccgccaggcctcatgcgcggacctattgctgctattttctttttcttaaaaaaaaaaaaaaaaaaaaaaggaatcctgctgttcagtggtcaaaattgatgtctctttttgaaacgtgtttctcaaagacaattctatttcccagcagccccggccctcgggcgcgctcggccccactcacccactcgctgctccggcgaaggccccagccccgccgcctccgcgcggcccagggcgcagtcccgcccgaggagctgcaggcccttgtgctccgccgagtggtgcttccgcagctcctggacgagttccaccaccagccgcagcagcgcctgtccgtccgccggctcccggggctccgcgcccccccggccgcgccccgccgcccccagcaccagcagcagccccaggaggagggggtgcccgggtccgcgcatcgtgcgctcggggccgcggggctgggagactccgacacgcgccgagagctgggctcgctgcgagagaaggggcgcggggggccggagagaaagtcagcgggggagggggacggagcgcggggcgggggaggggaggggaggcgggaggagccgctggcgctggacccggcccctcacctccgcggaccccgaggaacaagccggcaggtgagggagccgcggtctcctcgacgatcacgcccgaggtcccgcccacggggagcgaccgccgctggtgcggaaaggagcccccggaacccgcccgcccgccagcccggcccctcctaactttcgcccgaaaggccgcgtccgccgagcgcgctgcgcctggcgcgggcgcaactttctttcccctttggaagccgcgggtgccaggcagctccccggccgcgggcggacctcggaggggccgcgctcccgcgcctaccgctctccaagaaggcggcgccgcgcgccgggcccggcggccgcgctcaagtttccagcgtcgcctttgcgcggtggtcgccggcgagcgccgagtccccgaagcccacggaggaggccgggtgcggaccctcgcgctggccccggccgcgccacgtgctggaagcccctccacctcccggccatggcgccctcccgcacctgcccggcgccacccgggagccacctgcgcgtcgtggccgggccggttacctggagccgccggagtcgtcgccgtctgtgcgcacgtctgtccccgcgccccgagctgcgccactactccatgcccggcgggcggagcgcacgggacgcggggactcggccgctccgagcgctggacccacggccgacctggggtgcgccggctccgagtcccgcctcagacctcggggagcttcttatccccgcgcccgccgac

SEQ ID NO: 228074 - DNA, 1253 bp, Homo sapiens
  chr2:289132-290385
  hyper
ctttaccaggaactcggttctgtttttgtctaaatgtagatcttgggctattaaaaagggagctgcctgattgcttcgacatttaataagtcaattagagtccatccgttttggagggatccgctctccggacctcgaggggtctgccccgcccgagcccagtccccaggttcgggtccccaagccctggtccccgaggcggggcggccaggaggcaggagatgggcgggtgaggactctccacggcccccgaggtgcgcacagctgaccacccgaggaggggcaggacctgcaccccctccccagaccccctgcgagaggacgagcgaaggtccctccccggcaaggaccgcgccatctgcgcgctcctctgcgctggaccctcggcccgcgggtccctcgcgccccggcagggaacgcccgcaggagggcacttgcctcccggactcgtctttaagaaagtttggctctttggccgaagcccggcacatctgtgaaagttcagcaatttgcctcttttattttattcttgtaaaatgtattatcaatcagttgcgcactttcccattcgattggtgctttctgggcaagagctggacgtcttccaagtccgcgatctgtttgggaaaggtgttctgagtgcaatcagagaggcggagtgggcgagaattaaaggcctgcaccatgatcggggcagtcgcaggaccgcggcgggaaggtgctggcccaggcgcacgtgagcgcgggcggtgcgggcggaaggctccgcgccccgatcccccagctcccggagaggccccgtctgcgcccgtccccgcgtcctttctctcttcctgcacggggtctgtctcctcaggaggagaaagtgtccggcagagctgggcggggaggcagcgtggagagagaagatatgaaatgtgccggttccggaccccgccccacacccttgggatctgcgttctctccgctcccttgaaaaacagatggtttgatttcacagcgaggcttttctttttctttttgcaagctacatgactgaaatgtgaacatttctgctaaaatacactcaggaaaaagtaaaattttatgtcaaacagaccttaggcacataaaaggaggcatttttcgtttctctctttccccttcccatgtccaagaagacacttgagttccacgggcaagagcgacgcctggcgatggaaccggccctccccggccctgctcccggtcctgcttgccgggcccacctcgca

SEQ ID NO: 228075 - DNA, 749 bp, Homo sapiens
  chr2:467961-468710
  hyper
actcctgggcctgaaactcccgcgctgtgcattcagggccctcgtggctctcagaggcgcgtcccaggggcgcacactgcaccttgggctgggcagctccgccgggttgtggcgagcggatgagggaaggacgcagaaaccagggcggaggagccgcgaggggcaggacgaggctgcatgggccagcgagggggtcgacaccgagccagagtgagcgcggggcctggggcgcagagcccgcccagggagccgggagacgccgcgcaagctccccggacaaacgcaatgaccgaggacgcgcgggcgaggccgtccagggagccctggtccctcagctgcaccggactgagccgcgaccgctcagcacgcgctgcttataaatcaggggtgcgcttcccaagccccgggtgaggtcccctacgtcggcacagccttaggagctgcaaagcagcgcgcgcctccggggctcctgcgcgccccttgaaccccgcctcccgcatcctcctgcaacagcctggagctccctgtgcaggacgcagcggggggcggggggcggtcttaggaggctgcggggcgcactcccacctcctgcctccccgagacccccagcgccttctccagggtttagagcggaggtgaaggggcctcgtcctgcaccgccactgggcgcctgggctgttcatcatcggttaccgccgattcataggaactcctcaacacattggctcggaaatgtacagtcataggca

SEQ ID NO: 228076 - DNA, 239 bp, Homo sapiens; identical to SEQ ID NO: 198052
  chr2:677555-677794
  hyper

SEQ ID NO: 228077 - DNA, 224 bp, Homo sapiens
  chr2:945451-945675
  hyper
gcctccgcgatgggcgctcgtgcctgggtcgaaggactggggggcggaggatttggaaagggagaaaaatacgggctggcttctttttaaaaaatgtgggtagccttgcctgcccccgccgcactggaatttatcctaaacttactttcatttacattaaaacaagacgatttgagtctaccaaacccaatactgcatctgtgaggctccttttggcacaaacc

SEQ ID NO: 228078 - DNA, 56 bp, Homo sapiens
  chr2:946335-946391
  hyper
gggagcgcccctgtccccccatcctgcacttcccccagagtcgcgcgccagtttcc

SEQ ID NO: 228079 - DNA, 55 bp, Homo sapiens
  chr2:1610486-1610541
  hyper
gcctggggaggggcagagtccggtcgtgtgggacgtggcaggaggtgcagatgct

SEQ ID NO: 228080 - DNA, 749 bp, Homo sapiens
  chr2:1746562-1747311
  hyper
tgcggaggaggagaggaactcgggcccccgccccgccccagggcctccaggaagcagcctgcaaactcggcgacccctgggagccgtggtctgtcccagcactttgtttcggaggtaggcgcactggccgcccacttcctgaattgttcactcaatttttttacaacttttgcagactctttgctggtgccaaaaagtcctctggctcagctaagaaacgtgaaaactatttttggcatgcagaaaagtcgctacaggactaaattagagtcggcgcctgaaacgcagcccgcgttcacagatcccgaaaatgttgaatccgactcgcttcagaacacaggaggcctgcagcgaactctggcggcatctcggtacctggagccgcggggcggagggatggggattcctgctgtggagaccgtgacgcgggacggcccgcaggacagggtgtcaaccccaacgcaacgcatccggttaaacgtatagcgcaactgcgaacacgctcgcgtggattagaagcgaaagaagagaaatgcccgaggcagaaacccgctctgagtcccggctccatctagacccgggctgccccgagactaccgcgcggcccctctcgggaaccccggccgcccggctcgctccgggcgcaggaaaagcccctgagaagcgcggggcccccaggacaccccaggagaggacgctccgggcagatgcgggggcactgggagcgggggcgccgcggctgcgggaac

SEQ ID NO: 228081 - DNA, 300 bp, Homo sapiens
  chr2:1748550-1748850
  hyper
cgcgaagcttctccacttctcttacccgtggtttctgcctgcgctcactacgggttttttagttggcgccttaatgtttgtaacacttttagagcgcttgctctgatccgggcacgattccaggcgcgcaggcgcgctcctctctttctccttctccctacccgcaaccacgtaggaaattatttaacgttccaaaaaagcccctcattccttttgaggaaactgaggcccaagccccaaagcgcacagcaagggagtctgcgggaagattagacccaggcggtccggctccccggggcc

SEQ ID NO: 228082 - DNA, 121 bp, Homo sapiens
  chr2:1754708-1754829
  hyper
tgtggagctgaatgtgcagccgtgtgttttgttcacggcttcctgcgtctgccctctagaggcccacagaagcctcgcacctccccagcccggcgtctgcgggtgaattgtctgagcagga

SEQ ID NO: 228083 - DNA, 95 bp, Homo sapiens
  chr2:1858660-1858755
  hyper
acgtcctcactagcgcccagagcagagacatgctggaaacactggctgtgtctccctgagataaccagcccccggttttcgggggtggtaattca

SEQ ID NO: 228084 - DNA, 143 bp, Homo sapiens
  chr2:3307440-3307583
  hyper
agcagccacaaacccgccagacgccggcaacctgacttctgagtgtttcccggcaccgtgaacacaatagacgacacgtgatacggtgcggcctctgcgcccgggaagcttcgccctctgctggcagacggcgggatccatcg

SEQ ID NO: 228085 - DNA, 236 bp, Homo sapiens
  chr2:3381720-3381956
  hyper
tccgggctctcagcgcggggactcctggaggtgagaacccggcccagaggaaataagttggtgggcggagcgggccgcggaggccggctgtgggtggaggccggctccgagcgcaggccgtcgggagcaagcggcgattagccttagctagccatcgcatctaagaatcgctcacgccgtagttgggcgccgccatgtattgtcatttgtatgtacttggcgttcctgagcgctgg

SEQ ID NO: 228086 - DNA, 118 bp, Homo sapiens
  chr2:3383399-3383517
  hyper
gggctccaggccccgcccacagcagacgaaccggaaacgaaccccatttccggcctgggggcagggcctcgggttcctgcatcgggcctgagcagaactaggcgcgccgcggcccggc

SEQ ID NO: 228087 - DNA, 251 bp, Homo sapiens
  chr2:3751023-3751274
  hyper
tccctgccccgtgccgcctgctcacctgcccgggttccccgtcgccccgtctcctgccccggccccgagcccctcgccctggcggccaggcggtcacaatcgcccagggtcgcgtcaacacgcagcctccgcccgcctggcagccccgtcccgtccccgtccagcccccgtcccgtccccgtcccgtccccgtcctgcgccagcggctggagcggacctcccgtcggcggtgcccgggcctgggcgcggct

SEQ ID NO: 228088 - DNA, 87 bp, Homo sapiens
  chr2:5506156-5506243
  hyper
atgggagccgcaccgccctcccctttcggtgaggcagcgccccctggtggactgacacgggcagttttggacgtgagcgttgtgaaa

SEQ ID NO: 228089 - DNA, 607 bp, Homo sapiens
  chr2:5813468-5814075
  hyper
acagcttgatcagccgcccctgtaaccgggtggggcatccccgccctccgctgccctggaaggagccctcggctgggtcagggccgcgggagccctggccaggagccacctccgccaggcgcggccgctcccgggggctcctcctgcgtccccagcgcccacgccccgccccacctggctccgctgcacccgcagccacagcgcccgcccgggacacctgcccctccacggccgcgcgggcggaggatggcactgcaggtggcgaggctgctgcactgggcttccgaggaggtctgggggaggaggcagctggcagaaggaaagccagacggcggcggcagcagcttaataaggggggtctccagagaactgtggtccaggcaggtggctgggagcccggtgagccctttcagagaagggggagcgctgctgtctcaaagagcagctgagccaaaaacagaggggccgggggtgggggacagaggggtcatcactgcctggacagagctgcgtcctgcgcaggaccggcagcccgaggcggagacgaagggggcccgcagggactcctggccttgcgtcttgggagagcgcacgctggcctgcgcta

SEQ ID NO: 228090 - DNA, 3095 bp, Homo sapiens
  chr2:5831133-5834228
  hyper
cccccagaatatccgtagaggtagtagggactcaataaagaaacacaaaggagacgaacacggcacgatcgccggggtccgcggctgctctgcgaggcccagcgcgccccaggtcgcggctccccggccgccagcgcacctttccatctccagggaaaatatttagacgggaaactcgagtgcaccttattttctctttggtttatgagtgacccagaaggcttctagctcacaatcgcacgatttcaggacgaggctgccggagaagcgctggcgaccgaggatgggggaaggacaaagaggaagaggaggcctgggaaggagaaaggagcggcggaggggcggggagaggacggggcggggagaggaggggcggggagcagagggagaagggaaggagggcgccgggcccctcgcagggacgccgggcggggcgcgggcttgctggagcctgcgggacccagagcccgctccggagccagccctgggagtggccagcttgaacccgagggccccgcagaccgttactccggcccccgcccggggcggggcgcgcgggggcgcggcgcagcccaacccgcacagccgcgtccccaaacaccaccgaggagggaaaacagacggagaaaaaggacaaaacagaaaaatgcaaaacgggggagggagctcaccgcctctcgagctttaaattgatttctttgccttacaaaaagggagaaagggaaaaggagagcagagcccacgtgccgggaaggttgctgtcttcaagcgccaccttccgtcggccagggccgccgcggggctaccgggcgggctcggggcggcgacccgggggagcggccgagccccgcgaggggctcgccggggagcagctgcgcccaccccggggcaggccgggcgcggctgaccgcgagccgggcggaggccgccgtctcaggctgggcgcgtgcccgagtgtgtgcacccggggagtgagcgcgcgccgtccgctgtcgccgtcgggcctcccggggactgggcacaaaggcgcgcggggcctctcccgggacccggtcctcggttagcgccggcgcccgaaccatcccggttcgccccgggccgcccgctccccgtggtgccgcgcgccgcttccgagcatcccgggaacaggcgcatctgtgcacacacgcggattttttaaaaataacatatttctagacatgcctcctctccccccacccccatctttgcaaagcagcccggagggcggggtggaggggcggggcctccgagttaataaaggaagatgggcggagccggcccccagccattggctagctgggggagtgatgtcacccatatgacaccctgataactagttgagagagagacctcaactttttgcagaaggagcgcgcgcgcctgggagagctcggggtccggcgcttgcggtaggagccacgagccggagagaggggtcccgggctgcctcgaccgccgtcgccaccgcctctcctgtcgcgaccgcagctcccaccgcgccggcggccgtcgtcgccgaagccaccacagccgctgtgtgcagcctggaagggggggcgggggggagggggggagccgcgaaagcggggtgccgaggactttgcaacttgcccaggaaggtggaggggtgggagggggagggggacctccgcacgagacccagcggcccgggttggagcgtccagccctgcagcggatcatggtgcagcaggcggagagcttggaagcggagagcaacctgccccgggaggcgctggacacggaggagggcgaattcatggcttgcagcccggtggccctggacgagagcgacccagactggtgcaagacggcgtcgggccacatcaagcggccgatgaacgcgttcatggtatggtccaagatcgaacgcaggaagatcatggagcagtctccggacatgcacaacgccgagatctccaagaggctgggcaagcgctggaaaatgctgaaggacagcgagaagatcccgttcatccgggaggcggagcggctgcggctcaagcacatggccgactaccccgactacaagtaccggccccggaaaaagcccaaaatggacccctcggccaagcccagcgccagccagagcccagagaagagcgcggccggcggcggcggcgggagcgcgggcggaggcgcgggcggtgccaagacctccaagggctccagcaagaaatgcggcaagctcaaggcccccgcggccgcgggcgccaaggcgggcgcgggcaaggcggcccagtccggggactacgggggcgcgggcgacgactacgtgctgggcagcctgcgcgtgagcggctcgggcggcggcggcgcgggcaagacggtcaagtgcgtgtttctggatgaggacgacgacgacgacgacgacgacgacgagctgcagctgcagatcaaacaggagccggacgaggaggacgaggaaccaccgcaccagcagctcctgcagccgccggggcagcagccgtcgcagctgctgagacgctacaacgtcgccaaagtgcccgccagccctacgctgagcagctcggcggagtcccccgagggagcgagcctctacgacgaggtgcgggccggcgcgacctcgggcgccgggggcggcagccgcctctactacagcttcaagaacatcaccaagcagcacccgccgccgctcgcgcagcccgcgctgtcgcccgcgtcctcgcgctcggtgtccacctcctcgtccagcagcagcggcagcagcagcggcagcagcggcgaggacgccgacgacctgatgttcgacctgagcttgaatttctctcaaagcgcgcacagcgccagcgagcagcagctggggggcggcgcggcggccgggaacctgtccctgtcgctggtggataaggatttggattcgttcagcgagggcagcctgggctcccacttcgagttccccgactactgcacgccggagctgagcgagatgatcgcgggggactggctggaggcgaacttctccgacctggtgttcacatattgaaaggcgcccgctgctcgctctttctctcggagggtgcagagctgggttc

SEQ ID NO: 228091 - DNA, 1535 bp, Homo sapiens
  chr2:5836048-5837583
  hyper
cttctccccacccatcctggcgggcgggctgcgcggaggctcgggagctggccggggaggggcggatggaggggcctgggttgccagctcccttggtcggggtcctgctcgctggggcttgtgtgttctctgcggcgggccgcgtccccgctgagcctcgcggtgacagccgcctttggcagcgagcgctcggggcacttctatccccgcctctcaaagggtggggacagccgtttccagatttgaattttttctgttctttatttttaacgctgcatcttcgcgtgtgctcagaggtggttgttggcggagaacgccgccgcagtgtttgacctctagcggtgaagggggaaggggaagaggaaaggagagaagtggtcggtgtctgtttccttctgtcccccggggccgtggagctgtcggagggaaggaggacggtgcggggccgcagggggcgcggggcgcggcgggacccaggctacgagcgggagggaggcgggagtcgggggaagacgcggcaggccggccgagggcaccccgaggaacatggcatggcctctgtgcgatccgagtcgcggtctccggggtgcctgggagggccgaaccactggtgagggcgtggggagcagggggtggcagagggcacccgggcggtagtccgggacgcgcaaggcagagccctgacgctccgggtccccgtgcctggctcttcttgcctcgccaccgcgtgctcctgggcgcgccccgccgcgggcccttgaggcgcgcggagacaccagcgctggcttcccgggcccgcgggccggggagggaagcctcggggctgcggggtgagaggaagaaagcaaacccggggagcaggcggctgccgcacccgcgcaccccgggccctcaccacgccctccccgcgcgccggctcaggggctgccccggaatcagctccccggggccgccgcaacgaaggtggatccgcatcttgattgttctccgggagcctcctgggggctccggcggcggcgcgggcgcgacccatcccgctggcgctccccgctcgctgaaccccgtttgcctgtccacaccccctcgctccccaccatttttcctgaccggcctgtgtccccgagccctcgcggcaggcccgagcaggcgatcgcggccgggcacgcgcgccccgggctcccgccccccttccgagcatccgccgcctcttttctgctgggtctgggaggagggaggctgggaggccgctcggggcccagcgtgccagccccggagttcagcctcccgagctgcggcgcccgcagcggaggaggttttcagtggctgattgaaactcactgcaaaatcaccacgactctttcacctactgagatgattgaccgaggtttggccttccatttttactgagatttggcgagaccgaatggaagcgtccgcacagtaactgcagctgctaggccagaggggccccggcgcccttcccgcctcccctcccgcttgcttttgccttactcgatcttaccaccacccctccc

SEQ ID NO: 228092 - DNA, 468 bp, Homo sapiens
  chr2:5866016-5866484
  hyper
taaaacaacaatttaggaggcgaaagggagtatcaagttagcgaaactgcaagggaaactgggggcagcagagcgacgtgccagcgtccgtgttgggcgggtgtcggggggacccggacaccccgccctccttcctgcagagctctgcgggccctgtggcatccatggagaccctggctccggtttcacaggaagggaaggtgtgtgtcacagtccctaatggatcagctaccaatcattagccaagtccttctcttacttttctcctcggagagaaccaagcttagacaatagcatggctttcgaggtgggaaggacctcatgaaggagacggaaaagagtgactgcagatcttacatgtaggatctggcggagctcagcttaaagccgttgccacccagccatgggcattttctccacattttgcaggcatcctacaactgaaaactgggtcgcaggcatttgaat

SEQ ID NO: 228093 - DNA, 457 bp, Homo sapiens
  chr2:6121665-6122122
  hyper
acacaggctcccgtcggccccagcaagagcctccccagctgccggcagcatcctgtgatccccggagagatttttcatgagggctgtatatttggagagagagaggaaaaggcagctagcccagggaggaagcaaccccacacgaatagcggctgcatcataaatatttctagatagcaaatagcccattaaaagcccacattgtaatgccttggaggggggctgcctttccctgcaataccccgggaccgtcggtaaagcaggctttgtcatcgtctgcgttttcgccgcggcgctgtcctgtctcagctcctcctgactcagctgaagggggctggtgaataatgcatcacctagggagaggcgctggggctgcggggcacagctgagcgtgtgcagagggagcccctcaggctttctctctgtctgcctccatcttaccgtatccagagaccac

SEQ ID NO: 228094 - DNA, 97 bp, Homo sapiens
  chr2:7005154-7005251
  hyper
cctccaaaacggcccgggcggcttcccggtccgggaagaccacggaactgggcaagtctggcaccaccgggtgcagcgggggctccgggacgggcac

SEQ ID NO: 228095 - DNA, 128 bp, Homo sapiens
  chr2:7057748-7057876
  hyper
cccaggtagagtgacgcgcgtcccctttgtgtccgcatcgcccgggccggccgcggagcggggagggcgggacgcggcgctgcgcggccggccttggggctcggggcttgcggccgcgcctgccccgc

SEQ ID NO: 228096 - DNA, 136 bp, Homo sapiens; identical to SEQ ID NO: 198063
  chr2:8823634-8823770
  hyper

SEQ ID NO: 228097 - DNA, 67 bp, Homo sapiens
  chr2:8825635-8825702
  hyper
agggccgtaggggcgtcttccccgtcgcaggctacccgcggacctggcccccaggtccccgccacct

SEQ ID NO: 228098 - DNA, 89 bp, Homo sapiens
  chr2:8826161-8826250
  hyper
tcccgggagaaaacgccagggagtgcggcctttccaaatgagtgctgctccagcatgtgtacagccgtttccacgtgtggatctcatgt

SEQ ID NO: 228099 - DNA, 120 bp, Homo sapiens
  chr2:9143113-9143233
  hyper
ccaaagtgcagtagcgcttaagcctctccgggcccctagcacccatcgacgccgtctctaaggcacccagcacacccagacccatgcatcagcctctccgggggtcgctcagaggcgcgc

SEQ ID NO: 228100 - DNA, 67 bp, Homo sapiens
  chr2:9346368-9346435
  hyper
tgtctcctaggcctgcgacgatgcaatgactgcacgcaaagcgcacattcacggtcaggtcacttct

SEQ ID NO: 228101 - DNA, 451 bp, Homo sapiens
  chr2:9347695-9348146
  hyper
cgcccggggtctttggtacccggtgcggaccttatcaacttgttcttgaagtggaccggcgggggcagctccgcgctccgagctccccgccgcagcccccgagcgccgcagggcccccaccctcgggtccgcgggtccggggcatcccgggctgcccgggaaggcgtgcccgcctcagccagggcggcctggctgcgctccacccgtgcccggagaaggaactgcgggcaaggtgtgtgagagtcggcgcttctgggtccaagaagcctccaggagccgctccccggttacctgggtctcacctgcttgaacccggaatgccgcccttccccctcaacctggaaaaggcctggttttagtaaagtgctctcaaggtgcaaagtcatcacgcctagctgctaagcagtacgctctccaggtcctggggagaggaacacgtaggaacgaagaa

SEQ ID NO: 228102 - DNA, 196 bp, Homo sapiens
  chr2:9695939-9696135
  hyper
gccagcttccggccgccgctgtcccccgcaccacccacagccggaagccggctgccgcgcggcatcccgggaggctccgcttgccccgccccacgccggtgcgccgcgggcctctggtccgctgccgtgttcggccccgcccgtcacgtctagctggggctcgcccggcgccttcctggacgcagacgtatgagtc

SEQ ID NO: 228103 - DNA, 318 bp, Homo sapiens
  chr2:10092151-10092469
  hyper
gccgtgctctttgttcggtcggagcctcgggaggagagaccctgtcctcggggaaactcgacaccggaggggccaccctcctcccctcctccgcggccaggttgggtcccctcgggcgcgcaccttggggtccgggcccccggcgcggtcgggtgcggcgcgaggtcggggcgcagccaacgcccccgggcctccccgcccccctctcctgcccggtcggcctcgggagcctggtggggctcgcgccgcgtcgggacaggtggacttctccaggtaatctgtggtctcaggctcgtcactcggcgacctgctggaacc

SEQ ID NO: 228104 - DNA, 411 bp, Homo sapiens
  chr2:10182875-10183286
  hyper
cccggagggggcggcgttttctcggggcctgggaagaatgggcgggtttcagcgggcgccttctgggtgactgcccgtttcggcttcccctgaccccgtaacagagcggaagaggcccagagacgccagaggaggggcgtcagcgggacactcaggccaataagctctgactcccgctgtctgcaaaaatgaccggatgcaggaatgtcacctagaaccggccagctttccgacctctccggtcaaggacgcattcctaagagacgaagggagaatgacagaagttaaaaacaaccaaacaaaagccaggttgaggcctctaggtgggtctccgctaccgatggattcagccggtggggctgcaggaggttcctataagcgtggtcccctctccccgcaccgagtccggcc

SEQ ID NO: 228105 - DNA, 147 bp, Homo sapiens
  chr2:10184120-10184267
  hyper
tgcgcttcctgggcggccccgccccgctggccccgcggctatttccagccatgacgtcaccccggtcctgtgagccggacggccgttgggcgggggagcggctggcgggaacgcggcacgcggccttgggggcggggcaagagctgc

SEQ ID NO: 228106 - DNA, 144 bp, Homo sapiens
  chr2:10220229-10220373
  hyper
ccaccggcacccgccggcgggtcccgccctccagggctgccgctccgggccccgcggggaggctctcggggctgcgccgccgcctcagagtccggctgctccggctgctgccgctgcccatggcgcgcccgccgcctcccggac

SEQ ID NO: 228107 - DNA, 315 bp, Homo sapiens
  chr2:10220687-10221002
  hyper
cccactcccgcccacgggtcccctcgctccccgccgtcgggtcagccctgtcccggccttctggaattgctgaaccctgcggggggcccggctgagtttgttcatttatggaaacgctccccagacgacgctcgccgggcccgtgggaggccgcgggagcttggggggacttcccaaagcctgagccccctagcgatgcgcggggtgggcgggggaaagaccctgagggctgcgcgcgctgcgttcgcgaggtccggccgtcagtgcgccccgacctttcagtgtccgccaggcctgagacgccccgggagggaa

SEQ ID NO: 228108 - DNA, 202 bp, Homo sapiens
  chr2:10260352-10260554
  hyper
cttttggaagtcgcgctaaccttggcctgagacctgcaaacttgcccaggctggggcgtgtgaaccggcgagcgcgcagcggaaacggggcggggcacctgaggctgggaatgcagaggagccttccggggggcggggcggggcctcccgtgcagaccaatggtggagtagatgcagatgtcaaaacgcgcgctcaagtggc

SEQ ID NO: 228109 - DNA, 208 bp, Homo sapiens
  chr2:10443618-10443826
  hyper
gtgagcagctgtgcgcagagcggggtggcggggtgggtgtgggtggtccagccccacgcccagagccccctgtccctgctggtcggcgcagtgcgtagcttaggagcctcgaggacagctgggacccgacgggcaagggcgggcctcgcgggcaggctgggcagccctcagggaacaggtccgtgcggcccacgtgggtcgcctgtga

SEQ ID NO: 228110 - DNA, 222 bp, Homo sapiens
  chr2:10444006-10444228
  hyper
tgtggtgacaggtgaaatgagaacgcactgaagacagctcttggtccaaagccccgcacacagtaggtactgtgttaattggattagcgtctcctgtttaaaatcctttttttttcccctttatcgtgggtggggccttacattttccccgggcgtgttttgtgcctctccctggccctaacttaaccgcgaagcactgagattcgagaaagtttagctgcc

SEQ ID NO: 228111 - DNA, 59 bp, Homo sapiens
  chr2:10588856-10588915
  hyper
acagctgtgcttccacctggcgttcagtacctcgtgcccgagagcggaaaagggaaatc

SEQ ID NO: 228112 - DNA, 361 bp, Homo sapiens
  chr2:10589155-10589516
  hyper
aggtatcctgtaactagatgggtcctggcctgcggaggtagtttcccctgtgaagccagggactcagccaggagcgtgaggggacccggatcctgagtctccaagccgcccactaccctctgctttaccggatggaactcatcagtaactaggtatctttaagggcggctccctggcgcgctctgagagttacggaagtcccaaaatgctttgaccgaaaacgtctaaacagtgaatacataaagcaaaaagccgcgtgggaaattcgagtccctaggagcgcccaggggacgcctctggaggtggactgccactcactccaggccacgctggaatgcccgcaccagggaggcactgcact

SEQ ID NO: 228113 - DNA, 110 bp, Homo sapiens
  chr2:10862415-10862525
  hyper
accccctactacttttttttttcttatttaaaaaaatcctctgaagtctatttttaaagctaataccaatcacaaggttggccagtttgacctgcggtttgacctggtag

SEQ ID NO: 228114 - DNA, 150 bp, Homo sapiens
  chr2:10953101-10953251
  hyper
ggcctgctgggggcggggctggcagtctcggctcgcaccgcctcagctcctccgggccctctcggggtgctgctcggaggggagtccagtactgggcgtttttaccttagttccttattctgcacccccccaccccgcctcctccttgcc

SEQ ID NO: 228115 - DNA, 927 bp, Homo sapiens
  chr2:11051788-11052715
  hyper
gcccagcaacaggcggcagcattctctccccactaatcctctccaaacagcagtgagagagaatgcctgccgcttcaagccaggtcgcaacccctcggtgacccgctgcgcccgaggaggggccggcggtgcgcggtggtggcggcgggcgcggcagctgtgcccgtctgcccaagggttaatccgtcccctgcagctgccgcgcgtgccttgcagaatttcaccagaagagggtacagtttgaaaagctcctgacgtcaggctggaattcctattgtgtttagaaaaggctcgggcaaagccagcccaagttcgctctctgcacacctcgagcacctcgcggacggcgtgggtccgccagctccgggacctgccgccgctgcctgcgcgccccggggcggaggacggtgccagccgcccacgaggagaccccgctcccgcaggaggccgagctgaagcggcggagcgcgccgccagccagccggggtgagtgccccgggcgaggccggcggccgccaaagcccccgcgggctcgcccgggcgcccggatgccagccccgagccccgccgccgggtgcatgcctcccccgcggcgcgcccccgcaggctgctgcccgctgtgaccgcccttccccgcaggcgggcgccggccaggctctccccgagatcagcgcacgggtggcacccgccggacccccagcggcagcggcggcggcggctgcagggggcgcggggcggaggctgcgagggcgcgcgcggggaggatggacgggtccggggagcgcagcctcccggagccgggcagccagagctccgctgccagcgacgacatagagatagtcgtcaacgtggggggcgtgcggcaggtgctgtacggggacctcctcagtcagtaccctgagacccggctggcggagctcatcaact

SEQ ID NO: 228116 - DNA, 328 bp, Homo sapiens
  chr2:11269992-11270320
  hyper
acacacatttcccctgccttcgcctcccacggacccgccccttcagctccttccctcgcgctcccaagctccggggcccctgagccctgcgccggcggaacggggcggagctcgcgaccctccctcgtccgccgacccgggaaggggcgggggcctacaggaagtgggcggggctggctcgcagggcggagcctcgcctcgctctgtgcatcgcaggtgtgcttgctcccgggctggtggggccaccctgtggctgcctgggctggaacgttctgcctcgcccagctgaaggccctaaacttgctacgccttttggggtgaggaaaac

SEQ ID NO: 228117 - DNA, 33 bp, Homo sapiens; identical to SEQ ID NO: 198081
  chr2:11621413-11621446
  hyper

SEQ ID NO: 228118 - DNA, 359 bp, Homo sapiens
  chr2:11622985-11623344
  hyper
cctggcgctgcggccgcgagctcagcctgtaggctgggctagcctccgtcggcggcgggcgctcaggagcggggccgcggcggccggaggacaaagggcccgaggtaggagcggtccctccgggcggcagcgggcggagcgggggcgcggggctgtgcggggctgctcggggcgggcactcggcgcccggcggggaaggtgcgccccgccggacgcgggcacttcctggccctggtcccgggaaggaggtggaaggtgtccgggatcggccctggcagcgtgtagggacctgggtgctgccgctgccgtgcgcttgtgcgtgcgtgtgcgcgcgggtataggtgtgggcgcgcgtgtgt

SEQ ID NO: 228119 - DNA, 143 bp, Homo sapiens
  chr2:11623404-11623547
  hyper
agtgcgcgtgtgcgtgcgtgcatgtgtacgcgtgtatcggtgtgcgcgcgcgtgtgtgtgtgtgagagagagagagcacccgaggctcctggcgcttggcacatggtgagccctcggtaggtgggagccgtgaacagtgacgg

SEQ ID NO: 228120 - DNA, 476 bp, Homo sapiens
  chr2:11809909-11810385
  hyper
cgtgcacgaagtagtagccgcggcagcccaggtcgccgaagacccaggggtagtggaaccacacgaagctgtagagctccaccggcacgccgaccagcagcagcagcaggcccgcgagcgccaggctgagcacgtggtggcgcaggcgccccgcgcgcccggcccgcgccttcagcaccacgtgcgcggacagcgcattgcccgccgcgcccagcgcccagatgagtgcgtagagcgcggtgaacagcaccttggcccagaggcgagtgtccacgcccagccgggcgtccaggctcagccccgggttggagctgggccgcgggggccgcgggctgctggtttccatcccgctcccgcggccggcgctccctccctctcactgcccggagtctgggcgagctgcctggttagtgagcacctcctcttctctgggaacctctagaactgggaggacacgcccccgaaagggtgtccct

SEQ ID NO: 228121 - DNA, 220 bp, Homo sapiens
  chr2:11828584-11828804
  hyper
ctgggaggatccagtttccacgccctgctgtatttttcaggccccgcctgttcctcatttaccccgtaaaagtgcagcccttcgcagaaacatcttgcggtcgctcgggtcccggtgtcctggcccagaaataccctctagagggcgctgtcacgctgagacccgggacaggacgcaccggcgcgaatcagggcccctcgccacaggggagtgttgacaa

SEQ ID NO: 228122 - DNA, 1005 bp, Homo sapiens
  chr2:12856408-12857413
  hyper
gatcgggggcaagcggtgacaccaactaaaaggaagcaatggatttccttttaaatggagaggaggatgtcggagagataccatgaaacgaattctcgaaactccaggcagcaataccgatgaaagcgcattcttccaaaacagagctcctcattcagggccacatctgagcctgggggcccaatgctcagagcgtgcctggctttctggggaaaagcgccaggaacatgaacgagctacgaagagctggagcgggcgctgcgggagcagcgtgtggggaacggctcgggagtcgctgctggtaaccccggcccagccgcccgcagctgggctcgcagccggctcgcagccgacacccagggtgctgcgcccggggccccgggccgcggaaggatatttcactttgtttacctccccggccgggcgagggagctgcgaggccggtgctggcgcccccggcacggagctgcaatggcagcggcgcggggagccgcccgaggactggcagcggcggggctgattgatgggcgcccggcgcaatgaggggggcccgggcgggggcggggcggggccggctctgggctgagccagtcgcgggggcggcggggggggggcggaggctccgtggaaatgtgtcggtgacattgaatggggagaccgagcgcgagcgaggcgcgcgcgcgcacacgcgcactcacggccccgctcgctccgagatccccggccacgtaagtaactattaataccgcctcgccgggggatgcgggcgtgctgagcgcggggattggcctcgggcaccgtcggccgtcccctttaatttttaaatacacggtcccctcttttctctggggggggcaagcaagaaatcaaagaaggaggagacaagccgtcaattttctccaaaacaaaccccaccgggcaatttggtctcggggtagggggagacggggtgattgcaaattattccaggacgagatccagttctccagcgggaaaggggcaaag

SEQ ID NO: 228123 - DNA, 180 bp, Homo sapiens
  chr2:12857962-12858142
  hyper
cgttgggactgagtcgccgccgtgagctccccgaagactgcacaaactaccgcgggctcctccgccccgtctgcgattcggaagccggcctgggggtcgcgtcgggagccctggcgctgcagctccgcaccttagcagcccgggtactcatccagatccacgccggggacacacacacag

SEQ ID NO: 228124 - DNA, 711 bp, Homo sapiens
  chr2:14772284-14772995
  hyper
agacgtctggggaacgaaaagggtcttcgatccaaggaccagcctaggggccatcgggaaccaaggctctgggggatcccagcagggcccagacgcccgcctcgggcaatgtcgctgcctgccccgggccgctcgcagtgcctgggccatactggggtgccctggggtttcttctccatacccagactcagcttccccgctggagtctgtcttcctggaacacggaacgcgggcgggctgtgttctcagtcacaatcagctcggatgagctggggggcgcgggcgcaagcgggcatcggcacctggcagaaagcgccgcgccccccgcgggtgcgcacacctccgctccccggggcggcgcgcggtcgggtgtgcggggtacggggcggggcggagcggagcagagcaaagcgcacaggaggcccgcctctgctcccctcccccgccggcgaagattgacacagctcgagcacccgccccaaccaatgagcgcgtcctggggcgggccctgggaccggctgctccggctacttagagtcgtcggcgcggcggtgggaaagcagagccgagccgggactgtccagtgggagcaggcgccccggccagcgcagacctggaggcgcacgggcgccgcaccgcacgattcggctcggggtagagcggagccgcagccccacgcgcagcccaggacccactcgccaccgccgcttc

SEQ ID NO: 228125 - DNA, 760 bp, Homo sapiens
  chr2:14773809-14774569
  hyper
ttttcttctgggagttggaccgagttcccggaaggggtcggaggctgtgtggtggcgtctgctctcgcctgacctgtggcggcttctccgcccctcgtacccctggggaggcacggaggactcggctggaaagggtgactccggtgagggcacgtaagctagccggcaggtcccaggggcactgcacgtcttggggagggacaccgaaaggggcagcccggactctgacggtgtctctgcctctctgtgcctccgcagatccccgctcctggccctcgcctcgccacctcattgatgggcaaccaactggaccgcatcacccacctcaactacagcgagttgcccacaggggacccgtcggggattgaaaaggacgaactgcgggtcggggttgcctacttcttctcggatgatgaggaagacctggacgaacgcgggcagcccgacaagtttggcgtgaaggcccccccgggttgcaccccctgcccggagagccccagccgccaccaccaccacctgctgcaccagctggtcctcaacgagactcagttttccgcctttcggggccaggaatgcatcttttccaaagtgagcggtggccctcagggcgccgacctaagcgtctacgcggtcaccgcgctgccagcgctctgcgaacccggcgacctgctggagctgctgtggctgcagcccgcgccggagccgcccgcgcccgccccgcactgggccgtctacgtgggcggcgggcagatcatccacc

SEQ ID NO: 228126 - DNA, 1073 bp, Homo sapiens
  chr2:14774749-14775822
  hyper
ccgcctggtgccgctttggcaagcgggagttcaaggcgggaggggaggtgccggcaggcacgcagcccccgcagcagcagtactatctcaaggtgcacctgggagagaacaaggtccacaccgccaggtttcacagcctggaagacctcatccgcgagaagcgccgtatcgacgccagcggccgcctgcgagtgctccaggagctcgccgacctcgtggacgacaaggagtagccgcctaggggctgccggcccctctgcctcccccgcacctcgctcccttcccttccccgcacccggacttcgcagtcagcggttctcaacctctgccccgccccgccacgcgcgtccgccgccggtggcccgggcccgggctgcacccccgcatccccaagccagcggcaggaagtctcaggaactgccccagggccgaaagggcgccgctgcgagcgcctggctgacagccacagcggtggtgacggtgctgggagaccccgcgtgcgctttccccttgagatgtaaaccgggaacggggaaggggctgaggggagaaaggacatggccttccccgcgagtccatggccagtgactgtggcccgactcgaaaacaaccctcttctcaaaagggaccatcaccgccccgagcgtgcgcacacagaccggtcggaggcgagaactggtctctacagggcacagttcagctcctctgtggatgcgtccccagatcgcaggatttccaagaaatcgagcctgtcccttgtgcacttgggaataattccccaagacagcacttcgggattccgggttatcctgaggctgcccgggacttttccagctctccagccccaggtctcctgacattgtgttccaggctgcgggctaagccagacagtgtttgcctccggttctttccaccgtgggaagcgaacgccacccccacccgcctttgcctgcgagtctccctcgctggcagaagggaagccggcccggtcccgggaggaagatggcgctgcgaattcggtgaggacagccggccccgcccccgacaaggagctcgctcgttcacctggtgtc

SEQ ID NO: 228127 - DNA, 113 bp, Homo sapiens
  chr2:15701352-15701465
  hyper
agtcatagagaatcgtctcctcctcaccctctgcagtgcctggactcaaagccggccctgactcgggggccgccatgttcgccgaggactcaggcagcggaggagtgtctcta

SEQ ID NO: 228128 - DNA, 53 bp, Homo sapiens
  chr2:16080083-16080136
  hyper
aaactggaaacatccagaggtcttgttcctaagggggcgcgtcctctccctgc

SEQ ID NO: 228129 - DNA, 181 bp, Homo sapiens
  chr2:16081810-16081991
  hyper
gtttccaaagttgcggagcctcgccaccaccccctgcatctgcatgccccctcccaccccctgtcgtagacagcttgtacacaaaaggagggcgggagggagggagcgagaggcacaacttcctccaccttcgggagcagtgggcagagtggggggcttggagggaagattggggaacctg

SEQ ID NO: 228130 - DNA, 420 bp, Homo sapiens
  chr2:16082411-16082831
  hyper
agctgggtcacggagatgctgcttgagaacgagctgtggggcagcccggccgaggaggacgcgttcggcctggggggactgggtggcctcacccccaacccggtcatcctccaggactgcatgtggagcggcttctccgcccgcgagaagctggagcgcgccgtgagcgagaagctgcagcacggccgcgggccgccaaccgccggttccaccgcccagtccccgggagccggcgccgccagccctgcgggtcgcgggcacggcggggctgcgggagccggccgcgccggggccgccctgcccgccgagctcgcccacccggccgccgagtgcgtggatcccgccgtggtcttcccctttcccgtgaacaagcgcgagccagcgcccgtgcccgcagccccggccagtgccccggcggcg

SEQ ID NO: 228131 - DNA, 364 bp, Homo sapiens
  chr2:16790116-16790480
  hyper
gactcagaccaccacgtcagtgaagaggtgaagctgggtcctgaactgctgctgcgatgggatcattcacatggctattaatcatacaagagcccatttatgacaaacgcaggtcactccctttgcatgacaaggcacatgggtccacagagccccattatccaaaaaaaaacacagagcattgtgggcgatgcaggcgaaggcgagtgcacacacacaagcggacattgtaaggctgtttgcacaaccccgccgtgctcctcgcggatttcctgccaaggagacatttagatctcacagaggcggctgcagacatttgctcattcaacatggcttcaggcagtggctgcggaaacccggtgca

SEQ ID NO: 228132 - DNA, 488 bp, Homo sapiens
  chr2:17699488-17699976
  hyper
tcccagactttttccgcctcagacaagcgaggcaccagaggcagtcgccagcccgccttaaagacacctccaggctcctcaagacagagccgcttgctactaggtggttgggaatccgggtcctcaggaggcgttaaagaggaggtaggctttctgagctcggccatccgcggcgtgggctgagggagagacatgacagcgaatggaaaggatctgtccgagtcccggcggggctccaatcccttaataggcggttccgggccgctctggtcacgcccctgacccgcccctcaagacctggccttagcctaatctcagggtttgccccaccccgaatccgcccctccacagccccagcctcagccccgccccgcctccctcagtccctcctctccctgcccccacccacgcgccccggttgtctcaccactgaaggtcggagcaccctgggccgttacattgtctatttttagcgcctttttctaatg

SEQ ID NO: 228133 - DNA, 765 bp, Homo sapiens
  chr2:17721349-17722114
  hyper
ggtgctgcaggacccggctcccagtactcctagcagaagaccctctgatgaaatggcccatgacaaaatgaccaccataaccgttccttcagtaagccaggtagacgtgctcacagcttgctgggaagtcttctttcggagatttctgcagttttctccttcaccttacagcctaacaaagggtgggccgggggtcggctaggacagaaagcagcgggaaaagcggctccacgtgttccatctctggcctcggccttcagcccccaggttcggtaaccactgggcgtggcgagtccgggtaacccgcagtccctcgcgcccgtccaggtgcgggttgctccggtagccggactcccttttcctatatactttccttttgagcttttgctaaaatctggagacgtggaatccacccgcggaaactccgagcccctccgactgagcatgcgccatcgccaggcggcttttggtcacaggctcccgagttctcctagctggggctgcggagctggggggagggaagagaggaaaggggagggggtgcctggagaggcggaggctcgcgcgcctgcgcatccagctccagggaccctaggttttctatgggattcccaatctgcagcagagatttacccgagcgtgttgcggcagcggctgggcttgcaaggcgcgatccaagagggatttaagcagcccagagctccagagaaaaagagagcgagagagaaccacacacagagacggcttaagcgtttacccgaatta

SEQ ID NO: 228134 - DNA, 35 bp, Homo sapiens
  chr2:17934473-17934508
  hyper
acacaccagttgccgcctgcgagatatcatcagac

SEQ ID NO: 228135 - DNA, 33 bp, Homo sapiens
  chr2:17934861-17934894
  hyper
gggaaagcgacagcgcgcgccttcaccctaccg

SEQ ID NO: 228136 - DNA, 35 bp, Homo sapiens
  chr2:17935192-17935227
  hyper
tggtaggcacgggcggctccgcagtgaccggactc

SEQ ID NO: 228137 - DNA, 342 bp, Homo sapiens
  chr2:18011854-18012196
  hyper
aagtttccccagccaccaggcgttcagtcactggctgcagatcccgcaaccctcgggtgttcaagtgcgcggggtggtgcgggcgctcccgcagtccgcgcttggctcgtgggaggcctcgggcgccccctccaggattccgtgctaactgcaaacgatcgcgctcgcagggaggcccccagtgcttggaaaactccaggaatcccttcagagcactttatttccaggccagcacgcggcgctctgcagacctagtactgggctgtggataaggaagagcagagcggatgggttacgccgaggatgcccaggctgagcctcggagtctggtgctcctggact

SEQ ID NO: 228138 - DNA, 1970 bp, Homo sapiens
  chr2:18059018-18060988
  hyper
aaaaatctgcagtttgggggcgggagggggagcgcgggggtgggtcccgaagcgtcccatttctcctcctggctgttaactgagcgctctcgctcagtgcagcgaggccagcgatgccttctggaccacacgctgtcctcgccgaggtcctggtttgttcctcaacgtcggctgaaggcatcgtcccctgacttcctcttccattcgtccttccgaaaggggacccgactggttcctcttctacatatgaggcgcatctgcttggtgcaaatgtccaagcacctcttctgactcggtgagtggaggaataagacaaagcatcttgttctgcactgtgcctgagtcttcaggcagcgggaccgatggcaaacattggcaggaactggagctatatgtactctccttcgcactttgttttaaaacaagtttgggcctcgcgatttcctgaggaaatccaggcaaattagcaaagtgtcgcttgggccgcgactttagaaaggcggttgccccagccgccggggccgcgggggaggtcatctttttcccgcagggccacggcgcttccggcccaggagggcgcgcaggtgggaggcgcggggcgcgctcctggtcccacccggacagcgcctgccgctccggggtgactctgcacttgggcctgggcgggggcgcgcggccggcagggcagcatctaggtctatgggtctgtccgcctgtctggcggtcggagccccgcagtcctcagccgcccgcgccctcggcccggggcgcccggctgcgggcccgaagcgaggggctggcggagctgcgaccaatggggcggcggccgagcggcgggccccgccccgtcccgtccggccccgccccgcccgcagctcccgggagcctcgctctagcggggcgggaccgacggacagaccggccgacgcgggccaccccgctctcctcgccgccgcggcggcaggcgcggggccgcgccgcgaggcctgatccctgcagcgcgggcaggcggcgtcgcagagcggagctagctggatgcgtccggactcctgcaggtacctggctggcgtccccacctccctgcgcgctccggagacttctccgggcgaccctgcaactttaccgcgccttcccccaccttttgctgccccagtctcctgtggtccaggtcgcgggtgcacgaccccgagggtctacggccgcagagcactttccgtccttctgggcgtctggcccgcggcgcccgcatcctctggtccccagagcccgccgtcgctggagccctaaggctccgcctgttgcgtgaactgcgggctgttgaagcggtggctgggttgatttgaaagcctcggggaaggtatttaggatcagctttcggggagtggggtgggctatggtcagggggaggaccacctggaggcgggagaatcgatgagccgaagaaaggcggcacctcgcgtaggggcatccccggggcgtttccttggccgggaagccgttccttcccttcctcgagaggaggcgctttcctggcgcttgtaaatgcttcccgggccgtctgctccgccttctttgtcattcctcccctcccctttgccctgcagctgtgctaggcgccccgcgacagttgcagggaagagcgaacccagggcccttgctctcgtgcagcgctgcgccctgggtggggacggcgtgaggcttgcagcgcaggtgtggagtcacttgcggactctgcgtttggatcagtggcagtggtggggaagggtcaccccggggtcaggaactcctcttttttttttcgcgcctttctgggtggctgcccgacctcctgaggcaccttggctagcaagcgagccagtcttgccggcaggggccgcggcgagcctggctgggcgcctttcgcattgcagggcttgtcctgcacccccaaccccgctctgtcccttctcgttcatttggagaaaggagca

SEQ ID NO: 228139 - DNA, 193 bp, Homo sapiens; identical to SEQ ID NO: 198096
  chr2:18741865-18742058
  hyper

SEQ ID NO: 228140 - DNA, 890 bp, Homo sapiens
  chr2:19550009-19550899
  hyper
gccaagtcctgggccgcccctccagggctggccagcagggggcagcgtggctctgagcgtggaggccagggctggtccgcgccggcagggccagcctccagtgcccagttgggttcccgggcctcgaagttctagcccgcacaggactcaggagcgttcccggaggaggtggggatggggtggtgaaagcccagagcgttttaacttctgcatcccctgccgctttctcagccagcagggcccggcttgaggctgggatttttggtgcctgcagcagggaagcttatagtccagttgtcatccgcggccgccgcgctccgggcgctgaagctggagaggccatcctgcgcttgggaaaggccgcgggcgccaccgcctgcgcggtcccgcggtcagggcgctggagctggggggagccccgccttgccccaaggagaagagccccggcggcctggcttctaactgtgggaaaactagacaccccagggaaggttcagcttatggaaggcggactcgaatttttcctcctaagcgtcccgggcctcccagggcgcccgcccccaccattcctgacaaggctttaaaattgtagggaatcttcgcgggtgcagagcctcgatcctaggaggggacaagtcccaagcagagaattgtgtctgagggaccctaagggagggagtgatgttggtttggggttccggggaggcagcggtcattgtgtatttgcacccgagtgttgagacccggggaacgggaaatattacagctctgaggctctgtgagggcgggtccttcccaccccaaagccagaggccaggagggaggccttcggttagggtggggaaagacattctcttctcttcttgcaccctaagcgatctcagcaccca

SEQ ID NO: 228141 - DNA, 829 bp, Homo sapiens
  chr2:19551121-19551950
  hyper
tcatcctaataagacggggtggtaggagggggacacgctggcgtccagcagagaaacctggtcctctcaaagagaggacccaaccggtttcctgcgtttaggagggaaattacccatcctgcaatgcctgtaaaataaccgtttatttaatagttaaaaaaaaaaaaaactccagtgataaatgtccgttaccgatggtcagcataaagtgccaatcgcaatataacgcccggctcttggctggctgctccctcgcagtgtcgcggcagcggaggccgggccccctgcagaccccaggcccgaggtccccgtcccgctctcctagtcccggagcccacggccgccagctgagctgcaagagctgggagggggctgccccgcggtccctagggcaggaggctgaagcagatacagggattacacttttgcaggctccgggggtgggggcaggggcgggaggaggaggtgggagctgccagtgctaaggacttcgttgcctctcctctctccactcactctccgcagtcagagttacaagcttatatggtcaaagacaaaaataaaaaagaaaacgtataaaataacaatagaaaaagtaatacttctgggagaggcgccgctgcggctccgcggagctttcgttctttttttaatgcagtttcccttccgccacgtgagtaccgccttttggccaagagtttagccgcgtcctaggggagcagcagggacggtcggggtcgcggccccgggcggggctctgaagtgccgcgtgcgccagggacccaggggacaatgttggagaggtggaaggtcccgagcgagcgcctct

SEQ ID NO: 228142 - DNA, 2348 bp, Homo sapiens
  chr2:19556476-19558824
  hyper
aggggacccgaccacgcacagcagacgcaattcgcgctcgggatcccgagtccctgcgcagtgcgggcactcgcgtccctcgcgcggtggagcgccaatcccaggtctgcggccagtcctatgctgggcattaatgaagtgtgcagagtctattaaagtggtttattcggggctaattgagcgtgagcaagttaactgcttgcattaatgagaacgggagcgaactccacgagtttgcgcctgggggagcccagcagcaacccaagaaaatcagccttgacatcgaatctccaacgagtggtgacaggcgtccggacccccgtgaagaggactgaccggcaccggatacttctatagcattctcccaacaaacgagatctaacgaacccattggcaaggcggtcatccggctgcacttaaatgtccgctgcgtcctcggtgatccattccccaatcttaataaaacagcaattacctcgaggagcctgggatggaacatctacacgccgccggtcgctgctagtcccctccagcgcttctcttccctagggggttgtgaacctgggacacctagccttgcacgtggttttgttccgcagagccaatgcgcagctcttagcctgggtgaaatttaccaaattgtggcaacaaagaaacccttgcggctactttacacattgagaacccaacccgctactgcctgagctgctgaaaaaggactaaacgtggtttttcattcttctccgagacatttccgaggagaaattagttcagcaggcagcccttcacccctttcccccttctttctctcctgacggctggattagcggacagtcaggggagtaacagaacttttcctgtccccagcccggagaccctagggctccacagagtttccactagtgctgtgtgtgggtctcgaattggaaagcagtgcttgcgcccactgcattgcctccctgcaccaggacaatcaagggttccgctccaggccttgacgacacagagcaatcatcctatggagaatatccctaagttagagcgcgagtgcaaggcggggttcagactcgcagccctgcgctctcgggtctaggcggcctcatactagagcgcaactcctcaaaagacaaacttgaacgaaagcgctaccgagctggggcatgcacctgtccctggcgcggtcggctgcggctgtggccattcactccctctcccttccttcttcgtcaacctgggcgtcagccagagctaggagcgcgtctcaggaaagtttgtgcccgctgaagttgctctggtttcttaaagggggcccacagattgactttcaaagtccgtgggcacctcgcccgtgattccgcagagccgggcgggctggccgcagtagcggaggcccgccccccttaatccccagcggtcagaggccgaggaccccgcgcaggaagtcctgaggcagcacccccaaccaccctgctctcactttcacaaaagtcctacagcattcgtttggcaagagcttccttcaggggcattgagagagaggaggcacccgccgagcagtgacaaggaacctgggagtcctgcccgcattcgctttgctgagcccaggcgcccaggactgcaattaccttgttccgcagaggtcctggggctgagcacgtctctggggctttagctgaaggggactggggaagccggaggccctggagcccacaggcgcccctggagctctagtgtcccgactcctctcctgccgcggggactccaagcgccggacacgcgggagcgagcgctcagcagccccggatcctgcacgccggggacggtgagcctcgctcgcggctccctcgctgggtctgaaccaggagcagctgagaacgtgccggggagaggccgagctccgactcactcatcccttagcaccgagccgcctacttattttaatccaccaccctccctcctccaccacccccacccccgccccttgcctcaggattcctcccctccctcccctgccccccaaccctgccctgcgcctgcgcaatgaaagacaaagtttttgctgacccgggcagcagactttggcagctgctctcgcttggacccggcctctcccaacctgcgtcccctcctcttcagtcccgcgcgacccctgctgcctttttaggtccagagcggcacgcctggcgcactggaggaaacggtccctagcagatgagagcgggctggcaccgcacgtttcgaggtcctatacttgggctcctaggacacagcccgtgctctttgggaggagggagggaggggcagtagctctgtgcaccgggatccccacaccgcggcttgggtttcaa

SEQ ID NO: 228143 - DNA, 756 bp, Homo sapiens
  chr2:19561251-19562007
  hyper
tactgggagtccagcgcactccgccaccgcggctgcagcttctgctagctcggagcctgcggactccagccggcgcgaactccgccgcgactctttctggctctctcgctcactgccttcggggcggaaccgcgggcgccggagtggtcccagactcggctgggaccgggcagcctagaagaagggtcccctcagtagagaccaggcctccagctctccgtccggcgctccgctccacaacccgccagtcgatgtgaggtccgtcaagggagcgatccctccgtctgcccgggcttccgggctgtggaccgcactgaacccagtcccgcagcaagccctgctgccgccttttcctgggcacgcctgcggtggtgacggcccgctgctcatgtctccacgccaaaccccagcccctctcccgattcctgctccttggtaaagcgccccagcctgtcttcggagtgaaaattgagcagcttccagaaaattaactagaatgtggtctatattgctttgagttgttttggattcaaaaaaaaatgaaccccacctctccgcaccccatagcctaaaaaaaaaaaaaaaagtcctcattttttcaaatgaagtttgctcagcacttgcgaatttttgcttccaacgcaactacttcctgtaactactttgcagacaattgggggtctgctcgttagaaacccccttacgcatgtacagggctttcaaataacctggagatttaggcgtccctctgtattc

SEQ ID NO: 228144 - DNA, 342 bp, Homo sapiens
  chr2:19563156-19563498
  hyper
tgccccaaaccagacgtccttgctctcagatggatgagggcttttgtttgtttgtttgtttgtttttaaataatccgaaattcctagcaactatctgccgccgttcgcttctggtcctgggaagacgatgagcaaagatctactgggaccccatcctgcatttgcaagctcggtccgcgtgcccctcccggcacacccggaggtgagaagtgccctccggtgcctccgtccgcagcccctcgtaggtctgcacgtcctgcttcggatcccaaatcctggctttctgaagaagcgcgggaagaagagagagagtctgtttccgtgaatcgatttccctgaaac

SEQ ID NO: 228145 - DNA, 364 bp, Homo sapiens
  chr2:20068518-20068882
  hyper
cagcccagtagtggagtccccgccgcgggccccttgcttgcagggtaggtgtggcccggtcgtcccactctccgccccctcctgctcctcctcgccgtgcccaacccgcccgcttctcctgcctaggctcttctttctgctcctgtcgccatggccccggcctcggcgctcaagcgaccctctcgctccgcccaggtcagtgaaggatgggatgcaagtgcccgccaagccccccgtttcccacgtggagttcccacagggcagcagggaggggccgcgccttctctaactgacccgaaccgacccgggcttcacaggcttcgtggagagcagctgccccgccggcatcttccggatgaggctc

SEQ ID NO: 228146 - DNA, 193 bp, Homo sapiens
  chr2:20101765-20101958
  hyper
gagataacggttccgctgctggcggggcgtttgcagtggcccttgtgaactatgtttctgccgttaccagtgttggacccgccttcctcttttcctagaaaaggcgcagatgcgtggtcgcaaactgatttccaagtccgttgtctgatgctgcgagacactatccgtttgttacagcgaattgggggccgat

SEQ ID NO: 228147 - DNA, 42 bp, Homo sapiens; identical to SEQ ID NO: 198103
  chr2:20190155-20190197
  hyper

SEQ ID NO: 228148 - DNA, 564 bp, Homo sapiens
  chr2:20212119-20212683
  hyper
ggcttctcctcgttcgatgctcacgcgtccctcccgccgcccgcctgtacctgcaccgcgggcgcggccaggctcgctggtcccggaagcgggcgcgccgtcgggagccgcaggagaggggcggcgtccagggctgcccccgggacctcgggtctccagcctccggaagcccgggcgggccacggggtcgggggcggcggagggcagcagcagcagcggccagagcagcaggaggagtcccgggaggcggcgcgcgggggccgggcgcggcatggtgggctccgtgggcctggtggtgtccgtcgggggccaggagcccacgcgaggctcggatttaaaggtcccgcggcctcgggccccgccccgccccggggcctcgagcgccaggccggcccggcgaaccccgcccaaggccaacaaggagccttgtccgcgcattccagcggcagaaacggaatgtctgggcgaggcggccagcggcgcggtggtcacctcccgcccctgccctaagccccgagccggctgcaactgggtgggctcggctgctgtcgcaacctccgtcct

SEQ ID NO: 228149 - DNA, 255 bp, Homo sapiens
  chr2:20251336-20251591
  hyper
agccaaactcaaacggctgtttcacggcctccaaaacccaacgacgcgtcttcaaacccgcccccggctcgtgcccctgccagcttcttcgcgcctgcgcactgagcgcagcgacttcggcttacccacccctcttcctccacacaggccaatggggagcggaaggctggatggaccggacttctgattggaagaacttggggattgacaagacctcacgcccaattagaagtgcaactcgcctcagcgagtctc

SEQ ID NO: 228150 - DNA, 80 bp, Homo sapiens
  chr2:20251798-20251878
  hyper
cacaggctgataacgtgacctttgcgcgcagctcaattattgcgcgggctgggggcggggcctgcggggaagggacagag

SEQ ID NO: 228151 - DNA, 597 bp, Homo sapiens
  chr2:20424296-20424893
  hyper
gatgtggagacgttttacataattgagcgcggggccccggccccccaccctccccagcgcgggaccggtgcggcacccaccgacagcggaggaaattggggctggagccctggtctcggggctcaccgtcccgggacccgctgggctagcgcgggaagaagggaagtcttcgctccccctccccctccacgtgcacccgccggcatccgcgggtgaccagtcccggcttcccgccgcctccccgcctggccgccggccgcactcaccggcagggccggctgcaggctcagcgccagcgcgcacagccagagccagagcgccgcgcgcctcatgctgcccggaccggcggcgggagagcggcaggctgcgcgggtcgcggctgcgggccggcttcgcgggttccgctgctcgatgctctcttgggcgcctgcccagcgcgccgctgtcccaggcgagggctgcagggtccgccggctggagtccgctctctactgccggattcctctccgctcggctcggattcggcccgcacctctcccgccgagctccgccttataataaacccacaggcccttccttagccgttgcaaaaactgg

SEQ ID NO: 228152 - DNA, 440 bp, Homo sapiens
  chr2:20425310-20425750
  hyper
ggggacccgggggcgatggggccttcaaccgacgggcaaacacacacagacacaccccggctgtcctccagctgcgatgcggctcgctgcgccccgccggcccagattctcccgtacgctcgcgttcttcctgcactccacaaagtgctggagacttggggccttagtttaaacagctgcacccgcacggaagggctgcaagaaaaagggggacgggggcggagttcgcagcgtttttctgtggaagacaacgccctctctcttcatctgagctaaaaggaaaaataagtaacttctttgttccccggtgacctcgggcacgcggatctgaggagcaccgtgcagttgctgctccttcgagatcccctgcgaggccctgggcctcagttcaaaaagctgtggaaggcctgcgggtgtaggggaaacggccgagagagcaa

SEQ ID NO: 228153 - DNA, 124 bp, Homo sapiens
  chr2:20646812-20646936
  hyper
gggcgctagggccgcagccctcatctgccaccgcagtctggttggagctgttgtcttgtatgctcagcgaggcccggagagacccgggagagagctaggccgagtccaccgcccgagtctgctg

SEQ ID NO: 228154 - DNA, 592 bp, Homo sapiens
  chr2:20647176-20647768
  hyper
gcagcgaggcgttcgcgggccccctcctgctgcccgggcccggcccgctcatggcggccatccgcaagaagctggtggtggtgggcgacggcgcgtgtggcaagacgtgcctgctgatcgtgttcagtaaggacgagttccccgaggtgtacgtgcccaccgtcttcgagaactatgtggccgacattgaggtggacggcaagcaggtggagctggcgctgtgggacacggcgggccaggaggactacgaccgcctgcggccgctctcctacccggacaccgacgtcattctcatgtgcttctcggtggacagcccggactcgctggagaacatccccgagaagtgggtccccgaggtgaagcacttctgtcccaatgtgcccatcatcctggtggccaacaaaaaagacctgcgcagcgacgagcatgtccgcacagagctggcccgcatgaagcaggaacccgtgcgcacggatgacggccgcgccatggccgtgcgcatccaagcctacgactacctcgagtgctctgccaagaccaaggaaggcgtgcgcgaggtcttcgagacggccacgcgcgccgcgctgcagaa

SEQ ID NO: 228155 - DNA, 262 bp, Homo sapiens
  chr2:20865453-20865715
  hyper
gtgagcaggcgccgcgtctccgcggtggccgagagggcaatggctgaggagttcgtttgggacgaagcagtggagcaggggaactggggagcctgggccgggcctctctgtgggtcccagcgcagcgcagccaggcaggcgtcgggacctaggcggctttggattcggcgggcgacctcgctttgaagctgatcacccgctcaaggtgatcacgacgtgccgacccagtctagattttgagttctgcagaaaatgcaatttt

SEQ ID NO: 228156 - DNA, 1099 bp, Homo sapiens
  chr2:20866375-20867474
  hyper
gggtctgtggctgagtggggaaccgccgacccgcgatccggaacgcgactttgaggccgccgggagcatcctgtggcctctctctgcgcggccacccggccgcggcgcgaagcggtctggagggcgagcccttccgcggccccaactctgccgccccgttcccggcattgggaaccagggcagggagggggcgggtgtttctctgcgggggagtggggaggaagctgggcgggtgcgcgcggtgccccgagcctggaaccacggagggcgcgttggtcttgggcggatggagggggtgtcgcactgccgcggggaggcgtgtcgggaggctggggccagtggcagtcgcttggcgagggtgggggcgtagcgctgcggtgggaggaggcggctccggccctggtctccactctaggccggggtggggggcgcatagcggccgccggagctttcagcagggggcgctgctccgggcgttgggcgggggtggggtgggccaggagggggggccgcgggctggccgcgcacacttcccccattattaaacactatgttcaaaaggcgccgggggacttcccggagccacggagcccgcgccgcccgcccgcccggcccacggagcccatggacctgagcgccgccgccgcgctgtgcctttggctgctgagcgcctgccgcccccgcgacgggctggaagcggccgccgtgctgcgagcggcgggggctgggccggtccggagcccagggggcggcggcggcggcggcggcggcgggcggactcttgcccaggctgcgggcgccgcggctgtcccggccgccgcggttccccgggcccgcgccgcgcgccgcgccgcgggctccggcttcaggaacggctcggtggtgccgcaccacttcatgatgtcgctttaccggagcctggccgggagggctccggccggggcagccgctgtctccgcctcgggccatggtcgcgcggacacgatcaccggcttcacagaccaggcgacccaaggtacttacgcctcttctgtgcccgcccatcccgtcaggtcctgggctgagaccagccccggagccgtgccgcagctccgttaca

SEQ ID NO: 228157 - DNA, 657 bp, Homo sapiens
  chr2:21022199-21022856
  hyper
gccaggactatcaactcttgtgtttggtacacaggacacaaagcaggtgtccggtaactacttgcgagggaagatacgaattaaccaaggaataaagtgttccaatctgcattctgtcttgcgtggggaacaaaaccaaactaagacccaaggatgagggtttacggttaaggtcttcagcgtgaataaaaggcggcgtgagcactaaacgccgggggcaaagaacactcccggcccagagtttgacccctcctagcgagttcttcccggccagctgcccaactttttggcctctactcctccgcgggggcaccataagactccctacaggtgggctacacttaggggttcaaatgctgcattaccgcgctcgggtgagcgactgcccggcctgcaactcaagggactcccaggccaagtggctccgaactcgcgagctgtcggaacagtattatttttgctgctacgggccatctggcccagggcaacaggggctctgcgaggaaccatagagaagaaggggcgccagatcccgcgtgcctgcccacccgtccttcctttgggcagtcaccctgagctcggcaagctgtacctcacctgtccacctggaaggctgcccgctctccctgagggtcctgggaaggcggcacgagaccg

SEQ ID NO: 228158 - DNA, 137 bp, Homo sapiens
  chr2:21540143-21540280
  hyper
agagagctctgggcagtagacgtggtgattgaggccaactttcgtttaagtctcaatactgccccctcgtggcagtataaactaaggccggagcctatttccgttacctgttagacggaagtgaaaaaattaatggc

SEQ ID NO: 228159 - DNA, 126 bp, Homo sapiens
  chr2:23607987-23608113
  hyper
ccgtgattggctccgcccgcccctggctgcgcgccgaagcccgcctccctcgcagctaaagcagacggtacccggagcggagcgagccagaagggagcatggtccccgcgccgcggccgcgccagc

SEQ ID NO: 228160 - DNA, 1949 bp, Homo sapiens
  chr2:23608339-23610288
  hyper
ctcgatgagagccgcgccgcaccgctcatagccgcacaggctgacaggcaggaggaccgacttccctctcccgggcatcctccctgggctgccgggaggcggcggcggcggaggaggaggaggaacgaggggagaaggcggagagcaggaacgcgaggaggaggacctggatccgtttcctccggccaggacccgagcggccccagccaccgctacccgccggcgctgtccgctctccatcagccctcctgcgcccacccgcgaccccgggctctctgcgcgtcgggccggggccggagccgcgcgccggaggtaagagccgggccgggctggagcgcctcggatgcggcgccggagggagacccaggtcctggccgccgcgtggggccgggccgggccgggcgtgggagcggggccggaacccggaaccctgggctcggcttcggcggcggcggcggcgacaggagcctcccgcgtctggactcgcaggctgcaggagcccttgcgcctgcgctgctccagggggaaaaaaagggggggaaaaaacttcctgcccccgggtgtgtatgcaccggggctgcctggggccactgtcacggtgttcggaggtgctggaggcttgtgtgacccctggccggagcagcccccctgctgggcccggcggcgcgcgcccctctccaggccacgttcccctgagcggcccagggccccggccgggcaggagacctggaggcgacggagggctggcccccaggggcggccgcgcgcactgtcctttggggaggtgcgcgcctctgtgcagcgagaagccaggttggggttttctgcccctcgcgtcctctgatctcgcatttggggactgggtctctttactcaatcccaagtaactttcgaggtagatgagctcgaaaaccgtcgggagggaacccgcacagaccttattgtgacccaccccaccccgacacacacacgcacacttcccttgacaccttgtgggtgccagcgtgttgtggggggacgcggaaaggagagctcacggggacggcgaagcggccaggaggtggtgtcgttggggaggggttgttgatgtgtgggacagggtggacctggagatgtgtagtgtgggagtgtgaacgcgcgccccgatggcctcggggggccgggggagcccagggctcgcgtcccggtctccgtggcctggagcgggctgagagcgctagggttatctgcggtcgccgcgcgggtgcccgcgctgggcagcgtcggccccgggccccaagggagggacgtgctcgcctggggccggagcgcggggctgggagccggggtaggtcggaggtggctcttagggcaggtcgcctctgcgttgcctggggaaggcggggacgcgctgcctgcctgcggccagccgtctcggaggagggggtggcggccacgcgcgagtctcggatgcctgggtccacccgctgagaagccagttgtcgtccctgggctgtggaaccaagcggcagacgcggtccgttggcgggccctcgcgcgggcccccagagatgctgatgggtaaggagctgccgccgccgccgctgccatccccgccgctctgcaaacgttctcctccctccctcccgtgcttgcgccgcggcgcgccccgggcgaatcgtggacgcaggtatttatgtagcattaggcgagacctcggcgctggagggaccagaccgtggaggacgccgagctgctgctgcctgcgaaacttccacttcggcagctcagcggcatcccggcccgctgctgcaggttccagcctctctccagtccagcaacgctgggattcggactcctcttgcaatgacagatctgtcctggttacggctgtatttatactagtttcagtctctttaaagtcatctgtctagtcactacagagtttcttcctcgccgtgtggtcttat

SEQ ID NO: 228161 - DNA, 32 bp, Homo sapiens
  chr2:23886284-23886316
  hyper
ccgccccgcggctccgccgtcacgtgtgccgg

SEQ ID NO: 228162 - DNA, 36 bp, Homo sapiens
  chr2:24232870-24232906
  hyper
gccagcagccactcgcgccgcgcccctagcccagaa

SEQ ID NO: 228163 - DNA, 165 bp, Homo sapiens
  chr2:24270302-24270467
  hyper
tgggcggtgatatcggtcctctgataggtgggtggtcctctgataggataggcacgctccgagatggccccgtctattggcttttgaatatgcacattagcagagggttcgtcccactggccaataagctctggctctgccgcacggatcgctgggagtggtagt

SEQ ID NO: 228164 - DNA, 806 bp, Homo sapiens
  chr2:24272437-24273243
  hyper
agtgggttaatgtcgtcaggcggggccaggctcgctaacagccgggcggggtcccttcccccgggccccgccccggccgaccccacctttccgcgcggctccgccccgccgcccccttgccagtggcccctccccgcgcaggtcccgactccagccgcacctcctccggctctgcagtggcggcgaggaggcgagccggagcgacggcggggctggggccggagccgagccggggtcgggcagcagcagggaccccccagaggcggggcctgtgggaccgctatgggcgtggagatcgagaccatctcccccggagacggtaccgggctccctccggagccaggggaggggaggggtcccggggcggagcccggagggcgggggtctgattcggaggtggcgtggagggtgctgaagggtcggggggctggatggggaaggcaggcggagacgccggacgggattcttgggggtctaggagaccatcctccgccatcctcttccgcgctcacctaggggaatgtaggcggcagctcggaggcgggggtctgcggcccggaggcgggggtctgcggcccgccaccgccccgggcttctcctgtcgcggctgcagtcgttcggttatccgctgctgctgataccccagcctgggtttcggcttcgctttccctgccctactcggcgagctctggaaagcaggacctgctctcggatacccgctgctcggggacctcctcctagcgcgtcccccgccgggcctcccctcggtcgcttccctgcgggccgggctgtgagcggctgtgggg

SEQ ID NO: 228165 - DNA, 173 bp, Homo sapiens
  chr2:24299237-24299410
  hyper
tcttacgctgagacgcgctgacgtagcagcccccttcgaatagactccggggtaaaaccgagcctgagcgagactcgaggccggaagatggaaaggcgagagtccaagacacttccgggctctgtaccgtaaagggcggggcgtagcctccaaaaggcgagatgttccggtcg

SEQ ID NO: 228166 - DNA, 486 bp, Homo sapiens
  chr2:24299777-24300263
  hyper
ggcccaggtgagtagcgggcgaaggcggggcctgaggaggactgagctggggcgggacccaggtgagtagcggaagggatcggggcctgaggagggtggtggaggtgcggcggggcccagaagtgtagcaggaggtggttggggctgaggaaagtggtggaggtggggcggggctcagatgtgtagcgggaggtggtggggcctgaggagggcggcgagaggtggggtggggcccaggtgagtagcgggcagggctggggcctgctgtggtgcccactggttgcggggcgcgcgggcaggtgccggaggtggtgggcctgggcctctagctgtgcgcaaggcggaatatgtggggttctggcggcttgtgtcacggctgacgctgtaactatacccagaatctccgtccctggaggggccctcaggttgagcgtcagctgatcgggcctcagtaatccccgctgcgacgcccgtccggactcccac

SEQ ID NO: 228167 - DNA, 33 bp, Homo sapiens; identical to SEQ ID NO: 198118
  chr2:24307619-24307652
  hyper

SEQ ID NO: 228168 - DNA, 81 bp, Homo sapiens
  chr2:24346201-24346282
  hyper
attggccgggccacgcgccggtcaccgagaagcagcgactccagccccttccgcaaaccaagacccgccacctagagccgc

SEQ ID NO: 228169 - DNA, 181 bp, Homo sapiens
  chr2:24583444-24583625
  hyper
gcagctgacggcccgcccgctgccgggcaccgactccccaccctccggagcccgaaactgcccgggcgtggctcctcgccccaggagttccggggcattgaaccctgaaggtctgctccgagtcggtcgggtccgaagcgctcctctctgccctcggggaggccccgaagccccagacctg

SEQ ID NO: 228170 - DNA, 132 bp, Homo sapiens
  chr2:25016064-25016196
  hyper
gtgtgcaaggccgcggtggccgcgtgacaagcctgcgctaccagtgcgcccgccggccaggagaacggagcttgtgatagatcctttcgtaacaccaagtattgtaccaggacctgcggctccgccccagag

SEQ ID NO: 228171 - DNA, 224 bp, Homo sapiens
  chr2:25142459-25142683
  hyper
acccttggaggctcgggctccgatccggcccccttcccacgctcggggcgctgtcttcccccccggaagcctggccctgcccctgcgtttacctgtgcgggaactcggccaccgcgtgctccgggacggtccccgcgcgggctggggcgggagagctcggcgcgcccgagggctgctccccgcagagccgcgccgccccggcagcgcctcggggcccggccgga

SEQ ID NO: 228172 - DNA, 568 bp, Homo sapiens
  chr2:25354447-25355015
  hyper
caacagggaggggtcggagtccgttttcctcgggagaagtccgccaggaagttgggagcgcagaggaagcccaggctggaagggggcgtgaccctgccctgcctgcgcgcggtgcacagaggaggagggtgccagccttggatctcgggtgtcccgccccaccgctctcagggcccacagtactggagatgttcaacacgctgctgaggcagctgcggctcagcatcgactacgcgctgaccgggagctacgacggggcggtcagcctcggcaccaagatcatcaaggagcacgaggagcgcatgttccaggaggccgtcatcaagaccgtgggtgcggcgcggggccgggccggggcggggcggggccgaggcgcggagtggggaggggaggggagggacgggacggggcccaggggctcaagactgaggcgcagggcggggtggggccaaggggaggaaagagggaccctggaaaggggcggggcaccgggggcggcccggggatgggggttggagagggagggaccgcactggggcgaagggcatccaaccgggcccctgtagga

SEQ ID NO: 228173 - DNA, 106 bp, Homo sapiens
  chr2:25565423-25565529
  hyper
cctgcagttctcccgacctccgccagagcccactgcgctctgcctgcctcagcactggggctggggacagcagcgctggcccaaccgcgccgcaacccccagccag

SEQ ID NO: 228174 - DNA, 47 bp, Homo sapiens
  chr2:25896707-25896754
  hyper
tcggcggggtgcccggcccgacgtgactacccgacaaagaatgcaaa

SEQ ID NO: 228175 - DNA, 32 bp, Homo sapiens
  chr2:26100797-26100829
  hyper
cactgagaggactcgccgcagacgccgaggga

SEQ ID NO: 228176 - DNA, 217 bp, Homo sapiens
  chr2:26101334-26101551
  hyper
caggctgccgctacggtcatgtgaccgctcccgcgcggccgtcactactgtacgcagccggccgcgcgaacgagcgcgggcgcgcccccgcctcccaagcccggccgctgagctatcgagccggcggtctgcggtacctcgccacgcccccgcccttccggtctccgcctctccgcaggagcatgcgcgccaaggaggccccggcagtagctgtagt

SEQ ID NO: 228177 - DNA, 436 bp, Homo sapiens
  chr2:26401683-26402119
  hyper
ggtcttggggggcgcggccccagccccatcttttcgcggggctgcttctgtccgcccgcacgggggaggggaggaggaggcggaggcggaggcagaggcccctaggagggcgaaggccggcgggttaacgaggaggcgctgagtgcacggctgggctccacgctgatttctcctaatgaattaataatggcgctcgggcgggcgggggtggccggctgcggaccgcggagagagccgaggggaaggccgtggagggaggaggacggcgactcgcgccgggtggggctgaaggcactgcggggtgactcggtctccaggctgcggcgctctgctccgggagtcagggagacctggcctggccccgtactgtcccccgtcccagcccccgcccctggccctgcgggaggggccaggcgtcttccctgagcatggtgcc

SEQ ID NO: 228178 - DNA, 695 bp, Homo sapiens
  chr2:26407500-26408195
  hyper
aggctgccggtgaacgtgctggtgcccagccggccgccgcgcaacccctacgacctgcacccggtgcgggagggtcattgctacaagctggttagcatcatctccaagacggtggtgctggggctggcgctgcgccgcgagggcccggcgccgctgcacttcctgctgctcacggacacgccgcgcttcgcgctgccgcagggcctgctggccggggacccgcgcgtcgagcgcctggtgcgcgacagcgcctcctactgccgcgagcgcttcgaccccgacgagtactccacggccgtgcgcgaggcgccagcggagctcgccgaagactgcgccagcccgcgccgcgcgcgcctctgcctgcccgcgccgcgcgcccccgggctcgcccgcgcccccggcccgctagcgccggctcccgccggcgagggcgaccaggagtacgtgagccccgactgggcagccgcgcccgagcccgccgcgccgcccgccgagatcccctacgaggagttgtgggcgcaccaggggcccgagggcctcgtccggccgcccccagggctcgatctcatctccttcggggccgcgggaccgccgcgtcgggagccggaagcgccgccgcctccagtccctcccaaatccgaggcggtgagtgagcgcgctgggggccgagtcccgggtccagccagggcccaaag

SEQ ID NO: 228179 - DNA, 143 bp, Homo sapiens
  chr2:26467720-26467863
  hyper
cagccctcaagaacggccctgaccgcccgcggggtgaggggccctttctgggcaggacccgccccttggtcccgcagagccttggtacttggacctgaaccttgctccgagagggagtcctcgcggacgtcagccaaggtgag

SEQ ID NO: 228180 - DNA, 736 bp, Homo sapiens
  chr2:26521767-26522503
  hyper
agagaggctcgtttcgtccaatgaggagtcctggggtaggagtggtgtgtgtatgtgtgtgaatgtgggagcctaactaggctcacccggcacatggagaggcctgtttcatccgatgaggagtcctggggtaggggaggtgtgtgaaagtgtgtgaaagagatggtctcgggagaggccaacgcggggagtgacgaggggaggcacagatcccttagtgcgggttgtgttccgaggccagtgtgggggaaaccagacctagaacgttgtatacggctgataggaccaggtccaccgctgcagcaggctgtgagaggggaaggcacgttcctggctaagcagcgtccaaaactcccgtaataggacccagtctggtggacccgagagtaaaagtgagagtgaaagtgcgccgcaagggaggaaatgggaggaaaagcgtcgaaaccaactcctttggagtgcatgataaaaaaatttttaaaaaggatttagaggtgattatgggatgaaactggatgctcaaaatttaaggacatactgtgaattagaatagccctcttttagtgttggacgactggccgaaggcactacagagaaattggccgtgtgttttaaggtggtgactagggttggaggaccaccagggcattcagacctagtctttgtattgattcatggctaaatgaatgcagccctgcctagcagtttattgtagaacgctcgcagctcatggcga

SEQ ID NO: 228181 - DNA, 197 bp, Homo sapiens
  chr2:26568767-26568964
  hyper
ctagcaaatgaagcgacgaagagagctggaaggcgggacttagtgttgcctgatccacgccgattggacaacagcagtgtcgggggacgggccgctcgagcgggctagcaaccccccctcgatgggcggggagaagcgtgggctgcgcttgcgcactgagaggcggccgaaggggccgaggcggctacgcgtgcgcg

SEQ ID NO: 228182 - DNA, 185 bp, Homo sapiens
  chr2:26726521-26726706
  hyper
cctggccctgggacgacctatcccaggagggccttttggcagccgggcaggggctggaaagcggcgggagggcgccgcgaggcgcggggctgcggggctcacgcggcacctgtcctacctggtctttggggctcctccttgtgagaccggtttttgccgagcttcatggcggagaacacgctcct

SEQ ID NO: 228183 - DNA, 811 bp, Homo sapiens
  chr2:26915613-26916424
  hyper
gcgggtgcccggcgcggagagcggcgagcgcagccatgccccaggccgcctccggggcagcagcagcggcggccggggccgaggcgcgggccgggggcgccggggggccggcggcggcccgggcgggacgatgaagcggcagaacgtgcgcacgctggcgctcatcgtgtgcaccttcacctacctgctggtgggcgccgcggtcttcgacgcgctggagtcggagcccgagctgatcgagcggcagcggctggagctgcggcagcaggagctgcgggcgcgctacaacctcagccagggcggctacgaggagctggagcgcgtcgtgctgcgcctcaagccgcacaaggccggcgtgcagtggcgcttcgccggctccttctacttcgccatcaccgtcatcaccaccatcggtaacggctcgccgggcggggggcgggaacccagggctgggcgcggggctccgggagtcgtccggggccggctggggctgggggcgggggctcccccgagaggggctgggcgccgaaccctgcgctcgcagaaacccgagttcagcctggcgtgtgtgctccgcggggacggaactcggggaggcgtcgattcctggctccggacctgactctccggccgggccagccctaacttggccctgccatgttgcataggcccccagggactccgaagtgtgtgagaggggcagggacgaccggcggaggctcgggcaggaggggtgtggccgggccaggccctgaacagggcgctgagagtgagcggcgggagagcgccagtgctccgtatccctgaggat

SEQ ID NO: 228184 - DNA, 141 bp, Homo sapiens
  chr2:27008750-27008891
  hyper
ctcctatcatcgccgctatatttgtgtctcggtgcatactctcattggccctacctgcagtcgctctacgtaaggggcgttccagagtcagccactgggagtcgctggattcgggttttaaaaaacgccggccgtgaagtg

SEQ ID NO: 228185 - DNA, 97 bp, Homo sapiens
  chr2:27069893-27069990
  hyper
ccccaccggatcgccggggagcccggggagggagggattctgcagctgcagcttggaggtccttgatgctgcattttaacgcgcatcgcaacgcctt

SEQ ID NO: 228186 - DNA, 57 bp, Homo sapiens
  chr2:27071618-27071675
  hyper
gcccagcctggacccgacccggcggtctgttccaccgcccggctaacggagcggacg

SEQ ID NO: 228187 - DNA, 155 bp, Homo sapiens
  chr2:27071855-27072010
  hyper
ggctgtagtctgagctggagagaagccgggagagggcgaggggaggcctcggttgagaaaagatggggatggggaaggctggggagctgggttaggacaggtagtgggtctcggggagcagggagtgggaactagggtttgaggaggaaagagaa

SEQ ID NO: 228188 - DNA, 61 bp, Homo sapiens
  chr2:27165767-27165828
  hyper
cagcgccagggaacgctagagtcagaaaatgctgatttctgttccccgtctttgattacca

SEQ ID NO: 228189 - DNA, 42 bp, Homo sapiens
  chr2:27273188-27273230
  hyper
cgaatgtcgttcgcgtcaggagagcacgtccggagaagccaa

SEQ ID NO: 228190 - DNA, 375 bp, Homo sapiens
  chr2:27274194-27274569
  hyper
gagggattcccggcgcagtgggctacgtgtttcattttagagacacaagactgttaagcgataaggagtttcacacgatgtctttttatttcgcagttgagtcccagtttctgccgctttatctttcccgcctcccggcaggcaggccgttaaccgtcttccggaagacgctgctagaaccctccggccgctcctgcccgccatcgtccccgaacgacactcgctcaggtacccactaacgtgcgaggaaccctgagagctgaccaatggtagcgagctttactgggcgggtcgccagctgcagccacggccaataggcgagagacttcttgtttcctggcagagcggggtcccggcaccgcggcgctcgggtgt

SEQ ID NO: 228191 - DNA, 208 bp, Homo sapiens
  chr2:27274788-27274996
  hyper
gcttacgcggtcccgaccccgcccagctccgtggcctcacctctgactcctaggccctccctgcctaatcccctgccgcgggagcccgtctcgaccccttccatgcctcccagtcccaccctgcccagggcaagcccgctcggtgtgacggttccccgcgagtcgagggtggagaagccagcctccttcccccgagtgggactctagc

SEQ ID NO: 228192 - DNA, 195 bp, Homo sapiens
  chr2:27294084-27294279
  hyper
atcatgcttggcccgacactttctgattgtaagtttcgaaccctgctagccctggcgcggcctcgccactcagctctggggactgggcgctacagccccgggccgttacctggggcggagaaagcgccactttcattcctgcttcttgggattgttgacggccacgtagtgatagagaacgacaagcaagaagag

SEQ ID NO: 228193 - DNA, 162 bp, Homo sapiens
  chr2:27304248-27304410
  hyper
tggcctctggagaccgcaggtcccagcatgcagcagttcctgtggcttgccttccctcctgcgtgctgcacaccggatgtgctgtttccctgccccgagatagccttactataattatgcaaacaggaactcctggccaactctcaccgtccacagagcctc

SEQ ID NO: 228194 - DNA, 210 bp, Homo sapiens
  chr2:27308893-27309103
  hyper
cgcccgacgtgtctacgtcggctgaagagacagcgggggcggcgggctcctggggtctcgcctgagacggggcacctagccctgggcgagcgccgcacccgggcccgcagcggcaccgcgcccagagcggcctctccccacgcccggggcgcgccggctcagggaggctcggggccgcccatgcagacttttggcctggcgcgatccccc

SEQ ID NO: 228195 - DNA, 405 bp, Homo sapiens
  chr2:27341651-27342056
  hyper
ccctggctggctgacggcgatgggctcgggtctccggccggccggggcggggtgtcacccacctgctgcggcgccgcgcggctctgggggtccagctccgtgggcgctcctggctgctgcgccgcccgcgcctcgcctcccgccgccagcctcccccgggccgctccacgtggccgctccacgtcgccctcccggctggagccgccgccctggccgggcagagtccggagccagtgccagccgccgccccgcccgccggacctggcccttcgcagctccaccagcgcccccgctgcgcccgcggccggaggggctgcgcgcgcccgtgtgagtgtgcgcgtgtgtgcgtgcgtgagtgcgcatgtgcgcgtgtgcgagtccgcgtgtgctcgtgagtgcgctcgt

SEQ ID NO: 228196 - DNA, 110 bp, Homo sapiens
  chr2:27435624-27435734
  hyper
ctctacgcacgaacgccatatatcgtgcggtggtagggctgtacttttgtaatgcttgatgagttctttacgtacctgcggtcgttttacaccgcgccaaactagggctg

SEQ ID NO: 228197 - DNA, 224 bp, Homo sapiens
  chr2:27440128-27440352
  hyper
cggttttgcagtgcggagaccacgggggcccactccccgtggctccgcggaccccgccccttacgtgcccggccccgcccctcacgccgcctgtgtccgcgccgccgcagtctctgctgctgccgccaagcgcgcccgaggctcctacgctgccgcgcccggcttctctccagcgccccgcgccgttagccacgtggaccgactccggcgcgccgtcctcacgt

SEQ ID NO: 228198 - DNA, 366 bp, Homo sapiens
  chr2:27473082-27473448
  hyper
cagtgagggtctctgcctggcggaggggaaaagggtcttcccgtcctgaccccagtcctgagactccctgcaaagacttccggctgcctctgccgctgcggtggcgtatgccccagttgggggcgctgctccccagccagccgggctctaggaagcgggagggccaaatgcctcctttaagccggctgcaccggggccctgaccgggcgggagggctgctggagggtggtgcttatcacccgggcttcctcttgaccctgccggctgggccctgggccttggccttcgcctcttaaacgtggtgcaggactcaccctgggccacccccaggtgggcagccttgggagaagggcaggacctgcccat

SEQ ID NO: 228199 - DNA, 544 bp, Homo sapiens
  chr2:27592814-27593358
  hyper
gccagagagactccgggagggtttgggggcacgagtactcggcgcagccggctgctgggttggcatgaccacggatccgccggcaggcgcgaggcgagccagggatccgcgtggggacgcactgcgcggcggatcaaaggaatggaggggtcaccgaccctcctcacagcaaccagccggtgcgcggcgcgggactgcgctcgagactgtgtagaccggagcccagcgtggcgctggaacggagcggcggggcccaaaggcgctcaaggcccggcactagctgtccggagctcgtcggctccgcgtaccagtaggcaggcccggctcttcactcaccctcgcgaacagccacggccacagcagccatcgccctcagtcctaggctccgcccgccgtggtcacggagccgccccgctgcctcgctccgcggctgcagggtccacagcgccacctgggctggaggctgagccgcagaagcgaagcgcgcagccccaatcggactacaatttccgacgggccccgaggccccgccccgcactacggg

SEQ ID NO: 228200 - DNA, 76 bp, Homo sapiens
  chr2:27603727-27603803
  hyper
gattgtgacgaggcggggagcaagccaatcagcggcagcggggagccggccagggagcagcgcaggaggcgtcctg

SEQ ID NO: 228201 - DNA, 224 bp, Homo sapiens
  chr2:27651189-27651413
  hyper
agaactgtcatggcgccttcaagaagaggtaggaggccctctctgcgtccagcagaaccatctggggcacctggaccgggcggtggggtggacagagagacgagccccagctgggaccgaaaacatcgacccctccgagaggtctcggccggaccggcgcaaggggaggagagcgggtggaagcccaccccagcgaacgcccgagggccgggccccgcccaccc

SEQ ID NO: 228202 - DNA, 93 bp, Homo sapiens
  chr2:27712679-27712772
  hyper
acgtgcgcaagcgcggtgagatctagggcgggcccttgagagggcttcatgaatgttctccttgaccaatcccgtcgccgcatgcaaactcaa

SEQ ID NO: 228203 - DNA, 517 bp, Homo sapiens
  chr2:27717787-27718304
  hyper
ggtgcccagagggcggcccatcgcccgactcggtggcgctgcccctaccccatcccggcgcgggcccggcgacgcgggcagcgcggggccgagctgcgggcggagcgggcgcgggtctgcggagcccccagggctcgagcgggccacggagtctgtccgggagcagggggcgttgcccggacgctggcctgggtccccggtgcgggaggcagtgcggcggcctccgcccgcccctgcagcgggatgtgaccgtcccggagagccagccgccgccttctgcagcgctggccccgctcgctccgccgcagcccggccgggacgcgcgggcccgccccgcccagccggggttctcgccgccgtcattcccctcccgccccctcactcccgtcctctcggggctcctcccacgaccctcccaatggcgcctccggagcccccatcccttatcccttctctctcccagctgaagcggacgagtcggcgggggcgtggggggtgagacgcgggtgctagggtc

SEQ ID NO: 228204 - DNA, 511 bp, Homo sapiens
  chr2:27805830-27806341
  hyper
gccgcagccccctcggaagctgctaggcggaagtagaagttcagaagagggctaggcggagccgagcccacatccgggagaggagagcggaagtggcgttggtctggccggagcccttgggtgaaattgttaggcgtggagagggagtgatgtcttccagactcggtgctgtacccgccgtgagtttcttggtttgaccgttatgctttagaggtagcgctgtcgagcccggaacacgcggtccctcgcttttgtcccatgctgagttggttttatcagaggccatcgtaggccccacccttctagatcagatcacctgtccctttttctttacccacgttctgctgcctgttccccacctccttggatttaattcctcgccacattaccattagtttctattccttttacatccccaatgtctctcatatccgttgtcttttcttttggcctcccttttagagcctgggacagggctttgagaatgggggaagacgaaggctctggtatt

SEQ ID NO: 228205 - DNA, 484 bp, Homo sapiens
  chr2:27851762-27852246
  hyper
catcagccctgcccgacgctaagaagatgccctggcaaccgccgcgcccctcacccgctcctttctgacgctgtggtggttttcgttcgcagcccagaacattgcggaagtttctctacccatgcggtgtctctatggtcgggtgggtggggccaggaggaagatggcggcgtccgcagctgccgctgagctccaggcttctgggggtccgcggcacccagtgtgtctgttggtgttgggaatggcgggatccgggaaaaccacttttgtacaggtgacgtacacagcatgggtgtagtaggggagcgcaaaaggttgcctccggcaggcggaaggccaggaagaaagggagggaagaggatttggagggtaccggcgcatggctttcgggggcttcccatcaactttagttccttccccggcaaagcctcctcgggccctagccaggttaattaaggctctcttctgcgcaccttcagggcat

SEQ ID NO: 228206 - DNA, 251 bp, Homo sapiens
  chr2:27886206-27886457
  hyper
cgaagaacaggcacggagcccaaggaatgcccaagtccctccaggggtttcctcggtcacggtccgccggcgcaggcgccaatcacagggtcctgaggtcgcctgacgttcagggcagccggaagacggggaggtctggacctgaaccgagacaaggaggtaccacactattcactgctgcgtcgcagagcgggctgggcggctgtctggacctcgagaggcctgaggcaaggatcgcgtcagaccccgaa

SEQ ID NO: 228207 - DNA, 76 bp, Homo sapiens
  chr2:27938529-27938605
  hyper
agaggccggggagtaggtggcatctgaggctcccgccgcgtcctccccagcggctgcctgacgctgcatcggaggc

SEQ ID NO: 228208 - DNA, 214 bp, Homo sapiens
  chr2:28113199-28113413
  hyper
cagacgccgccatcgctcaaaggtgctgctgtccaacctggacggtgacctctgccctttgcccgaccccgtaaccagagacgccactcctgccctccctaacgacgcgggcctttcagacgcctacgcgggtcgcccacctgactgcccgaaatcaccccgcccaccaagtgtcccctcttcttcctggaatagtctcggtgcacagcctcac

SEQ ID NO: 228209 - DNA, 177 bp, Homo sapiens
  chr2:28114002-28114179
  hyper
tccctttttaagacgtcccctagagtggggtggtcattcttcgggtctgagctaacttgtttttctcgaatgttgccccttgggggaaattgcttccccagtgtaacttccctcgtgcgctgtatgacgtcgacgtgacgcagcaggatgccacccctttccgttccatgacgtcag

SEQ ID NO: 228210 - DNA, 223 bp, Homo sapiens
  chr2:28617015-28617238
  hyper
ccacccctgccccgcgtcttctctctgggtggtggacagacaagaaaatctttgcacccactggcacctctcgacatcctgggaccctattccttcaggaaagccctctctctctcctccccgttctccatcagtcataactcctttctgaaaggggttggggacccagaaacatggttggactccttcaagtaatctggagcgagggcgagggctgccgctc

SEQ ID NO: 228211 - DNA, 201 bp, Homo sapiens
  chr2:28617456-28617657
  hyper
gggaagagacatcacgcaggctcctgggtggttctggaagcagaaaacaacttgtttctaaagcagccggactggtttgcactggagggattgtgcgtgtgatctctgtgtttataaataccaggaaggtgctgttggcgggggggtgctgatggcgtgtctgccctctgctgcagctcccccacccgctctgtctcgaga

SEQ ID NO: 228212 - DNA, 424 bp, Homo sapiens
  chr2:28789407-28789831
  hyper
ctccccttccccaacatcagcgaaaatcagccgctggtttaaagctggcgttttgtttggatgtgctggcctatggggaggggagtcgtattctggtttgctttttccgtttttctactgaagtgatggggaaagtgcaagctccaggcccccgggctgtttctcgggagacgggcgtttctggctagtgtctgaagggtctcggcgtggctgggattttaacccttcattttctttcttggacccacgttacagcgtcggcggagatgagaacatcggcaccgttaccaccctggcgagtgagtacgcggcggcggccgggatgtttggtttggggcggcccctgcacgcttcccgctccccctgcaggtggcgcgggcctcgggaggagccccggctgcaggagcccgctaaattcaccagg

SEQ ID NO: 228213 - DNA, 101 bp, Homo sapiens
  chr2:28844563-28844664
  hyper
gttcctttcagaagtggtaacgtgggccccatgctctgtttgagtctctaagccacaggaagcgatgtcagttcctcaacgtcacgagcaggaagaaatta

SEQ ID NO: 228214 - DNA, 638 bp, Homo sapiens
  chr2:29033386-29034024
  hyper
ccgcagccccagccccgggggcctggttgtctaatcgaagggaagtaaacggccccaacgcaagcctgactgcgagacgtgcccaagggaggtaggtcgaatgaagagggttgtgtgagttttgcgcgggcaggcgggataacggaggagggaggcccgcggccgaggctcgggcgggcggggggcagggaggggcggggttcgccggcgcgcactcccaggcaggccccgccccctcggccggctgtgcgcgctgattggcccctgccggcctcgcgctccctcgctccgggttggcgggagaccttagagcgggtaccgctgctggctagcgaccgacgagcaaccgtctgaggccaggagcgctgcgacggagccttgaccgccgttgcccggccctctcccgcgcagccccgggcttccgcaggtacctgtgctcgcccccgggaaggggcctcgcaggcgaatctccagtttcgagtgtgcccggtccctgggttcgctcgccggcgaccccaccgcccgccttagatgagaaggcagcgctccagcctcgtcctcacgccgcctcccgtgggcgccctcagctgccttcgcggcgacgacacacgcgctccccgcagcgggctctgggctga

SEQ ID NO: 228215 - DNA, 185 bp, Homo sapiens
  chr2:29093424-29093609
  hyper
cgacctccaggttcgctcttggacagcaagattgagagacaaaacttaacaaagcgctgtgcaaactgaaatcccaggcttagctcgcttgtgtcttgaacacggaagtcacctagtcacccacaagatgtatgagtacagctaacccccagatgcatttgacagacggcgtgggacgcgccact

SEQ ID NO: 228216 - DNA, 100 bp, Homo sapiens
  chr2:29339006-29339106
  hyper
gcagtccttggctacctgagatcccttaattctgaaccatccgcacctgggaggggaagttgaaaggagcgctggagctgagcccgcatccttaaggatc

SEQ ID NO: 228217 - DNA, 1433 bp, Homo sapiens
  chr2:30142811-30144244
  hyper
tgactaaaaacactaaatcccggcacactcaggcgggagctgctcaccagtcccgaagatctggaagagaaggcggggctgggaggcgcgaattgccgcggacagccttccctctctgcccacttccgacgccttcttctcgggcatcaggcggatcctcagtcgcccttcgccttggcgaatccaccaactgaacagctcgctgagattgaactggagcagccccacagccgcctccccggggggcccgacgcaaccctccaagatcgcctcctcgcccagctccagcaccaactgcttggcacgccggagcttgcgcacggagccgcccttcagcaccctggacagcgtccgggcctctgccggggctggtgaaccggcggtccaggagacccccggcgccggccccagcaacctgagcagcggggcgcagtccagagctagcgagccgcgggcctcgggcctgccagccttcagctccgaggaggatggtggcagcagtaggtcccgggcgtagacacggaagagcgagggcaccacgaagtcaactgccagactcttcctctgcaggcgcgagtagctgagtggctcccggggctgcagcggcggccccgcagctggggagcccgcgcgctggccggtccccatcccggagcccacagctgccgtggaaagcagcagcggcaggagccacaggagcccgatggctcccatcccgccggaggaggccgtttacactgctctccgggcccagcctcacccttcgctctccccgagatgggaagaggctctgaacagtccttggtacccagcggctccttccacctgatctccagaggactgtgcgtgcgcgcaagtctcttgctttcccccaactgcacggaggcgagcaggagtctaaatgaaacagacctggaagctcaggggcgagtccagagacactcaagcacactgggctcactggctgggaccttgagcctcccgctctccgcgccgagtgccgcgcccccgtctgtagctcgctgcgctcggtacagaggaactactatggttgaagggaggtggcagttgggtaccgtcctctcctgccccccgcagtcggagctggggtctgtcccctctcggggcagcctccaatctctgcaacttttaaggctgagaacggcggctcccagctgctgcacgctgtcctggccgccttttgcgttccttttggctcctccaagctcttctgcccggtctgggcgggaaccgagggcggaggctgccgtcttgcgcaccctcaagctatctctccgctgcgggaaggcttcggactgtctgcctgctgaacttctgggcgtgaatcccagcccccgcgctgcgcaagtttgcagcgtccttgctctcaccggcgcctcggctcctcagagttcgcaggcactggagcggcc

SEQ ID NO: 228218 - DNA, 320 bp, Homo sapiens
  chr2:30144544-30144864
  hyper
tccgcgctgctgcccgacccacgcagtccggcctcgccccgccccacccgcaccctccaaccaatggcgtggctcgatcggctcctatgcaaatctgcagaggcctcggcattcattgagaaaaggagtgagcccgccccaccctccctctgttccctctccagtctcttgttcttcccctcctctagattccctgccctatttctctgcagtgtgaaagggagcaaatgtgagaactggaagaggcctttgcaatcaagcactctccctaattatacatttaagagattaaacgggtccgacttcggaaaaacaggttc

SEQ ID NO: 228219 - DNA, 43 bp, Homo sapiens
  chr2:30369368-30369411
  hyper
acgtgcgatgtctcgcagctgccgcaattagacaggccaagcc

SEQ ID NO: 228220 - DNA, 39 bp, Homo sapiens
  chr2:30453520-30453559
  hyper
gtgtgggaggcgttcggctaaagctctttgtttctgctg

SEQ ID NO: 228221 - DNA, 56 bp, Homo sapiens
  chr2:30454579-30454635
  hyper
gtgtgtcagcctgccctaggacttcatgtctatatatttccccattcactggtgag

SEQ ID NO: 228222 - DNA, 999 bp, Homo sapiens
  chr2:30454815-30455814
  hyper
gctgagaacatccagacaaaggacgtgaactcggagccctcacctaagtgacggccggagggtttgtattggttggcgggggagccaggggtcacgtgtgaatcccccccaatgaaaccaccctatgcggagagctgcaggaggcgcgcgccccacttggcgcaggggggctcctgctcttcccgggcccctcctctttttctttttgtttgcatgcaagtctcaacgtcgaggccggcagcagcggggctgagctggtgcggccgcagggtttgcagagctccgggggggtggggggcgggaaacgctctccccacacgtaaccccactaaagccacaagcagcagggcacgcgctgcagcctctcaacccctgccctctccaccgcccctaaaaaccgacgcacattggtgggggccgggactgggaggagccgccttcgccgtgctgaaggggaaggagcccgggccgggcgcggggcgtcggaggtttgccccggactggggatcggagccgggagggatgcagagagaggcaggcccctgactgctgggacttccttgctggcagtttcttccttcctgctctgggttagaggagaagcggccgggggcgagcgccggcagccccggagcgcgctctcaggtgcggacgtggggagctcggccccgagtctccggcaggcgctgagcgaagggaaaaccggcgcaagccgcggcggggtccggcctggcccaagaagcggaaagttcatgcttctcgcttcaacttttcgggccggcgccacagccccgagcgaggaagagccgcccctacgtcagactcttcaccctgcgtgcgctcttctggctcctttctttggaggtcgccagcagcctttccaagacccgggaggaaactgcctttgcagggcccagctcccgaacctaaacttgccgcaaagccccgcatcttctgttagtctccctgcccccatccgtcccagcctggcagtgttta

SEQ ID NO: 228223 - DNA, 850 bp, Homo sapiens
  chr2:31456682-31457532
  hyper
caactgaaggagaggcgattcaaagcagggagtgtgatgaataggtcaactctgtcctcgcagccgtccctgagagggcgctgttcccaaatcgaagccccagaggcggagactgagacaccggcactctcccactggactgggtcagcatccctctccccgcgcggccgcaggtctagagctgagcgcctgcccacaaacatggcggcgccctgcgcggcttcccgtcgccgcaaccgtggggccggccctgccttgccagtactaggggacttcctctgcgcgccggcttcctgcccagctggcatttaaaccaccgcctggggctgcaggatgctgctgcggatgcagagctgtccgcgggctgggcagcgtcgccgtctcccctgagccgcctcggtccggcaggagcggagccgaagcatcccttgctgcacgcagggcagagcaggcgagggctgggggccgatcggggaccccggcttgggaccccggcatctggcagtttccttgcaggttcaactttaattgccaagatttcacccctcctcctcaagcccagattatttatcctccctccggcctgggctgctggatgcagcagcggctgggcttggtcccaggagcagggagagtgcgctcccggccctcctagccgcgtgcccgggccatggtgcggctgagccccgcgcttgggtgaggcggcggcgcggctcggagcccggcggaccggtcctacgggacatcttcccctgaggaggagtcttcccctggggctgcgtgccgggggcgagcggcggccgcgatgttcagctggctgggtacggacgaccgccggaggaaggacccc

SEQ ID NO: 228224 - DNA, 177 bp, Homo sapiens
  chr2:32234815-32234992
  hyper
cgctgccctgcggcgtggagaagcggggctcggcgccgggcacaccgtccttcccgggggtggcagcggccggccgcacgcttcctgcaagccagaggcggcgacaagtcggctggggtccgggagcacgttccttcctcgagcctggtcctgagggagggcgcaggctgccgaggc

SEQ ID NO: 228225 - DNA, 351 bp, Homo sapiens
  chr2:32235911-32236262
  hyper
gaggaggcagtggcggctgcagctacgcgcacacaaaagcccagggccggggcctgaaccggggaaggcagacccggagaagagccaacgcttccttactcgccactctaacgggtcctgcccactgagcatgcccagcaccgctgcctacccgccgaggaatctcaacgtgcacgctccgctctccggggtttagcggcagcagaggctgggaggtgggggcagggcgcggggagcaggacgcagccgcaaggcaagccccctcccccagccaacttcctcaaatggagagcacctagggctcgcggatgcggctttccacgaggacagtcccgcgggtatccatcatat

SEQ ID NO: 228226 - DNA, 429 bp, Homo sapiens
  chr2:32264569-32264998
  hyper
acaagaagagccgcgagttacctgggagatttcaacacgaagactccaggatggagtgcagcccagcccccgaccccgcccctcacccccacctgggcgcgggagcaccacgagcagtagagcagcagagtgggacagtccacgactgggcgcctacatggggtctggaaactctacgacagtcccaagtacctagaataagtgagaaagtgggggaaagggagctgattacccgcgcccaagccgttcgttcttaagagccctgcaccgcgccaccagctcccagcacaaacagctccggccgtaagtgacggctgtcgcacgactgccgcgcctgcgcagaacctcccggcggacaagaagctgggaggcgcgcagaaccatcgtcagtccccgaggctctctgcagtccgcgtgagtcctggccaa

SEQ ID NO: 228227 - DNA, 318 bp, Homo sapiens
  chr2:32288258-32288576
  hyper
gctaatttaattcccagattgatatccattgcttctgagatgggccaattatccttcggagaagacttaggtcgcctggcagaaaaagatgaaagaaatctaagaaaacgacgacactgagagaggagcctagcgaaccagcagagcgaccccaagccgcaattcccccttccgtggatcgattacgaaggcttcctggcaggagctctccagggctgccgacgtgagccgaactgcacattgggaactgtagttgagtgggaaagccgagaggcgggggccgcacacgcgtacaggggccccggtcaacaaagacgc

SEQ ID NO: 228228 - DNA, 83 bp, Homo sapiens
  chr2:32502955-32503038
  hyper
ccaatcccagcgccgctgtcactgttatggtcctgtcagggtgccggcgtcgtggtgcttgggtggtcgccaccaagaagact

SEQ ID NO: 228229 - DNA, 182 bp, Homo sapiens
  chr2:32581580-32581762
  hyper
aagcttaactatgcgcttccagcacctcgtatctggtacttctgttcaacagaaagccttgggaatggggagggcaggcgtggtaaaaggtacaggtttgggaaggtcgctcggttccttccaatccaaacgagaggcttctgattgtttattctcacaccagagccgtgaccgagacccag

SEQ ID NO: 228230 - DNA, 500 bp, Homo sapiens
  chr2:32852579-32853079
  hyper
cttctacagcgttccgacagtgttccaaaaacttccctgcaccagcggcaggggcagatttcccacccggccatgattcatgtagagcagtgtcaaaaccagatcctttccttacacgctcattcgccgaaagacccatgctatgctgacggggttccaacctgggcttcaccgactccacgtcagagggtctgtgattccctgagagggtacccttaggctgagagcaagggcccacctgcactctgcgcgaaggactgtggttttcatcgggttgtcgagagcgttctaacccaaaatgctttaagaatcacaactctagcccttctaatcaaactgctttggccaagacgtccgttttgagttgcatttgaaccctagccctcggtgggaggcacactcacttccacgttcacagttcttggaagcggtcccactgggggcggggctgagcgcgaccgcgccctcaactccccctattgcccgccccggggtggggc

SEQ ID NO: 228231 - DNA, 139 bp, Homo sapiens; identical to SEQ ID NO: 198160
  chr2:33171660-33171799
  hyper

SEQ ID NO: 228232 - DNA, 142 bp, Homo sapiens; identical to SEQ ID NO: 198161
  chr2:33172105-33172247
  hyper

SEQ ID NO: 228233 - DNA, 114 bp, Homo sapiens
  chr2:33824328-33824442
  hyper
tcttcgccggcaacgcgtacactcgcgcatgcgcgacttccccggaacttccaaatccacagctggcgcctcagctcccgcactgcgcatgtccggagcgtgcgcaagaaactt

SEQ ID NO: 228234 - DNA, 258 bp, Homo sapiens
  chr2:36825136-36825394
  hyper
ggggccgggaaaccgtcggcgcccccacccgcctcggcccccgcctccgccccaggctcggggctcgcgttacagttctcctggtccaggaggctccgggccggctcctggaactcatagaaatcctgccagtccccgtccgccgccatcgccgcccggagcagtcgcgcgccccgcccaggccggcccagcccgcccagcccggccccgccccggcccgaagccccgcccccgcccgctaccgtgctgacagatccc

SEQ ID NO: 228235 - DNA, 230 bp, Homo sapiens
  chr2:37194141-37194371
  hyper
aacaggctcaaagcgagctacccggtgcggccgcgggaccggggttctcccgccagctgccctgcgtgctctcgcttcggcttcgtgttcggagtttctctcaccctagacgctcctccattctgccaatctgcgggtcgctgtcgctcttgcctttctcttttgactcgaggggctcaaacctgttacctgaccagttttcatttctaaggaacgccgatcacctttct

SEQ ID NO: 228236 - DNA, 31 bp, Homo sapiens
  chr2:37384213-37384244
  hyper
tggatccagagtgcgcgcgagaggcactggc

SEQ ID NO: 228237 - DNA, 740 bp, Homo sapiens
  chr2:37458343-37459083
  hyper
ccagagaatacaacgttcaattcgaaacttttcttttgtaaacagcagtggaaaccggcgtgggaagcgcaccgaacacatgcttcagaggctgggatctcggtcctggacgcccgcgctctacgcagcgcggaagcggcggggcagtcagcctagccaccttcggaactctccacgcctgatcccgttccccggagcccgcggccgttaccttggtgcctccgagccgtaacacttcctccagggagaacccattctcggcttcactagtattatcctcatcctcctcgtccggatcttctactgcctcctcggggcgccaaggccgcttggcatggaactccaaaggctccttgactgcggccatggcgggcaaagcatacgcgcgtgaaactcagcctatttccgctctgccagtggcgtaattcctgtcggggcgtgtcttctcccggaaatggtctaagccccagctcctggcggagcgagctagcctgcgaatttcagcatgagtgtactgctgaggtcaggtttggggccgttgtgtgccgtggcgcgcgcaggtaagcgtcagtcccctcgaagcccggttgccgtggaagccgcgtggggcgccttcctcagctcttcagttgagggtaccgggggatcaagggctcgggggctcacttccaccttgaaggtaccctgggctggaaacgggtccggtacaaacgcaatagggctgcgtagtcgtgggcaag

SEQ ID NO: 228238 - DNA, 331 bp, Homo sapiens
  chr2:37571656-37571987
  hyper
ttgtgtctgtcacccagggccgcccagccccggggtttgcgaaggtccggggtaggagggctgcagcctgcgcgacgcggcgggaggctacccgggggcgatgggaaggcgggcgcagtcgacccaagggtggagaagagggaaggcgaaggacgcgcgttcccgggctcgtgaccgccagcggcccggggaacccgctcccagacagactcggagagatggcaggcggaagacaccggcgcgtcgtgggcaccctccacctgctgctgctggtggccgccctgccctgggcatccaggggggtcagtccgagtgcctcagcctggccaga

SEQ ID NO: 228239 - DNA, 163 bp, Homo sapiens
  chr2:37572275-37572438
  hyper
aaatgtgtctcgccggcggctgctgagccgggaggcgagggcgcatcgcggcgccaccccccactcgggaccctggagggcaacggggccggcgctccggggccgctagggtgcggggtgcgcctgggggtgtgcccacagcccccccgctgcttcatccaag

SEQ ID NO: 228240 - DNA, 80 bp, Homo sapiens
  chr2:37898934-37899014
  hyper
ggggccaaccggtggccgggcgcgcgcgcgggggggggtcaccgttggaccctcggaggacaatgggcgcccattgttac

SEQ ID NO: 228241 - DNA, 344 bp, Homo sapiens
  chr2:37899734-37900078
  hyper
gaatgctaattttcttaatcggcctccgtctcttcctcctccgcgagtcgtcggcctggggaaggagtaggcgacaggaaagggcggtgttttccggctgggaggtcccagcccgcatggtcagccaggggagggggctgggacccctgggagtcggacgctgggggcctggcctctgccctgagactctcgggttggatggaaatcctggcacaacgcggagaacctcccggataccttggctttgccgagagatatcagcttcaggtcatcaccgcggtgccctgggtctgtctgaaaccttagagggtgcgccttaagccgatgttgtaaacccaggctga

SEQ ID NO: 228242 - DNA, 2197 bp, Homo sapiens
  chr2:38301661-38303858
  hyper
gcggggggcggccccgggccgaaggctttcgcagtgcctcaagaacttgtccaggatgaagttgctgaagttgcggttgagctgctcgaattcgcggaaaacggtgcgcaccgggttggggaagtactgcagccagggcatcacgtccaccaggctgcccgcgcccaccgtgcgcccgaactcttcgttgtggctgagcagctcacggaactcggggtcgtcgtggctgtagcggcagccgaaacacacggcactcatgacgttggccacggccacgacggtcagcggcctcgggtcgaggaaggcgccgtccgcgctgccgcgcaccagcagcgccaccagctcgcgcgcctcgctcagcacgtggccctcgaggacttggcggctgcgcggctggcgcgtgaagaagttgcgcatcatgctgtgggctgcgcgccgctgcaccttccagtgctccgagtagtggccgaaagccatgctgcggccgccggacaccacacggaaggaggcgaaggccggccggtcggcgaaggccgagccctgctgcaccagggcctggtggatggcgcgctcgccattcagcaccactatggggcagctgcccaggcggatctggaaaacgtcgccgtagcgccgcgccaggcgagcgaacgagaggtgagccgcctggcccaccgccgccgcgtttccgatcagtggccacgcaaacgggcccgggggcgcggaccggagctgccgcctccgttgcctcagcagccgctggcccacatgcacagtggccagcaccgacaggagtagcaggagcgtggtctgctggatggacagcgggtttagcggccaagggtcgttcgggctgaggctggtgcccatgctggggacagagaggagaaggcgtgacactcaggggtgcagagacaggagcgggcgccccacgcccctaccccagcctctggggactgagtgccgttgggtggagaggtcggagctgactctctggagaaatggccgaagacgccccttcccatccccaacccactctcccttggagaagagaaggggcgtgtttccacctcgctgtaacccagcgccaaacccttcccctccccgcaaggcgcgtaacggttcctgcaatctggggacaacgctgcgggcatcgaggcggtggcgcttgatttcctttaaagtacctaccacgccacccgctacctgtaataatccatctgaagaggtcgccgggcagcgcctcggcagacagactgacctgcggggaggtgcggtttccagtggcgcgggacagccggctccgagaaggaactgggacctttgcctagggcaagacgtcaacaggaacccgcagcccggcctggacacctgctgccctcactggaagctttaactcccactcgagtctcttggcgtcgtcagtgccaggagcgcttggattgggatggggacggagaagggtgcctcgctcgccgagccccgctgcccttggggacctggcaaagtcgaggtttcctcacagcgttgagattgagactgggggtcggtgagtggcgtcaattcccatgcccttgcggctctcacaactggagtcgcagaagcgctcgctcccactcccactccagagtcaaagcgcgccatcccgctcctccgggttttaaggactgggtagaaggagggcagcgcgacctggcagggcggggcctgcggggggcggggcgcgccgcacaccaggccgctttgacccggactcccgtccaggcgcaccggccggcctcggagctctaccagcaggctttcatgggagcggaggtgcccacgtttccattgtgcggtaaccgcgcttcatcacagccacctccaatcgaggccgcacggtgtccccagaaccacgctcggtacaacctgccccggccgctgcgctcgacttgggagcgcgccccgccccgagcgcacgacctcccttccctctccgcgacttgagcttgcttcccggaaagccagtgtagtggcagcggtttgcctcacagcgcccctggttggttgtttaaattttatcttaggttctcgcaaacaaattgccacctcagtggaggctctttggcatgctaaattttttccagttcttgcggcgagatcaggaatccctaaaagtagccgctcccccgccccggggccccgacagtgcttgggc

SEQ ID NO: 228243 - DNA, 161 bp, Homo sapiens; identical to SEQ ID NO: 198166
  chr2:38342433-38342594
  hyper

SEQ ID NO: 228244 - DNA, 155 bp, Homo sapiens
  chr2:38604302-38604457
  hyper
agacgtggttaaccgcggcgcttgggtcgctggtccgtcgccggcgccacagcccctggtgcggttgctgccctcgcgctgcctcgtccccctccgccatcttgtaccgatttaaaattaactccccactgacgtcaaacgccgccgccgcttta

SEQ ID NO: 228245 - DNA, 193 bp, Homo sapiens
  chr2:39005144-39005337
  hyper
ttgaactgtccgtcgtggcaatggagagggatagccttagaggacatggcggttcattattattattattattacagaacaatcttagactctgtccgcaccctgcactctaggtcccgcgactctcagacctccaagtaggactacaaaacagaggtttctgggggaaggaagtgacgatcggcgcaaagca

SEQ ID NO: 228246 - DNA, 427 bp, Homo sapiens
  chr2:39187314-39187741
  hyper
cgcgctgcccgcgccctacgacgaggagccgttccaggctccggccctcttcgagaactgctcgcctgcctcctccgagtccagcctggacatctgcttcctgcggcccgtcagcttcgccatggaggccgagcggccggagcacccgctgcagccgctgcccaagagcgctacgtcgccggcgggcagcagcagcgcctacaaactggaggcggcggcgcaggcgcacggcaaggccaagccgctgagccgctctctcaaagagttcccgcgtgcgccgccagccgacggcgtggccccacgcctctacagcacgcgcagcagcagcggcggccgcgcgcccatcaaggccgagcgcgccgcgcaggcgcacggcccggccgccgccgccgtcgccgcccgcggcgcatccaggaccttcttcccc

SEQ ID NO: 228247 - DNA, 102 bp, Homo sapiens
  chr2:39847387-39847489
  hyper
ttcatttgtcatgccggtggctgtggttatcagacattgcagcaggattttggcaaaaatctcataaatagtgtgcagcaatgtcagcggtctctgctgcta

SEQ ID NO: 228248 - DNA, 453 bp, Homo sapiens
  chr2:40678393-40678846
  hyper
agaatccccaaagcacaccacggcacagtgcccagagacgtggaccccgcagcccactccctgctaccccctacatttcttcctcgtctgtctctgccccgccacacctccctcctctccgcagtccgtggtgaatgagcacccaacgcccgctggaaaacagggggctcggaaatgtggccttggggaaagaccccagggattaccggaaggagggatgtccgcggagaagagtccagtgggtggggacgcctggatccccagcagctctgcattcggggtggacttagctcttcgcgccctgaatcctcagagcccagcgcggtgcagggtgcagcatctctccttagcagccctttcttcctccggcagcctgcactggcaggcaggcaggcaccctcacgcccagacgcaccagcccgagcaatttcactctgggaagcgcggacaccc

SEQ ID NO: 228249 - DNA, 239 bp, Homo sapiens
  chr2:40678906-40679145
  hyper
acacacacacacacacacaaatttagaagccgctcgtttgccaaagcagagggaagtgtagccttatgagcagcaaatggaaaatagttcttggtctctgactaaatgccttctgcctgtccatcataagatcctacctggtttggggagtgtgaatggattcttcctccgttcctccacgctagtagaaaatacggcgcactccctccttttaaacagctcccgatcaggaagaggtc

SEQ ID NO: 228250 - DNA, 379 bp, Homo sapiens
  chr2:42068163-42068542
  hyper
gacgtctggtttccggggacgcagtgataagcgcagaacgggaggtctctgaagcaagatggggctccagacataatctttacctgaataagtcccaacgctgggagtgtcagcccgatcctcctacggtggaaaaggcggcagccaattgctacagtccctttaggcttttctctcccgccaatcctcactctgccctacgggagggttcttggccgcttcagctcggtttgctgcttaccaaccccgcggcccaaggggagcacggctccctggcccgatgcccccggggtatgcagaagggcccagccgggacagcagccactgcatttctttggcttgcgctgcagtccggatggagctcggttctgacccagaa

SEQ ID NO: 228251 - DNA, 458 bp, Homo sapiens
  chr2:42274303-42274761
  hyper
tacgcggctgaccccgtcagaccccaggcatcttgaggggtagggagcgacccccagctgcatttggggctttagaggcaaggaaaatcagaaacactttggtaaaaggagttgaacagggcatcctcggcgagctcacgagcattcctctatgcctagagctcctgtcccacgcgcgctcgcaggtgctggcccggctgtgcccgcttccccctcaccatcgccccaatccggaatccggggctgagcgaggagccgccacccccggccccacccgcgagagacggggtccacgcgccttccctgcgcccaaaccgccccgaggcccccagtcccaggagggagcgctgagatcactcggatctccgcaccccggacttagctgctcgtcccctccggagcccgctacccgccggcctcgcccctttatctttcccccactccgcccggccggctcc

SEQ ID NO: 228252 - DNA, 214 bp, Homo sapiens
  chr2:42275001-42275215
  hyper
gccgggccgggcggccggagggggcggcgccgaggacgggctcgggccgggagctgggaggtggaggcggaggggcgggggagggggcgggggagggggcgggggcgggggcggggggcggctctgggccttataagcggcgggggcagggcggcagggaggcaagtgtcaggccgatgtgtcgcccgcgaggggccggggtcggggccgccgg

SEQ ID NO: 228253 - DNA, 473 bp, Homo sapiens
  chr2:42275455-42275928
  hyper
tgagccttcgccggccccgggtccgggccgtcgcgggggccgcggggagctggcccggcagatccgggcgcgctacgaggaggtgcagcgctattcccgcgggggccccgggcccggggcgggccggccggagcggcggcgcctgatggacctggctccgggcgggcccggcctgccgcgcccccggcccccttgggcccggcccctgtccgacggcgccccaggctggcccccggctcccggcccaggctcccccggcccgggcccgcgcctgggctgcgccgcgcttcgcaacgtgtccggcgcgcagtacatgggctcaggctacaccaaggccgtgtaccgggtccgcctgcccggcggtgccgcggtggcgctcaaggcggtggactttagcggccacgatctgggcagctgcgtgcgcgagttcggggtacggaggggctgctatcggctggcggcccacaagctgc

SEQ ID NO: 228254 - DNA, 512 bp, Homo sapiens
  chr2:42329271-42329783
  hyper
ttttttttaaatgatgtcatcgcagtctgagagcagccagacacgtagtgatcagggaaagtcgaaagtgcagatgggttcgcaaacgtggactctctagttttgggtctgcagatggggccggccaccacgtgctctctgagttctctttccaagtacagatccctccggagacggaacattgttccgcctttaattcttcccaggagctgcggaggaaggcgtgagaaccggagcccggggtgacttgcgggggaggggatcgcttccccgtcgcccacacctgcctaacccacgcccacggcggccgcaaaggcgacaccgcgtgaatctggaaagccccgagtttcaacaggcccaaccatcggcggctttgcaggcgcagcaccaagtgctgctctgcctgtgttcccccagacagcccctggttgtgatttgtcgtttccagtccagctagagtcccaaggccaagaactagacccttgcagcgagatccgcgcccccccccaccc

SEQ ID NO: 228255 - DNA, 149 bp, Homo sapiens
  chr2:42588290-42588439
  hyper
ttgtagtacatgacgcccagagtccggcttcccgcatccgctgccaacgcgaccgccccagagaaggaccccgcctccccggctgtggtcccgagactcagcgcaaggacccggtgctgggactagggctgcccgaagatcgcctaact

SEQ ID NO: 228256 - DNA, 213 bp, Homo sapiens
  chr2:42719937-42720150
  hyper
caggacggacgggacgggtagagaagcagtgcgtcctacccggagggctccctcccagggccggcggagtacctgctccggtcatccaggctgcggttgtcggcggctgcgttgcgccagtcgggcaacgtgctggcgcacagcaccaccatggacacgatcacgaacaccaccgacacgctagccaggatctgcgcggccagcgacgacgtg

SEQ ID NO: 228257 - DNA, 391 bp, Homo sapiens
  chr2:42720180-42720571
  hyper
agccagcgcctggagggagccgcctcggccccgccggggcgcgcctcgtcgcggcccagcacgcccggctcgtcggccgagtagaaggtgtaggtgtcggacatgcggtcgtcgaggcggcgctggcagcagtactcgaggtgcgcgccctccaggccccagtagatcatctcgttgtagaaggagagctcgcacatccgcggcgcgaagcgcagcttgccgtggccgcgcacgtagagcaggatgaagccgaaggcctccgagtgccggtcgaagaagtactcgttgcgctcgcggtcgtagtcgtcgcacacctcgagcacgtcgcgctcggagcggcagccgtgcagccggctcacgcggcgcagcgggaagtccttcagcagctccc

SEQ ID NO: 228258 - DNA, 250 bp, Homo sapiens
  chr2:42721291-42721541
  hyper
cgggcgccccgccctggacctcgggctccccgcctcgtgacgccgtcctccccctccgctccggcccgtagtggcggggaggggtccgcagggcgggggagcggggagcccagcgccgggatgcctgctcccgcgtcctgccctgggccatcgggatgaattgggcagtccccagggccccttttaacagccctggttcaaagcccagtgtggactcgggtgcggggacagacggcgtttggagagcttt

SEQ ID NO: 228259 - DNA, 245 bp, Homo sapiens
  chr2:42795911-42796156
  hyper
aggtaggcaggctcggcccgacccggcccgtgtgggagcgggttccgggagcggggggccggggcgagtgcacgccaactgccgggagccaagggcgccggggctgaggtcgcagtgggctggggcgccggggcccgcagaggggccgggactccccacccccacccatcccttcccctccccccacgcgggctcgcgagggcccggggccaccttcaccctcgcaccccgcccagtgtttaggg

SEQ ID NO: 228260 - DNA, 1048 bp, Homo sapiens
  chr2:43019539-43020587
  hyper
gatggaggagggggaggaggcgagggcagggggcggccatgggggtgctggactcacatgagcttgttgcagaccgggggctggaaggagccccggttctccttcacccaggccctcactcccaggcggcgctccatgactgtcccgggcgcctcctcgcagcgctgtcctcccgccgtcggaggcccgcagctccgcccagccgcctttttaaccagaatcccaagctcacgaggcggagcaaacccccgcgaccccgtggtgggggcttggggcccgcggactttgccccctggtggactttggtctgagcccgccgccctccgcgccactccaggccctggcgagcgcggcggcggcagcgctggggaacggcgtcccgcgccctctgcttctccgcggggcaggggctcggtccccgccaccgtctccggggcgccccacacactggcgcctgcggtggggcctgctcccggcggaggacaaagaatccagacccttcctggacgcttgtccccagacgttccttccctctacgccccgaggggaatcccagggaaggttcccagaaatactacagtgaggagatcgcgggttggaagtcccagcacctgagaacacggtgctggcgctgggctcaagatttggctttcccatctggaaaaggggaatgactgccccgccactcagggctgcggcgctcacccagcgggaagccgcacggcggtccccgcaggtcccgattcaaggtgagccccagacctgctgcgtgcggccggcagactccgccgcgggctcggcgaggggagcggtgcaggcgccgagctgcggagcccgggctcagggcaggaccgcgagccctccccacctgaggcccagccgagcggccgctgtccgcgcagtgtcgcagtggaccccgagccccgtgctgaactccttaggcgtcttaggaacatactcagttcgcacgcagctatgggaggaatttggcagatgtggacaccggcctcagtgtcctagccctcgggaatctcggggtgttaatgat

SEQ ID NO: 228261 - DNA, 195 bp, Homo sapiens
  chr2:43037887-43038082
  hyper
aagcaggaagcagctcgcagtggactctcaataccccttttccgagctacttgttgccaccgcgcgacatccagccgctcgaactcggacatccacccactgcgtccttctagtgctcttcttaggcgggtcctgtaactgcacctagtcccggaccacaggagggcggatggaggtggcgaggcgctccactgt

SEQ ID NO: 228262 - DNA, 287 bp, Homo sapiens; identical to SEQ ID NO: 198175
  chr2:43445793-43446080
  hyper

SEQ ID NO: 228263 - DNA, 81 bp, Homo sapiens; identical to SEQ ID NO: 198176
  chr2:43446676-43446757
  hyper

SEQ ID NO: 228264 - DNA, 620 bp, Homo sapiens; identical to SEQ ID NO: 198177
  chr2:43446817-43447437
  hyper

SEQ ID NO: 228265 - DNA, 140 bp, Homo sapiens
  chr2:43447696-43447836
  hyper
cagtggaaacgccacgatgaagacattctaaacaccatcacattctgggctcattttcacaactgactacggaggaattttctcctgtagtttctaagtgcaactcagtcttagagtcaacagtccgggatgggaatttt

SEQ ID NO: 228266 - DNA, 346 bp, Homo sapiens
  chr2:43448444-43448790
  hyper
gtgaaacagctgcccgaggcctggcgtatccaccagaccgccccctcccctccatgctcagctgtgagtcaccagagaccccggctaaggcagggcccgggagggagcggggatgcgaggattgttgatggagcccagctgttgtatatgagaaagcaaactattgctaaatctcttacctaccttggaaaaagtgtctgaactgtgtgcatgagggacggcggtggaggagaagaaacatgaattgatttatgaacccgatttaagttcctaaagtgattgttttaaagttagaaacagccagagtcactatagtaagattttgttcaaccgtttgcgaaatcag

SEQ ID NO: 228267 - DNA, 550 bp, Homo sapiens
  chr2:43451134-43451684
  hyper
ttttttttttttgttctattcgtatcacaactgccctgttgtgaatattttgttcaacagaaaaagttcgacttttttgctcaaaaagaatgaaacttcgtaataaaaataaaaaaaaaaagacaagaggaaaccgaaaaaggaggggtgggggcccctcccggcacagagttcgagtccaagtgctcggtcgggcttgcagtctgcctagggcccatgtcaccccccccactcccgtgcccccagcaagggcgagatggcgaggggtgtcctccaacatctctgaaccgccttcccttcctcctcactggcgccctcttgcctcagtcgtcggagatggagaggcggctgaagattggcaggcggcggccagggtcgaggctgggagactcagagccgctgaggctgccggagctcagggagccgcttaggtagctgtcgcggtccgacagcgagtccggggggctggggggcgcgtcgaacacgggcgagtcggacaggcggcgcggcagctggaagctgaagggcggcgagggaggtgcggcggccc

SEQ ID NO: 228268 - DNA, 275 bp, Homo sapiens
  chr2:43452584-43452859
  hyper
ggaatttgttctccttgttgagcagggctgtgccgccgccccccgacggctccttaagggtgccgtaggaggtcggaccgccggccgccgcgctgccgcagctgctgccgttagcggcgcccgggaacttgggcgagcagctgccggggctgggcgcggggtgggcgagtgcatgcaggttgctggccgagtgccgtcggaggaatcccggcgcgaagcccgagctgggggcggcggccacaggcgtccccaccgccttcttgtccagcatgttg

SEQ ID NO: 228269 - DNA, 154 bp, Homo sapiens
  chr2:43453310-43453464
  hyper
agggcgggaggggcgtcccccagaacctggggacagaggcaaagtccaagaactacaacggctgctgccggccgggcccgctccctggcctaccttgcacaagaagtcgacatcgtagaaggcggacagaagtgtggtcgacatgtttctggat

SEQ ID NO: 228270 - DNA, 68 bp, Homo sapiens
  chr2:43454171-43454239
  hyper
tttgtactgggcgcgggaattgcaaaatgccagaatatcgcaaccatccccgcggcccggcgggtttg

SEQ ID NO: 228271 - DNA, 433 bp, Homo sapiens; identical to SEQ ID NO: 198179
  chr2:43822951-43823384
  hyper

SEQ ID NO: 228272 - DNA, 930 bp, Homo sapiens
  chr2:43864197-43865127
  hyper
tgaaggtgaccggccgctgcagcaagctctggagtctcgcagttgggacgttaggggtaccactccaggacagagctccctcctggggcagggactgggaggagccaaagttatagccacacccccggtgacgcccggtggtcggctgtggtctcccattggctacaccggctgccagtccctggaggaggcggtgcccttccccgccctctccgagctcggcttgaggcgggcgcgggctgagagtccggggatcccgggggccagtcgcggccgggacatcgggcgctgcggccggggacccgctgctgagatagacaggtgagaaagcccggggacgaggggccactccagagttcctgccaccctgggatccccgcccccttgagggcgccccgtccaggggggctcgcggggccgaggtttggggcgccgggaggagcgggaaggcggggacgagagggacggagcgggctgactcgggatccgccgctgcacctcccgccacagcccagagtcggcccccaagtctggatgtcgccgggagaggtgggcagggggcggtggccggcggtccctcgcgcccgtgggctcccgtgacgttctgtttggaaacactgggcccgggcttctggcgcggcgcgagcggtcccgggggcgcagcggggcagcccagggtccccgagccgagggacccgcgcggtcagggatgccgcgctcgccttaggcttcgggagatccaccaggatctccggggcgaaactttaaactcaaaactttaaagaagcattttgtacacctcgagttgctggcacgtcaaagcaccctaaggtgacctacccggaaaccactgtccccgaagttagtggggcactttttaaaggacaacactttttacccgtcgatattgttgtgcgtaacgctgtggaa

SEQ ID NO: 228273 - DNA, 301 bp, Homo sapiens
  chr2:44223035-44223336
  hyper
ggccgccccggcacgcagcaaccaacgcgcggatctcagcagggctgccattgctcgaacgtccccgcagcgggaagcacgctccgccagaaggacaggaggagcatgtgaccgcagggtagcctggcgcggcagagaccaactgccgggcgtgccaaatgtggggggagcgacggattgttttaggttggaagatggaaaaccgcacttctccgaggacagaagacccaatgtaatatttacataaacgatgttgcttgattcattatcgaagcttttcttttccgtcttccgtctccga

SEQ ID NO: 228274 - DNA, 225 bp, Homo sapiens
  chr2:44588951-44589176
  hyper
tggcgtgacagctcggccctggttgccaaggagatgcgagtaccggaaatgcggaattcggggagagcgcgcatgcctggtccggtggagggagggtgccgggcgtcacaggtcctgacagggaagaagttggcaggtcctggcaggggacgagctgcggcggtggcacctccgggtgtggaaggctccagtgagatggagtcgcgagtcgcggacgctgggacc

SEQ ID NO: 228275 - DNA, 271 bp, Homo sapiens
  chr2:45029031-45029302
  hyper
cagcgtttccaagccgggctctggccgccggcgcgagagcgaggccaaggtctgggggcagttcagggggaccccgaagtcgggacggcccagaaacgctttgcccacagccaccgccctttcctttgtgagtttccccaaagccgtcggtgcgacccggcgccgactctcctcctcttctccctgcgagggcccgcgccgcccgggcccagtcctgggggatagatccctcggggcccaacggctgggccaccgccggtctccggccact

SEQ ID NO: 228276 - DNA, 80 bp, Homo sapiens
  chr2:45030318-45030398
  hyper
gatgcacaaaagctcgacggaaattggagtaacttttggaggcccttgtagctgccgtcaataagcgtcagccccataat

SEQ ID NO: 228277 - DNA, 1874 bp, Homo sapiens
  chr2:45155186-45157060
  hyper
taggaagctcgaagcgcaaagcaaccggaccgaggcagctctgccttcttgcagcccaagggtcctgcaagccgctctttctctctgcgcagcttcagcgatccaggcgcgcagggcccggctgaatgctaatttgggatacacaggagcgcaagttcaccgagttttccgcagttttgcaaatccttttccctctccccatgcctcgcggtttaagaccacgcgatttcccaaaaagaaaaactcaaaagatgccaggcgccgggctggagtcacttagagccagctctggctgctcctccgcctccccgacccccggccgccgctccgccctgcccctcgcgcctcgaccccttctcccgaaactccgtcctctccgccgaggggctgccttgcccccaacccaccccccgcgtggagaataaacacagttgacatcactcttataatctttatttaaaactgtttccaaggttacaaattgccgagcctcgtatgcaacaggttcctccaaagcggtatcattacagattaactgtaatgtgtaggattagaataaaagcataagggattaggtaaaagggcgacgctccagacataacgcccgagcgcatctcgactgagtcagcctagggagactgcgaaggcgcagggtgtcggggcgccacggggccgcaaagccggactcggttcctccgctcccggccctggccccggccccagagcggtcgggacagcggcgccggaaggccaacgcggccgaaggtttcggagccaggcttcccgggcgtcaggggctagggacgggtccccggagctggggaagatgaggggccgagaggccgtggaggcggaggacgcgggcaagccacggcccggctgggagcttcgggaagcgccgcgcccgggacgcggtctccgggcggggcgaagcgcagggaaggcggcgagggggtccccacacccgcacggggcaccgggtttgtccatgtgggtgacactgccttcaaggcccaggcccgatggggcccttcctggcgtcctcctcacccccactccgccgcgcctcccctgtccagctggggctggggacagcggcaggggctgggcagccgcgcaggccgcccgcacccttccgagcccaggcctcgggccttcgccgcccgcccaggccgtgcgccctattggaccaccttccccccggccttcgcctgcccctctcgcgccaggaaggccctggagctccctctccccctcacaccgcttcctgcggggccagggctcgccgtgctggccccatttggactcaggcctgacctgggccacggcctcaggccgctgacgcagccccgagggctgtttgcgtgttggggtggagggcgcggggctggaaaaacaaacagggcgggggcgcggaggtttggggtgggggccgcagggggctggaaggaagtgcgcagtgtggcgagagcgcgaacaaagccctctccggagccccgtcacccctcggtgaccccaggcccgccccgctgagccgcggggctcccgggcctcgcctccgagcaggccgcaccgcccggtgggcgcacgtcaggcctccgcggccgcccgggccagtgctcccctcggtccccgcaggccgagcccgcggccggccccgaaggcgcgagggacagcgcggccggcggtggagcctcactcaggcacggagcccacagagcgaggctgaggaggactccatgctgttgtccgtcgggaaaccggactactctggggcgcgctggagccaccattctgccagcagccggggaggggccgcgagggctcccaagtggacggaagtaggcgaccaacttcgccgcgactcctgcttc

SEQ ID NO: 228278 - DNA, 548 bp, Homo sapiens
  chr2:45157281-45157829
  hyper
tcgtatccggcgcgcgggcccagtgtgggactgcggctgggagcccgggccctccgggagtgaagatacctttggaggtgagacggcctctctagcgcgttgacactgttgatggaagggattaaaggggtatcaggttattttaatttattgttgaagatgatgactgccccctccccgatccgcataccgtcctcactttcccaccccaaccctagacccgacaacaccgttcagccctttgccccgggcagcggaaatggttagcttcctctaggagtttctgctgaggaaggcgcaggcaaccctagtcggcttagagagagacaaccgcacgcgatcaccgagcacgatttctcccaacaaaaaaactaacaataatagcgatccacacactcaagaggtctcaaacctccgaagttttgccccgagtcttgtggccctggcagaggtgacaagggcatttgggaaagacagagaaaaataaattcgctccagtgactgtacacggggcatttgaggctgtgagaaaacgagttgcttttctg

SEQ ID NO: 228279 - DNA, 1040 bp, Homo sapiens
  chr2:45159699-45160739
  hyper
agcttgagtctgagctcaaacgtgcgcgaccccctgggtctgcatggggagaaggaggtgtgcacgtgcaaacgcgggactttgggtggagtgtgaggttgatagggctttcggccccagggccctctaggcctcttttaaataccttcatctgcccaatttcttaacctttcaggacaaggagggagaccctccgcgatcctgcgccttgccaccctttgggaaggataggaccatcatctagggcgtctctcggtggactgtggctgggccgggctgaatgggcgggcggaggtctcgaggtcgtctcctggctctcgattgctcccatcacccaagccacctcgaggtcgagtgcgccctggggctatgtctggggaggtcatggcgtctcggggcgaatgatatgcacgttttggggcaaaactctcctaggcctcgcaggagcagctgtatttgtaacttggaattggcctgggcccgcctcccttggcccctcctccagctcctacctcaacacgcagcgctcagcgggctgccagagtgagcttcccggaccacccccaagcaccctggggcctcaccatccttcagggtccctggggcatcctagaggcctggatctggaagaatgggggccaacaagagtggccagggctctcctggggcggttttgcgatgtattcctccgctagaattagcctttcgggcctgcgcgcctacaggtttcagaggccagcgggaacggtggcctcgggtgtgtgggggtgaggggtgtggtgtgtgtgcacgtgttcacgcgcgactagaagcggttccttgtgcatttctagaatcttgtagatgtgttttctcgtgagaatgatgcagacttactgctgacttaaggtcagtttgtttgaaaagggagaacgtcagtccgatggtcggtggttgtgtctctcctgagcattcgtacaaagtgaagccacctcccctccgccatgcagtctcccagaccgggtcaaaggacccaggctccaggtcgctgaggcctggag

SEQ ID NO: 228280 - DNA, 2110 bp, Homo sapiens
  chr2:45161093-45163203
  hyper
cctcggggagcagcggcttttcaccctgctatagggaggtgcgtttggctgagctgtccccccaccaaataaagctaatgatgtagtaatttaggagggggagaggggctgggcaaaaggagagaggggagaggatggggaaacgcgcgccccaagagcaaaagcaaacagctgtggaggcgctgcccgcggctcaggcttcccaacaggttagctatactgggatccacccggcatttcgcaggaaggggtggggggaagacagagcgagagggggagagaggctcacaagaggacagagggagggagggaaagagagataggagccagagagcgcaccgcgcggcttaaaaggagagacttactaatgaatatttatccgccgctgctccgtgctcccggcttcccttacctttcggcaggtaagatcctccctgtgccccagccccgggggccctcctagctccccagtcggggagcctgtggctgggcgggagggctctccgttggtgggggtgggagggcggctctactctgcgttcactttgggtgcccaggcatgcgaccctgcacgactaggaaccgcgtgcgtgggctccatgtgtggaatgagtgtgagcatgtaagagtgtgtttgtgtgtgtgcgagagagagacagagagactatgcgcccgcaagcgcgcgcgcgcgcctgtttgtggcgcgctctggaaacattttccgacttttcactcggacgccctggatttctcgcctttgcctttctctgcttcccctccctcttctctcgccctcccctcccccacccaggtctaccccaccctaccccactcctaccccggctgctgaggcgctcttctgccggctattgtacggctggcgcgggctccccctggccacatcccgggcctctcacacaagaagaatagttctgtttccgccgtaaacccccacacaaaggctgcccggccaccgggtcccctgtcccccttcccggggacttcggcttttgaggtgctgctgcgcgttctttctccctccccctctcagggcgccagggcccagaccaaggagctaagagtgatcgggacttgggggtaccgggtggaactccttgggggccgcccgccaggcttcctgggctgcaactcggagcccagagacccccaggggaagggcgcctcttcccccaccaccaccccagccgtcgcctgcgggaggagcacggggaacccggcccagccaaagggggaagagggaggggaaaaggaagaaggtcggggaggggctgaccatataaccagaattctttaaacggacttacccggccacctgttgagaatccatgtggggtcggctggctccggagttgcgcaaggtggacacacaaaaccaaaagccggagttgggaaaagaaaattctttctctgaccatgccagacgcggccggtcaggctcgcagctccgcgctaggatcgggcggctgtacaaccaagatcgactttgccctgtcccccaacgcccccctcatcccacggctccacggctgggaggctccggactcagagctcgcggactcggcgctcagggtcagcaccagcagctcggcttaagccggggcaggctctctaagccctgctcagaagtcaagagcagcagtgctgcctctcctcgccgcctttcatgccgcggccgctccttattcttgtgtctcggcctctcccggccccctcggacaaaacccccagagcccggccactctcttcccgctaaatccccttcggggtcagtgctctaccagcaccgggccgcgcgcctctcctgccagccgtgtggctcttaaagagctgcacccctcctccgccctgcgcgatcccccgacccccgcctcccctcccctctcctccggatctagccccccacgccgacgcctgaggtccctgctgccccgaccgatgcctgcggactcccagccccctcccctcgcctcctcccctgagcagccggtgggcctggcctcgaggccacagggctgagttctaccctcgcctcaggtcccctttctcaccagcagcgcacacccctcccttccccgcccctactttagcc

SEQ ID NO: 228281 - DNA, 1420 bp, Homo sapiens
  chr2:45164541-45165961
  hyper
gtggagggtcctttagagggcggcggggctcattaggcagagcagggtgccgagaggtgcgcgtcgccggcccctgaggccgcctttgagccgtcggggcggcttcattaagctgcgctaacaaggcgtacaaatgccgagcccagcagctttcttgcaatgcccggccttagcagggcgccggactaatgagggtcactcaaaggggctgatcaaatattcaaatttccccgcacgccaggaacttttatgcatggagaaagttgaggcaactgagctgtgtttactgtccggggcgacaattgcttggagcgccagtccccggaggctaaggcggggggcgggggtgcggggagggagcagttgttgttgttgtttttcaaaggaaagtaatcggggtccttgaagggcttcgcggcctccccgcctgcgtgctgcgctcccctgcgccctccctggccgcccgcgccaagcgcctcagtttgcagcttgcggggaggcccagactacgggccacccggccagcctccgcctcccgacatcctgggagccggaaggggcgttgcccccacagggcaaaccttcccccggcctcctggtcggctgtttagagctgagcaaggccaagtgggtgcagctgccccaaccctccggatcctcgtctcccggaggcctgcagacccgttggctttccctgtaacccaaaacaaggagagagtgggaggtctctcgggcgttctccagatgtggttgagactttcccagtgctggggtggcgggtgacatttgtaaataaatgccagttggtccgggtacaaggagaacactatttaaaccccaaagacatcttttctccctgccccacctgaaggcgatattttagatcgccggggccaggattgaagcggggatgatggcagcaaatttgttctgcacaggtgacccggcctgtacgggcgccaagtcccagatcccgcaatcagagcggccagagagcagagaagagacctagaggatctgcaagctgacctatccacccgagactctccgctctgagcgaccccagggtgcaggcgccctccacgcgccacctcctctagcggtcccccagggtcccttcccagtcctcgcactgccctagggcttgcttggttcccagaccagcgtggaaggccgctgggccccggaacccaaggtccctctgcttctgctccactccccagtgcccagcgcctgggaatttgggaggggaagctctggcgctccacagccctgcttcccacccaaacacgcactcagaacccctcgactgagatcctatggagcctgcgcccccagcccggcggggagccagtccggccctccgctctgggaccagccgccccgcctccctgccctgctctccggactctcaacttac

SEQ ID NO: 228282 - DNA, 925 bp, Homo sapiens
  chr2:45169301-45170226
  hyper
ccgattctcaccaccgctccatacttctggcgagtagcggcggcgggaacggtgcgggaggcggcggcggcgcgggaggcggcagcggcggcgggaacggtgcgggaggcggcggtgctggcggagcaggcggcggcggcggcggcggctccagggcccccccggaagagttgtccatgttccagctgcccaccctcaacttctcgccggagcaggtggccagcgtctgtgagacgctggaggagacgggcgacatcgagcggctgggccgcttcctctggtcgctgcccgtggcccccggggcgtgcgaggccatcaacaaacacgagtcgatcctgcgcgcgcgcgccgtggtcgccttccacacgggcaacttccgcgacctctaccacatccttgagaaccacaagttcaccaaggagtctcacggcaagctgcaggccatgtggctcgaggcgcactaccaggaggccgagaagctgcgcggccgcccactcggcccggtggacaagtaccgcgtgcgcaagaagttcccgctgccacgcaccatctgggacggcgagcagaagacgcattgcttcaaggagcggactcggagcctgttgcgggagtggtacctacaggacccctaccccaaccccagcaagaaacgcgaactggcgcaggccaccggcctcactcccacacaagtaggcaactggtttaagaaccggcggcagcgcgaccgcgccgcggcggccaagaacaggttagtggcggggcccgcggcctggctacagcctcagaggcctgggaaggggagaggggttgagatggggctagcggagcggccgctgagagccagggaagccgtgactcctggccagtcggagaaagtttccgcttgtccgggacgcgcggaagagggggccgggctggctgtggg

SEQ ID NO: 228283 - DNA, 540 bp, Homo sapiens
  chr2:45171352-45171892
  hyper
ggcggtggggaacccgcagctcccggtgtgtgtttgagggagcagggacggggttactaggggaactcgaccggtcgcggggcagccggctcagtttgaagagccccagggactgcggagggaagaagcgcccggctcctctccgacttctgcttctccagggcttggcgtactttgtcgcttgcacccaggcctccccaagcggccgggctcgggttctgcctctcctccgaggccagcctctatctgagaagacttgggatgctcccgaaagcggaatggggagcggcggcgcgggggagccgggtggcgggcctctgtgtcagggcgggcgcggatctctttctcccgcaggctccagcaccaggccattggaccgagcggcatgcgctcgctggccgagcccggctgccccacgcacggctcggcagagtcgccgtccacggcggccagcccgaccaccagcgtgtccagcctgacggagcgcgcagacaccggcacctccatcctctcggtaacctccagcgactcggaatgtga

SEQ ID NO: 228284 - DNA, 180 bp, Homo sapiens
  chr2:45172215-45172395
  hyper
aaagaggtgacaattgtatactttctaggacaagcacggcttctcctttcggttcccatggacccggcaccccacctgcatgacgatttatttgtatctgggaaaatattctctctagttaaaaatgatttaaagagtcgactatacaaaaatcaatcaccaccacgaggacaagagggc

SEQ ID NO: 228285 - DNA, 545 bp, Homo sapiens
  chr2:45176739-45177284
  hyper
atcacccgggaccccggagctcgaagtccattcccaggcctgtggcgcactggatgcactcggcgtcttggagcagtctcttctccctctcttcttcctctgcctccgtggccctgtcagtcccgcctaagcctttgtgtggccgtcacctggagcaccggctgtgcctcagggactttcccgggccttccccttgtcctctctgtcccccagcgctggagctgagatgcccggcccgcgggacgctcgaccccctggtacgcgcgctgaggcccccacggcttcccaccgctccggccctttccggccccagctgagctgaagctccctggccccagtgtgcgggccccggtggccgtctggcccgagggagggcgggggcaggcgagagggagccatggaggaggggagcagtactagcccggctccaatttctccggtcagctgagcacaactttccattcgagtgtattcatgcagcggctgattgagctccactgtgccgggcggggctcggcgggagcgggcaggaacagccaggctga

SEQ ID NO: 228286 - DNA, 1112 bp, Homo sapiens
  chr2:45179622-45180734
  hyper
ctgtggctgggcccgcactgcctttggtttgttggattttgcgatatttaccataataattaatttgccgccattcaacagaatatcttagcaaggccccttaacgactggaagcgctgctaattccctgcgtatgcgcctctccctctgcagcccgggacaggcgcagccgccttttgcctgcccctacctcgcccgggacacactggcgccgcctggccaggcccgactgggaggaaggacagaggaccgacggacacttgtacatgtgcgggcgcacggaacccaggccccggccaccgctgcctttcccctgtgtgtctgagctgaagcggctacgcttataccgggaggtgaaacggaagctcagagagggccataatttggccactgtcacacagccaacctccaccttcacccggctacaccaacacactcgatgaccttctctgtcttcctcgccgtgcgctcccgatagcgggggaaatacttttctgagacgcctctctgggcacgcaagatgaggcaaaagcgggagaagggagtgggataggaccgggagcgggcggccctgggctctgcccttctgggcgcgccatcgctcccgccacctgcactaggactttgcaggaacgcgcctcctacgcgctgcctaggaggaccagacgcgagacaagcgctcagcaagcagctacgtgcaggcagacctaccaagccaggagaaagagcggggatttcaggggcctccgctcccacagcggaccggcctccgcttaaaccaccagcacttcccagtgggcctgggaatcgaggatgtgaagtgtgtggatacatgtgaacgttgttgagtgtgcagtgagactgttgtgcagattctcatgaattgcaagagaaatatttaccttgtgcgggtgacaagtctacctgcagatgagcccgggggcttgtccagtgcttgtgagcatgatgcagaaatatcaactaagttctcgaagaatggaggggagagggacaagcacaattgagccctgtcctcaagtttctcacgatccagtaggagggacagttgaggtcaccacttaaaaacaaaccaaccccgtggagttgcacac

SEQ ID NO: 228287 - DNA, 698 bp, Homo sapiens
  chr2:45181675-45182373
  hyper
ctgtcggtggacgccgcgaaccaatcaaacccttgcactttgttccaaaacccattccctaccagaatgggagtcctgtagggccaggtctcctcccatacccacccatttcggcctttgttctactgcacaataacagctggcactggggtgcgggaggacggtgaaagctcgagtcccaggctccaaatcctccaggagtaactggggtgacccgaggagagcagcgcactgggtgagtggaagcgtggcccgtgagaagggtaccgagggtcagaagtgtcgcaagggacccaggacgcgcgcgcctccgaacccctgagtcttcgcaggctctgcgaaacttcagtgcgcgcagcctcctgcacaccgttttcgcgcgacctccttgcctcggtctccaggggtcaagccaacccagcgcgggaatgttccatttgcccttttgggacattcagagaggcttttccgggctgccgcggcgcttccacgcagaggaggcgtcggcttccaggcagcttggcgatcttgttattggacacgcgagagtttagagacccagagaaatggagtgagtcaaagtcaaactcaagtttctcggcccctagtcctgcgattcttccattgcacattgcacccctgggcctttcacatctgctcctagcgagcttggagtgtaggtgcgaccagggcgcatc

SEQ ID NO: 228288 - DNA, 250 bp, Homo sapiens
  chr2:45182675-45182925
  hyper
gaaggctgcaggtcggatagctagattccatgatgcccccaagaagttgccagactccagtctgggagctctcaagagccagagacccagggaagtcccctctttggcctccgaggaccccgaagcctggcagcagtgctcagccttggaccccgcggttccgcggccggacgcccctcgcgctggctgtgcgcaccctggcgcaaagcactgcaggttggaggcggaaagcagcgcgctctggggccac

SEQ ID NO: 228289 - DNA, 206 bp, Homo sapiens
  chr2:45228528-45228734
  hyper
ggcggaggttcaggcggcaggaatggagaggctgatcctcctctagccccggcgcattcacttaggtgcgggagccctgaggttcagcctgactttcccgactccgccgggcgcttggtgggctcctgggcttctgggctcacccttacacctgtgtactaaagggctgctaccctcccgaggtgtacgtccgccgcctcggcgct

SEQ ID NO: 228290 - DNA, 312 bp, Homo sapiens
  chr2:45231171-45231483
  hyper
gaaaggaaaagccccgagaggacacagtgctctaggaactcggggcgccacgagcgcctcatcccctcccttccgcccggccgcggtgccctggtcgctgagggacgcggtcagtacctaccgccactgcgacccgagaagggaaagcctcaacttcttcctctcggagtcctgcccactacggatctgcctggactggttcagatgcgtcgtttaaaggggggggctggcactccagagaggagggggcgctgcaggttaattgatagccacggaagcacctaggcgccccatgcgcggagccggagccgc

SEQ ID NO: 228291 - DNA, 211 bp, Homo sapiens
  chr2:45231694-45231905
  hyper
ggcggccgccggcccggccgccctgagtccgatttccctccttccctgacccttcagtttcactgcaaatccacagaagcaggtttgcgagctcgaatacctttgctccactgccacacgcagcaccgggactgggcgtctggagcttaagtctgggggtctgagcctgggaccggcaaatccgcgcagcgcatcgcgcccagtctcggag

SEQ ID NO: 228292 - DNA, 51 bp, Homo sapiens
  chr2:45232085-45232136
  hyper
ggcagcaggctgcccctccccgcttctgcagcgagttttcccagccaggaa

SEQ ID NO: 228293 - DNA, 1438 bp, Homo sapiens
  chr2:45235530-45236968
  hyper
aaaggcctaagcatcgtccaagtcaggccgggctgccgctgggctgtggccgggcctgggggcccagtttaggcctctccgggggaccggcagaagccctgcgaacccctcccttgggccccggggagctggcgccgaagaaggtctacttactcgtacctttccttggcctcggccgcccggtcgcgctgccgccggttcttgaaccagttgctgacctgtgtggtggtgaggcccgtggcctccgccagctcacgcttctcgcggggtgaagggtaggggttgtgcgcgtaccactcgcgcagcacgctgcgactcttttccttgaagcagtagctggtctcctcgccgtcccagatggagcgcggcagcgggaatttgcggcgcacgcggtatttgcccacggcgcccaggggtcggccgcgcagcttctccgcctcgatgtagtgtgccttgagccacagctgctgcagcttggcgtggttgtgcggcgagaactggtggctctccaggatcttgtagagctcgcggaagttgccgcggtggaaggccaccacggccttggccttgagcacgctttcattcttgtgaaggtgctcgcaggcgggcagcgaccacaggaagcggcccagccgctcgatgttgccgccctgctgcagcacctcgcacacgcacgccacttgctcctgcgtgaagccgaaggtgggcagcatggacatggtgccggctgcgtccccgcccgcccgcgcgcgccctcaccgggccgcgcggtcccgcatgggagcttcctcgccgggccgtccgggccgagacgcgggcggggctggccccctggcccggcactggcccccggtgagccccgagtcactgccgtacgtccccgcgccggccgcgggtcccacgaagctccgaaccccaacggcccgcgcgcctggcccaagccctcgcccaagcccgggggccgcccggggcgccgctccgcatgctccgcgcccgcccgccgttccctcgctcgcttctcactcgttctccctcccgtctagctggctctcagctttcttaataatattattctaagcgggcatgaggcgcggcggcccgcgccctgattggtccggttatctgacccggggcctgccagcgccagacaatagtcggagtcaaattattcgccatggagacgctgtcagtcactggtaacccgagcctcggcgggccgggcggctccccccggccggctccgctgacagatcgccccgctccgcgcagaactgagggcggctctactggagcctggggcgctctgagagcctgggaggcggagaggggccgggttggggccggcggcggcggagattgacggggcggatgcccaaagagggagggaggaggaggacaggagagcggggggagcgggcgaagacgaaaaggggtggat

SEQ ID NO: 228294 - DNA, 718 bp, Homo sapiens
  chr2:45237182-45237900
  hyper
acattctaccccggcgcaggccagtgggatgggagagtttggacgtgctcgggtgccgcccaaagacttggctttttctgctgacagcgccccacccccatcctagaaactctggactcagcggtcctcgagggaaaaggggagggagtagacgaaagaaatggggaagatttggcagtggccgcaggcggacgccggagaatcgacttcccggaggatcccgcctttcctccctctcctagccccgccggctgcctggcggcctgtaccgccccaactctgcgctctctgctcctcgccgggcggggactcagacttaaccccacgggtcccacagcccgaggagcgccaggcagttccgtgtggcctctatggaagctgactccggccggcagctgcgacgcagaaccccggacggcgcagacccgcagtctgcccaccggggcgggggagaggggcgacggcagggactctaggacggtggtggggcttccccggtgggtggtcggggaggagaacggaggcaagattcccagtcctcccgcttcgccgctggggatcggctcggctcctggccactccagcctgggaaccggctcgctgagctccgggatgaggtgctttaaaagggggtcctgttttttgcttctttgtcagggtgccaatggaaacatgtggtgctggtcctgtgggagaagggctcgcacaaaggtgggag

SEQ ID NO: 228295 - DNA, 64 bp, Homo sapiens
  chr2:45240361-45240425
  hyper
tctggccctggcgccgcccgcctcgggcgctccatgctgctccgcacctcgggctctgggatgc

SEQ ID NO: 228296 - DNA, 863 bp, Homo sapiens
  chr2:45240845-45241708
  hyper
gcacgtggctggggcagtcacaggccccgagagctggagcaacggggtcaccgccacccctctgccctccaggccttcaccttgagacccacgcggcagcctggagggcccacaagagcaaacggtttagaggccgcgggctcacgagggatcttgttcaaacgaaaagaacgagcacaggggctcggggccagcctggaggccggcacagaggcgagtcggcccgggtggcgccgggaccaggcgggatttggggcgggtatccgggcccgggcgctggcagcctccctgcgacccccggccctgcgtccccgcccgcggtcccgccttagtcctggagtcccttcctgggccccttcgcctgggtgcggaggggcgcgggcgcggcgggcagggccacggggcgaggggacgggctcgcggctttgggttcagggagccgcggagctccaccgccgggttgttttgcaatggggctttggagaggttgcgcgtcccgggccccatggctccgccgggtctgcacgccagcgcccccacgcggcgggcccagagttcaggccggcggggctgcgcgctcggctccccgcaggcctgtagcccaggagggagaggagggagaggacgcggagagggcccgctggttcttccctcctcaccccagcactgacccgcctgtgcgctggcacggagggctcgaaaatcggggcgcgtccgcgaagagcgagacctcggagacagacacacaacccagaggtgcactaggttgccagacggtctgatcacaggattcttggggggatagacgctggcttttctccatcacacgtttcccctgcaacgtctgggtgcccaggaaatgt

SEQ ID NO: 228297 - DNA, 1441 bp, Homo sapiens
  chr2:45395855-45397296
  hyper
tgtattttgagaaccgctccctttcccgcacacgcattgctgcctcctctcgggcttggttaatgagtctgtgcgccaagccaggtcgctccgggcagttcgcgcttccgcgcctcggcactcggatgaccgtgtcctattcgtctctctcgtgaatgtcgctgaaaaaaaataaaagtttgttctaagcccgtggcatttccgcgcgcagatggaaaggcaagtgggagaggagggtgcaggtgcggggcgggcgcggcggccccttcaggcgccgggggctgggctgcccccggccgggagcagctccgctccgcgcacgtggctgtgggcgctgcggacgggggacggcaggcgggggacggcaggcggggagtggagggtgcagtgcccgcaggtgccgacggcttcctcccagagcccttcgcgccgcgccttgcctggctggtggcgcggggaaaccatggcagcattgcggctccggcgggcgggctctgcgcggggccccaccgagctttccgggagcctctcccgcagccgatgggcatctaggggcgcagaacgaagagtgggcgccgaaacgggtgtaggcgctggaggccgacggggaggcccggggcggtcaggcttctcggtagagagggccgtgcacctcgcggcctgcgggctaaggcggggagccgctcctgcggcggccgggcgcgcggactggagggagggaagcgccacggactggggaaccggggtgacggggagacgggggggctggtggggtgaggtcggcgggcagcagccaagtgttctgcagctccgaaccccgccaccctctgggcgaacggaatggcacccgcggagacgggcggggacgggcgaaagcgggtttgctccgacccgaagctgagcccgggttggagggcgagaccgtaggcgagaatggccgcgcgggctgggagacccgggccggtatggagtgagtggagccgcccgaggtagggtagttggggatggtagttgtgaagacagtcggagtctagctccgggcagacgaaacaccggggcgcgccagggtccgtttcctccttctctctgctttcccaccagccctgtagatacggagccagcagtcgggctagagcggaggctgagggtcgcggttccaagggcggtctctcgccccgggtcaggccccaccccgcggtggcggtcgcgtggcgctgtcctggagttgagctgtccccgcgccgcggcccgcacgcccaggaccgcacaccgccgcccgcaggcagagacgcctgcaacctcgccctctcgcccggctcccagctcggggctgggaaccggaaaggtgcatttccgtgtggggtgggggcgattcccggctgtcggcggtggggctaggccttgcggcggatgagccagaccttcccggctttccagccag

SEQ ID NO: 228298 - DNA, 101 bp, Homo sapiens
  chr2:45837797-45837898
  hyper
cctacatgccaggcgcactacagaaggtgcagttgattcagacagggccaccatgaccgtgaaaagggtgcttcctctcccacctccgataattttaggta

SEQ ID NO: 228299 - DNA, 339 bp, Homo sapiens
  chr2:45878653-45878992
  hyper
acatgcatccctccggatagactgaacatccctccgttcacccccccgccccgcgcggtcagaggcaggcgctgagtgtgcgaagaggatccgggttgaaatctgcgcccccggttctcgtccccgccccgtcccaccgccccatccccctcccggagtcgaaatttcccgggattatgtttcggaaaggtaggtaagcgccgggcgcggcgcccgctttcccgcagtccggagccggagagccagcgaggcggcgaggcagcccccgcggcttgcagcggagccgacagctcgtcttctcttctggaggtgcagctggtggtcggggggagagacttg

SEQ ID NO: 228300 - DNA, 1297 bp, Homo sapiens
  chr2:46525226-46526523
  hyper
gtgcccggtttgggggcgcggatcagcagctttgcagtggagacttctgcggctcggaggagtcggggatttgcgcgcacggcgaggccaggaggccgagggagatggcctggaggtcggaggtgcttccgcggtgcctttgaaaatctcccagccgccccgcagcagattaccgtggccaccggcgcttggaaatgtttgtgggtgcatgtcctcgactttctctggtctctcattttggggcagcatccacgtctctatttttctctggattcgcggagtccttccaaatgcgctcctgtgcccgcgccgcggcccaagtgggcaaaggggggcgggaggcggagagcggctcagggacacgatcctaccgaggagccaggacccttcagagcgccccgctgccgggctccagaccccaccgaaggttggagaacccacttcctcgtgccgcaccttgactctggggagagtaggtagtgagtgacctggattgccctgcgggggcagatggttcggtgtgtaggaagcggacggcaacactggatgtccctggcaggtccgggtgtctgtctccgaagaggacagagaagggcagccacgatctgcccgcctgccctcgcgagcctctcggcactgggtgagaggcaactctggccatttcttgctgccctctcgccctctcccggccgctcccagtccagccgggcccggcgctacccgagcgagggttcgagccctctgcgcggccgcgcagaagcaggcagggcctcaacttctgcaaatgtgtgcggctcgccgcctgtcccctttctcctcctgtctccacccgtgcggccccagtggcctggagcttccagccccgcgcttggccgcggcttggcgaggctatgctgcgggaagctggaatccaacgcgcggccggctgaaccgcctgagccgcgggaaaccagcggcggagcggcggtatagaggtgcgaggatgaggaggaccgactcgctaagggagggaggtgactggccgggagggctcactgccgaggttgatttgctcttgttccaacttccactacgggactggagccagaaaccgtgtatcctccggtcgaaagcagcggttcccacctcggggcaccgataaggatttgataaacgggagcgaatcgcgcctgtcctggctcggcgcccgggcccttcactgcgggatcgctaggggaggggattgggccctgctcccctttcctggccgtagtcccccctttctcgtcaccgtcgcgccctcagacccaagacaagt

SEQ ID NO: 228301 - DNA, 172 bp, Homo sapiens
  chr2:46689147-46689319
  hyper
catctggccaatggcgagcagtgaaaatcaaaaattaggggagagaaggttcaattaagtgtcgtcaaatcgaaacttccaccacttccttcatccctgagtcagcaatgttgtcagtaggagactggtcatgtgtaagcttgcagggtgccttaaacggggagaggtaaag

SEQ ID NO: 228302 - DNA, 608 bp, Homo sapiens
  chr2:46727082-46727690
  hyper
taagttttctcatcggtgtctgcaagtctgtttcctcggcagtgagatgtcgataatcagaatgaagtaagatgaaacctggcacggagcttggcctgcagccagaacagggcacctagttgcatttagcaaatgtttgctaattgtgaggctaaatcgtctcgcttcccagtgattagagaagcctgggcttcccagtgcccaggaaaccaaggagagttcccaaaccctcacgtatcctttgagtaacttgccaacttggggtgatgaaaacgcactcccctcctcccgccgccgctgggtcgggctctgaacgcacgagcctcggagctatgaggtcatacacgggtcacgtggccgctgtcgcatctgtcaactgtgatacaattactaagactgtccggacattcaaacctgctctctcctcctcctccctctccggtacgccggcccttttcacaccaagggaccgtctcaaaagtctaggctccaaatgctacgacgtaagaaaggaggagaaagagggaggaaaaaagtcgaagactacacttctcgttgctgccgtttgaaaactatgcctaagccccgttatttaaaatcctttctgc

SEQ ID NO: 228303 - DNA, 56 bp, Homo sapiens
  chr2:46926176-46926232
  hyper
gccttcacctacccgcctccggattggccgctaggaatcccgcccctctaaagccc

SEQ ID NO: 228304 - DNA, 545 bp, Homo sapiens
  chr2:47142871-47143416
  hyper
tccgaagcagacgcgaagccctccaacgtgagcctcaccagcccccgtccccaaaacgctcttcctcggcttcgccccgccccccccccccccccgacctgccctgcgcacgcgcgctccctgccgcccgcccattggcgccgccgggcccctcccgctggcggcggcgggctgtgaggacggctcgcgtgagtccacgtgtaatcggcccgggcccagcactggcgggactgacgcagttcttctacctgctttcccaagggcgacactcggctccactccagttgggccgctggacgccctaggggcccggcagttgctaggcaacgccggaagccctcaggaacgtagttccacgggcgacgtaggatggcggatccggatggggcggaccccaaagctggctcccaactccgctcaccccctcctatacagggctcttggttcaggtctcttggttcgtcctgctgcaagttgggaagaaagataataggaatgctaattccttcttgatgaaacgaccacaacacgctggagccggcctt

SEQ ID NO: 228305 - DNA, 122 bp, Homo sapiens
  chr2:47168426-47168548
  hyper
ttgctcctgtacgcgtacgggccgctcggccggagccgcagcccggaggcgccgggcggtgcgctgggagctgctggtgctgctgctgctgctgctgcccaccctccgccgcccgggccccc

SEQ ID NO: 228306 - DNA, 97 bp, Homo sapiens
  chr2:47169106-47169203
  hyper
taactctgtctaccgtgaaatggtggtatctgcatatcatgagatcagtgcattggctggactctgccccccaccgcggtccgagggtggggtgtcc

SEQ ID NO: 228307 - DNA, 42 bp, Homo sapiens
  chr2:47403982-47404024
  hyper
tgtacctgcaatgcgtcactgggactcgcagccgccgccggg

SEQ ID NO: 228308 - DNA, 482 bp, Homo sapiens
  chr2:47499351-47499833
  hyper
gggttccgggcccacgtcctccagaccatgcccctcacccccggccaccaccctccccgactgaccacacctggaagggaaggaagggtgggggtggcctgcagagggtgtggcgagatctggacggcctgggggcgggggactaagttgaccggaaatggggctaggccgcggccagggacggcagcagatgatggttgaggagtggcctaggaaggcctccctgacggcgcccacacacgccccgcggcaccgcgaacacggctgacagggcagttgggcagcgaggtagtcgggaaagagcagggggagcccagcggctccgttgcgccctctgtcggccgccagcctccattgcacgcggcgccgcccacctgcgcactgggaccccggccctgggccgaccaggaaccccttgcgcccgcgccagctcgagccctgttgcacctgtcgtggtcaccgcaagcctctctgggagaagg

SEQ ID NO: 228309 - DNA, 61 bp, Homo sapiens
  chr2:47596115-47596176
  hyper
tcttcaaggcttcagagcagcgctcctccggttaaaaggaagtctcagcacagaatcttca

SEQ ID NO: 228310 - DNA, 325 bp, Homo sapiens
  chr2:47629778-47630103
  hyper
tgtagaataaacccgtaatcccgatgttggcagtttgcttagaaagaaaaagggaggcagtcggagaggggcacacgttttaacaaaatactgggaggaggaggaaggctagttttttttttgttttcaagtttccttctgatgttactcccatgcttccgggcacattacgagctcagtgcctgccggaaatctcccacctggtggcaacctacccttgcatacaccccacccaggggcttcaagccttgcagctgagtaaacacagaaaggagctctactaaggatgcgcgtctgcgggtttccgcgcgacctaggcgcaggc

SEQ ID NO: 228311 - DNA, 44 bp, Homo sapiens
  chr2:47747971-47748015
  hyper
tgactgagagaagcaaaccacgcccggcggccccgcggcctgga

SEQ ID NO: 228312 - DNA, 133 bp, Homo sapiens
  chr2:47799011-47799144
  hyper
ctggcagctcccctgaggccggcgcggggaacggtgtgctatggaacgcccctgggaaatggtcgcccccctacgccccaccgcggcaggaaaagacgacggatgccccgcgcggctgcgggtgctcctctgc

SEQ ID NO: 228313 - DNA, 192 bp, Homo sapiens; identical to SEQ ID NO: 198200
  chr2:48009756-48009948
  hyper

SEQ ID NO: 228314 - DNA, 35 bp, Homo sapiens; identical to SEQ ID NO: 198201
  chr2:48011383-48011418
  hyper

SEQ ID NO: 228315 - DNA, 227 bp, Homo sapiens
  chr2:48131259-48131486
  hyper
tataacaatgaaaccgtttttaaggaaataatgtataattttaaaaaacatttaatctcaatccctttaaccaatggaggtgtgacaacaaacgcatgtaaaattaaccttaatccgccaactaaaacacgcaaaatgtctcctaacaattctcctcctccttaaaacaacaaccgtacacataaatacggttctgacctctaccactactgcgaacagctaattaa

SEQ ID NO: 228316 - DNA, 55 bp, Homo sapiens
  chr2:48543151-48543206
  hyper
attgtgacagccacgtggccggctgagtgtaatagagtgcgctagcggcactagg

SEQ ID NO: 228317 - DNA, 152 bp, Homo sapiens
  chr2:48756956-48757108
  hyper
cttcaagagggcatcgaaaggtaactcatagacttaccgcccccgccccccgacttttgcaggagggagcgctctcccctcctctgggaggctggagactcggggacagaagatgcgctggagggaagagaacggagcgtcggacaccagaa

SEQ ID NO: 228318 - DNA, 463 bp, Homo sapiens
  chr2:48757430-48757893
  hyper
tctgggaaagtttgcgggcgccccgggacgcgggcatctccagggccgctcggcgcctccccatctccccgcgcccgccctggccgcccccaggggcgccctggggcccgcagagggatggcctcccggcagggactcctcggctcccctctgttctgagactgctgctgggaccggggtccgactctaaagagaaaactcaaacagcaaaaaaaggaatatcgactcagttccgagggcgggggccggggctcgttctcacccgcgcgcggcccctcgacctctcggacccgggccaccagctctgcgcccctcacgcctccctcggggtctctgtgtctctctcccgctcccggactccctcctccttctgactgctgttatttgggctgttgtccctccccgctccctggtacctcagctcggaccttagcctgtgcctgcagcccggagtcccctcctg

SEQ ID NO: 228319 - DNA, 328 bp, Homo sapiens
  chr2:48982577-48982905
  hyper
ggagggaaggtggcatagagcgatggagggtcctgcatcaagggcgccgcgacgggagcgctgtgtactcacagtcgagtgagaccggccgtggggccggggcagcgcagggcgccgtcgggcacgcagttgcagggctcagggcagagcgcctcgcgcagcgctcgtggcagcggcggctgcagcagcagcagcagcttcagcagctgcagcgccgagaaccgctgcttcatggccggcgaactgggcttctgcggcttgccagtgtcttggacggcctctgagtgcggcccgcacccctctccccgccccttggctgcccttccac

SEQ ID NO: 228320 - DNA, 1869 bp, Homo sapiens
  chr2:50573244-50575113
  hyper
taattaagggaaggcgtgggggcaaaagtaattggcctcctgttgagtgagtcccaggactgcttcgctgtcactgcagtctgggcgcactttggaggaatgtgcgggctggaatctctccctccccgccccccggggccagggaagatgggcaggaggtggggcagcatatacagcacagacaaaaggttctgcagagccctcttctctctggtgctcaggtcccttagctgagcgcggcgccccatccggccactgagtgaccttctggcaactgacgcccccttcccgcggggcccagccgcgcgaccagggctggtcctttagtaggtgtccacatctctctcccagtacctcgacaaggaacgcccctcccacccctcaccaccaacacccgcgacgccttcccccatcccctttctattgtcttcaaagagataagtggctcgcaccaagcacacccaaatgcacctcccttttgtcgagctcccatttctctgagccttaggagcccaggagcgagtgcagggtagaaagaggggagcgaggggataacccgcgagaacttggcatcgcagacccaccgtgtccgcctcgcaaggatgccggtgacctgtagattgcaataggcactgaatgatgcttgctgctgccatggaaatggtggatgtggtgcgctcccaaactggatgccccccacgccactcctaggaggccgctgagggtgagcgggactatccaaagcagggccaggcgcccccctgcgccgccgccgccgccgccgccgccgccgcccccgggcgagcccagctcggcgccgcaccggagcatcctctggtacatggcggggcgcccgccgaggggcagccgccgcgggaggcaaagtttggggcgcggggagaggagagggcgcaggggagcgggcggcgcggagtgggctgaggggccggccgcctcaccgcgccagggcacccatcctctccctccttcggacagtcttctcggggtcctggagtccgccgtgcctagcaccccaaacaatccgaaacatagccgaggcgaatgcagctggagaggggcttgtccggaaaggcagccccgggaacagcaagcgcggagcgggtggctgctcccagatttccagggctccaggttctcgagagatactcccaaagagtttcgggcgagagtgcgtgccggcgggtggggggccgagaaattgtttaaagctcctcctggaaggtcctcacttctacatgacagacatccaccgcgaatccactaggtaaatccatttagctttgtgtgcggggactagggaggccacttcgccggcccaacctcctttcaagacagaagcagaccccatggaatccaggcgccccttccctccattcagccccggccggctcgcccgctagcgccagcctcccccgggcagcgcgcggagcagcggcgcgcatcgcctgctcccgaggcaatctccgcgtccgccgcctcctgacacttacgcccggcgaggggttcagagggaagagtgcgcccttctgaaggaagtgggaatcgaacggcggaaaggcagctgagaagaagatgcagacgaaggagtaagggagagaaacagaaaaagaaaaagaaaaagaaaaaaagaaaagaaaaaccacacacgctggtgaagcaaggggctctatgcaaatctgcagtctccaaacagcaaatcactgaagctcggatgcaatgcagaggacgagcctatgtaacgagggaggctggtctagcttcccacgaaaatcgccctgctttgcctctcccttgcattctccacgcatcaaagggacacgtgtaaggcgaaacgggaacacctaaaaa

SEQ ID NO: 228321 - DNA, 251 bp, Homo sapiens; identical to SEQ ID NO: 198204
  chr2:50629607-50629858
  hyper

SEQ ID NO: 228322 - DNA, 590 bp, Homo sapiens
  chr2:51259211-51259801
  hyper
tgccttttcagaggcgtcaggcttgagcgtctatctccaggagtgcgggaggggagaacaggcaacggaggggagcaggaggaggaggaggaggagaaggaggaggagggggaggagagggaaagagctgggaaggaaaaggcggtggtggagcctgagaaggctgggttacgtgacgccgggtgctgtccttctgaaagagaagggcggagctgagctctccgcagtaccatggagagcggcgggcccgtcctttggctggggaatgggtgggctcggcccgtggtcgcagcccctccaggtctggatgctgcggagcgaggtgcttttacctttgcatcgtccccttgcagggggagcctgatcctgggggcggggaccttccgcaagcgcttctaacttgtcaccaccctctcttccccatcggaaagaaagaaagagagagagagagagagagagagagagagagagagagagagaacgaacgaacacgaaccagagaaccacgtagcctactgagcatgcccaggcccctgctagacccatggaaagctgtatggagattccacttctccggggtttggtagtga

SEQ ID NO: 228323 - DNA, 41 bp, Homo sapiens; identical to SEQ ID NO: 198206
  chr2:54682463-54682504
  hyper

SEQ ID NO: 228324 - DNA, 1303 bp, Homo sapiens
  chr2:54784817-54786120
  hyper
tcccacaatgccttgcaaatcggtgctcccataaatcttccttgcgtcgaattcctatcataggcccgtgttattccaggaaaccaccgccttcatatcccctgatggcagcgtaagtcagccgagattcttcactgagcccgaacttacacctcccctggctgtggcgctgcacagcgccctgagagtgactttgtctgacttcttcccggtggctcgccgggccgccgccgcgtggttggcgccagcgcactggggcagtcgcgcgcgcccaggtgcgggccgcgttacctcagcagacgctagagagtgaatgagccgcgcgggcccgggacccttggggctcttcactctccaggccgtcccgtgggcgcgctagccttttcaagtgatagtaatcggagacttttccgttacatgaggctcaacaaaagattgtaattccagcagctctgtttgggaaggcactaccgcggcgagtccagggcccggccgggggtcggcggctgccgggcggctggggcgaccgcggaccgtgcgggaccggtagggggtcgcgggccggctaggctcccccgcgcccctcctcgtggtatagcctgcatttctaatacaatgctgttatgctaatcaggtgacatcaccgcccagcacacggcgagtggctcctgataaaattacaaaccggcggccgccgcgggcagctgggaggaggtgtgcgcgctgcgcccgcgagctcccgggctcggcaaccgtggcatgcttaggattggccatatttaaaagttctgaagtagaacctgcgcctcctctctgcttctccctcctcctcagtaatttatttcgagcttccaggcaagggccacggaagaagggaaagcaagaaattagatgcctgtgtggtaactcctcgcggagctaaggtggactctcttgcagccaacttcccatcagatcaccctgctggacttgcagaccggaatggggctcgcctaaggagccgagcgctgcggaggctgctgcgtgttggatgggagtgggagggggctggagcgagatttccagggcgcagtcctccggggcgttacgccgggcataatggaattgcagaggacgtctagtatctccgggccgctgtcgccggcgtacacggggcaggtgccttacaactacaaccagctggaaggcagattcaagcagctgcaaggtaagccccctcccaaaggccgggcctgtcctgggtgccaacgggggttcttggaggctttatttgtgaccctaatgaagacgggcggcttcacag

SEQ ID NO: 228325 - DNA, 425 bp, Homo sapiens
  chr2:54798138-54798563
  hyper
tataaaggtttaaacgacttgctgtacaattcagtcttgcaatgacagagagattacacactatctgcaaacaactgccaagcagatgaaatcctggctgtgggaagtctgcggtgaagagtggtgggggtggtcaggagagcagtggaagggaagtggctcagaacattgtagtggtggtttggcgtgcctgtcaagggctgtgggacgttttctctctcatttcagaaacaagggtggtgggaaacacatgggccgtggatttgcataaaccaacagtcaaatcctagctctaccagtgacttcactgagcctcattttcttcagggggaaagaataaatagcccttggggtgattgtaaagcctaattaggtatgttataattgtattaagaggatgacgagttcaccgtttgccagggagt

SEQ ID NO: 228326 - DNA, 93 bp, Homo sapiens
  chr2:54950042-54950135
  hyper
tagctgttcatggcgtgagcaccttcctgcttccaacctccggttatctgtaaatacccaagtcctctaatttaggacgcaggtcatgggaag

SEQ ID NO: 228327 - DNA, 459 bp, Homo sapiens
  chr2:54951619-54952078
  hyper
cttggattgggtgacttatgcgaaaaatctgtttctttcttcctcgctctcgcttcctggatatagactgtcaatttcggatccaaagacggcgatggcagagctcacccgggttgcctgtcaaatcaaggctatcgcagaataaatcccgccgcctgccgcgaagccccggcgcaccgcaaacttcagtgagcgaactgggtgatcgctgttgggatatgcagattcctgatgtaaaaggcggggtggcccccccgagagcctctcccgggggccggagcccgcaggtgcagtgaggcgcgcgcgccggtgccggcgcccccagagccgccttgcccgggtagagggagcccggcgcccggcggggtctggcggccgcacaccggcggcggcggcttgtctgcggcggctgcagcggatgatggtggcggccggcccgctgggctgtgcctgtgtgtc

SEQ ID NO: 228328 - DNA, 89 bp, Homo sapiens
  chr2:55276442-55276531
  hyper
ggagcaacccagacgggtagacaaaagcacctcctaaaaatatctgggtgccaaggcctttccttcctcacctcgaagcccaaccaacc

SEQ ID NO: 228329 - DNA, 199 bp, Homo sapiens
  chr2:55459598-55459797
  hyper
aaaacatcttttacgttgcttaaacctacagtttcgaaagcattccgaaggctaaagtgagaaataagcccaggctagggagaggagaaacgaagttcacgtcctagtctggcaccgggttggattgtcgctgggacggcagtcaggcatttggtgtggtcgcctaaggggtgggtccttcggcgggagctccgggaaa

SEQ ID NO: 228330 - DNA, 375 bp, Homo sapiens
  chr2:55496130-55496505
  hyper
cgtgaatgcctaacgtgggctcacgcagggattaaatgcatcttggaaaggcttccgaacgcacaatgtttatgaagttcgcgtgatttgtgccactgacacgttaggcgaaacaacacacaccacctgcaccggacaaccctggttaagggatcctacccacttaactcctacctacagccccgggcccctggattctgagcacgggcggagatcaccttctggacccggaagaatggtcggtaggtcagtccgtccccgctacggtccccgccgggcttccggtcccgctggaaaaggttctttccggaattcagagagttgctgtcgccgctgggggtgggactgtctgcggtgtccgcggcgggcgtccag

SEQ ID NO: 228331 - DNA, 581 bp, Homo sapiens; identical to SEQ ID NO: 198212
  chr2:55509213-55509794
  hyper

SEQ ID NO: 228332 - DNA, 602 bp, Homo sapiens
  chr2:55646536-55647138
  hyper
ccgtcaaggttgtccagctcctggaggatccagaccagcgaaactgctcccaatgaatcaatcccaacgggggctaaatgaaatacgttaaacagagaccacgttaaggataccgaggcgccaccagactcgacctcggcgttccgacctctacacgttccacccaccgatgggcatggagccgctttcgacccgcggagcctccactgcccgcagcccctcagtaccaacaggcagggctcgccccttccccccgagcagacaccattcctccgccgccctcaagcctcgcctccagcccccttcccctcccgggggtgggggcttgaatgtgtgtccctaaccccccagcttcctaagccctgccagcctttcagcgcgtctctgggaatccctggcacaaaatcaccgccgcgctccagccttctccgccctctatggagaagccggagtaacggcctcagaaccgcagtgccgcatcacaccccacccctcgccgcccgccagcgccgcccgccaatgccgggggccgccgtcaaagggagcgcgctgctccctccgcgccgatatccttccgccgactccccgcccctcccgtgcag

SEQ ID NO: 228333 - DNA, 52 bp, Homo sapiens
  chr2:55746535-55746587
  hyper
cccgtctactgcgcgttttctaaaccttggctcctacgcatttatcagaaga

SEQ ID NO: 228334 - DNA, 78 bp, Homo sapiens
  chr2:55921031-55921109
  hyper
ggagtttcgtttccgcggtgcccgagggacgccggggtaacggaaaccttggccaccttctacgaagactagagaggg

SEQ ID NO: 228335 - DNA, 220 bp, Homo sapiens
  chr2:56149729-56149949
  hyper
ctccccctcctgaaccttctcggtagccaacgaacgaggcagcaaagacgtaaaaactgctgtagaattgcatttcacgttactccatcctgctacgctgtttacatacaaaagacattcagcgtgcattttatactgcacctacaaagcaggctgcagaaagagggggtcgaaaggaaaaaacagtaatccatttcaaaggggacggtgcatttcctgc

SEQ ID NO: 228336 - DNA, 972 bp, Homo sapiens
  chr2:56150222-56151194
  hyper
ctctcaaagtggcatttccacgcctttctctgcgcacagctttgtttaaaagtcccaggttgtgtggaggggcagcccaaagcgactgattctcttttgtcttatcagtctgggtccccgacacgctaccttcggtttcaggctgcctaggaccggaaccagggatcgcaccgcagcccaaggtaccagtttcgggcgggcggcctggcccggcagggagatgaggtcccctttcttaacagcaagctaacgcggcggtcccctggagctgctcagcgtcccagcttctaaccagctcctatggaatccaggtgcggcttaaatctcgcacactggtcccctaaactttcaaaaccacgtttatgggcaaagccctgccggctggttgtcggcgcgcacacacatgcccatcccaacagatgtcacccgagtactcgcacttgctgacagatcgcattccgaggctgcacacctccacctccctctctgcccgagacaccctgcacagtccagggcagttctcgggtactcaacacccctcagctcaccccacctcactctcccgcgcgcggcccagtgagtactgggctcgctcggggcgaccccccgttgggggctcctacctgtgcggccgcgctgcgctccgggcccgggcagcgaggggagtgcgcaggggagggcagccccgtgggtctgatctggcgaagtccggcagcggccgcggcggcaggaggaggaggagaaagggagggaaagggggagggcgaaggggggcggaggagagagctgagggaggcgcgagcgctgagcccagcgttgcgagcccggcggtagagcgcgcagcgcagcgaggtccgcgccccctgctccaggggccctctttgccgcccccgcttgccctcccttgccagctcctcgtttcccagactcgcggggaccccacgccagagaggacacgttgacatgtgatgt

SEQ ID NO: 228337 - DNA, 1845 bp, Homo sapiens
  chr2:56410766-56412611
  hyper
atccctccaaatacgaagcacctcgcatttgggtcagcagctgtttcccctgcctggtgacaaggccggtgtgcagagggcagaggagggagcttcttccgccacacggtggcgcgcgcgagcctcccaaagaccgggcggccacagctcctcaccttctccccattccagccccacccgcccgggcgcagaaagagccgcgcccccagccctcccgggcaggacagccgggagcgcacctcgagggcccgggcagcggtcgagtggcagctgcgtccagcccatgcgggagctgctgcgggttacgggtggccccagctccaggctcctcctccagccggtcccccaccctccaccccttctcgactccgctctgcaaatcgaaggctttccggagcagcctaggagcggccgcgggcgcagcgaaggcggcaggaggagcgcagcagccttcgggcagccgcggcggcgtcgctagagcagccggggaggcgccgcggtgcccggcgcgccctccaagctaggagaggggagaagccgggggctgcagctgggcaagggggaggaaagtgcgtgtgcgtgcacgcctgtgtgcagggcagagagtgcggggggcgacagtctcggcttagggcggaggagagggcaggggaacggcggtgcagctcccccgctgtccccgaggatttcccgcggcagccccgggctccccagtgcccctcaccatggacttgcgcggagttgggacgggcctcggcagcagcaagcggctggctgccgggccctgggggagcgcgggcgcgcgcgcggggatggcgaggtaggatggccacccagcgcgacccccgccgccccaacccagcggcccctgggcggtgccgctgactcgccggagcgcacaggggtgtgggcggaggcggcctcgccgcgcccgcgccttcgggagtcgcctcgcctcttccacccacttgcacctgccaccccgcggataccatgtcgaaggcggccggaggcgcggcggcggctgcggcggcggcggaaagttgttccccagccccggccggctcgtccgcggccccgcccgcgccggtggaggacctgtccaaagtgtcggacgaggagctgctgcagtggagcaaggaggagctgatccgcagcctgcggcgcgccgaggcggagaaggtgagcgcgatgctggaccacagcaacctcatccgcgaggtgaaccgccgcctgcagctgcacctcggcgagatccgcggcctcaaggtgagcgcgggccaggtggggaggcgcggcgcggctgggagcggggtgccccgaggaggaggcggggccaggcaaactttccctccctccctcaacaggtgaccctccccttctcccggtcggcaccccctacccccagtccccagcccctgtgtaacttttccaaacttcggaggcgtctgctcccctcctctccccaacacggggcgctccactgtctggctgttcggggaggcgctgaggacgctggaaagcagggagggaggtgaagggcacgcgaacctttcatttcttagggaggctggaaaatctgtgcctggggagccgggtttcagtcagttaggcggaaaggccagtgagggggtgaatccaggggatcttcgccttggagggtcgggaatgcggctgctctgggccagcagctcttgggcgggcagagggcgaggaaagggcgccactgccagggagagcggctggcggggcgcccgggagaagcagcgggcgccaccctcagagcagtcttgtgtcaccgggtacataggagttcaagctctgccttcacgtcttctcccaatt

SEQ ID NO: 228338 - DNA, 193 bp, Homo sapiens; identical to SEQ ID NO: 198216
  chr2:56412856-56413049
  hyper

SEQ ID NO: 228339 - DNA, 160 bp, Homo sapiens; identical to SEQ ID NO: 198217
  chr2:58273538-58273698
  hyper

SEQ ID NO: 228340 - DNA, 54 bp, Homo sapiens
  chr2:58274020-58274074
  hyper
gggtcttgggtggcgggcggcacctccgcttgcagtgccggagccgcggccccg

SEQ ID NO: 228341 - DNA, 232 bp, Homo sapiens
  chr2:58274307-58274539
  hyper
cgggaagttggggcgcggggttggccgtaggtccccggcgtgctaagggcggacggaccaggcggctgggccgcgctgcttctcgttaccttccgcagggtcaggggccgcggcggggttggaggtcagcccaggcacatgttaacccctgggtaccagtttgctcggaaactcgtgttgaggactcatcttagccctgggaaggtacccagaagccgaagggacacccctg

SEQ ID NO: 228342 - DNA, 313 bp, Homo sapiens
  chr2:58655588-58655901
  hyper
gccctggccgggtaagtgacgccggccgcgggcccggggcggccgccgcgcgcgccacccccgctgcctccccgcccccggcggccccggagcacccccaccatcccctgccccctcccccaccggatcgccccagccccctcctcttgcccccggcgcagctgggctccgcttggatttcggtgacgctgtggctctgttcgtttgctgctgctgctgctgctgctgctgctgcagccagggggaaggggtggggagagttggggtgggggcggcagagcagtgtggagagcagtgcccctccactcgtttg

SEQ ID NO: 228343 - DNA, 216 bp, Homo sapiens
  chr2:60777863-60778079
  hyper
acccaggagggagaggggtacgagggagcagcctggactgcgcgccccggtctgtcctttgagcccccactgcatccttccgaagaagggcctgactttcccgagtcctgcgaacactgcccttccttcccgccggtacctggccgggctgtaacttcacaccgccgcgcgccgcgtctgatccgcatccggcgcggccgggggagttgggggcgg

SEQ ID NO: 228344 - DNA, 175 bp, Homo sapiens
  chr2:60780329-60780504
  hyper
tactattattgggttacttacgcgagaattcccgtttgcttaagtgctggggtttgccttgcttgcggcgagacatggtgggctgcggggcgggcggcggcggcggcggcggcggcggcgggcggacgacggctcggttcacatcgggagagccgggttagaaagaaggagactc

SEQ ID NO: 228345 - DNA, 175 bp, Homo sapiens
  chr2:60782018-60782193
  hyper
aaatgggaatggagagagagcgacaggctcgcaggagcagcggggagaccacggtggtgagatgaccgcctcgggtcaccgccgcgctccccaggcgccgccggccaaggcgcacacccaggagccagcagccccctctcgcctttctgcagacgttccctggaaattagggaag

SEQ ID NO: 228346 - DNA, 155 bp, Homo sapiens
  chr2:60782712-60782867
  hyper
ttattgttttaagcgagggccccgggcttgcacgcgctcacccatcccgcagccctgccggcaagcggctgtttattcctgtttcgtcttagtaaagtttcaagtctactgtgttagaaaatgactggcttgcctagctcggcggagcttcggac

SEQ ID NO: 228347 - DNA, 676 bp, Homo sapiens
  chr2:60783807-60784483
  hyper
gcagcgacgattccccgacatatatttaatttcaccatcataatatgcccagggtgaaatgggaagtgccctccgctcccgcccctcccccagccagatttcacccagtccagaaaaccacggctgtgtgtcggcatttgatccctcctggtcgtcgacccccctccccggcccctggtgccctcccctagggcgacaacccctccctcagcactgctggatgctcgctaaagagcccgaaagtgggggaggggagggtttgtatgtgtgtttaaagaaagatgtgtcgttttaagagattttaaaatattacgtaagtattgattaatgatgcaggtggttttgtagagggggtgaaaggtcactttaaatgcgcacacttggatacacaataagtatatttacctttccagaagtggcttttagaaagtaataaattatgacaacgttaaaattattttctggccgttcagttaacttcgtttggggctgtagagctgttgctgctcccattgaaagggtaattacgttccgtgggctctttcccaaacctttggtgacgacactgcgtgtaaactccaggccagcagacgacccctccccttccctcctccccctttttatcttgcccgcggaggagacgccccaggacttcctgcagtatatattctgcctc

SEQ ID NO: 228348 - DNA, 116 bp, Homo sapiens
  chr2:60784783-60784899
  hyper
gctctgaacgtgaatgtggtcaacaaacagctcgaagagggagacttaatacagtcccagccctcggaccgaggatcgcctggcgcgaggaactcgggctgagctggaagatgaag

SEQ ID NO: 228349 - DNA, 323 bp, Homo sapiens
  chr2:60796321-60796644
  hyper
ggctgactgagggggagtcacgtgggcagcccgtgggcagcggcggcagcagctcaaaagaaattgactgactggccgcttgggcgcatttcaatatatggaaatgaccagaggcttctgcaataaatcagcactcaacactttgtcatttttctagttctgcttcattttcctattttcctcttctcctcacagaagcctcatttcttgcattttgccttgccgcgtctcttcccacttccaacctacaccctctccaaatcttgccccatcctctccatcgctcccaaccaccgcgcgcccccacccccgacacacacaca

SEQ ID NO: 228350 - DNA, 623 bp, Homo sapiens
  chr2:60796704-60797327
  hyper
ccctgtaattggaaacatccggtctacgacgattttttccttttctttccctttcaaaaaattttccgacaaaatcaggcagtatttgctgccctgcctcggattatctgagacaagaggcgcccaggatgagctcatgtaatccccaggatgggaacctcaagccccttatgataaagaaaaaagaaaaagaccaggatactcattccttaccccagcccccactccaccctcgaggagttcccttagcaaacttaaaagactatcagaagcaacttgtgccatgcagtgccatggagagcgctggatggctagccagaagaaaagggaaggttgtagtggaaatctacgtgggtttgcaggttcctgcttttcttgtgtagagcctccggtgccctccacctaaccctgccccaatgcctcgggtcttttttgaactaatgctgtgcgtctccgcaatctgcaattactttggatatttctcaggagctaaacgcagcctgaatttcgtggcgcgtgcaaaaaaaaaaaaaaaggcgaaattaacaaaaccccaccaccgcgctgttgtttttttctggagtttttttttttttttttttttagttcggttcagaagcaaa

SEQ ID NO: 228351 - DNA, 405 bp, Homo sapiens
  chr2:60808827-60809232
  hyper
gccaccccagctcgcgcggggccgggctttggggtgtgagagctgggacgggagtcgggtggatgcctggccggagccgccagctcccctcgtcctctttgcttgtcctttagcacaagggcgagcagcgtaggacaaagactcgggcggcagctgcctggttcggcgcgcaggggcggcctcggccacccggggcgcccgccgcctccaccgccccgcgggggaggcccgatgcccgtctttgtctgtgccgccgccgtgggccgggtccgcaggaagcgggcgccatcgtgcggcctgagctggacactgcgcccccggaggcgcggaggcgcgaaccaccaagcgtggctccaagctccacggggacgctggtgtcatcgtggccacgactgcttgtactgt

SEQ ID NO: 228352 - DNA, 332 bp, Homo sapiens
  chr2:60962745-60963077
  hyper
gatcaaaccccagctcttggcggtgcgccacaggaactctccggtggtcgggttgtagatgaagagcttccactcggcgaggctctggttgagggactccttcttcatcgtgtgcgcgcggacgacgaggggagcggcggccgcggggacggaggcggcgagggcagcggggacgggggcggcgagggcagcggggacggaggaggcgagggcagcggaggcgcgtcccggctccggcggcgcagcccggcgacggcaggggagggtgggacgaccgagaacacctcctcgttactgggagtactcgagccgactgcagtgtttaaattttt

SEQ ID NO: 228353 - DNA, 252 bp, Homo sapiens
  chr2:60983180-60983432
  hyper
atttccttccaagcggtctaccggcattgacagtaccgcggacaaaggagagtaccaaataaatactccttcgaaccaacggtatactgagagccctgagcttgtgggcggggccccggagcctcccgggacctaaaggcagagggggcgtggctgagggtggtccagacctccaggggcggggctgagacctgcgagaggcaggctgggaagcggcgccatattggcgtcggccgcgctgtattgtcataa

SEQ ID NO: 228354 - DNA, 213 bp, Homo sapiens
  chr2:61108072-61108285
  hyper
gggggggggtccccgtatgcaaatacaggaattacagaagaagacaggacccccgccgcagcaccacttccccctacagggcgcaacgtcccgccgctggcgcgggggtggagatttgcatgtgcgaagtcgggaagagggggaaccacctctcgaaaaccccggccgtcgccctcccaggccgggagagtcggccccgcgcgcccccaaaag

SEQ ID NO: 228355 - DNA, 378 bp, Homo sapiens
  chr2:61109141-61109519
  hyper
gcttcagggtttgcgtgcagaatccaagccacgctctgtaattcgatcctgttgtcatagcaggaaccttagaaattcccaacgacttgattttaggattagggaagtcataagcgaaccaaaggaggacgaagagttctcattaaaaatgtatatgtattgaagatggtggttttatgttttagaacaggaatgaggaaccttcagacctcgggcaagctctctccccctttttagtttaatttcatcaaatgcaaagaggtgatcccccttgtactgacagttgtacaaaatgtgtcacggctttaaaaatcatccgtggtattttaacacgaattagaaaatccgtggtattttaagtgttaatgttgcttcgac

SEQ ID NO: 228356 - DNA, 77 bp, Homo sapiens; identical to SEQ ID NO: 198225
  chr2:61109819-61109896
  hyper

SEQ ID NO: 228357 - DNA, 137 bp, Homo sapiens; identical to SEQ ID NO: 198226
  chr2:61110113-61110250
  hyper

SEQ ID NO: 228358 - DNA, 253 bp, Homo sapiens
  chr2:61244606-61244859
  hyper
agggagttgtagccgctaccagaaatatcgatgagcctttaccctgaggtttagaaaggcagctctttctggggcaaatacaaagagcgtgtttcttcctacaaattagtggcatcctcccgctgtatggattcagctggcaaagtaactcaagccttgtcctgactgcaagggtgggcggggtggacggctcggtgttctgcccgttgtgtcttacgctccaggtgctggtctacgcgggcctggacagtca

SEQ ID NO: 228359 - DNA, 286 bp, Homo sapiens
  chr2:61293059-61293345
  hyper
ggggttgcgggctcggtagcggcagcttcagggcgcgagcgcgggcggtgccgaccactgcaggtaacagaggcgctgcgagggcagccgcggccctgtggaggtgagcgagacgccgagggggctcgggtgcccaccgcggggcgggaagtgcggcatggggcggtaccgctcacagccagccggctcccgccgcggcttcccaccccgggcggggtcccacttgcccaaacgcccccgaacgcccccgtgcacagcctcagccggccgcgcctcgagcagccag

SEQ ID NO: 228360 - DNA, 138 bp, Homo sapiens
  chr2:61404133-61404271
  hyper
gcaaacggtgtgacgtgtgcgcgctgtggccccaaaggccggtcttacagcgacctgggcgttcgaggtcgtgtcctcgagagctatagggagcctgccgaggccacctgacggcggtgtcgcgtctacactgccggt

SEQ ID NO: 228361 - DNA, 116 bp, Homo sapiens
  chr2:61765409-61765525
  hyper
aaccggttgaaaccggttcagactgggagattccatctcggttgagttttcagcccatggcgccgcggagcgtttggaacctgggcctccgcccccagcccgccctcctattggtc

SEQ ID NO: 228362 - DNA, 166 bp, Homo sapiens
  chr2:61991302-61991468
  hyper
ccgcggaaagccgtttctatgggtgacgacgtatggcaacgcgtctaagggaacgtcggcgagtcgactattgtgttcccaaagtcgccctgaaatgaggacagaagttcgggggagccgggggcgtagagtaaaggcacgatctgattggcccgcggccgcgcaa

SEQ ID NO: 228363 - DNA, 78 bp, Homo sapiens
  chr2:61991708-61991786
  hyper
tgagaaaggaggcccggcagaaagttcggatcagctgccggccgttcccggcgtagcctagggcggggagggattgac

SEQ ID NO: 228364 - DNA, 199 bp, Homo sapiens
  chr2:62081271-62081470
  hyper
ttgctatgggcgccgtaactggggacgctacaggagccgccagggaccaaaagtcacgcaaaatccactcaggctgccagagacccgagtcgggtgcttactggatcatggcagtcagtaccgagtctgttggctggttccgaaggttggcaggctgaacagggcacttattccactcctttgcgtctaaccgcctgaa

SEQ ID NO: 228365 - DNA, 67 bp, Homo sapiens
  chr2:62115906-62115973
  hyper
tgtgggtgaagagcgccgggggaacctttacgcgaggcagcaatgacaacgcgcgattttaaaggcg

SEQ ID NO: 228366 - DNA, 178 bp, Homo sapiens
  chr2:62132600-62132778
  hyper
tactggaaccaaacggatatttccgtggaggtatcctaaggggatgggtgttgcagagcaaagctgtaagctgccaactctgacccctggggaagccttgcctccaggttccccgaggttccccgtggtggttttgcacaggctatttaggcacatctcggccgccgtggcggggcac

SEQ ID NO: 228367 - DNA, 423 bp, Homo sapiens
  chr2:62422576-62422999
  hyper
tctgcatgaccccacgaagagaactaaggaccaccccccacccttcctgtcctggacggcttcataagccagaggatccagtggcagtaccaagcagggcaccactctgggtcgtgagcacctaagaggtggagcaaaggtcagaccccagggtggcccaggcctccctcccccgcctccccggcggggccattcctcacccgccccagcactggagggggcggccggggtcggtctagttccggttacaaactggacagaaaaggccactggagtctcgctaggcgatgcgcctagtcccctagcctcagacgaaccgcaagaggggccacccacaactggaggggcggaggctggagctgagtttcattagtgtttttggagctgccaggcatttccaggggggtcgccttcctagaggcc

SEQ ID NO: 228368 - DNA, 801 bp, Homo sapiens
  chr2:62424205-62425006
  hyper
caggctgctagcccgagtcgtgggggtggggtggggcggggtggggtgggtgctgccaggccagggagcgcctgaagccggactctacgagacacccctcgtgggaaggtgggcgtggggggccctgccggggctgcgggcgcgggactggcggctactccagcacggcaggcggacccttctggaggcaataaaccgagtcacccggttaatttccaggccacggtatttgaaactcggggctggggagccgcagaactccctgtacccccatcaagtagaggagccgtcgggagactccccacaagtgtcacagcgtcaaagctcatctttaaaaatatgtacatttataacctgggttggcgaggcggcgctcttctgcccaaaacgtaggggtggttagtttgtagagtgggcttagctcacaggtgcctgagctgtatccccgtggccgcctcagccaccccaacttctcagaaagattgtttagaacaattaaactatattcttttgcccttctcttgttggaaccctaccgtaatatccgatagcgaagccagttggtgaatatagaattctacttgttaaaacaaattcttccggtataattatttgtgcctctggaggtggtaaacgaggtggccgacagggccgggactgggagtgaaaaggcggggaccctggccgagccagtcccggggctccggtgccggcttatagtcgcacccatgcggatctgacagctgacccggagggaggaccggcagggcagggcagggcggtcacttcccattgtcctaa

SEQ ID NO: 228369 - DNA, 637 bp, Homo sapiens; identical to SEQ ID NO: 198232
  chr2:62732953-62733590
  hyper

SEQ ID NO: 228370 - DNA, 436 bp, Homo sapiens
  chr2:62798173-62798609
  hyper
agtgaaaaatcttgtccttgcgactggtaggtacagtcgctgtcaacccacagttctcccaaaaggcgaggtccttccttcggctcagcctgctccctctctcctcgcctccccatctctaggacgcgggaggtgggagccactgcgctcccggagacgccgcccgtgccgtgtcaggttgtccccgagtgcgcttgccgtgagtttctgccgcgtgactcacccgtgtccctcgctctcagccatcggaacagcagaagcgggtcggggagagcgcgctgccctgacacctgcaccccatccccacctccaactccatctccagaatttagccttcgcggagcccagcggctctagccagtctctttacttggcggcaggtggtgtgggggtgcgaaggaaggggagatgcggcgaaatcaaagtactttttgta

SEQ ID NO: 228371 - DNA, 2717 bp, Homo sapiens
  chr2:63274625-63277342
  hyper
agctccttcgctcccgaagccgctcccaatcggccaactgacaacccttccctcgccccagatttgctaggatggtctgggaccgccgggcggcccctctacctgccccttcagctttagtcccgagcctctcggggtttcaatttgggctgctcggtggcgcccgaacgcccctcagcggcggtggagcgtggactccggcgcctggcggggtaaggcccgcggcaagggcgctgcatccggacatcgctgcgtggtgcccagacgctggctcccgagaacgggcacgagcccagcacgccggaggacccggaactcgaaagcccgcgctgcgggaaaagagactatcggtccgagggtcgcagaggagcaggggcgttggcagcgggcttgcttgggcacagtctgcgggccggagcagaacttccgcccctggtcagatccctcggcctcagatccaaagccctccccttgtcccaagtgtcctccagagcctggccgggcctggaggtcacctggatgctggatccttgtctccacacccagctccctcgccccttcccggctcgagggccttgagctggacggcttcacctcctccagtggtgtccccacttccccttcccgcaccgcggccgatgctggaacggtcatggcttctggcccagcatctcccacctggacatttgcctagcgacggccgcctcaatcctctgcgctgctttcaagaaactttcatcccagtctctctccctctccactctcctccctctccccctctcctctttcttttcttaatcctggggttttatgggctgagcgttaagaaaattcgcctgcaatttgggattagataaatactctaattaggaaaaaaaaaatccgtgctacttgatacctcccaacttccccgagaatggtggcagcatctggaaccgagagcgccggcctcccgcgaggcgtaccccggggaccgcgctggcacattccagagcgcactgccgtcccacctcgctgcgccggacccaggtcaggtgctgaggctgcaggcgaaacagggcctggtggagggaggaatgagttaaggtggaggaatggggcaaggtcacgcgccccggcactggagggccaaccccggcacacagcggactggccgggactagggcagcgccgggctatggacgcggacgccggcgaagcgcaccccgggacgtccgcatattctttcccccaaaactagtgcgctccagccggcgcctttcctcggaacctaaggaaggggtatatttcgttgctttctttaaacctcagcacgatcacagtggctccgagccgcgggcggctgaccgcgggcctcgcgggctactcctggtaggggcctgcgcgagcctaaggtgtgtccccgcctgggttagcgctgcgctctgcactgtttcttttcctcttaaagcttctttctcactcactctctccctccttctctctctcattttttccccatttctctcgttcttttattcagctttctctctttctctcccttttgtgaatgggccgcggtgtctttgttctgtagagaagcgcccgtgtcgctgacttttgtgaaccagagaaggatcttgtaaaacctccttttctccttcgtacgcccccactcccacccctcctcccctgcctctttgattagatgttccctcatcgtcaaaaaaaaaatgtaatttcgttggtctggcggccactttctttgaacattagctcgctttcagctccaacttcaattagaaggagttgattttgagagatcaacaaaagaaccgaccaaagccttattaaaggtcctaagaagatctcccgggtcctttgagaagcagttaaggaaacagtgtgccctccatcatattctgttaccgtattttattcggactccaaaggaaagtgtcgcttgggggagggggaagcactttgatgagcggcggccgcggccccttttcactcagcgggctcccccttcgttctcctcctcctcacccagcgcccggtccgctctcggcgcccgaccccgcagcccgggcagcgcgagtgctccccactgcgatgcgcctggaggctccttgacttgccctcacacttaatcctgtgcaaactttttaccccgcctgtcggggtgggggagtgggggagattagaaacaaggggtagaaattcctcgaaagggaataaagtgcctaattttcaggaggaggtgccatttaaaagattcgcctagcttagagttggaacgaaaactcttttttgcacttttaaaagtccacccaggtagacgtgtttgggaagttttttcgggtgggaaatgggcttcgcccgtacgaacaatccggggaaatcgcctcaaggaggatccttacgcagcatgtggaaaaaagttgagggcaggggtctgtggccacattttccatcaaaaagtccctgttagaggcagtctaagaaagagagagaaagagcgaaaaagaaactttcctatcaaaatgtttcaattaagaagtagggtgtacgtgtgaggggaagaggacgctgggctccaacgtttcagtagaagcgcttaagacttgcaaacacccttggtggggacctggaaccccgggagatgccgacgagcaagcaggtaagtggcggcgccctcccagtgggtgctcttcccaggcgcgagagtccggagg

SEQ ID NO: 228372 - DNA, 1002 bp, Homo sapiens
  chr2:63278422-63279424
  hyper
atggtgaacggccccggcagctgagggcaggtaaggagaaagccgcggggccaccccggactccgggagcgcgttggttacccttatctccccctcctcaaatggatcccggcttccccggtccccagcaggtggtcggggctgtgggagcggcctggctcccctcttggtgagccgaggaccccggggcgctgtcgcggcccgcagccccctcccccgcctcctccgaagtaaccaagctgaagtgctaagtttggagaaagtctttgaaaactcacgctgcagcttcgcaaagccgtcgcagctttgagtcccattttccttcggccctagagccctggctgcttcccttccggtccccttcctacaagctggactccctcagcccaggtcttgggtcccagaagacgggggcgggaacggggctggggggagcttctttagctctaacttctctccttgaacgtcctagcccgagtccctggcttgcttcacagcgatcccgctaagcggggtgtagcgatggccccccagggccccaggcccagtttccagcgcccctccctgacccctgagagtggcaccccgggttcccggcagcggcgggggcgaggcttcgacctcccagctcgggtctgcgtgggctacgccgctgaggcctagttctctgttctcgaccgtgtcctggggccgcgggttcagctacaaggatggcagcacgcgacttgctgccctccggcttcacaaatccccgagaccctttgaggtgctaggccagtcacccttcaccccctgctgggaccctgcggtccgcagcccagactgggcagagagaaggccgggtgcgcgctggcaacgaaggacgctggccgcagctgaggcgctcccgacctcaggccgcatcttggggtcgcccccctctacagtggccccttcggcgtcctctggccctctgcgaagcctgggcccgttactgcggttgaggtgcggtgggatttcgcg

SEQ ID NO: 228373 - DNA, 624 bp, Homo sapiens
  chr2:63281020-63281644
  hyper
tggcctctcaggctcggccgcccgagggagtttcttttattcccagttcggctttcttttgcgaaggccgagatctgggcctgccaggggcctgcccgagtcctctatcgcgggtccacgtggccaccaatgacccgcggcgcccccgcgtgtccccgcagccactccgcggaagcagcggcgggagcgcaccaccttcacgcgttcacagctggacgtgctcgaggcgctcttcgccaagactcgctaccctgacatcttcatgcgggaggaggtggcgctcaagatcaacctgccggagtctagagtccaggtgcgcactccccgggctccagggtctgggtaggggagctgaggctgctcggggaaggtctaggaaggctcttgagtagttcttgaggagaccatcctgtgggggtgggcttacagactgggcagccgctctcggactccccctagcgctgggccccagccaggaaagggggcaaaagttaaaggaaatggcttagagccctggattccgcctttagccctagggcgccttcggtgtcggtatcgaaagtactttttagaattgccggaggactagggaagctcccgaatgtaaagcgccctgcgggcctg

SEQ ID NO: 228374 - DNA, 443 bp, Homo sapiens
  chr2:63282553-63282996
  hyper
gggagttgggtccgcggggcggtggagcaacaagctcccctagctccctttgacccactctcccccatccggcccactgcaggtctggttcaagaaccgccgcgccaaatgccgccagcagcagcagagcgggagcggaaccaagagccgcccagccaagaagaagtcctctccagtgcgggagagctcgggctccgaaagcagtggccaattcacgccgccagctgtgtccagctctgcctcgtcctctagctcggcgtccagctcttccgccaacccagcggctgcagcggctgcgggactaggtgggaacccggtggcggccgcgtcgtcgctgagtacaccagctgcctcatctatctggagcccggcctccatctcgccaggctcagcgcccgcgtccgtgtcggtgccggagccattggccgcgcctagcaacacct

SEQ ID NO: 228375 - DNA, 238 bp, Homo sapiens
  chr2:63283922-63284160
  hyper
ctaagagttcctcccgcgcagactgctgccccttcagctgccctcgattttgctccacgcctgccggccagagcctcccggcgtttcttccgccccagcggagtgcgctggggcgcgccagggctaggcccgccggaggagcgcgtccccagccttccgcgcacagagccgcatcccgccccgccctgcgctggactggttcaagcttccgcctcggcgggaacgctgtacatagtca

SEQ ID NO: 228376 - DNA, 2977 bp, Homo sapiens
  chr2:63284466-63287443
  hyper
gggcgcgggatatccgaagtgtggaggaaacagacaagtcagggtacagaggtgggggttgggcaggggcgcagggctgaccccctcacccggtctaagcacagggtcgcagttccagtttacaaacctaaaacaagaaaaccaaaaccagggaacaaaacaacaaaacaaaacaaaatccgtaaaagtacagcattagggaaaaacaaacaaacccaggccccaaacccagttccaactcctctgtcggcttctctctttcaacacccttgttttgtctagtgagtttttagtgcaccttcgttctccgaaatctgcggagagcccgcgcgcctgtgtatcaattttggctttggccgcttcgtccagtaggtgggaaagtaatttgtaaatttgatttgtctgatgtgaagatcacaaattacttgttgaaatgtaaggcagtccccctcctcctctttatctacattacttcccgaaaataaatgcaaattaatgaacggcttgtcagtgttgctcttctgattccagcccgaggtcctggtctcggggggctaaaagcgagggaaactccgtgttaataacccgcgtgttaatgacctgcgtgaagctggaggccaaaggatgaggcgggaggacttggcaagagaagtccccagaaactttcgcttagggagtgtctccccccacccccaccacgcccctccgcgtcagcctggcctcttcccccaggcgttttgaccccgcatcccccctcgccatccaggacagagacaggtgtcaggactcaattcccgaagcaattcctttctcttcagaggcaggagcctggcactgatttcttcaccctaattgcctgcaccagaaagaagagggggaggggaagagggtcgggaggcgggaaaggatagctctgtaatgctctcagagctgagccaaaaaggaaaagaaagcaaaacgacaaaaaactgatccgtgtcctgcatgttggcagcagacaaccttccttgctgctgagctgtcccgggtggcttcaccgcggctggggaatccgagccattccttccacgtgctaagatgtccctctaagccctcagctcctgccagaagtagccaaattacctttcttcgtactgtaaacttcctttaaaacatacaaactcataacctggaaaagtcgacaaggacgcctttcactttggcaggggaagaagacgactggcttgcatctgggggtcaggaaggacagttccatctccctctgagggaagacggggttgaggggtaatcctcccccagaaaatgcagagcctggaactgtccagactctggcctgaaacctcctgggtgtaaggccatgaatctgctcgacttgctcacgggcgggaaggaaacaaggaaacaacgaaaagtttcctgcgaagtgaccaacatcccctattttttaaaaattccgtgtgagacctgagaacacactgtgaagcggggttcggagaacgacccctcccgcgttccgcgcccagcggggtcgcagggctgcgagcccggctgtagcaaagctttctcggccgcgtcctccctccggattcggtaggccaggctcgggcgcgcccttcccacaccaacaaaccatctttcccgactcagcagaggcccacaggggcgcagccgctgtccctccgcccttggcccagcggcgccgccctggtacgccaggcctgaaggcagggccggcccgcgccacgcagggtctcccttaggcggcgccttagggtgaaatgcggggccaagcctgacctgccggggtgccccgtggcatctctggtgcggaccccgcacgtgccggggagaactggcaggcggccagggcgaggaggcttccagcttgcgccgcactggcctgggcacccgggctgcagggccttttgggccctcccctcagtgaccctgcctgtagcggccccagggccgctttggctcaggcagcagctgccaatgccgctcgaggcccgcggctccctgaggcgagctctgcggggcccagcagtcctcttggctgctaaatggaacgaaaccaggagacccggctttgcactcgtttggacaactgtgtggcctccggagcaaggtacccaaacccttgggcctcagtttcgtcgcagttgttatttgaacccactcggcctgggacgtgccagagcttcacactttaggtcgcggctgcgggcgggaggggcagatgcgacccctgggccggcccctcgggggcgtctagaagcttcggcacctgcatactaaggccggagggggctggcagccaggcacaccgaggcccggccggagttcccgcccggggaacgaggcttcgaaaagaggcacgtgcttctcccagggcctcccgccaggtgctgaaaccccacggcactgagtggaaaccggaagagggaaggcgcccagggcctgccgggccgcggcgccacctgaggctgccgggacgctggagcgtgggggagtggggtgagtgcgctgccgggccgggggcggcgggggacggcgggaggtggccaggcccggcagggtgagggcgctggcgttggccgagagtccctgggcagcggcggcgggaacgcggaaggttccctccacccccaccccaacccccacccccacccccgggccggccacctgttgacaggcaggttctctgagaaccgacttcagctcgcccttctgtccaggaagtttgttcggtttgggtttgggtgttcgtgacacaatcggagcaattagaattgaagcaacttcaggagatttagcaacccgcgaaaatttagcaacgttcagacgtcaacagttttctttctttgagtggtcaacgaaaacttgacgttttctactcataccttgtattctctgcttatactgtaggggcaaaaaagtctactcttagacaaacgtgtgtgaagtgctttaaggg

SEQ ID NO: 228377 - DNA, 489 bp, Homo sapiens
  chr2:63815746-63816235
  hyper
gtgggggtgatgtcgctaaggggtgattctcccctccctagagttacacacgctatctctcccgccaattgccgggctccatcaggcaggtcctttcctcctgagcccaaaccatccgtttgttgtcgtcctccaatcacaggggctcatcctcagggactactttgcaatcggcgcagagcgcagtgagaagagcttgaaaaaaacctctggtatcgggaagtgtagttcaacacttgaaggaaatgctttggagattgcgccacaaccagggcagcgtaaactacagttcccagagagcgccgcgtcgggagcggagccttttctcgctaacaccgctcgccctctccgagtcagttccgcggtagaggtgacctgactctctgaggctcattttgcagttgttgaaattgtccccgcagttttcaatcatggtgagtgtgggccccgggttcctgcccacctctggccctcgcgcccttgagtggg

SEQ ID NO: 228378 - DNA, 86 bp, Homo sapiens
  chr2:64067905-64067991
  hyper
gccgcaacgccgccgtaagtgctgctcccacgcgcggtatccccgcgtactgctcagtgcccaactccgacgggctctcaagtgcc

SEQ ID NO: 228379 - DNA, 83 bp, Homo sapiens
  chr2:64068891-64068974
  hyper
gcagctaggggcgcggcctgccagtgcctcctgcagtacagccctggagggcgtggggacttgggggcggtgaaatagccgct

SEQ ID NO: 228380 - DNA, 324 bp, Homo sapiens
  chr2:64455371-64455695
  hyper
ttcaaaagcaagcccgtacaaagcccggctccttccttccttctaactccctatcaggaagctccttcgcccctcaaatcccttcaggggctttgaaatcctgggctcccgagcccaagctgggcatgaatattcatcgggggcgtggccccgccagcgcgcagggctccaagcagctgcgactagcggaaagcgcgcgccagctgcacgcagggaaacagttctcattttgtgtgctcggctgactgcacgtccagcctcgggccagctcgagacggccacattgtgagtctgtgggaggggttctaccgagacgaatggact

SEQ ID NO: 228381 - DNA, 84 bp, Homo sapiens
  chr2:64681068-64681152
  hyper
ggagggaggggcgcgggtggcacgagcacctgtcacctgaccggctcgggccctcacttctccagccccggccctgcccaccct

SEQ ID NO: 228382 - DNA, 293 bp, Homo sapiens
  chr2:64752068-64752361
  hyper
tccgcgctggctgcgttctccagggagctgttcagaagtttggggctttgcttgggcttcttcgctctccttccccctccctcgtgacaggtgtaaacactgcctccttcaccgaggcccgaggctggccgcgacctgagtgtgctgcttccaagggtctctgaagcaagcgaatttggaatcctccaacaggcagaggggacagccccaaagctcacgcatcccttcctcagagtaccttttctgctgtcttcttgcactcttcaagaaattatctgcgtctcctctccagt

SEQ ID NO: 228383 - DNA, 147 bp, Homo sapiens
  chr2:64752591-64752738
  hyper
aattttttactgggcggggggatgaaacaaaagtaatggttccgtttcaaagttctcactttaggagaagtaaagtagaactttggttttcaacttttcctacagtgtaagtcttccttccacctcctattccgaggattttatttg

SEQ ID NO: 228384 - DNA, 395 bp, Homo sapiens; identical to SEQ ID NO: 198242
  chr2:64994380-64994775
  hyper

SEQ ID NO: 228385 - DNA, 236 bp, Homo sapiens
  chr2:65283407-65283643
  hyper
gtattggtggagccgcggacttagagctgcgattcgctgcgcgaaattgccgaaagccctcccgcggagggagaaggggcgggaagaagggcgtggtcagcgcggccgaagggcgtggttggcgctcggtcctgccctgcgcgttttgggctgcggttggagggccgcagttgcagtcagggtccgccagctcggggccagcgcatggggctgctgagaccgctccggacgtgcga

SEQ ID NO: 228386 - DNA, 40 bp, Homo sapiens
  chr2:65659688-65659728
  hyper
gcggaagcgatgacgtcttcccagcggccagaggtggtgg

SEQ ID NO: 228387 - DNA, 1458 bp, Homo sapiens
  chr2:66652773-66654231
  hyper
gtggaagcagaaatcgctcttccgaattatttaggaaagccaacacgcaattatgcaaaagtgtagataaggttctccgaagcagaaagcagcagcgcgggacgcgggtttccccttctctggcgagtaccagtgctgggaggctgtttatctgtgtcctggtgctgggacaggacgcaatccaattccagctctcggtcggttctgccgctctgtccccggttctgcagcgcactctcttactccctctctcagtagtgtccccggctgtctcctttcctccgtctcccggtcctctcccagcgtcacccctcactacctatacccccgcgccctacccccacctggggcgctgggttccacgcctcctcaagaggtgtgagcgcccgcgctgggcgcccgtagcgcggccctcctgtgtccccacttccacccggcggccgctggaagccgggagaaggaacggcaccaatcccctcacgcttctcccaggacgtctgatcccattagcgcacctgaaatcacaaccttggccacaaatgcgcgcttgttgcgacccctccgagtgggccgccgtgccgcaggagccactctggggccggggtccccaacctctcccccctgcaagtcctaaaaggaatcgtagagcaattgatctcggaggagatgagcgcaccccggggctcattgctgcccctgaggaagagccgtccaggaacggaggcgagaagcttccagaattaggccaagaggcaggtggcggggtgatccggcgtccccgagtccagctggggagaaaggcgccctcggatgctcagccccaaagcagcagaagacagaagccggtgcgccatcgtcgctgcgccccagtccgcgggtcctcgcgctcctgctccggctcccgggctgccacccaccgctgcccaagcctgaccaactcccaactccctccggcacaggctgaggcgacccccaaagagaaaaataggatcgcagtcaaaactggcggggatggggcacactggtgggagaggggaccttttcaccttttgctcttcccaggggacacagtcccccaaacctacgtccctgcgccaaaccaggtgcgagcaaactccgcggaccccgcagctggaagtgcatcctgccgggacccccacccgacccagggagtcagcgcgccccagggtgcaggcaggcccagggctctgggtggctcagggcacggggaccggatcgcgctgcagaacaccgccgggacccggcacccggacgcgcaagggcgacagggcagccctgctgtaaggactgtgccatgagaggttctcattcggtaaacagtggccctcccagaagtggccgccgacctgccagtcaatgaagttatcctccgggagctgggaagaaggggcgcctcgcggggctgtgggctcggttgcgaaccgatgtgtttgtggc

SEQ ID NO: 228388 - DNA, 1567 bp, Homo sapiens
  chr2:66659957-66661524
  hyper
gagagctctttcaaggcaaagcgcttctgaaggttttgggagaacgtgtgtcagcccttcaggcacacagggtgccagtacggagttgggggcggggaagggtgcagtgcaggcggctgggaaggctcatctgctcggctttatggaaacgctccactgttgggggcaaccaaccccgcgttgactcctgcgaagtgctaaaggaagcgatagatgtcgcctaaggagactacggacgctcggtggaacctcattccagacctatgttctcatgctcgccctgtgtctcctgctcctcggaagcccactctatagaatcttcagtcctacctcgcagacggacgcaaattatcttttactttgcgcttaagagttggcttcaatacattttagagctcctaacctttcccaaacaatcttcggatgaagggatacccccaatcttgctcaaaactctttccctacctacacccccttgagggtgagggttcagtccgcagctggcgagtgggacgtgggtgggggcgatggaggcgcgggcgggctgcttggagggagtcagccttttggccaccttcagggcgggaatagggactggcagttcgcattccccgcagatcgaagctccctgctgatcgattatttgataattgattttccccgcagccaatgcgcggcggcctgggcgggggcgcctcctgattggccgagcactcctccacggctgcctaccgagatttgggtgagctcattttccagtcgaccgcagggggagttttctgcgaggtttcagctggagggagggggaaaaatcctctcggagccgagcgagctgcgagccctgcttgtggatgtgaggtttccagccactggtagagctgctgcggctgagccatctcggcagatcagagcccagcggacagaaatataaatacgaaaataacgccactaaatataatcacaagggagaagcttagagcgggagaataaagagaaggggtgagggggaattaaagcccaggcaataggtgttaaagttaaaaacaaaacaaaacaaaaaacagtggttggttggagcctccgagttgtaggtacaggcagcttttgtctgaaatctcagcttccgaagcggatttctttttctctggcactgggaggtttcgccgagccgggttggggacgggaaagaggagcgcggggaaggatgtctggggtggtgagggcagggcttcgctggagaaagagctagtggggcgcgaggttcttacaggcccgggagaggtcgaggctggagcccctcggcgcctctaagacaaaggcagcggtggctgcagccggagcctagcactccggcagcgtcgcgccgcgccgcgccgcgccctgggcgcacggccgcctcaccccgagcgggtcggagaaagagcctccctcccagcggctccccggccccggctccgcccgcgaggtctgggctgctgcgagcccgcgccgggtttcgctttccgacgatcataaatagcttggtgtttgtaaacaggcgctgggggcacattccccgcgctcagct

SEQ ID NO: 228389 - DNA, 197 bp, Homo sapiens
  chr2:66661704-66661901
  hyper
ccgagccacctcaaccccatgttctcaggactccttagcagaggctttcccaacctggcttctccctccttttcctccacgatcccgctttgacttttctccttgcagtgtttagttctgagaattcagtactttgcgcatcaccccctgccccgaaaaacactggcagaccccaataatttcgaggaaagtcatga

SEQ ID NO: 228390 - DNA, 351 bp, Homo sapiens
  chr2:66662571-66662922
  hyper
cattcattcaccacgttgacaacctcgcctgtgattgacagctggagtggcagaaagccatgagatttggtagttgggtctgaggggcgctcttttttttccttttctttctttctttctttttttttttttaaactgatttttgggggagagaagatctgcttttttttgcccccgctgctgtcttggaaacggagcgcttttatgctcagtgactcgggcgctttgcttcaggtcccgtagaccgaagatctgggaccagtagctcacgttgctggagacgttaagggatttttcgtcgtgcttttttttttttttttttttttttccgggggagtttgaatatttgtt

SEQ ID NO: 228391 - DNA, 904 bp, Homo sapiens
  chr2:66802569-66803473
  hyper
ctccccctcccttcgcagagccacaggaaaagaggaaagtcggcttcgactgccatcttttggggatttcgaaaaacgactcggtaggaaacggagggaggcggaggcgcgggagtgggggaaacccccttattatccagtgtcggaactggctcccttaatctgatgcttaaatatttgatgtggaaaaattacccataaaattagttactaacaatttcaaattgaaatcacttatcgaattataaacgcattaaagctgtatggatggtattaggagttcctcgggaggcagcgggtgtctccttgaagtgagccaggcgggcgagtttcgccccggggaaaagagcccccagccgagcccgggggcaaggccgggagggcggcgctgcaacctgggcgcagggtccgggtcagggggatcgagcgggcggccgggtcctggtggaggctgcggctgcttcggctcgcgggggcggggagaaggggaggggaaggagccttggtgggaggctccgaccccggagcagaggcgcctaccagcaaacttcgtagtgaagtcgaaggattctgaaaaggaaaaacgcaagccctgccctccccctccctctcgcgtctcccacgcggcgtgcagacttcgcgctcgactttgcgatcggggttagttgctgtgtgcagtgtcccccaagtctgcgggaggagcggaagggtataggctccagtcctggggttgggcccggctccgtgccccgagaggaaatccagcgggcaactgcgcagagctccagccaggacgtgctacccctgagtccctcgatgcgctgggtcccggcctaggccccagtgcgtgggcgggcaggtctttgcccagagaccacagctctggtcgcggggggtggcgggg

SEQ ID NO: 228392 - DNA, 478 bp, Homo sapiens
  chr2:66803682-66804160
  hyper
agactttgccacatcgggggccccagactccagagtcccatagtggccctgggagcgcgacccagagagcctgggggctggagggcacatggaacgcgtgcacggcccactaggagggcgttgggaggagagtgcccgagtctggagccgcagccgggaagccgtagacagcaccccgacgccttaggcagaagctcctcaggatcactttaaaagctctgcaaactttccccagcctttcggataccctcaggcccttggcccaccggaaggcagtaaaaacgtaacttcatgctgcaaagctcccgggtaggcgcttggacgccgatggagagaggcgtggaactgggtagtggggcgccctgcctggctgggcacttttccttgtctcattctcgtctcccatgccatgccttacccactggctgctagcggcgcgtttcacttaaggtggccacggtgcggagactacaggagc

SEQ ID NO: 228393 - DNA, 897 bp, Homo sapiens
  chr2:66808520-66809417
  hyper
tgtaaagacaaaagggggagcgatgcaggtctgtttgttttctttccccgccgccccactgtcccttttctcgtctccccgcgcacctccccagacgccctgccggggtggctccgcggatgaggcggtcatttgctgtccgctttgcggggacgggtcactttccgcgctggcgtgaaagcaaatgtggagctgcttttggaaggcgccggccggacgtcggctaggctccttctccccgcgggctgggggccctggggctctgcaaggctctggctccgaacagattgcgcctcccgcctggctgccagtaggaactggggtgggagccgcgtaactaacagttgcgcgcaggaggcgagccccaggtgtgagcgcagaggctctctccccagcccgcgggtctgggaacctttcaggacgcctccctccccaactcctacccatgcgtctgctccctaggccgagcccccctcgtgaggttttaatgaccgcggacgcaggggagcccgcacttgagcgaggaccgacttctctggcgggtccacgctgctcgcgcttgcgtccgcgggtagcgcgctgtgcccgggtcagggggcgagctgcgagaagtaggaggggtcaagacccccagaaatccctccatgggcacacacacaatcaagaatagggttgagggtcttgagaggtagaactaccctaggcagggcttctccaactcggcctttggaccccgcgcgcgcccaagggcgtgcccaccgcggaagcacagatcatcttcccgggactgggtctcctggaccctgcgttgctccctttttcctagcggccccgtagctggctgccgcatgtagggcgatcttcattaacttggacgcccaacgtgattgaaataga

SEQ ID NO: 228394 - DNA, 232 bp, Homo sapiens; identical to SEQ ID NO: 198255
  chr2:67624277-67624509
  hyper

SEQ ID NO: 228395 - DNA, 41 bp, Homo sapiens
  chr2:68384727-68384768
  hyper
ataatgccagatgcgctcctgcgatcgcacagaatgttcct

SEQ ID NO: 228396 - DNA, 186 bp, Homo sapiens
  chr2:68547178-68547364
  hyper
aatttcaggaaatatgagtctttccaaagcttaggggaaatggccgaggaaaggcgcaattccacgtgatggagccacgctggatgaggaatggatgcaagaggaagaaaataaccatattcaaggagctacatcttcttgtgggtgtacatttccattatacgtatgctcgtcccaaaaatgaca

SEQ ID NO: 228397 - DNA, 700 bp, Homo sapiens
  chr2:68870369-68871069
  hyper
cctttgcaagctcgcggctgagcggggccgtgtccgtccactccgacggcgctgggctgccaaggtgagccgccgaggagccccgtgccccgaggcgggcacagccgccctgcatgggtgcccccggcgcgggattgacgcagagccctgcccggagccccagcgaccccgttcctgccccaggcggccgttccgaagcctgagccgggcaacgcgcagcccgcctggcccggctccctcccgcgcgtcctcgtcgcgagctgccgcctgggagctccagacgctcccgcccagggcgatccggacgctcccgcccagggcgatcccggcctctgcagcccagctggcgacacgcctcgccaagagcccgcacctcggcgcctcacggccaccggaggcggggacagggagtccggcgcgggccgggtcgggggatctgcagcggcggcgcgaaggtaactcccccgccagagccgggaaagagccccgagcagaggaggaagggagcggggacctgcccttcgcctgccggcttctggaagaagcgtctcctgatccggccccggaataagaaacccggaccttgcctgccgggctccgcgatgccgcaggtacagagcgcgccctcccggggaggatgctccagggaccccgcgctgcactggctgcggccgtggggtgcggcggcttctgagtgaag

SEQ ID NO: 228398 - DNA, 56 bp, Homo sapiens
  chr2:69240189-69240245
  hyper
aagaacgcgaaaggggggcagagaggaaggagagaaggcaaagcactgcccccacc

SEQ ID NO: 228399 - DNA, 71 bp, Homo sapiens
  chr2:69240665-69240736
  hyper
gcttccagtggctctctttggccactctggtgctcatctgcgccgggcaagggggacgcagggaggatggg

SEQ ID NO: 228400 - DNA, 339 bp, Homo sapiens
  chr2:69240916-69241255
  hyper
gcggcggcggagtgctgcgcctttgttggggcgcgctcctcccagcctcggctccagagcccgcagccgaggcgacgccgcttgctcggaaggggacagacttcttttctgtcttgctttctgtgtcccaggagcaggcaaggggcttggaggatgctattgtcttgctgagtttctgtgactccctcccgtgttggtgggaaaggcttgcttaccaaaggcagaacttgcaggcacaggcactcctaaagttagaggcttgggcattttaaagccaatcgtcgcattttgtttttgtttttgtttttttgttttgttttgaaacgctgtcccacggaa

SEQ ID NO: 228401 - DNA, 589 bp, Homo sapiens
  chr2:69533478-69534067
  hyper
cttctggctggagatgcagccgtgccagcttcctgaattctctcctcaatgtcggctgcgtggggatttaaactcatttaaactggtgggcctgggaccggctgtatccatcaaaaaccaggaaggggagccggcgcggggcgtgcacagctgtaggagggctctctgtgtgcgaatccaggccctgagttcgcacgcccacctggggcggtggtccagccgccaggaacccgcttcccagccgctccccctcacgcaggaagccgggactctgggcgcagctctcccggaccacggccacgtcctggctccagctacggaggcagaaagaagccacagaaacctaaaggacaggaggggaaactgagctttccgcgtgggtgcggctgcccttgacacccgcttgggggctccggagggggaggcagggcggccccgcgctgagggtggaagcgtgaacatccgagcagagagagcggggaggggccgtccggagagatgccccgctggcccgactgtggcccccgggaaagacgccggtcccgtgagcaccgccccttctgttgtctccagacgccccgctgggatc

SEQ ID NO: 228402 - DNA, 72 bp, Homo sapiens
  chr2:69664548-69664620
  hyper
cgccatcttagtccggagtgcctaagggtctccctgacagaaccacgaaagatctgcgcagccgcaggctgg

SEQ ID NO: 228403 - DNA, 232 bp, Homo sapiens
  chr2:69968429-69968661
  hyper
catgggtgcaaagacgacctagccctagttggtgtcttcaagaggctgcgtccagcaggggaagcagatatgaaaacacagaactattacaagggatgagcgccgcgccaagccgaacctgggagctacggacagtgtctaaactttagtcactcacaggagtacaaagatccggggctgctcctaactcctactccaaagctttcctggcctgctgggcgcacagggaaga

SEQ ID NO: 228404 - DNA, 35 bp, Homo sapiens
  chr2:69969207-69969242
  hyper
ccccacagtggggcggatccgtcccggataagacc

SEQ ID NO: 228405 - DNA, 275 bp, Homo sapiens
  chr2:70056451-70056726
  hyper
ccccagcaagcgccgagctcccgcaaggagaccaaatagcttcggggttttgccactagcttagcacaggcccataagcaccggggactcaaggcacctttgtagaaacaatgagtgactggagtcccaggtcttgccactacagaggcgcgtatgaaccacggtttaacactacgtctacgccgaagttcgggttagtcagaggccacgcccaccgcaggcccgaaaacaccagcctgcactggcgcgccggattgtgcgcaggctccacctgc

SEQ ID NO: 228406 - DNA, 359 bp, Homo sapiens
  chr2:70120922-70121281
  hyper
gataatgggtatacggctgaattttccaggaatttctataataacaccaaatcgcatgttttaatgcccaccgtgaacaaagaagaccggaaccctcgcaactcgttttgacgttttctggtcggcggtaaaagctcggttcccggccctcccggaagttgttgcacagttgtttccgggaagcgggactccaaatgggtcgcagtcgcagccgctctccacggaggggtgagtcctgtagcaattcggaggatatggggctctgttggaggcctgtcccttttgttttattttgttttgtttttggtagccgcgtagcagagaggcgggcccttttcccaggcggagagcgaggggtg

SEQ ID NO: 228407 - DNA, 300 bp, Homo sapiens
  chr2:70141869-70142169
  hyper
aatgggagaccggcgaggtgcttgccttctgcagctcttggccaatactaacaaagcaaaagggggcccgggttgttggtatagaaccaatgggaaacaaggaaggagcacgaggcggagttgcgaatcctgtcaccagttggaaagagggggtggagcccgggccttgtcaagtgtgaccaaccagcgagaggagcggactttgcggggtggagccctgaagccctctcccaatcgcacaagtgtaggggcggggcattctttggggggcccaatgaggaacgcggccgaagctggcct

SEQ ID NO: 228408 - DNA, 688 bp, Homo sapiens
  chr2:70313274-70313962
  hyper
cttttttaagtcataaaactcgcggaggtggaaggccccggggaggaagaggggtgcattctagagctttcgggccgaccccaatttctcgttggcgacgaatgctaaccacgtgtcgccattttgtgttcaggaaacatggcggccgccccaagggtaaggaacaggggaggcggagtagcgccacgttagccgctttccctgagagattgtgaagcacgttgcgcacggggccctttctggtctggcttagcccaaggaggaaggggaaaaggcagaaatcacaactcataggccagcgtcttgagcgacacttcctcagcgggaagaaccggcaaaaaaggccttccaagatggcgggccctgacggggccgccccccttgagcctggcgcagtggctgcgcccatgggcccgaaaagcagccgcgggagcccaggccgcgcggggaaagccgcagaaacgtcctgaagccctggccggcagcccctgaacaaacgaggcctccacaggcgtacactattgtttctaatgtcggaaaagggtgccgcggtggaaacgacacaagggcaggaggtggggtttctgtggctttaaccgaaagaaacttgcgaaacgcaaacaaagcattatgtaaatggacgccattctttttaggaccacgtttctagcacgccccacaaacagca

SEQ ID NO: 228409 - DNA, 36 bp, Homo sapiens
  chr2:70351165-70351201
  hyper
cataggacagcagccggctctttttttcatcaggat

SEQ ID NO: 228410 - DNA, 243 bp, Homo sapiens
  chr2:70351561-70351804
  hyper
tggcaaaacagaggaaacaaaggaatgatgaaatgaactgagctgccttcatgccccggatgaatgttcagccattagaaaagagtgaatcccagctgggatttggggttccacggtgtactagaaaagcaaaacaaagagaagcgcctactagatgccatcttggaaaacaaaagcaaacgtgtgtgtgtgtgtgtgtgtgtgtgtgtgtgatgttacatgggcatggggaaattacggaag

SEQ ID NO: 228411 - DNA, 190 bp, Homo sapiens
  chr2:70369036-70369226
  hyper
tgcccttccagaccggctctagtgactggcggggaagaaggggaaaaagaattagtgtatctggacacaacacccagcatgtgctaggcagaaactaagtgtgcgaagcggatcccgatgtacaaaggggaaaacagcggctgggaaagcctgagccacgggctccaggcggccagtcgcggtcctcccg

SEQ ID NO: 228412 - DNA, 405 bp, Homo sapiens; identical to SEQ ID NO: 198266
  chr2:70485366-70485771
  hyper

SEQ ID NO: 228413 - DNA, 409 bp, Homo sapiens
  chr2:70520657-70521066
  hyper
ggctcaagacattcggctaacggagagggaaccaagggactcgcaggacgcaaataactgaccacttcggtttggctctcacacatacttactttttcaactcgggagggtgagctttgctcatggtgtatactccgcgggctcacagatgccttggaacgcaacgcacggctttcctcacgctcccgctgtaggcccggcgtcttgcgtctggcgtcatcgacctcgttagccaatggattgttggcagtttttacatttcacctcgcgatatctcagcgcctcggtcatcgttgagcttccggttatgtcctcagcgattggccaggacggaggggtgcgtcctctaggcacctttctgaattccgttttccttgtacaaaattgagataacgggtattccaccggt

SEQ ID NO: 228414 - DNA, 322 bp, Homo sapiens
  chr2:71295259-71295581
  hyper
tgcccgtgtgactcgccatcgcgtggcagatgttcagtagaacattacagtaatttctgttacaggtccatgggcgcaggtccctgagcccacagcttcgcgggggtctggccgagcatgcgtcacaacctacgcggccaagagcagtgcgcacgcgcaacctaacgcgggactgccagcaacttccgggcgtttacaggcaggcaggtcagtgatgtgtcctaagggtccgaccgacctagatacccctctttgattcctcctcttgggattagtgtccatctctggaagcaggatccaggaggacgggaggggccgctgc

SEQ ID NO: 228415 - DNA, 413 bp, Homo sapiens
  chr2:71357126-71357539
  hyper
tactaagcggtggcgcttctggaaggcaccctctgcctaagtgacagcagctgctgtggaacgcgcccccgggggaggacattagatcaaggtgctttggccacgccgaggcctcctccgcccccgaccgccgttcccacgctccctgtcccatggcgaaggtcgccggtgcccggtattcacctacggcattcgcggctgcagccttcagcacccgcgccattttggaaagcaacccgccacgtcaagactagccacggaggttgagagacgcgcggcagagggcggggcgggaggcagagggggcggggacagaaaggtcaggggcgtggcgaaggtcgctgctttcctgctacaacgggcctactttagctaaaacagaaacgtaaggccaggacgggtcaccctttgtg

SEQ ID NO: 228416 - DNA, 1133 bp, Homo sapiens
  chr2:71453495-71454628
  hyper
agagaagtggcgaacgtctcccaggcaaatgaggcatgaagaatgagggctggagtcaagggggagatggagcaagtataaaaaggcagaggacgcgcaggggccgcgaataggggaagggcacgacgcgcaatccctcccgctccagcccggggagaggggcgggggatgccgcgcgggtcaatttgcctagcattgttgcacctgggtagaaatgggactcaggccaagaattcggttcgagtgttaggaggacgctgaggggagtcaggaacttgggtgggagtcggggggaaacagagcacctgtgcgggggggaaagggacgaaaaccccctattgctcccgaggggcaggggctgaccccagcggacgccccttttcgccgatggccgcgacgtgggaccccgcgcgctttccctccctacaggagctcgggcaggcgcgtgccgcccttcacagccccgacggcggcagaaagggaggcgcagggcgcccccagagccgggagaacggcgtttccctcgagtcctttccccagcagcccgggcacccgagcccacctgggctaaccagaagcccctccttcagatcgtactctgccactcctccgagagcttaagccgttgccgtagaggtcgccgtcgccacaacagtctcggcctttagtaccaaaacgtgaagcacagcacccgagaagcgccactaccacttgccaggttatctcttactgcacactgcctcctcgccccgcccccgaacccaagccattggttgccgggcaccgccccattcgtctattgggccaaagaagatgccgttcggtcacctagaatggcatatgtggtttttattggtctaaatgtgaagcagtgcccgcccactccctcagaagtttcagcttctgattggttttaatgtctgtcttttctcttccttcattttttttttcctgtggtggaacacctccttgagggagatgccggctctgattggctgaaaggacgctacgctagcctgggataggcattgggccaaggatgcgcccggcccactcgtgggggaggagaccaaggcgccgcactctgggtttgtttacacaggctcttgctcccgcttcgtctattggctgag

SEQ ID NO: 228417 - DNA, 82 bp, Homo sapiens
  chr2:71503408-71503490
  hyper
ggtgttctgtaaacagcaggcgaagaaattattagtcttaaaaaggacagaaagactcccgcaaaagcagcagcgcgtgccg

SEQ ID NO: 228418 - DNA, 64 bp, Homo sapiens
  chr2:71503670-71503734
  hyper
gtgggcgggtcccgccgcacggagtcctgcgccttgaggctcaagcggcggcgtgcaaggcgtg

SEQ ID NO: 228419 - DNA, 102 bp, Homo sapiens
  chr2:71504756-71504858
  hyper
gcccatccacttagcggaaggaaagtcagccactaggctgcgggctccgggctgtccccagcgtgggagaggctgtcctgctggcccggctgtttattgcag

SEQ ID NO: 228420 - DNA, 484 bp, Homo sapiens
  chr2:71680538-71681022
  hyper
gaggcctccccaggatcccccgtcctaccccgggcggtcgggttgagttctggagagactgctccaatccccgaggcggaaggaggcaaccgatttggcgcagcactcagccagggggtagaagctcaggggaggagccgagcctttctcctgtccaagagcgagatctgggctacgccgggcgcccggagccctagtccagcccccggccatcgcggccgccgcccagccaggtgcaaaatgccgtgtcattgggagactccgcagccggagcattagattacagctcgacggagctcgggaagggcggcgggggtggaagatgagcagaagcccctgttctcggaacgccggctgacaagcggggtgagcgcagccggggcggggacccagcctagcccactggagcagccgggggtggcccgttcccctttaagagcaactgctctaagccaggagccagagattcgagccggcctcgccc

SEQ ID NO: 228421 - DNA, 703 bp, Homo sapiens
  chr2:71693521-71694224
  hyper
gtgcgcaccgggcccgggatccctggctggtgtggagccttggtcaccggaggcccccgcggagcaggccccacggcgccttgtgcgctctcggaggccgagctgcgcgcccgcgtcagcggcgcctcgttcctggccgggagctgggacccgcggagctagggaccagcacccccacaggcgcccgtctgacccctgtccctccccgcccgccgcgggcagggcggatctgggtaggggccggagggggagggtccgcccagcgggtgtccggtgtcctccctgcagcctctcccaggcattggtcacttctccgcggaggagcagcgaaggcgacagctctcttggcgcggctgcctgggagccgggcgcttgctgggtgggtgctcgggcccggtgctcccgctcccgccctgactgcgcgcctgtgtgccgccggggctgcccagccatgctgtgctgcctgctggtgagggccagcaacctccccagtgcgaagaaggaccggcgcagcgaccctgtcgcaagcctgactttccgaggtgagagccccgtggctgccgcgcccatgctcgggtgctacccgactctcggcgctcactggcgggtctgaagcccctgctccggagctaaccctagtccaggccacagtttctccctttgtcagcagggacggaaatcccagccccgacttctgcagggg

SEQ ID NO: 228422 - DNA, 1674 bp, Homo sapiens
  chr2:72371579-72373253
  hyper
tgttttttggtaatgactttcgagaggaaagaggtatcccggacagctggacccgaagcgggagtctccgcccccacccccacccccacacccccaccccgcgctcgggagcctctcggaataaatatttccaggctccgggccacgggctggcgagaccccgcggggtggccgcaggccaaagattatttatagcggtaagcggtcggtgcccggaggcagcaactacagatgggggttggagtttcctccgctctccggtgtggcccgcgcagggacccggcggccctcggaggactctgcagggcggggtcacgggcccagagccgcgattttcctaatgcattttgccctggaaataacggagacggactttggttgccgccctggagtttggaacccgagcgcggggcggggcgggaccgggcagggcgacccgcgcaggtaaccagatccccggtggtggcggcgcaagccgaggatggcggggccggggccggccggactctcgaaacggctggcggagccggccgggcgcgggtaccggaaaccgtggagacctcagaggggcgggggcaagggcgtcccgctcacctttgacgtcggcactagttaccccaccccacgttaacccttctcctgccggggcagcacccggcgcaaaggggaggggcgccacctgtctagccgccccgcctgccagcccacgagcgtaccgactcgggctccagatctacccgctcctgcacccccgaggggacaactcagtccccctagcccgggttggtccccctcctcactttccttttttccacagaaaactacttccagctaaatgtgcacacacgccagtacagccgaaaagtgactctgcagaacccggagccctaatcacttttccacatgcgcctccggcccggcgcgcgacggggaacgagctgggagcgcccgcgcagccaggaggggggctgggccgcgggaacgctgtccccctcccaggctggaaggcggggataattccccctgccgtgcagcccttctagacggcgtctacccctttaagaaaaatctaggcggaggtggggtgcgacagaaggggtggtgaggcgagggtttccctccctccgtctgctatacccgtctccctcgctccgtctcactctccgtctttcctctccttcttttcctctgtttttcttttctttcaacacaaaagttgggttgtgaattttccgaggtcgccgccgcctcgcccccaccccccgcctctgatctgcctaactataattaaagtgcgttttttgtggcattaataaagagttatttgtccgccgtttccacggtcttcacaaagagtactttcataggggcggccgctcgggccgcgagtccaatttatacaaaaatgttgtatttttagccctgggctctgtttagatggcgctcggtggaaacggagagcccttggaggtccccccgtaaaatctgataaatgactccgaaaaaataacgctgggattcagagggctctcattaaccccttaggcgctcctgtacacgtaccccctatttccctcctcacctccagatctagggccccgggttggagggatggggaggcttaggtttcctcctccctaacttctgtgcaggttggacgctgacccccagggg

SEQ ID NO: 228423 - DNA, 60 bp, Homo sapiens
  chr2:72374234-72374294
  hyper
gacactgtacctggcgctgccgacggcgccgcaggaacacagttttaaatcggcaattca

SEQ ID NO: 228424 - DNA, 186 bp, Homo sapiens
  chr2:72375014-72375200
  hyper
gggcccgacgggaggggaccggagcggcgggggaggggaggctgcggccgggggtcctggcacctccagccgaaacagagaaggaggaaggggccaagggaaagggagtggaggctgcgaggggagcggagagagggaggaaaaaaattgcctaaaagaagagaggaaacacgaggcgactggggt

SEQ ID NO: 228425 - DNA, 551 bp, Homo sapiens
  chr2:72375815-72376366
  hyper
ggggtgaggcggggtggggttgggggaggaggtggaaaacccgagctgggctattgtatcaattaagaaaaggcagtccgtcccgggacgcggtctctcggctctggagttgctgctgggggaagaaatggggaaaaaagaaaggaaggcaaaaggaatgaaagagggggaaaagcaggaggcaggatttcagggctggtggttttaaaagcttctctcaatgtgaatttgagtccaaagcgaggcgatgcgtgtgtttatatagaggcgggaggctgcgccgtgggcgccccgccagcacccccccgccccaacccgcgcgctcacaaagccggaggcgtggtgagaggccgggcccgcggccggagctggagagcgcagcccggcctcccgccccgccccggccgcccgccgcccgccgcccgcagcccgcccgggacccacttgtagccgccgcaggatcaaactcagttcacctctcgcctcctcttctttctcgccggcgtctcgctgagcccagcgcctacagacggacgagatgagacacacgc

SEQ ID NO: 228426 - DNA, 979 bp, Homo sapiens
  chr2:72376426-72377405
  hyper
ccgcacacacggtgcgcactcgcttagtgcctgcttggcttctaggctccttcccttcctcttttcctccttcccaggtcagcggtcccctcctccagctccgagcagtccctcctgggccgaagccccggcagcggaggtcctggccggactgccccctcgactggcaggcgcccaaagccctcgaaactgtgccttagggtcccgagcttccaacccccgggatcccgctggctcttatctccagggacccctgagttaccagtcccaatccccctaagccagatcccccattcccgatccctatatcctcacacctccgatgctaaggtccgcccccgccatatgtctcttaccctacggaacctggaggttctcctgtccccgtcagcgtcccaggctgctgactctgcagcccctcctttcctgcacattgggacccccctcccctgcttttgtagtccccctccaccgcccgcagcgtcggggaaccccgatactggtccggcaagtgtcctgcgcggggacaaacgcggcggccccggtacccagaggcgggagaagacgggcacaaacgttcattgatacaaatgagtaaataaacatgctgggtgagcacggccaccttctcagcgctggcagcagagggcccggcgcgcgtgcctgtgtacggtgtgcgtgtggcccggggccgcacctgtgtgttcgcgcgcgtggccttgcgtcggcccgacgtctgaggagcgacgtggtatgtctgtgggtttgtgtattctttgtagagccatgagtgtgtctgcgcatccgtgcatctgtcatctggcctctcctcctgcgagcctgtgttaacatggagctgcgtacagcaaccccgacattggtctagctaatgtctgcccctctctctcccgtgcatcctgcttccctcagccccccttggctctggcgttcactctcacactcccggagccagagtcga

SEQ ID NO: 228427 - DNA, 171 bp, Homo sapiens
  chr2:73052644-73052815
  hyper
cctctcgttccccagcgccggaccagcctcggagggagaacgaaggctgctcctgccccgagggaggcagcgggagggtcctgagtcactgggctgtagggcgccgggaagggaccccgcgtcggggctgcgaagggagacccgcctcgcccggtatgcagggtctctccg

SEQ ID NO: 228428 - DNA, 298 bp, Homo sapiens
  chr2:73053055-73053353
  hyper
gcagcgcgtcccctccgtcggctcggctcaccttttccctgccccacaatgccgctcccaccacaggctccacagccgccccagcctctggctacccgcaggccgacccctccctcaggctcgacacgcccccttgcgtcaccgcgtccgtcggcgttctgcgtaatgtccgctgggatttgtagttctctgggaaatgctaggttggattccattcattcatacatggaatccgcaaatactagttgaagcccactgtaagcaaaaacagttaacgacagtgcgtaaacagtgatga

SEQ ID NO: 228429 - DNA, 174 bp, Homo sapiens
  chr2:73114130-73114304
  hyper
ccacgaccagggacgcccagcacccagtgcagggcctgccctggaagaggtcagtagtgcaaagttagggctggaactgggaggaaattcgagcatgcgtcccagccggaggctgagcttgcgggcgaagaacacggcagcgctgggaaccgggctagggctttccgtgtgggc

SEQ ID NO: 228430 - DNA, 316 bp, Homo sapiens
  chr2:73114710-73115026
  hyper
ggaggccgagctgggcgccgagcggtctggcctgcgcgtggtgcgggtgcccgccgacctgggcgccgaggccggcttgcagcagctgctcggcgccctgcgcgagctcccccggcccaaggggctgcagcgactgctgcttatcaacaacgcgggtaagaccccggggctggagcggactccccatgtgagcgcccacttcctccaccgctggggaatttaagggctactcctaggggtcagataggacgcctagaaatctaaagccctagttgttccagcttgagtagcaagtggaggcgaggtgtacaggaag

SEQ ID NO: 228431 - DNA, 318 bp, Homo sapiens
  chr2:73141975-73142293
  hyper
aggaagctgacagaaaggggcgctgggagaggaaaaggtgagggaggacgaaaacggaactcctatcacccagcgcattccagcaccccctccccctcccccgggaagtctgcgactgcatcctcacagggatggaatgggagtggaagctaggccaggctgggaccccggggctgtcccagcccaaccaagacggtgaccagactcaagttactgatcctccgctgtttcttcatctgtaaagtggagttaatgacagacagctggatgtcaacgttttttgttgtttgttttagagatgggatctccctgtatcgc

SEQ ID NO: 228432 - DNA, 438 bp, Homo sapiens
  chr2:73142353-73142791
  hyper
gagatcttcctgtctcagcctcccgagtagaaatgtcagcatttgaatgcctcacaagggaaggtggtgtaataaaaggtctattgatttagatatgaacaagtatacccagagccacacgaatgaaaggaggtggccagtgtagatgcaagtctaggacggtcggtagattccaagcttctctacctgcccagttaaacaagttcgtggcccctggccagcctctcggtgggggtctgcgacagaacgggtgggattcattaccaggctaggagcgcaaggccctcgggccgggttcagcttgctgggctcctgtcttgtctcagcccccagcacttgctctgtcaccgcagagcacaggcccaggcaacgtttacccaactgaacccgcatccctgtgggaaccttgttccaacaaaatcccgtcgttgtctcctt

SEQ ID NO: 228433 - DNA, 411 bp, Homo sapiens
  chr2:73142998-73143409
  hyper
taaagagcctgagacacaaacgagaggaaaagaccatcacagaaagctggaaatctccggagaggccagcgagaacccgcgctccccacggattccatcattccttccgaaggcgcctctgcggtgtctcagccgtgccaggccccggggttcccaggacgcggaggagtgctgggtgcggccgcctcgcctccccacccctggccgcccctccccacctcgcccaagggggccggaacggcgtcggcgcgcgggggcttttcggagcagtcgagtggaaaatagactttaacccgctttgtggcggccggggcgccctgagcgctctccaaaccacggctcccggcgctcaggcgggccgctgccaagacccggcctggagtccccgcagagttgcgcggcgcacggacc

SEQ ID NO: 228434 - DNA, 2170 bp, Homo sapiens
  chr2:73144129-73146299
  hyper
gaaaacgcgaaacctcaggaacaaggtcgcagcttcagaccgcggcccaggaggccgatggtgggtgagtgggagagtcccggagagcaggggggcagagagctggttttcgggaaaaccaatgtgttggaccccaaacatccaccctccgctcggatccaagttctctgagaactgaaacgacatcccgggacgaatgggagagttaggctgagctacacaccggggaggggagggttggagtttagccccaagcccttcggacgccttcttcggctcccgcgtgggttgagacggcggcacggccaccagactcagctaaagggcggagtcgcgaggagaagccagtggcgaggggaggaggaggcctggatctccccgcgaaggctccagtccggcttttgcctccgactgcgggctccctccccacccgccgtccctcgccccgccccgccccgccccccaccttggggcaggtgagcggcggccaatgggcgagcgcggggcaggtgcccgctaactcgcgcctcgcagcgctgggcggccggggctgggcagggcagtgcggggacaccgggggctggggtcggtcccagcgggactccgaaaggagggagacgagctcaaccctcgggccttactggcagctcgcagcctagcacggagcccgcgcctgtgcgggcgcctggagctgcccgctccgccgcagcagccgccgcgcctggccgtacgctgtggccggaccccgcggtcgctcgctcacacacccctcgccgctccgcgcctggctcgcccgcgggggccgagcgcgagcgggcgggcgggggaggtgaggggtgcgggcgggtgtgcatgtgcctggctgggtgcacaccccgcaaggcggcggcgccaggacgcggagcgctccccagagcccggctgcctcgcacagctcccgcggctgcgaccatgttccagcccgcggccaagcgcggctttaccatagagtccttggtggccaaggacggcggcaccggcgggggcactggcggcgggggcgcgggctcccatctcctggcggcggccgcctccgaggaaccgctccggcccacggcgctcaactaccctcaccccagcgcggccgaggcggccttcgtgagtggcttccctgccgcggccgccgcgggcgcgggccgctcgctctacggtgggcccgagctcgtgttccccgaggccatgaaccaccccgcgctgaccgtgcatccggcgcaccagctgggcgcctccccgctgcagcccccgcactccttcttcggcgcccagcaccgggaccctctccatttctacccctgggtcctgcggaaccgcttcttcggccaccgcttccagggtgagtgtccacgctgtgcccgccgaggcggccggccggcgcccgtgctgcggcgatgcgggggaggctcgggggcgcgcggggctgtttagaagttactgccgggaaggctgcaggtccgcggaggtagattcccaggcagggaagagctgtgcggcatccacccgcgccttcgccgcgtaggtctccctcccaggaaagcaggtggagacctccaggcttttctagaaaatataccagttcggacgcaagcccaggcgcgtcctcggagcctgtgctggccctcgccacagcctgcccaattctctctcccagctgagccagtctcagaccagagtacaactcctcccgctctccctccgcccggcttaacctcgcaccacgcttctctcgcaagtccaccaccacctccgagacctcagccttcgctggcgcgtccgggcgggggaaagtccattcgcgtgccccagctctgggggaagcaagggcagcagggagggcgaatcggagagttaatgttcagtgtggagggcctggctgtcttgggatgtttctcggcaaccttggcccgacttctccaagtcacacgtgcctctcctacccaaggtggggaaggtttgcagtaagcaaactggcttccgccgttgctcgccgccttcgggagggagcccacccggctgctggaataccgaggacagttttcccgggcagggggcgggggcagagggcttttaaggtcgtagccagtccgaaccccggagtttgcatccagcaatcggcttgctaataaagatcctc

SEQ ID NO: 228435 - DNA, 1271 bp, Homo sapiens
  chr2:73147009-73148280
  hyper
agcaatctaccctggtcctccgtgggctcgatccgaagcctgggtctcgaaacctggcgcccaggggccgagttgtagttggggcggtgtgtgagcccgcgggccgccgcggccgaggggctggcgggttggaggcttgtggagggataggggctcggaggagagggcggggtcgttcctaagtcctgtggcctccagccgttcagcttgtccggagtcggcatcctgggccgcaccctcggcttcgaatccagcccctgacgccctccgcaccgcggttcctgcctccgggcgccgagggccgggggcgcctggagagaaatccagctccggctctgagcgtctccagtcaggcgaggcggataaatccttcgcaaaaccctcttggaaattgccgccgcttcctgagccatcagtcccagcgggtacgttatcgagtagcacaaacagttggatttttccctcaagaaccgagtctggacgcggagatggagccaagtgtggctgcattttcggacccggaaatccgttgggcactgaaggacttttcgaaccctgtagcgctgttgcttcgcggtccatcgtcgccgctgcagacggatgcgctccccggcggctctacgccctccagtcccggccaggcctctgggctgggagccgagccgtctcgggccctccggcgccgcgttttctagagaaccgggtctcagcgatgctcatttcagccccgtcttaatgcaacaaacgaaaccccacacgaacgaaaaggaacatgtctgcgctctctgcgcagcgcttgggcggcgcggtcccggcgcgcggggaagcggcgtctccgctaaccgaggcgctggaaggggaaaagcgaatgcggaatcgtccaggactccgaaggtcggggccgctcgcgagcaccgaaggggaggagccgacgaagaccaggagtgggccgcatttcggtactgtttccccgagatcaggaactttccgggtctaggagcaacgcctggagggggctgtagagacccagccccccgggacccgcaactacaatgggccggagcttctaaggtcgcctttgttctggcaggaggacggggaatgaggttatctccgccgcctgtcctgcctctccctctcctagccctagggccctccgcccagccgtccggccctgagcccctggccggcggcggcctctccagcgaagactgcggctcgaagactgcagctcggaccccgggtgcttcggatccctagctcccacctcc

SEQ ID NO: 228436 - DNA, 1348 bp, Homo sapiens
  chr2:73150976-73152324
  hyper
tcttggagggagatgctttgcgaccagttaactgaaagcaaatcgttggggctggcggccagggcagcgcccctgggaaagggcggagaaagagcgccatggacttttcttccccaccccttggcctcttccgctgccccaggcattgtgaatgtgggtccacgcctcgtccggcctgccccatctcttggcttaacagagggatctggagagctgttattccccgcgttcccccgcggagtggctctcgagtgcggggaggtgttgcggaggggagtggacttagggaaggggcggcaaaagggcaaagggagaaatggcgtgtgtgtgcgtgtcaaggaatggagagggcagggcgcttgggagcagggcgcgaggccaggctctgttgggccccggctcacggcgccccttctctctgtctgtacctgcgtgtgttgccgtcggcggcggggccgcagccagcgacgtgccccaggacgggctgcttctgcacggccccttcgcacgcaagcccaagcggatccgcacggccttctcgccctcgcagctgctgcggctggagcgcgccttcgagaagaaccactacgtggtgggcgccgagcggaagcagctggccggcagtctcagcctctccgagacgcaggtaatcacccccggtcgcggcctgccctgcgcccggagcccgggtggaggtgagggtgcgcgggtgcaggagaggccctgagcccgccccagcccagccctgctgggttccaaaaggcccccattccccgcggcgctgcggtcaagcccgtctttagagcctcttcctcgagactgcgtgcagcctgctgagcccgcaggacttttgtcaagcgctaaagacctagcaggaggcagagtaaatgcaaactgtatcccgagcccggctcccaaagctcctcacggggggaccaggttccctggaggaagcgggtcgcctcgggagcgggcagcgcaggcagcaccgaggccactggagctggctccagccctggcattcctgcagcccttttcccgccactgtgtcggggcgctcatagtcctgcggggagccggtccgcactggctttgctgctgttcctgggcaaaactggcggggccttggctgcccaccagccaggagcgtctggggagaaagcccaggtgtcctcagactaccaacagaggggcttaaccagggaggggccagcccctgcttggggcccgagggttgctctgatccggcccaggccggctgatagggctgtggaagccacggtgtgcgcgcgcagagcatctgagtggcctgggcctggtgggaaatagaccccgggtactcaggtgc

SEQ ID NO: 228437 - DNA, 394 bp, Homo sapiens
  chr2:73152630-73153024
  hyper
cagtctctgcgtgccggccggctcccagagttgcgagaggccggctccgcggtctcccagctacctcccggctgacttttcaccttccgctcccctttcctcctagtctcgaccctactacaccaccgtcccctcccaagtcccgggcagtgagaagatgcccggcatggggggcagccggagcctccctttagcagccagagtaggaagggggcttagtgagggagcccagacccaaacttcatccgcagctttcttcggcggaccttaccctctcctccttcagtggcattttggcatctattgtcgtcatatctgtctgctgccccacttaatctacaaatcgctcacgggtcggaggcaggacccgtgcgttttcagatgtactagctgg

SEQ ID NO: 228438 - DNA, 47 bp, Homo sapiens
  chr2:73298957-73299004
  hyper
gtgtagtttttcgcgtcgcggcgcttacaaccgtagactgcggagag

SEQ ID NO: 228439 - DNA, 1351 bp, Homo sapiens
  chr2:73429316-73430667
  hyper
tgcgtcaaggacggcgcgggtcagctgaggccaagaccgcaggcactgccctaccgctctccagatcacagctccgcctctgcaaggccccggggaaacgggcatcccttcttcagtgagcaaaggagaaagacggagcccggtggctgggtgtttcgcccaggatcaccagcgagctcagagtcctccccacgaccgccccagggtgggcatttttaaaagcggaggaagggagggaacacactctttggtgctgtgcccaccttgcctcgcacagagcgggcgctcacaggctttgggggccccgcccggaccgcagtggggagaggccgccccatgccccgccccgccaaatttaagagccttcgccgagcgccaggaggttcccagacaaccggtcttgctcgctgccttttgcagaatcttctcacttctcccgagctcccttccttgcgtccgtccgggcaacggccgcgtcatgcctagccccaggccgcgaggcagcccgccacccgctccctcgggctctcgggtccgacctccgcgctctggccgctctccggcgcccaggtcccctactggcccgaacacgccccgcgctcccggacgcttcgagtcccctttctcggtcgaggccatcctggcgaggcccgacccctgcgcgccggcggcctcccagccgtcgggctccgcctgcgtccacccggccttctggaccgctgcttccctgtgcgccaccgggggtctgccctgggcttgcccgacatcgtggctgcccgcctacctgagcgtaggtttttaccctgtgccagggccgcgcgtggctcccgtctgcggcctgctgggcttcggcgtcacaggtactgcggtcccggcgcccgcacgcgggggactgggcgggggctggagagcctaggtcgccactgccggcgccccagtgcaggagagggcactgagtgtgagaatcacacacggctggagtgggaaggggctctgccaccgtttaccttgcagttgaagccgaggaccgcgacagtcttgctgaaaaagaccccggcgcgaggcttcccccgcacgctgctgaggtgggagagggtgggtgtgagggcggcgcagcgcctgaatgcggtgggcaggaggccagcgctggggctgcaaggggacccagccctgctcccggtctccgcgtcccttgactccctcgcacaccccggggtagcgcttagtgacagagacgcttcccaaagcggctctcgacccgaaccaatggccctgttttttttttttacggggtagggggaagtggacgctccgggcggtgctgttgagcgaggagctgttaggagctggt

SEQ ID NO: 228440 - DNA, 501 bp, Homo sapiens
  chr2:73511726-73512227
  hyper
aggggtcttcggcgccgccctaggggtgtagggatggctcgcgccgcgctcctcccgggtcccagtcttcccggctcccggcaccgcccagtgcattccccgccctgggcacctccagctgtggcttctgttgcccaccttgaatcagggcctctccgccctaaccctagcactctggcttgggcctgcttccacgcgggggcaaatccgggggtgggtggttctgtgaatccggaagggggcgggcgcaggcgctactcctgagacatgcgccacggtccctaagcggcctcatgggcagcgcgcctgggtcgtgcactcggcgacctcgggtcagatgcttggtctccgcggagaccgcctgggatgatcccctctgggcattcctagggaacccgcggaactgctgctggaccccatccggagacccaattctgctcttaaagagccgcctaggaacacgtgtacccatcacaaatcccatcccggacctagaggagg

SEQ ID NO: 228441 - DNA, 1567 bp, Homo sapiens
  chr2:73518216-73519783
  hyper
gtcccgcgcgagaccgccttggcgctgccccagcctgtctctgggggttatagaggaaggcgtggggcgtgtgccagttacaaaagactgtcttgaatcccagggtagtgcctattcactgggtggtctcagaagacttcccccaaagcgcggctgacaagggtgacagcgcctggaccgcgggaactgtccgcggagctggtgctgaatagggcgtgtgcggcgggcgcttcaaggaaactggaagcgggaccggaggccggccctcgggcgtgcgaggaggagttggaagaagagcggggaggggaacggcccggaactcgtgcgcgccgaacggcggcgccccaacccataaacccatctcttgctcagagagaagcgaaggagaggcccagcgagtaaaagccgaggcccttgagccgctcctcggcgcgcgccttctgcttgaggtgcaccttgctgtgccgtttcttctcatcgctgcgcgcgaagcggcggccgcacacgtcgcaagcaaaaggcttctcgccggtgtgggtgcgcacgtgcgtggtgaggtggtcgctgcggctgaagttgcggaggcagatgcggcactggaagggtttgtggcccgtgtggatgcgcaggtggcgattgagctcgtcggagcgcgcaaagctccgcacacaactctccaccgggcaagcgaaggccttggcgtgcggccgcgggcagaagcagcgcgtgctgcatttgccgccgcggcgccccttgcgtcgcgccttggcctgggggaaaggggtgggcggcggcggcggcacgggtggtgcagccacgccactgcttccagggatgtccgccaccagaggtttagggaagtccgccgcggcggcgctgcgaaggcccagcggggaaagctgaggctgcgtactggccagaaactctccgccgtcgccgctactccctccctccccactaggaggggtcaggagcccagggaggccctcagccccctcccctaagtcacccggggccagcgggaaagcgtcataggccccgctgggatagagtctgttggctgggacggccggcagttccgcagggcagctgatggacagcaagtcctcaatcttggtccctattacgggaaaacgagcctccggggcggcctggtagtctccctgtgacccacagttccctggggcccccacagaaagcagctcccagggcgcgtagggacccttgaaggcagagacagcgtccagcgctggcgaggcgggaggcgcccggaggccgggcttgacgtcgggcggggagagctgaggctcatacaggcactgcgagggggcacccgcgcaaggcgaggcctcccagaacgcctctgggaaaggggcagcgcccagatccggggagtaaaggtccggcggacccggcagcaaggcatcggaccccgcaggaaaaggggcatccagcggggatctggacgctgctgcctctggaccggggaagggtgccaggcctaagatgcccgacatgaggttgaagagtgcctccgggtcgtgcgggtgttcgggcactgcctgaa

SEQ ID NO: 228442 - DNA, 130 bp, Homo sapiens
  chr2:73612642-73612772
  hyper
ctctgtgcaggggcgaaactcgaccccagccgagaactacactgtccttgcgcggggccctctgcgccccggaaggcgcccagtcccggtttattgtgagcttacagtacagttcgcaaggtcccggccg

SEQ ID NO: 228443 - DNA, 307 bp, Homo sapiens
  chr2:74007133-74007440
  hyper
agtcggccaaaagcgccagtccggcgccctcaatgccaggataagaccctaaacaggaaaagactcggcagccacctacgccgcgctccagcgtctcgctattgcgcatgtgccaccgccggtcgtgatggcgtagccacgctggcttactgagactcctgatctgtaaacaggactttggtggctacagcgccctctttagccagaggccagtagcacaggtcaataagggcgtgtatgcacccttcagaattcaaacagtgaggcacagggaagtccctctgcccgatccgccccacgccccggt

SEQ ID NO: 228444 - DNA, 135 bp, Homo sapiens
  chr2:74055936-74056071
  hyper
atggccgctgtgtcgttcgctcctcattggtcggattttccgcaggtgccgattctagccccacctactagctctccgttccaagtcctaaatcactgggaatgtaatagacagacgaacgggagtgggcggagc

SEQ ID NO: 228445 - DNA, 640 bp, Homo sapiens
  chr2:74153738-74154378
  hyper
tggattgtggaattacgtcttttaaaatgttatttgtccaatgaacaaaaaccactcgcaccgcaactccttttactatcaaattctgcaccgttgcaaaacttccttcactcaacgcttctttacaaacatcgcgatagcggagcggtctcttgggcgcaccccgccgcatgttcaaccccacccacttcctgtctgacgatctccttacgtcaacggtgcgctggagcgagtgagcagcgatacctagggcggaagtgctctcggcggaagtgatcgctgtgtgaatcgtgggtgggatggccgcgggccgcctctttctaagtcggcttcgagcacccttcagttccatggccaagagcccactcgagggcgtttcctcctccagaggcctgcacgcggggcgcgggccccgaaggctctccatcgaaggcaacattggtaagggccggaaagcggctgccaagccttggcctccgccacgcaggcgacagaggctgggaaaggagctgggcccggaatggcctgcgtctgatgcggccggcctctttttctgggctgcgaggagagcctttcccctcgcaaagtgcactgtgtatctttgcctccttgtttttaggatatcgggcctcagtacccg

SEQ ID NO: 228446 - DNA, 110 bp, Homo sapiens
  chr2:74229981-74230091
  hyper
tcctctcggatctcggggggattctcagaggagaaatgaaaacaaaaacacactggaaggcgggggagcctgtctgccgtgatccaggcggcagctggaggcaggaagat

SEQ ID NO: 228447 - DNA, 35 bp, Homo sapiens
  chr2:74405756-74405791
  hyper
ggcccggcgcccgcggcccgaccccactcacaaga

SEQ ID NO: 228448 - DNA, 146 bp, Homo sapiens
  chr2:74406031-74406177
  hyper
taaggtttcgctgcgccgggagggacttgtcgcgccccctttcgctccgcctcgtcctagaactcggccaatcatcgctctccaagccaggacctccctcccccggaggcgtggcgaggatggcggtcctgcggaaggggcagtgg

SEQ ID NO: 228449 - DNA, 167 bp, Homo sapiens
  chr2:74425424-74425591
  hyper
aacttttctcttgtgttgtccggccttcggtgacactagcggcgtcaggcaggagtttgacttcctcagcctatcatggcacgttgccgaggcttcagcgccttacaggacctcgctccaggctcttctggctccaatcaaaagcagggctctttcggacttcgctt

SEQ ID NO: 228450 - DNA, 32 bp, Homo sapiens
  chr2:74426431-74426463
  hyper
ggaacatgaacggactctgggcaccctagctt

SEQ ID NO: 228451 - DNA, 183 bp, Homo sapiens
  chr2:74684552-74684735
  hyper
gatgctgctgaagcgcgaggagcgggcgcggaagcggcggctccaggcggcgcggcgggcagaagagcacaagaaccagactatcgagcgcctcaccaagactgcggcgaccagtgggcggggaggccgggggggcgcacggggcgagcggcggggagggcgggctgcggctccggcccccat

SEQ ID NO: 228452 - DNA, 231 bp, Homo sapiens
  chr2:74685369-74685600
  hyper
tattggctattgccgctgtcagtcagggccgtgggtcgaaccttcacctactctttgtctgtacaagctcttgttgtctgggtgagcggcggaggcgctgctgtggattggtcacagggagaaacctctgatctgttcctattggcccgtccgtcaagggacgatgatgattggtagggcagagcaatctgagtcctagttggtggagttctgcccggatggaagctccgg

SEQ ID NO: 228453 - DNA, 97 bp, Homo sapiens
  chr2:74710446-74710543
  hyper
agactgctctctacggcccagctgcccactggaggtcgctgctgcacccaaactttgcaaggaattcggtccagaggattacggcgaagaggtaaaa

SEQ ID NO: 228454 - DNA, 603 bp, Homo sapiens
  chr2:74726157-74726760
  hyper
tctctcctgcctttctctatcgcgattgccccgcctacaaggaacagagcaacaggtcgctcagttggcgacggtctgcccttttcccttggcactggcggccttccggagccgccgcggaacctagggactaacggaggagaggtgagaagtcgcaggtgcgagtcctggcacgtgggctgaggacaggggaggattagggtgggtggcctgggctgggacaaaggtttgagacggggaaccaggaggagagaggtgaggaaaaggctaagtcagagtccgcgaccttgccggctctataccttcagagggctgcagagcgcgcgcgtcaagtccgcggaaagttttactagtcagctcctccagcgcgcacagcggcgacgttggacccggacccgactctggaagctgcggcgcagagggtgctcgggggaccatgcgcggggctaggatgtctgcgatgcttaagagtgtccggggtgttcggggctcgcgtcccgagttcatggtcggccgggctggggcggtccggctgtccgttgcgctaggctccgcaaacgcctgggccccagtgctcggctcccaatccgggcccccagcctc

SEQ ID NO: 228455 - DNA, 1250 bp, Homo sapiens
  chr2:74729487-74730737
  hyper
tcggattgccggcccggacattccactgaattctgtgaatgtgtagcagggttggaggaccctcggaataacccccttggggaggtggacaaggacaatctcagcgaagagcttgctcccctcctccccacccttaggaaacgtccgtgaaccggagtgagagggcagtgggagttcagggagcaaagtccaggcggaggagcgtgaggcggggcttccgtccgtcccgcacacttctgggattgttttctctttcagaaagcgctactgcggagtgaaccggtccttatatcttagtttcgtgactttgggggcggcaggcctgtgagttgttttccgccctggacgctgttttgcaaagatctctgcgcgcccaccgccaccctcccgggcgtgcgggccgggaagcagccagcggtgggaaactccgacgccctcctcgacacttttctccccccaactccccaagactcacttctagggaagtcctttttcccatcaagccctgggaaagactggccaggctgagagagggacccgtcctcctctgtgccaaaggcgggagcaaatcctggtgctgtcgcctttggatgtgagtcctggaaatggcgggggtgaggaaggtgggcaggggcaaggtttggccctcaggcgagaaccgacgccttgtcccggaagcgcagcacggccgagtgcgtccgggggtgcagacggcgccctggggtggtcctgccgccacctctcctttgactcaggagcgccgcgccgcgtccgggcgcgttctcagtcgcgcgaagccagagaggaccctgggcgtgattctccctccctggcacagacggagacccgagtgaccccggggtccgggtgggcgtggggaatggacccatagacccgggacgagcggcgcggagcccgcagctggccagcttcagccaccttgggagacgcagtgcagctgccgctgctgacagacaagaccaaggctcggctgggccccaccccagatccggcctgagcgccttccgcgctgctcggcctcaaggcgtgagtcaccaagggcaagtcccgtgacttggtcctcagggtctccggcctcggcacattaatcttcagacccggctttttcgacgccgagctgccgcccagccccaatggcagggccttccagggagtcccagtcagactgctccccagctcccgcagctgctcggtccctgcaaagcccccgggagcgtttctactctccc

SEQ ID NO: 228456 - DNA, 41 bp, Homo sapiens
  chr2:74735289-74735330
  hyper
ctttgcagagtctcggagagggtgccgggggatggggagtg

SEQ ID NO: 228457 - DNA, 295 bp, Homo sapiens
  chr2:74740310-74740605
  hyper
taggctgagctgctcgttggtgcccacccgccaccgccaccgcaggatggtagaagcgcccccctctctgagcccagtctcaccggctcagaggcgccagggcccccccgggggccggggcgggccggggaaggtaatgtaattccggcccagctaacccgattaccgcggcctgcaccgggcagggcggcggcgggggcgggtctaaggctcaggggcccgcccgcgggggtcccatccccgggaaggacgcagagttcacgcactcccggctcctggattcatggccagaggt

SEQ ID NO: 228458 - DNA, 315 bp, Homo sapiens
  chr2:74740635-74740950
  hyper
cccacctcccttctctgacagctccaggccattttttgagtttgggtggggtaaaatgtttatgggaaacaaggcggccaggatccaaccaaggcctcagtgaggtcccacgtgtcccccgtggcgagatttcgccctcccgccgttgaggaggaagagtgtgagaacagacttcctaggcacagaatggaggggcagagtcctgcattgaggactccctgcacttggggtccgggggtaagtgccagccccaagaacccgccggcctgatttggcccgggttgagccatggtccgttttacacggattttggaa

SEQ ID NO: 228459 - DNA, 221 bp, Homo sapiens
  chr2:74741490-74741711
  hyper
gcaaacaggcgtcccttcccctttaactgctgggccccgcccctgccctacccccagcccccactacccacccgggccgatccgtcagtcactgccccagccggagctggccaaccctctccacccgggacttgggcagcggcgccggcagcccagcgtctatttgcgcttaagagccagcaaggaagctccaggggccccagctggccgtgctcccccgg

SEQ ID NO: 228460 - DNA, 1346 bp, Homo sapiens
  chr2:74742371-74743717
  hyper
tgaccccgtctcctcatttcttagctttctgctccaactcaaggacccctttcacacctcccactagatcctcccaggggatcctcccccaactcaaatctctgggtcctgcctccgagaggtgatggggagggagctgccgtcggtgcccgcgccctcctctgtagtcccactgtccacgcgtggggaggggagggtgaagttacaggggacgtctccctcgcatcccaggggaagggcctttcttggctatagggctcggctgatgcttagggcccgggtaaggacagggcgcgggagttctgcggcctggacagccgcgcggccttctcagtggcacctcgggccaccctgcaaatcctgccctggtctttcttcctcccggtagctgcgctctcgcccttctctgggacgcgccgcataggccacccctaccaaaaccggacccctccgaagcggaagaagccgcgcacgtccttctcccgctcacaggtgctggagttggagcggcgcttcctgcgccagaagtacctggcctctgcggagagggcggcgctggccaaggccttgcgcatgaccgacgcacaggtcaaaacgtggttccagaaccgacgcaccaagtggcggtgaggcgcggcgcgggcgagggcggactggggttcccgagcagggcctggtgagaagcgacgcggcgggcgccccgctgaccccgcgtctccctcccttaggcgccagacggcggaggagcgcgaggccgagcggcaccgcgcgggccggctgctcctgcatctgcagcaggacgcgttgccacggccgctgcggccgccgctgcccccggaccctctctgcctgcacaactcgtcgctcttcgcgctgcagaacctgcagccctgggccgaggacaacaaagtggcttcagtgtccgggctcgcctcggtggtgtgagcgacgcccgtccgatcggcgtggagcgccgggcccggagcggtggagcgcgcggctgcctgcgtccatggtctagtggcagccgggcgcgtgaggagcggcaggccttgaggctgtcgtcgagggctcctccaccaccggccggctcccaagccagcgttgcgcagatgcacggccagctcagaggcggcctttcccgccatttttcacttcactgccgttacgccctcgctggaacctgaggcgccgagagggcgggacctgcaggacagtagccaatgaggtgcggggagggggccgggctggccaatgggagctgctttcctgagggactcgaaattctccggcgggtggtcgggagctggggctctgaggggctctagcggcgttgcgcgcggtgc

SEQ ID NO: 228461 - DNA, 104 bp, Homo sapiens
  chr2:74756283-74756387
  hyper
actatgttgtggtcgaaaggtgtcacatggttggaaatgaggaccctgacactgtgatcccggagtccggagtcctcctgccgggccacgagccctagcaccgc

SEQ ID NO: 228462 - DNA, 142 bp, Homo sapiens; identical to SEQ ID NO: 198306
  chr2:74776396-74776538
  hyper

SEQ ID NO: 228463 - DNA, 165 bp, Homo sapiens
  chr2:74782321-74782486
  hyper
ccacggcgtagcgcggctcgagttctttgaccataaggggtcgagctctgggggtggccgagggagctcgcgccgcctggactgcaaagtgatccgtctggctgagtgtgtgagtgtggcccccgtcaccgtggagaccccccctgagcccggcgccactgcctt

SEQ ID NO: 228464 - DNA, 96 bp, Homo sapiens
  chr2:74942355-74942451
  hyper
caggggtgggagccgaagagagtaatttagggatagaggtgagaacggagttagacacaaaagtaagatcacatgaactccgacttcggatggaac

SEQ ID NO: 228465 - DNA, 541 bp, Homo sapiens
  chr2:75062278-75062819
  hyper
gggctcgaggagaagctgacccgggaaggagtaggaaaggggcagaggaactccgcccgccgcgccccctccccggaactgtggcgcccggaactgaggctcggcgaggggcgtcccccattaacccccgcccctccaaatcagcctcgggaccgcccagcctcgtgtcctcaggatctgcctctgagtaaggggaggactttggttgttactttctggtttgccctaaaagttactcggagaggccaacgcgccgcgttcctggattacttgagattcttgagatttatgtccttccgaaaacgagcttttttttccttaagcctcgacctgtctgttcccacctggctccgcagctccctatggctgagcgctcaccgcggccgggtcatttacataagaaagagcctcaggccaagccgggaagctctcattccccgcctcggggtatgggggtggggatggggccggggccggggacgggcagggccaggggcgcgctcagaattgagtttctgaaatgcccgggattaggggattg

SEQ ID NO: 228466 - DNA, 261 bp, Homo sapiens
  chr2:75146990-75147251
  hyper
gtttaatgaataaaacgatgaaaggacccgtcgcctcctaaatgcagatctcgagggagcctccaggtggcgctcgccgctcggagaagcagggagtcggtgcgccgcagctccggcaggcgtctgggaggtggtcgcctcctcacctgcccaggcggccgtcccccgggagcgggtggcggtgacctcaggactgacgcactgcctcctccgggcgggtgcgcagcctgcgtcaggggcgctgttctccctgtgctcttg

SEQ ID NO: 228467 - DNA, 1973 bp, Homo sapiens
  chr2:75426244-75428217
  hyper
tgcccgcctgcccgcggtggctctgaattcctccactttcaagcttcaggagacgtttgagttcagaagtctggagacagcatctctcttgcggtaaactgaaaaagggaaagaaattccaccggtcacagttctaggaagcaagagatcccccgcatttatgcacctgctgctgcctgcaactcctatttctccttcctccgcagggaaaggcaaagccctgtgctgcgtgaggacttaggagcgaagtgggggcccattgcagcgcgacctgtaaaagttctgagcctatggccaggattctggagcttcgtatccagctggagatttttccttctcttttgctgccgctgccgccgcctgcagtttcgcgggcacctctcggttcgggttgctcagctcgcgagttagctgcgcacgaggcttttataaccccctgcagagacgtcactgggaaggggcagtacctgggctgcgtactcgccagtcccggtgcgcagcgcggcagctgcgccagctgttgacaactgtctcattccaccgccgcagctaccacgccttttgctgcttgctacttgccgtgggagtctgcgagccgggagccccacgcactccgcgagggggcagtaggtggcttggaagtaactgacacagatgcggtccgcagctggaatcgtcgttgcacgaggggtgctgggaggaaggaaggatttgggaaacagctggagtggaggacaatcaacttccagggaatgaagcccagagccctgagacagctctgcagaggcggcttgcctgtggcaatgggaaacggtcatgtgtgggggcgatgtgccagcgccgcgctccgggccgcgctccagctaccgagaagccagaggcgacgactccctggtccaggtgtcccgaaaacaactttcctgaggctgtgtttaggaaacacccccacaaaatatctagctcagttacctggctagctgattcacctgggaagtgacagtctctaagctttgaggacactttcctcagccaccctggtgacttggcccctcgttccaggagaagctccatttgagccctccacctgacccctctggatgagcctctgctcaatcactggggacagggctgagctccctgcgaatcttggtgagcgcaggagccacactcataggcagcttgtcgctcagacgcgcggctctgggctctccgccagcaatcactgcggcgctgcgtttgcctcccggggacctggcagcctccgcctccgcgcctgccaagcctgcaggccagagccgggctcggggtggcatcggtggtccttctccctgttccccttccaggtttgcataggggctggaggacaggtcagccagccttctctgcccgcctccatcctgccctgccgtcttctgactttgaggcctcgtatcccagtccaagaccatttcaaacggtagaactggtgccagacacttggaggaggcagggcaaagactcgccagtccgtataaacccttttggagaagccaagatgggatgagctccgcagcacgttcccgccagactgctgcaggcagagttccgcggaaaactgaaccccgggagtcctcaggggcccatctaccccggtgcaccgccccctcctttcactgcggggactcggagctgtgggactggagcgcgcaccggcagacttgcgcgcaggttggagttggcgcacacccgcgccagccggggagcggcgtttacgcactggtaccgcgagcgctcaaagcatctctcgggaagtgctttaaggctgggaaatttactatacacttatgccgggcaaaaattggatcccacgccggggaggagaatctgctgtttcactctgtattttttcggagcctgggattttagcgtatataggaaccgcacattgctttgccaggttctcctaggcacccgtaaacacactgcatagaaaa

SEQ ID NO: 228468 - DNA, 252 bp, Homo sapiens
  chr2:75787179-75787431
  hyper
gtggggacccccacgcagacctcccagatagagcagcgtggactgtctgcgcgcccctctccaaaagcaaagcgtcccactgggactttagggggcgccaacagcctttcactccctgatgcactcggctttcggggtcctgggggtcgccaaatgcgcgcggcgagttggctgcctccgaaacaaaccaggtaaatagtccacggtgcagcacgtacatttctggcaggtccgccccgcgcaggcttggga

SEQ ID NO: 228469 - DNA, 736 bp, Homo sapiens
  chr2:75787704-75788440
  hyper
ctctgggtgtttccgaaaagagggcgcttcggagaagccggagcccgctggggatgccgggcgcccccagagttcagggagcgctctcgggcacctcttacctttgctggggccccggcgcgcacttccggggactgcgcttggggcgcgcggggccgagcagggggacccggagctgatcactgaggggcggacacgacaaagcgctgcccgggtcttgggccggcaccagtacctcggaaaggaatcccggcggaggggccgccggggtcagggctggcctggggatgtggggtcccggcctgggtgctcacggacggcggcgccaagccccgcagaagctgcaggagcccgagtcagtgggaggaaaaggttgtctcatttccttcgatctcccccctcctccacccgcttggctccggacctgccctccctctcccccgcccccttctgcaagccagcggcccatgtgggcgcccgcaagacgcgaaacctgaacggctgcggcgtgcggcacctccctccgcgccaagttagttcacgctcccaactcctgcctgcctccccgcgctgccgactgtccgcaggaccggggaggttccccatcggcagtccccaacctatcccggtcctccaggctttccccctgctgggacgagcccagatttgaaagcagacctccaagcccctgccagcatccatcctctcattcctgtcccgtcgcctgctttgagcc

SEQ ID NO: 228470 - DNA, 154 bp, Homo sapiens
  chr2:75873843-75873997
  hyper
gtcccatagcagccgccatatggtggcagacagcaacaacctcgtcgcactgattactgggagctgtagtcttgacgtgagctagctggcatggcggcctgcattgcagcggggcactgggctgcaatgggcctaggccggagtttccaagccg

SEQ ID NO: 228471 - DNA, 751 bp, Homo sapiens
  chr2:79739572-79740323
  hyper
acaaacctcccttccgcggcagtcactacctttgcagcactctggccctgccctcctcctgccacgtgtcggacccctgctgggctggccctcctttcctactctgcgacacccctatcccccccgcccctatcctgcccgctcccgcacccggtccctctccccgggcctcgcgactccggcgattcagctccgggtccccgcccgcagggtaacgcggttgtcatggacacggcacctgcgccctacggcggtgccccttcgccgccgtcccctccccccacctgcggcgccgagcctgccgcgcctccagagctccgccctaccccgccccgccctttcgggcgctccccaggccgcgcgcgcccgcggccccccacccagccacccctcgatgcccggtgcctttccaggcgccgcggagccacggggaccgcgggggcgcgcgagcgagcaagcggccgcgcatgcgcactggctgcctcccctagcggcgatccgggccgctgccgctcgcgcttgggcaggacgcggggcgggcggggggaggggggagcggcttcgcttccagccccgagtgaggcggagacccaggcgggcgggcagagcaggcggcaccgcacctcggccagaggcggctgcagcagctgctgcccttgtccctgccgccgcctctccagtcccttctgtgattaccactccagctgctgggaacgggcgagaaagaggaggaggcgagaaactcccaccg

SEQ ID NO: 228472 - DNA, 2312 bp, Homo sapiens
  chr2:80529666-80531978
  hyper
gtggatctgcacggcgttctcggcgtgctcgccgcctggaagagccacggtggcaggctcgaatgtgccgtcgtgctgcccctccccgccgtccgcgagcgtggtggccgagctggcagggggccccagatcactgcggttggtgacggccgagagcaggtggccgctggtgggctcggccccatcctcgcacaggtggaaggcgtacacggcgtccaggacgtcctcgccctgtgcgtactccgggctggcgcactgcaagttgccatcgtagcgcccctggaagttgttgagccacgaggctagggcacacacgttgcgcccgcaatcccacaggttcccggccagggtgatgcttgtcagggacttccaagagttgaggatccggggctcgatgtaggtgaggcggttggagtccagctgcagggactgcaggtgcggcacggtctcgaacacatggggctccatgtactcgatctcgttgcccgacaagtccattttctccaggttccaaacccagtccagcgagctgaccacaatggccaccttgttcctccgcaggcagagcgagtgcagggagatgaggcgcgggaagtgggcgaagttcaccttgaccaagtcgttgtgctcgaggtgcagctcggtgagcttaaacaagccggcgaaagagttgcgcgccagactcttgagctgattgtatccgatgtcgagaaacttgaggctgcggcagtcctggaagatgcgcacgggcacaaactggatggcgttggcccgcatatgcagcgtggtgagcttccgcagcccgtggaagaggtcgggcgcgagcgcctgcagcttgttgtacgagaggtccacgctgcgcaggttgggcatgggccggaaggtggtgttgggcagttgggtgatctggttggaactcagcgtgagttccttaactcggcgcagtttctgaaaggcgtccccctgcacggagcagatgtgattgtgatccagatagagccacgtgagctgcattaaccccgtgaactggccggcgcgcagctccgagaggctgttgtagcgcagggacaagcccagcaggccggacaggttgtggggcgcctcggtgaggttgagcgcctcgcagtacagcagccgcccctcgcaccggcacagctgcgggcacccgctgggggcggcgggcagcatctgaaagcaggcccccagcagacacaagaccacccccgagggcctcctcagcagccagtatagacagagaccgagcagcaggaaatccattagcgagaatctttccagagagactggagaatgtccattggaagcgctcggtcagaaatctacatcatattttattccgagggaggggaagcgggggagggggagaaaagggcaaaaaatcaaataaatacatagaaataaagaaggacccccctccccaaaaaccacacgttcacctctaagcatgcagaaagctgggcagcatagaaagttcacagccacggaaagatcaaagagatggtgatttggtccatgttagatgctgcagcaaagaaaagggaggaaaaaaaaaatcttcgggaaagaatttaattaaaaagtgtcttacccacccttttccagagagtgacaacctccattcagctgctccctttgtgtgcaggctaattatatgcagggcgagagaagacccctctgtgtttccgaggcagccccggtccgcggccggcggatctggcaggcgcacaatgtctcactttgctgctcggctcggggctgcaagggcggccggcaaggcggggaggcgacttctaggacccgcaagtttcccaactacgtgccggagcccgagcttcgccttcctgccgccttcctttccctctgcagttcggactgtgacgttgtggggggaaaaaactccaaactcggggctcgcgactccccaggatctgacagtctggttaatgtccgtcattggaaacgaccactgaccggcgccaccttttactccgcggaaacagcctgccattcgcgccccgggcagctgcagagagcgggctcactcatgctttgcgggcggcgggcggcgggcggcgggcggtggggaggtgcggacggcggcgcggggagcggcgagcggcgcccgggctccttccctccaccaggcagtgtgcggcgcgagcttgcacaggcacctactgctcactgagtgtcgtaagctgctcacgattgtgcgtcttccccgagcacctcagacatgggcagattgaaaaggggtgggcataaaaccaacattttaccgaaccactaaagta

SEQ ID NO: 228473 - DNA, 312 bp, Homo sapiens
  chr2:80549613-80549925
  hyper
ttcccttgcttgggcggctacgctccccgcggggctgcctgcagcccccgggcccttgcagctccgggacggcgcgcggcggcggaggccgcggggccccaagcgccagcctggccccggcgcagatgcgctgccccggccgcagcccagccgccgcgtgtgttgtcaggacgatcggaaacgcgtgtgtggggagatgggtgccagtgtcgccttgtccattatccaaaacccagtcgcttttgctggttcctcactcagcatgtgagagagattgtcttctcactcggtgccactcgggggccatactcc

SEQ ID NO: 228474 - DNA, 490 bp, Homo sapiens
  chr2:84686316-84686806
  hyper
agacgggcggcggcgaggccgctgctgccggagaccatggtagcgatgtcagcggcagcggcaagggttgcggtcatacgccaatgacactcccaggcccccggggacctcccaggggcagaggccggaggaggcagagggtggccacagcagtcgcctgaacaaatttccctttacagaggattcttcacgaaacagcgggaatggcaggtgaagacaaagaggcatcctatcggagaggcagataataactcggctccttcctagaaatgtgggtttgattaacattaattataacagcagctgagggaaaaccccacgcgagactggccagcgcgtggcattgtgggcaatgtagtctgacggccgcgactggttcgtagcttttgagtgaggcggcgggaagggagcgagggaagagcggcagtgagaccggggagacaagggacttgaagactaggagggaagaaacagcgaggtgaggtgcgaa

SEQ ID NO: 228475 - DNA, 39 bp, Homo sapiens
  chr2:85107341-85107380
  hyper
acgcaagacctgtccgctatagagctgtgttgactcggg

SEQ ID NO: 228476 - DNA, 99 bp, Homo sapiens
  chr2:85107560-85107659
  hyper
gaaatggcttcaactccctaaagtcccttctaactcaggcactgaacatatgaaggttaagccaagcagcttcagggcgctgttaatattttgataaga

SEQ ID NO: 228477 - DNA, 91 bp, Homo sapiens
  chr2:85154122-85154213
  hyper
ttcctacaagggacgcctaaacacagagtcctaaacacagagtcctaaacacatgcagggttggagggagactgacgaactcaactaccag

SEQ ID NO: 228478 - DNA, 1195 bp, Homo sapiens
  chr2:85359942-85361137
  hyper
ttgaaaacctgggccgggggtcgcgttggaaccccacaggaaaaaggcgcggaaagccgccgggcattttccggggttccatagatgtccccagtgtcctagtccgtgcatcagctcgcgcactcggagggactctaggcagggggagggccccgcggccagtatgtgcgtccgaggctttcccgcagggggcagtgccgcccgcccgcgcgccgatacggtgggagggggtgggaacctgcgcggagttctggaggttctttgggagaaagttaggggatgcggaggggtgggcgcaagacttccaggactccagggaggccgtggggagggccgccgagggtgcagtgtgaggcgcaggagggggttgggggcggtgcacgttgcagggagacgcagcccctggaagatgcgagtgtgaacgtgtgagtgtgagtgcgtgtgtatgtgtgtgtgtgcgcgcgcaccgcagctctccgggttccgcgaggcgcgcgggtgtcagcttgcagccggggctcctccctccggcccccctgcccagcccggcggtccctcctccctccctccccgctcgcccctccccggcgggccaggggctgggacgccccggcggagcaggcggcggcggtggcgagttggggagccctaggctcggcgctgccggaggggcccgagccgagccgcctgcgccccggccgggcagcgccgggcccgcttcccgcggggccacgccctgtcaaactttgttgcggcggctagcgcagcgggcccgcaagcgggcgggaggggcgccgggccgggccgggcagggcgcgggcggctaggggctccgagagcggcggccccggcccgcggccccaccatgccccagctcggcggcgggggcggcggcggcggcggcggcagcgggggaggcggcggctccagcgccggggcggccggcggaggggacgacctcggggcgaacgacgagctgatccccttccaggacgaggggggcgaggagcaggagccgagcagcgatagcgcctcggcgcagcgggacctagacgaggtcaagtcgtccctggtcaacgagtcggagaaccagagcagcagctcggactcggaggtaaggaagcaccgcggccacccccgggggatcccggccctgcgtccgctcacccgctcttgcctttgtgtctcctccgca

SEQ ID NO: 228479 - DNA, 198 bp, Homo sapiens
  chr2:85553952-85554150
  hyper
tcctccccagattcggttttgaaagcatgaggagaaagcttccctttgtcagcaagctggtttgtgtcagccttggggagctccttgttatcagaagggttggagatgggcttggaatggtctttccgggaaggctgctctggaaccaccttgttagggctgtcttttgaggtctgctcctccgcacccgacttgctg

SEQ ID NO: 228480 - DNA, 145 bp, Homo sapiens
  chr2:85555444-85555589
  hyper
tggccaccaccatcgtgtgcttgcgtttctatcctctgcttttttcgtggttccctcctggccgtacacaaacgtgctgtgctctggtctctcccatgtgggaataaatccatccgatcacctgcaaagcgttgccttcgcatcc

SEQ ID NO: 228481 - DNA, 235 bp, Homo sapiens
  chr2:85581697-85581932
  hyper
gcccgggctagttcgctctccagtcaggaggcggaggcagctttgagcactgattaaccagccagccagcgaagagccaactctcaggtgatgattgaccctcccggctctccgtacttcttttgggtttccattgcctactgggaaatgtagttctcggggccaggggagccggcacggaagcggctgtgcgcatgagcagatgaggcctagccgaggcggcgggacccccaag

SEQ ID NO: 228482 - DNA, 70 bp, Homo sapiens
  chr2:85788617-85788687
  hyper
cttccctaggctccgcctcccgacgcgtcagcggctgtgcggccggccgcaaagcgccagcactgtcgta

SEQ ID NO: 228483 - DNA, 65 bp, Homo sapiens
  chr2:85788985-85789050
  hyper
cgagttgaggacgcgcctggaaatgttgcctgggttttgagccattgcacgaccccttcactttc

SEQ ID NO: 228484 - DNA, 108 bp, Homo sapiens
  chr2:85804638-85804746
  hyper
agcgactcgagatgcgaggtgggcgggggcaggctgaaagttggagcaagcaggaagtgaactgagggccaccctgggaggaagccgactaggcgaattcacttactg

SEQ ID NO: 228485 - DNA, 404 bp, Homo sapiens
  chr2:85822391-85822795
  hyper
ccaactagagggccgcgggggcagaagtgtccggcggggatccggacagcgcatccggaagcgccatgggccaacgctcgcaggaacctgaacccctgggccagcgccgcctttgctcgcagaggcctctagcatctgtactgtcgaagccctctgagcttcagggcagactgaagagccttacacaccagacacttggacgcgatcgcgccagaaatccccgggaattcagtcttggctccgactccaaaacaaatgattcctcaccagccagatctccatcattggcgttagtctctggtcacctgacttgttcaagccaatgagagggggccgaattagtacttccgctttccgtgctgtttaacgagccactatgcccgtccctcggatactctgattgg

SEQ ID NO: 228486 - DNA, 249 bp, Homo sapiens
  chr2:85829658-85829907
  hyper
aggacccgggacgcgagagtccccaggtgattcctggaagcccggaggaagggaaggagcccagtacgcacctccccggagcgccccgccgccgccgcaccctgctcggccccctcgtggcgccgactctagctgcggccctcggagcagccctgaaaggtttaaagggccgagcggccccgcccctggaggccccaggcctcgccgcgccgcccgccgggacgtggagtccgcgcagccccggcctcg

SEQ ID NO: 228487 - DNA, 158 bp, Homo sapiens
  chr2:85830122-85830280
  hyper
tacctgggattgtcgccgtgcacatggctggaggagcgtctctccgccactgcgcacattttgcagcctgcaccggccaacggtgagtcctctaggaagctctctcaacgtggcgccccatgcctgcctctggccagggctgcggtgggtccagagaa

SEQ ID NO: 228488 - DNA, 168 bp, Homo sapiens
  chr2:85982463-85982631
  hyper
cagttggtggtggcaaggtccggaacgctgcggtgggacagtccgggggagttgtcagcccctcttcaggccccagcggtgatgccccgaacactcaggttgcttccgggctatgcactccttgccctggcatcctcaagaacccgcgctacaagcctgtgccctctc

SEQ ID NO: 228489 - DNA, 761 bp, Homo sapiens
  chr2:86114869-86115630
  hyper
agctgtatccttccgtggaaaaggattagcagccataagcccgggggagggcagctaaacaccagagggcaggagatgagtctccttcctctctgtgacacccagcacggccctgccacgaggagcaggcaaccactggtgccagatgaagcgcagcacataaaaccattttccccttcaaatgaacgatgcctaattaagcaaaagccgcatgcatgacttaagacatgaggatataaaattcgtcttccgagtcagctagagattctgcaggatcctctaccctcgtaaacgtatttttttatgattagaaaaacccggggcctggaagggacctcggccatcggcagggtaagcttctcaggagagaccatgagcccgagccccacagggggatcagtgtctgccaaggtcaccaagcgggtgtgaggcaagggcagggctcctcggggatgctctcggaaaaccctgcgttacttacacacgcaaggcgtacaatgaatgcacacccgcgtcaagccacggcttacaattcagaagaaatcaaaaggtcgccaaaacctgtcttctccgcaaggctggctgcagagagggtgcagggaaggtcaccggcaaatttctaccagcggccccacatcacgcctccccgatggatgcagagagaggtttcaggagctgctagtaaccttgcagggggttccctaagcccatcccaggaaaacgagttaactcggctctgctaactccgaagcttccagcaa

SEQ ID NO: 228490 - DNA, 246 bp, Homo sapiens
  chr2:86333267-86333513
  hyper
cttcagccaatagcggagctgttccctgctccccgcccactgcgccccaccttcctgaaggtcgaggcacgctttcccaacatgctctgcagagaaatcaaagatggcggttgtatctgctgttcgctggctgggcctccgcagcaggcttggccagccgctgacgggtcggcgggcgggtttgtgtgaacaggcacgcagctgcaggtaagagacgcttagggtatccgcgaagaagaccgcgga

SEQ ID NO: 228491 - DNA, 115 bp, Homo sapiens
  chr2:86565024-86565139
  hyper
ctcagcgttccagcggagaaactgaagtccgaacctgaacctcgggaatctgtctgcacctgtctaggtgggatgctgtcatccctcattcagctagtgcgttagcctcataaag

SEQ ID NO: 228492 - DNA, 265 bp, Homo sapiens
  chr2:86668219-86668484
  hyper
aataggcctatggcggagggatcactcgcttattctctgtgtactttaacctaatgggggtcgcccgggagtcggaagggggaggggaaagggaggaggcagccaaggaattgtttttttctctggccccgccctcgcccggggggccaatggtgatgatctgtttcccccggagcctcgcccagctcctgtgtttcagccaatgagcggcggaagcggctccgaggggggcgggtccgggaggctgtgcgtgtcttgtgagagc

SEQ ID NO: 228493 - DNA, 138 bp, Homo sapiens
  chr2:86850743-86850881
  hyper
ggatggggcgtcgcggtctctgcagatggaatcggtctcggagggaaaaaaccaataataggccccgagactgctcctccaggcggctacccggctgcctcccggccactcagcgcccgtcccgctcggatgggcagt

SEQ ID NO: 228494 - DNA, 86 bp, Homo sapiens
  chr2:87018279-87018365
  hyper
agagtgacagagtgggtgaagggagaccaaagatttcaagaagtgagggcgagagtaggcagcaaaggaggggagtgtcccttcct

SEQ ID NO: 228495 - DNA, 768 bp, Homo sapiens
  chr2:87034564-87035332
  hyper
cttacttggagggtagagaacggtgcttccccacgctgctgtgcaatggataggagctatgtgaagctggcgtatgggtggggtttgcaggcttcgtccggcttcatcgccggctgctgacccggcaccaattcctgttctgcaggtctcaccgcagaggggcacgccagccatgaggacagatgagggaacacgtgatgccacgatgggggtgccaggatgaggtgggtgcggtcgcggacaggcgcacgaggagcccagcggagcgccacccggagcaggcgcggaggagggctggggagggccaccaaggcgacgagagccggtgtgcctgaatcagcctaaaggagacggaggaggagtgtggtgggcgcaggggcagggagctgggggaagggcggggggctagcccaggctgaaggcaggcaggagcagggccgcgatgtcagacaagaaacggcagcagtgtgtttgggaacctagcaccaaccgcaccggtggagacagggtctgctgtagaggaggtggggccgggtcccagctaagtaaggcggtggatcttgcagcccttccatcctcagccgctcattctgcgcaaatctcggggccagccttggtggagccgtaaagcgtccaccagaacctggatccctccgccacctttcccatgaattcacctttctgtacacagcaagcgcctgagcggagacggccgacacgtttcccactgttaccccaggaaaccgcggctcctgagggggtcagggc

SEQ ID NO: 228496 - DNA, 118 bp, Homo sapiens
  chr2:87035595-87035713
  hyper
acactccctatctcgcctgtcacccgcgtccagcaaaatctgatgccctgtcggcccagcagggggcggtgctgctttagttttggcctggtcggggttgagcggaggagggagcgac

SEQ ID NO: 228497 - DNA, 333 bp, Homo sapiens
  chr2:87088802-87089135
  hyper
gccaagctgcctcccgggcgccccgccaccgcgggctcgacgctgcaccctgccaggaccagggccaggacagccacttatcacctccccgctcaggccccgggagcgcagacccttgggtagcccgcgcgccgccgccttacctgtcagctgcgcggccaagaggagccacagccgcggccgcatcgtggcgcgcccgggacacctggccccgggggctcggcggagacagtcgcggctggggtgggtgaggagctggccgggcggggcgcctgggtcggggagctgggggggcagtggggagggcgggaccgggcgcggtggcggcgggag

SEQ ID NO: 228498 - DNA, 915 bp, Homo sapiens; identical to SEQ ID NO: 198321
  chr2:88315897-88316812
  hyper

SEQ ID NO: 228499 - DNA, 81 bp, Homo sapiens
  chr2:88355120-88355201
  hyper
cccgccgccggggcgggaactcaccttctctgaggcaggggcgggcgtctacaactactgtcccccgccccgccaacgccg

SEQ ID NO: 228500 - DNA, 118 bp, Homo sapiens
  chr2:88752280-88752398
  hyper
ggggcggtggccgcgggcctgggctctccacgcccccgccacgccccacctgcccgcgcgcccaaacccggagcccgcccgccccgcccctaccgcccctctgcccgggcccgggagc

SEQ ID NO: 228501 - DNA, 465 bp, Homo sapiens
  chr2:88752578-88753043
  hyper
ttttggcttttctacctctttcctcctaaccttttgtgatcgagtcgcggaattcacgtccagtctcaaccgatcggcttccagtcgaaaataatcgatgtgatttacaacgctttggggtatacggtagaggttattaacaggcccgcttggcgtgtccccttctcctcggggattctgtgattggaggaacggaaatcagtgttgagtttttctaaccaaactgtaggttcgctcacattcgggaagcatttattcgttttctgtgcggtttgtacgggctttcgttgtgatttgttatcttcaaaaacataaaggtgaatgttttcaaagacatttaaataagtaccttcggaattagcattttaaacccgaaagtttcaaagttttaagtaatttaaactgtgcaagaagcgctcatttacaaaaacagcctcatctaacgggcaggtctatgacttgccc

SEQ ID NO: 228502 - DNA, 368 bp, Homo sapiens
  chr2:88926936-88927304
  hyper
ccacgtctcagcccggcctctgccgctgccacctgagtgacagcctatctcggacatcgcccattgagcaaactttccgcgcgtttgctctctcattggctgcggccgctgccactccatgttcccaggctggccttgttggggaaggtggactttccctggtggtcaacatcgcacctaccaatcaaatcgtaatttcgtcgttcgaggcccgtccctcttccggacgcaattaccaatgagaaatgcccttccccgacgtctttttacctgattggtgcgctcatcagttcccggaatacctttcctacaacagattggccatcgcggtggttggcctcgccccacaaagcgaggcgctggagaag

SEQ ID NO: 228503 - DNA, 77 bp, Homo sapiens
  chr2:88990956-88991033
  hyper
atactgatattcccgcggctaatggtacttcacagagcgaagtgccggagcccgtcgccggcgattgcgcattccgt

SEQ ID NO: 228504 - DNA, 436 bp, Homo sapiens
  chr2:89064675-89065111
  hyper
ctgcagccgccaccagcacacggaccaggggtcgccgaggattgggaatccccgaccaggactgcgcctccagccgtgcggaccccggggccagcggggcagcggcaagtcaggcagtctgcagcaggagcgctgggcatgggcttcggcccgggttgcaggaggcgtgcaccctccggccggataggcggcgcactcagggaccaggaggccatcccaggtgagccccgccagccccagccggagcccgagctgcagctgccacctgcaagtggtgctctggctgcagcggtggcaaccccggatccagtccttccgcctcgcgcccatcagcgcggacccgggggcgacgcagtggcgaagtcgggctgtgggcccggcggcggcaccaggcggagaagcgccactcaaccccatccctgggctgcagagggcc

SEQ ID NO: 228505 - DNA, 392 bp, Homo sapiens
  chr2:91635028-91635420
  hyper
cttttttcccctgtcgccgcaggtttctcctgccccggcttcttgcccccaccgcccgagctttttgcccccaccgccgcggctatttgcggctatttgcacctgccaccgcggagttttgccccgtatgcggcttccggcccccgccgccacggctttttatcacccccgccgctttttgcccccgccgccgcgggtttttgcccccgcccccgttgctttttacccccgccgccgcggctttctgcccctgccgacgagggtttttgcggctttatatccccgctgtcatggctttttgcggccgtggctttttgccccctcagccgtggtttttttgcggcttttggcacccgtcgccgcagctttttcaggcttttggtgaccgccgc

SEQ ID NO: 228506 - DNA, 152 bp, Homo sapiens
  chr2:91635540-91635692
  hyper
cggctttttgcccccgccgtcgcggctttttgcccccaatgctgcggctttttacggctttttgtgcccatcaccgtagctttttgcctccgccaccacagctttttgcctccgccaccgcggctttttgaccccgccgccatggcttgttg

SEQ ID NO: 228507 - DNA, 161 bp, Homo sapiens
  chr2:95664007-95664168
  hyper
gggagggcggccctcggtggggtcgactgggcggagccgccgcctcctatcttcccttgaaggcacctgcgcagggggacccgcggtgcctgggaggggagggggactttcgcatgaagcccctccttgtcagtccggtcaccgcgcgcccgctctgaagc

SEQ ID NO: 228508 - DNA, 139 bp, Homo sapiens
  chr2:95691259-95691398
  hyper
gagtcagacccacagtccccagctctggacgcccgcagcggggcctcgaagaggttcagggcggtgcccgcggcgctcgggccgggtctcccggggcgtggggcggggggcggggttgggcggcggccggggctcctcc

SEQ ID NO: 228509 - DNA, 35 bp, Homo sapiens
  chr2:95691818-95691853
  hyper
caacagaatgaggggaacagtctacaggactatgg

SEQ ID NO: 228510 - DNA, 207 bp, Homo sapiens
  chr2:95692273-95692480
  hyper
ggcgagagcgatccgcgcgcctcgactgaccttgggcaggcccggggcctctgcacctgcggtcggtcccgccttgcacgcacggtctctgcctgaggctgcaggaaagcgcttcctactgagaactcctgataagcgctcacggtgtcgcgaagccgaagtgacctccctcagcctcaactccccgggggccgctggccttcacct

SEQ ID NO: 228511 - DNA, 114 bp, Homo sapiens
  chr2:95831017-95831131
  hyper
agctgtcgggagtcggaccagctgcacagttaatacatatgtgtcctaggctcctctctccttccaacgcaaatatgtgtacaaaccctgcctggaaccgcagccctgctctca

SEQ ID NO: 228512 - DNA, 252 bp, Homo sapiens
  chr2:95873228-95873480
  hyper
gggccgtcagccgcgccccgcggaggattctgggagtggtagttcggcctcatggttggccggcgctaggcgtccccgccggctgttagatgcctttgtcgtcgggctcggcttcctcagtgtgtggctggaggtcgaacccagggtagaggagggctgaacgcatccccttttaatctgagtgtccgggaggagggtggcgggaggacccccgggtgggggcgccaggctgcccacgcgtgcgttcccggc

SEQ ID NO: 228513 - DNA, 560 bp, Homo sapiens
  chr2:96011307-96011867
  hyper
tccaaacaggactcgcgcttataggcgtggagcggagctggatttctcccttggctaacacagcgggaaggatgaggtgcgggccgtagccgcgctgccgcgctgagtccgtccggcggggatgcccacagtgcgccgcgcccgctggagggcagcagagggccaggctcccggctcaggtctccggcctcgcggctccaaggaccccgggctccgcccggccacgcctcgtcctcccctattttctccttccttttcgcggctttccctcctctaccagacccggcaggaagaaagccacccacaaacgaataagcatgcccttgccctgcccgtgcgtggcactccgcatccgcttagctcttccccgccgcccgaaggcgggcgtctccccctctctgcggagcaggcggcggcggctgcgagtccgtgactcgaccaaggtcacgcagcaaagtcagcgaccaagctctgttccgcagacgccagggccaaagcccacactttccctaaagccccgagtgcacgcgcgtttccagaacgggagaactttggagacc

SEQ ID NO: 228514 - DNA, 180 bp, Homo sapiens
  chr2:96068500-96068680
  hyper
tgctgcatttccccggctggctgcggtcactggtggcagtgctcaggcgcccgccgcccttgaccttcggccccgcgagctctaaccctacagcgcaggaagatcggccgccgcggccaggtaggacgagcctggctgggtctaggccagaagggtgtccgtggcgccggtctcccgcgg

SEQ ID NO: 228515 - DNA, 586 bp, Homo sapiens
  chr2:96192240-96192826
  hyper
ccagcttgagctgccgccgctccccgagaggccgcaaaagcccgagggctccaagaactgcctgcagaggctcagggactgcgagctgtccgcgctgacgccgcgctccatgcggggcccagaggaccggggcgccctggaccacatggtcaggatgaccacgagcctctaacagccccgccggggccctcgcgtgccagactatgtgccccgagagcaccttgtgctgggggaagaggcggctggcggtgcaggaaatcctggcggcgcaggaaattccggcggcgcggcgaggggtggggggaggcaggcgcaggaggcgggcgaagaggagggcgcagagtagcataagccgctcggcctagcggccgctggctccacaaaggcctccccaagagccggcctcccacctgcccggctgccggggtcctggggctccgccgcccccgccccgcggacggccagcctcctgcccctgcagtgcctgcagcagagcagcttggggcccagcgtggtggtgcccaggtccgcctcagcaaggtgcccgcgcccaccttccaacccaaaaggccggcgcggaagggca

SEQ ID NO: 228516 - DNA, 237 bp, Homo sapiens
  chr2:96781977-96782214
  hyper
cgcccctcgggcggcgccgagggcgctggagccccatggcctggacgagcggggcctaggaggtcgggaacacccaggaccagcagccgccctcctacatcctcctccaccggtgcccggggtccctgccgtccgccccagagaagtttcccaagttgtcccgccgccgtccccgtcccgcccgggaccggagaaagtcgcgccctcccgccacgcggatgccgtacgctctggggg

SEQ ID NO: 228517 - DNA, 170 bp, Homo sapiens
  chr2:96874380-96874550
  hyper
cgggatggctccgcgactgctacaccaggcactcctgggcccgggcagcagaccagtcagccctgtggctcctcggcgacctccagcgggcgcccggggccgggatgcagggcgcgcggacagaaacgagacagacagctcaggcccagcagcacgcaagctcccgcgcc

SEQ ID NO: 228518 - DNA, 52 bp, Homo sapiens
  chr2:96931553-96931605
  hyper
ggtgcgacctgtgcgcagaaaagaccctccccacgccgcccactgttcctca

SEQ ID NO: 228519 - DNA, 194 bp, Homo sapiens
  chr2:96931839-96932033
  hyper
tggtagttcgaggcggtcccgcgatgctttccctgccgaggtgaggggagcgactacaactcccagagggtatggcggccgcagcagtgggcagttgagtttccggggcgacccaggtcctccggcggaagcgggagcctctgtcggccgcggaagcctggagtgggcggtacgcagacgcgcgcggtgagacc

SEQ ID NO: 228520 - DNA, 48 bp, Homo sapiens
  chr2:96987015-96987063
  hyper
aagctgcgtccacgcggttaggaagcatcgcttgggccctgggggatg

SEQ ID NO: 228521 - DNA, 104 bp, Homo sapiens
  chr2:96987423-96987527
  hyper
aggaaaggactaattcataatgcggtcactagagcctcgatgtgcccaggggagcgcccgccgagcgccagcgggaacagcgcatcgcggacgctgcagggagt

SEQ ID NO: 228522 - DNA, 499 bp, Homo sapiens
  chr2:96990882-96991381
  hyper
gggaggccgagcagcggagagtgtgtggccacggcccctccactctcccagcaaacccacgggggcctcggtgcggacagagacccggtgtggggaggccgctgcccctgcacgctgggccacgggggtttgggcggggaggagcttgtactgggtgggcggggaggagcccggacggcgggagcggctgcggcgcgcgggcgccctcggagccgcgtgctgggggtcgtaggggcccaccgcgctcagccagacgttcagacgctcggacaagcatggtctataacccaggaaaggggagcagggccactcccgcgggcggccccagcgatgaaccggacgcccccaccctgccgggaaaaaagcagtggcggtcaggccgcgctgtctctttaagatcgtgttcctactaacactgacggtgagtaacctggccctgggtcccgggagacatcccgaggtaggatgggcccttggcctcctacggataggcgggtga

SEQ ID NO: 228523 - DNA, 52 bp, Homo sapiens
  chr2:97001267-97001319
  hyper
attccacgaaagacgggccttgctcaccctgctcgacgctgggttcccaagc

SEQ ID NO: 228524 - DNA, 215 bp, Homo sapiens
  chr2:97073201-97073416
  hyper
gcctctctcacccccgttctcaccaaatacaggcacttcctctgagaggacggcagagggcgcagatttagcttctgtcctgcgaatgaagcacgcagtacaaggttccaaactgcaagtcaacagcaagcacgaagcagccacactggaaatggggtgcctccatcgcctggggctgtgggctgccatcctctgccaagcggatgctctgccac

SEQ ID NO: 228525 - DNA, 197 bp, Homo sapiens; identical to SEQ ID NO: 198324
  chr2:97173863-97174060
  hyper

SEQ ID NO: 228526 - DNA, 60 bp, Homo sapiens
  chr2:97175440-97175500
  hyper
ccaacaactccaacaagccctctggaccaatagctgcagcccccacggggccttgggggt

SEQ ID NO: 228527 - DNA, 637 bp, Homo sapiens
  chr2:97193015-97193652
  hyper
ggcaggggaaggcctcgggagggacacgacggtccggcagcagagcctgcggggctggaggaggcgccctcctctcagctgctcttcctgcccctttcggtggcgaagatggatggggcccggggctttcggcggggcccgaggggccggcgaggctgcggccctggagccccctgcctggcagccatttgggccccagggaaatatcggcgctttggctaaccgaattattctttcggtttgagccagctcccctttttgagtcagatccggcggcagggccagaaaagcgctttctgaaaccccagcgcggtcctcggtgggggtggaatggggtggggtggggggcgcggccgcgccgctgggcgccctccccgccctcccccctccccacccccagtcctccctccgctgcccgccccccaagcccggtgtcgccccctccgccccctgccgcatccccggagccagtgcccacaggggccaggcagcccgcaggggtcgctcacggctggtgtaggggcttggtccaccacgctagtacttcgggcaccaaaatagaaaaagaataacgcttggaaagaatctgatgtttccgaaggagcatcgaaaatcgccgttacgggaaaagtaaaac

SEQ ID NO: 228528 - DNA, 123 bp, Homo sapiens
  chr2:97303973-97304096
  hyper
gatccccacggcccgccactcccctcgaagccaacgctgctctcacccgcggtcttacggccgcgcgctcggccacggccggatccctaagcgcgtgcgcgttaacgcctccacgccccggcg

SEQ ID NO: 228529 - DNA, 243 bp, Homo sapiens
  chr2:97426260-97426503
  hyper
aaagcacttttctcgccctgcctgcagagcgggccacccctagctgcaggtgagggacgggagaggagcctcccacgtgcggccgtgcgaggccgaggaacaggaacggcgtagctaggagaccaggtcccggagaaggagagctggccccactggcagagaaaggcggggaagggcgcggaggcggagcactgggcgggtacccgctggcggctctcgcgcggcggcgctgctccaccttaa

SEQ ID NO: 228530 - DNA, 35 bp, Homo sapiens
  chr2:97427013-97427048
  hyper
tcaccgaggtggacgatgccgagaccctccacaag

SEQ ID NO: 228531 - DNA, 142 bp, Homo sapiens
  chr2:97483019-97483161
  hyper
ggcgtcctggccagcatcatgcagagcggccacacgcgcatcccggtgtacgaggaggagcgctccaacatcgtggacatgctctacctcaaggacttggccttcgtggatcccgaagactgcacgccgctcagcaccatca

SEQ ID NO: 228532 - DNA, 78 bp, Homo sapiens
  chr2:97523294-97523372
  hyper
agattctgctccccgggccctctctcaaacacctgagcaggcttgtgtctcccaggggaggtcgtcccccgctactcg

SEQ ID NO: 228533 - DNA, 137 bp, Homo sapiens
  chr2:97523809-97523946
  hyper
tgatctggccgctcggcgtccgcggctgtcgccctagtcccgccttctcgccaaagctgaccaatcaaacgcctaggccttagctcgagaaccaattgcaacggtagggcggggcttgttgcgcccggccgtgcccc

SEQ ID NO: 228534 - DNA, 98 bp, Homo sapiens
  chr2:97534367-97534465
  hyper
tcatcctgttcctcgcactgcctcctccgaaacaccagccctctggcggaggggcggtggggggaccgagctcgggtcgagtcggggactccggcggc

SEQ ID NO: 228535 - DNA, 69 bp, Homo sapiens; identical to SEQ ID NO: 198332
  chr2:98261938-98262007
  hyper

SEQ ID NO: 228536 - DNA, 145 bp, Homo sapiens
  chr2:98262416-98262561
  hyper
tcttgggagtgggcgggctcgagggctgggaggaagccgaaagctgaccgagaggagaaagaagcccgcccccggaagtccctcctgtctctgcagcttgttcccggaagttttgctgctagtcgcggacgcaatggcttcaagg

SEQ ID NO: 228537 - DNA, 133 bp, Homo sapiens; identical to SEQ ID NO: 198333
  chr2:98280679-98280812
  hyper

SEQ ID NO: 228538 - DNA, 50 bp, Homo sapiens
  chr2:98612517-98612567
  hyper
ggccccacctcctcgtcccgctctcggaggcctgcggcttcacggccaga

SEQ ID NO: 228539 - DNA, 804 bp, Homo sapiens
  chr2:98703014-98703818
  hyper
ctcagctccgcccacgtccagtggctgagctacaacgaactgccccacctcttttaaagcgtctttctctgaactgtgcaaggaagagagcatcgcctgacagtggtgaggtgaaaattaaaactacacaggggtcaatgctctgctgaaaagtatgaaaagaagttcgtttgtagcgtttcccgcagtctcctcgcctctcctcggcctctggcgccttcctcccctgtctgctcgcaccctatatttctaccccagctcatcagtgtatttgtttgttaattcattcattctttcattcatattctccgctgttgttaattttcccattgacagtaggcgcaaggggcaacgccactcgccctgtccctctagcgtggcctctgtttgggggtctggggtggaggtcgtcccggcccgggtggttccggacgccggctttccgcacctggctcggtgacggcctcggcgccccgccctcttggccacggtccgcagccatcgccccagtgagggcgcggtctgtgggcggggccggctccaggagccgcgctgtgattggccgtgtccaggcaaccgcggagacgccgtcgtcaacagaccgcgctcggaaccagaggcgcgggtcacagagacctagaacagctggaatccttcgcccccggcgcgcagccttcgcccgccggaatcgctgccttatccaccagcgggatgcttacctcgcccgccctctcgggtcaggcgggcccgggaggatgggagggtggctgctgagcgggagccgccacgtcttccacccgacat

SEQ ID NO: 228540 - DNA, 1497 bp, Homo sapiens
  chr2:98962790-98964287
  hyper
tgcctctttcggaccgcctttgaggctccagagcctcaccttactttcccacggagagggaggccacaggctccttcagcagtcgccgagcagagtcctgggccgggagcgcgggggagggagcgagcggaactgcgcctaggaggccgagggaggaggcgctccgcagaccctggcgcgccgcggagaagctcaaactttggcagggtaaggatttttaggggctcttgagctggaattttttggggggcgccgggaggtgtgctggggccgcagaccccatacaggaggtaagttagagaaccacacgcaggggagggatgctgctgcttccaggggcgggcgcggcgctgtccgcagcccccggtgctgaaacgggccgcgggctggagagaaagtgaaaaaggatcggctacggcctcggctcccactccccggctcccatacccctccagtccagttcaaaggacaggaagccctccccgtgctccccaagccgatcgcacccccttttactcacgtcccacagccgcgctgggccgagcccgctgagccgtcggggcgggaggcagaaggagcagggctggctcccgctggggacgggtagggcttgcagccgcgaccccaccccatacatttcctcctgtcacgctgtccccggaccgccagtccgggaaggacccacttccccggctccaagtcgggagcgggcgccgcgtcttctcgagtccgcgccgcgccgggggaggttgagtcagtggcctggagggagcagggccgggggaaggcagcggcgaaggactgccccccaacccaggggactattttcccttggggattcaaagagaaaggtaggctgaggaggaggcgagaattaaaattcttttaggagtgcgcggttactttttttaatgataaaatcacacccgggatctcggacgcccggggcttagtgctcggtgatggaggagaaggggcggcgggctctctgatcctctgcaatcccctaaccggataaaggcgccgggctcccagccgtcaggcttttctctttagctcagcccgcggcccctcccgacgcccctgggggccttggcgcgcaggccctcgcagtcccgcaaccccgggccgggtgattcatttttctccctgtgtaatctccctactgagcggcgcagctgggactttaacttcggccctctgcagcgggggtctccggttggcgcggcgcgtgagggaggatgaatggcgctggaacctagaggacctggagccggcgccccggcctctttggcctgaaccaggtgcctctgacacgcagtccgccggctcaggcctcgccggaagctggcgggagcagtcccttgcagcgaagcccggcaccccgacggcagacgctccccatcacatcttccaaaggggcgaggctgggatcagcaggaatggcacccacccgggttcagactccatcccggagtggacagctcggtgccccta

SEQ ID NO: 228541 - DNA, 156 bp, Homo sapiens
  chr2:98964317-98964473
  hyper
ccaacacatacacactttcattcatgaaaaccagcaagaatagtgctgtctgggcacggagtccaatgtacagcgtgcgttcacgctgagaattcatgggggacgcgggtggttgggccgggagaggagagatggtcacttgtgtgtggtatccac

SEQ ID NO: 228542 - DNA, 288 bp, Homo sapiens
  chr2:98964503-98964791
  hyper
tgtagaaaagtcggccaggtcagaggacccagatgggatttcactaagctggtgggagcttctttgcgttctttggggtagggggaaggacaggaactccccctgcttcgcaccaatgcccaaacaccgcacttcctcttcagcctcggttcagccacagagaggggcctcctcctgtgtagatgcccggaggggaggagcggtggttcttggggtgactggctggtggaggcaggatcttaatcactttagctgggactttggccgtgactacgtgtgcacttgcct

SEQ ID NO: 228543 - DNA, 235 bp, Homo sapiens
  chr2:99061163-99061398
  hyper
gtaggaattggcgcgagcagctcggtcaccggccctactgtctcagagggcggacccagctcgggctggtagtggggcgggggtcgcagggcgcgggccgggccctcagcgcgcatgcgcgacaagggggcggggccagggcggggctgcgcccggcgtctagagcggcggcggctggctagggctgcggcgcgcgtggagggttcgctgctggtttgccgccgggtcgggctcc

SEQ ID NO: 228544 - DNA, 35 bp, Homo sapiens
  chr2:99224744-99224779
  hyper
caccgggagcgcccggccgcgctacctggaccaca

SEQ ID NO: 228545 - DNA, 401 bp, Homo sapiens
  chr2:99346431-99346832
  hyper
ttttcgggtttacacgtgtgggttaaagaaatctatgtcaagataacctgttcatcaaactgttttttaaacattcagaaaaagaaacataaaccacaaaacgcatatttttattctaaatttacagtctacgttccaacgaacgactgtcattatcttttatcaaataatctgtccaacagcaaaagcacaacagcaaaatacgtggaaagcattcaaagcatacattgtgcctgcttctattttccaatgcggaatgtaggcaatgaaaccgctccagagaaacacactgttgcgaggaataaaggcgggtgtgcaagtggctcgactgccagctcagaaaagctcgcctccgagatgtcacctggcacacttggtggagtcaccgagacccagcctca

SEQ ID NO: 228546 - DNA, 659 bp, Homo sapiens
  chr2:99438951-99439610
  hyper
ctggcccgttccagcgggcgggagacgcccggacgaggccgcgctcggcacgaggacaccgagaacttcttcgcgcctcgcagctcggcaccgcccctctccgccttccgctctggcgccgccctctcggcgcccgccggtggcgcctcggctcgctcggccttggggcgctccggggcggcggcctctgcgtcgagggaaccggggccgggctccaccgggggagactccgcagcggcaagcggcggggacgcggcggggccctcgctggcggccgcgggccggtgtttcaggcagctcttgggcgccggcgggctcggggcgggcgccgtggagggctcggtcccaattctctcgggctcggtccccgctcctctctcgggctccgtctccgcttctctctcgggctcaggcgccggccctgggggccccttctcctcatccgggagcacgggcggcgtcggctccgcttccttcgggacactgcgttctggcccgtcgcgagcagagggcgcctctgaggtggcggcggggtcagtctcggggggagtcgtgtccccctcagggatggcggtgggaaacgggctcgcgacgtcttcgggagcacagaccacctcctccgccttgtccgtggccggggcacacgggcctgcgggggg

SEQ ID NO: 228547 - DNA, 610 bp, Homo sapiens
  chr2:99553203-99553813
  hyper
ctgtgggtcctgagcgtctccaggctaattagggaagctgccgccccgtctggaggtgattcatgggtgtgacaccggcgagtgtgggaagaaaggcagctgatgccgtctcagctgcgctcgcctttctttattttctttctttcttctttttttaaaatcctttttcttgtaaagacagggctggtccatttagggagaccgcgcacggagggagctgccttgggtggtcgcccagcgaatctcctccggagcccgagccgcggctttggtctgcggatggcacagcccggcgaccccgtcccggcctcttccccggcggtgcacgcccagggccaggcaggcgagaggcgcgggagtcgcgtcccagcagggagcccaggctgcgacgagtcctcaggggacgccttcaacccaggctggaagagatgatactaacgtcagacggggagtctcgggtgtcaccggacgccagaatgagcggcgaggtccgcattgtttggaggggatcacgcggaatccgcgctactccgcgggacgctgggtccgacggctagcgccgcgcacactggaggcctggaaaagccgagctgctcggctgtcggaggcc

SEQ ID NO: 228548 - DNA, 80 bp, Homo sapiens
  chr2:99770997-99771077
  hyper
tgtaaagacccagcgtaatacctgtatgctcaataaaaagtatttgctggtactccttcctgcccgtcgtgtgacctgac

SEQ ID NO: 228549 - DNA, 293 bp, Homo sapiens
  chr2:99797344-99797637
  hyper
cctgcggataccgcgactccgaatctagttctactgcccgctttagcacagtggctgcagctgtgctctgcgggtcctgcctcagcccggacttcgccataattctggaagttctcctccgcctcaacccaggatgaagttgagcgggtctgctgcgcttccgggaagtggtcatgtgatacccaggcgcctgcgctctctttctagggactttcctgagtgggagggatttcgccggaacaaaaatgcctcagtttggaggtcgcgctcactgcgacggcaggctttgagtg

SEQ ID NO: 228550 - DNA, 108 bp, Homo sapiens
  chr2:99952955-99953063
  hyper
ccgggtacacggccgaactggaaggccgcaaagcattgtgggagttgcagtttcttagtgcgcaggctgtcgtggccggactttctcaggagcgtgcttcagtattca

SEQ ID NO: 228551 - DNA, 232 bp, Homo sapiens
  chr2:99953660-99953892
  hyper
ccgggttctagaacgtggaaaacccgcgggtgtcggctcgtggcggacgcttgagggcagggggcgctcgggctgctgcctggtcggccggtcaaccggagacgctctacccgaagcgcagctctcgatgagccgcgccctgcgtcctcacgccgaggcggctgggcgatgcgcttgcgcactgagaactcacaccatatgtgtcctgttccagtgcgcgggtctgtggaga

SEQ ID NO: 228552 - DNA, 1424 bp, Homo sapiens
  chr2:100937759-100939183
  hyper
ctaagcctagacaaagctctcgaaagcccaaagcctcgggcccaccggccagctccccaccccgctgctgggccggacaggtgtaggggaggcggacccgccccgcagccgactcacccagctccagggcctggtcgcacctgagcagcgcggcctccggctgctgctggcgctgcaggctccgcgcctggcctgccagcctgcgcagccggcactcggccgggaagcacttctccagcaggccgctcagcaccacgttcacgcgccgcacctgcggccgcgcgggccctggctccacgcagcgcttgcagactgtgagcccgcagggcagcgtcaccggcttatgcagcagccgccggcagcgcgggcagccgagcaggtcgcggggcgcgcggggctccggggccggccctccctcgccgggcgcctcgggctcgccgcccgggttctccgcggacagcggccggtcgcgcaggcccacggcgcgcaccaggccgcccgccagctcttccagctcctccggccgcagcgccccgagccgcgcggcgccgcggaacgcgcccagggcttcggggaggcggccggcgcgggccagcgcgtcccccagcctcaggcacaggccgcggtccggctgcgccagcccggctagcatggagcgaaagagctcggctgccatctcgtagtcgcccgcgcggaaggcctcgtcgccctcctctaagcgctgggcgatcggctccgcgcggtcgcagccaggacactggggcggcggcggcggcgggaccggctcggggctcatcaccgcggggctgcgacgacgcgggtccggagcgaaggcgcggagcagggaggatgcgctgctgctgggaactggccggcgggagcgcggtctcagccctcgccagcagccacgcgcgtctgggggcggcgcgctgcgagcggctgagaccgcgggcgggggcgggcgcctggcttgggcagcgtcctcagcgcggtgtgggcggcgagccccgcagggctgcaatcgttccggggtgggggccgggacaggcaccgcgggcgcaatctgagcccctgcccacgcgcagcggcctctcagtcccgccggcttaggtaacccaggtcgctgcggtaacgcagtgaccgcgctccaggtccgcgtctcttgcgatgcttcccccactcgcctgagggctcctgcgcgactgcgcgcgcgtcctctgcctgccgcctccccgcagaggtgccggggccctgggagcaggtggccttggccgcgggctgctggcgcgccggcaccgcggcacctgctcttccccagaggcctggccgcccccacaacctgtggctccgcttaagcaagaacccaggaaaagtcaccaaacgcatcacgcatctctagcttcgacttaggaaattgtcctaaa

SEQ ID NO: 228553 - DNA, 82 bp, Homo sapiens
  chr2:101033436-101033518
  hyper
gactcccctcgcaccgaagctgcacatgctccttcttccctgccttcctctgcatgctccttggacccaagctgaacccttt

SEQ ID NO: 228554 - DNA, 371 bp, Homo sapiens
  chr2:101179132-101179503
  hyper
aggctagtcagagcgagacgtctttacaggtttgggccggcagctggaaaaggcacacggccccgggctcctcctccacccagccccacccctcctccgctgaagaccagccctaataaggcagccaccagaattagaaccaggtcaagtgcactccgagcaggacagtaggcagatcctatctggcgcatgcgaacgcttctgtgccagttccttgaagagcaggcgcagactcaaggctgttgcttccgcccttactccccgccgctcgtccctgggcggggcgaaggctgggctgggggaagaggcgtggcggcgctgtgcgcgtgcacaaaagagagctgaggggcgggggcgctgcggcacagctg

SEQ ID NO: 228555 - DNA, 1320 bp, Homo sapiens
  chr2:101435066-101436386
  hyper
cccccagtccaccgcgggggcctggcgcgcttggggcaaaggccctaggagaccccttctggccacaaaatcgagtatgacagaaaagggccagcgggggcgctttccttccagggccacttgccggaatgtaagagggacggagagacgtccggaaaaggctgccacgctcggagcgctgcgccaggccaggcacctaggccaggggagcggagacctcgtgggagcgggcagggggacctttcccctctcccgggcttccacccaggcgcctccccgctgtgaacgccgccgcccaggtgaaggggaaaccggccacgtttccggacctcggcggggcacacggtctccggttttcaccggctctgtcttggagccccgaagggcatcagacagcagccccggcacccggggattattcctgtacctctgcctccctccgcttggcgtttgcgggaaccttggtaaaatcctccctgtttctcgcgcgcgcctctctctccagcttctttttcttggattctcgcctgtctcctcccacagaggaaaaaaaaaaaaaggtcacgtatgtttggaaaaatatgtaggtcagtggaacatttcctgcactggtgcaaaaggagaggagggcagcggaggaggggagggagaggcagagtggagctccaagtgcccgctcctggccgcagccccacaccccacgtgcccctgccggggaggggggcaattagccggttcctttccatccttgacccattttccggaccagctacgttcgccttaggacaggcactggttattcctccccagcagtcgctgctgtcctccgccgaccaccgctcgcccgcatcttccccgacccccgcctcccacctgcccccgggccgcacccccgccgctcattgagaaatcgcagtggtccccgcagagacgcgctttgtgccctgggtcgagacctgcgcgcaaccctgcccctggaggacagtgtggagggggtgacagtcgcgtgctcgtcccccttcatcccctgcgcgggacagcagggtggcggcccgcactgcgagggtctacactaggcgggggcggcagattccttgttccccccgagtgacaactttaatgggacctcggctggcagcctctagtccacttgcctctcctctgggccggctcacctggaagcacaacccccccctcccccagccccggcgcccaaccccgaccctgcgccccaggcccgaccccgccgcgcgtccctggcagcccagcagaggctgcggcggcctggggactcgcgggtgtctgcgccgcccagggaag

SEQ ID NO: 228556 - DNA, 1021 bp, Homo sapiens
  chr2:101436606-101437627
  hyper
ggaagagtttgccgcgcgagcagccggcctctcgcaggagccgagggacccgcgcggctgcggcccaggagcggcggccgcggagcccggagacccgcagccgcggcggcggcggcggcggcggcagcagctagagcagcgcctcccgccgccgcccgggaggagctcgccgcgcccgctcgccgcctcgtctcccagcggcggcgggaggcgcgtctccccggcccagtccgcgcccggccccgcggggccgctccggcccgctccgaggtaaggggccgcgcctaggggcgcgggggacccagggtgggtagtacgtgcgcgcggggtcgcaggactcggtcacctgctcgccagcgtggaggacgcgcgggggcggaggggcgctcaggcgcgaggctgcgcggcaccggggaccccggacgcgggggcgcggagaggtgggttcccctccacagtcaggccgctgggggcttcgcgtcctgcaggaggtagcaatcgctgggccggtgggctccgggcgcgtctcgacgcagaagacagaggactgggcatccgagcctcggaatttgggggtcctcggggtgtccgacagggtggagaaggatcgtgccccagggcaacagctttggggattgcccgtggttgtcttcgagacccatcgcgctaccctccgaaacgtcgggcgtcctggacccccggagagtgcggcgtgcgcgccctgggcccgcggtctctcggagtccctgggtcggaattggttccgggccggattgggtgcggaatcggtgcccccaacccccgtgtgcgcagacagcgtgcagcctggctcctcacgtcgctgccgcccccccaccccaactccggagctccccaggttggatgtatgcgtatggttttgttgggagatgtgcccctttcccagccgaggagggacgcacctttgacctttctgaagagctgggcaggtcggtaaccagggaagggacaggcaccacccggctaaattcagaaccagtcc

SEQ ID NO: 228557 - DNA, 339 bp, Homo sapiens
  chr2:101767139-101767478
  hyper
gcgcgcccccagccacgacaccacctggagcctccggcgcctccagatggccgagtccgggctggctcggcgcaccccgctgtcacctggccccacacagcagcctcgctgctccagggcggccccgagccctccggccccgctccacccggcgtttctccttcgattcccaagtcgagtccggcctccagctcaccgggccaggcggcgaagacacctgcctcgcccggaaaacgcacgcgcccgggagccccctctaccaccacctcgacgggagcccgcgggagaaacgcagaaaaaaggaaaacaagcccgcggcagggccgtccgggccccgcg

SEQ ID NO: 228558 - DNA, 207 bp, Homo sapiens
  chr2:101924527-101924734
  hyper
tgaagaccccagcctcggctgccgcgaagtccccctcccgtcctcgcgccccggcctgctcacccgcgtgagacatgggcaaggtgatgttcccgtagcgctcctcattgtagaggacgacggccgaggcgttcctccgcgccgccaccagcaccttgtccttgaaggtgcagcccccacgagccaccagggcgacccagggcgcgg

SEQ ID NO: 228559 - DNA, 992 bp, Homo sapiens
  chr2:102003274-102004266
  hyper
ctccgaccctcccccgacttcgccaggctcacggaggcaccatcgccttccattatgtacagtgtcgagggtcccatccagggcaccgggcacgtctggtggacccggatctcagtcccgagcggtcgcgagcacgtccctgtccccgtcccccggccgccgcctgaatgccaggccccctcgcgctccccgccgggcgctcaccttcttgtgggtggacacggtggccaggcagccccagacgctggcatgggccagggagcgggcggtggcggcgcgcagtctagggcccgggggcgcactggccgtctggccgccctcgcgccggtaggagaacatcccgggtggcgcggggggcggcctggcccgggcggcgcccgcccggggccgcaggtgcgcgtcctccttgtgggcagaggcggggaagctttgctgccagatgctgcccgaatcctctagcagcgcgggcatagcctcctcagtggaggcgctgtccagctcctcgtccacctcgttggtgacggcccaagacacggagctcacgatcacgtagcccgcggccggggacagcagggcgctgcagcacagcagccaggagaggcgggtccccggccgcgccggccgccggccgcggcgcacggacatcttgcaggcagcacgcccggccgccggggccgccagcagcgctagtgccggggagcccggcagcgccccactgcggcggaagcaaggagcccgagcccccttcccgcccctgcaggatccccgggcgcggtcccccgcgcgagtcccggcgaatccctgcagccgcgcgcgaagctcagaagtccaggctcgcagaagaccaggttccacgcacacgccgcgcatcctgcggagtcctcctcgcgcgccaggtcccgggatgggttcgtttcctgcaggatggcacaggttccgcagccagagggtgggcgttcaaatcccggcttaatacacgcgtctgctcaaca

SEQ ID NO: 228560 - DNA, 818 bp, Homo sapiens
  chr2:102090423-102091241
  hyper
gaagtcacagatgggaagcccggccccatcgccgattcgggcccggggcttttacgcgtgtgcgtgcatggcaggtccctccgcgctgcggcgggcgagcatcagaaagcgctgggcctggggccgctcctcacacccggctttgacccggcgtcccgagggcagccgtagcgggaaccacgcttcccctccccggccccacctcctccatcccagcgtcccaggcgcctggcggctcaccactggatgacgccgctgtgcgggccccggctaccctcgccgctcgacggcgaggccggcaccccctcggccatggctcggccccgggcctgcagcaccgaggcaggcagcgagcggcggccgtgggcggcgctgggttgcaccggtcctgctaccgccgctcctcggtgtttactttagaaaggagcgcgcggggggcgcgcggggcgcggggcgggagcccagtcctccaggcccgagcccgggggcgcggaaggcgcgcggcgagtacgggaggccacagctccccaacccccgcgccccgccgaggatgcgcggaccccgccctgcatcctgcggtgtgggctggagctgcctcccgctctcacccagcgcccttcccaccggcgtagcaaccagtcaaacagggacgcgaacaacaagcaccaacttacaccttttccaatctggtcgcggtgttgagtccgtgggtgtccttgacttgcttgagcgttggagttattcaggcagttttcaaaaatattgataccccggctgccgctccccatcccagccccgccccaccccaccccaagagg

SEQ ID NO: 228561 - DNA, 41 bp, Homo sapiens
  chr2:102314451-102314492
  hyper
ggagcgcggtcggcggcctggtctgcggctgagatacacag

SEQ ID NO: 228562 - DNA, 159 bp, Homo sapiens; identical to SEQ ID NO: 198355
  chr2:102314987-102315146
  hyper

SEQ ID NO: 228563 - DNA, 68 bp, Homo sapiens; identical to SEQ ID NO: 198356
  chr2:102637363-102637431
  hyper

SEQ ID NO: 228564 - DNA, 59 bp, Homo sapiens; identical to SEQ ID NO: 198357
  chr2:102637461-102637520
  hyper

SEQ ID NO: 228565 - DNA, 128 bp, Homo sapiens
  chr2:102720910-102721038
  hyper
ttaccgtgcagtggcgggtgttggtgtttcttaagggtctggcacgtttgctgagtgattctggctgtctgcctggctctgagcttcctgttcatagttccccagatgtgtcacggccgagggattaa

SEQ ID NO: 228566 - DNA, 196 bp, Homo sapiens
  chr2:102758958-102759154
  hyper
gaggagccgggccgcgactcgagagcgcccggcagctctccaatgctttggaaccggcgggacccctgcgggctacccggggcagggcggtgtccgcaggggtctgtccagccgcgcctgctcctccgggtggagagttgggacacccggccagctcgctcgcagcccgcggactggcccagccgagccgtctccg

SEQ ID NO: 228567 - DNA, 63 bp, Homo sapiens; identical to SEQ ID NO: 198358
  chr2:102972744-102972807
  hyper

SEQ ID NO: 228568 - DNA, 45 bp, Homo sapiens
  chr2:103095718-103095763
  hyper
gatgatctttggggaggccctgctcaatgatggcattactgtggt

SEQ ID NO: 228569 - DNA, 1296 bp, Homo sapiens
  chr2:103235356-103236652
  hyper
aagaggagagaacaggattccgattccgtgggggcgtgggaacactgagttccgcgcagggagtttccctgttcagagcaccttgtgcgcgagttgataactctcggaaaggaaacaaaatttggctttcctaaactttctgtacgtccagagaatcccatgccttgtcttggcctccgcagcgccaggctggggtgacagcactcctcctccaccggcccgggcttctcctccggaccgcgagcctgtggcgcctccccgcgcgcccagcgcaccggggtgtccccttggaggagcctgcgggggcgggggaggagggaagggcgcgactcgtgggtcgcgctggttccttcactggatggacgtccgacgctgcctccggggcggagacagctccggccaccatgcgcccgttgcggcgattccacccacagttcgctggctctgggggtggcgggtcttggcgcgcggtgcctgcgcgaagggagggcagccatcgcccccgcggtcactggggccccgcgttccccgcgggctcgggcaggtgcgcggtgtgccggccaggtccccttgtcctcctgccctgcggcttgggcgccgcgcccgccccgcccccgcccgcgggccgccctgggcagggcctgccgctgcggctggagagcagcgcaccggcatgggcaggcggccggcggcggagggcggctgagggctgctgagggtacgcgcagcggcctctcgtcgccctgcacgtgcctcgccaggcagtgcgcctgctcgcagcgaggacctagccctctggttgcagagacccggtgccgcagcagcggcgggtggctgtcgctgccctgccctgcacggggcagggcggagcgggctgagcagcccgggcgcgatgcgttgagcgctcggagggccaaccgccggtccccttggcggcaaccggcggcacccatggaaccactgggcaactggaggagcctgcgggcgccactgcctccgatgctgttgctgctgctcctgcaggtggcggggcccgtgggcgccctggcggagaccttgctgaacgcgccgagggccatgggcaccagttccagcccgcctagccctgcgagcgtggtggctcccggaacgacgctgttcgaggagagccggctgcctgtgtttacgctggattacccccacgtgcagatccccttcgagatcaccctttggatcctgctggcctccctggccaagattggtgagcgaactggacttgtggggaatgggagggggcgatctcggggggacacctgg

SEQ ID NO: 228570 - DNA, 106 bp, Homo sapiens
  chr2:103353457-103353563
  hyper
cacatcatcaatacggtaagcacacaccagtttgtgatgataatgatgatgctctttgtttcctctgggtacagaccctgctgcccctatcgttggaggacaggag

SEQ ID NO: 228571 - DNA, 89 bp, Homo sapiens
  chr2:105458975-105459064
  hyper
aagagggagatgcccgtgtagagaaccgaggaggggggctggggtagaataatcagctctaaggttgcagatttagatctcaaggctga

SEQ ID NO: 228572 - DNA, 278 bp, Homo sapiens
  chr2:105460204-105460482
  hyper
ctggcgggccctagggtggagacccgggcggggttggggggtactcgcgaatctgctgcgggcgcagcgttggggtgtctggtccctgcccagccggtaggccgcgtccgccgtcccactcagtggggctttgcgcccccacccatgggagttgcccgttccgcagcagagttcgaaggggaaagtgggggccacgttcccagaggaacagagttccagacctctcagggcactgatggggactccgtcggacccacgggttccgcaaacactccaga

SEQ ID NO: 228573 - DNA, 52 bp, Homo sapiens
  chr2:105460700-105460752
  hyper
cagatgacttaaagcgttccatttctccgcgatccaattttattaggattta

SEQ ID NO: 228574 - DNA, 310 bp, Homo sapiens
  chr2:105460782-105461092
  hyper
ataatgctttgattaatgtaatcctggcccgggatccgccacatgcccctcgaccctctcccaagagaaggaccctatttgacaaacaataacagagcagtaactcttgcaatctgcccacacctttgggggtggctggggagagggtgatacacgttcacacaccgcttgctaaatgcagtggcgagaggagggagcagcgtctacatgaagcgaacttttcaagcgcagagccctgactcccaggcgcgggggctcaccgggaggggcccgggcgagagagcgcgtgggtgcgtgagtgcctgtgtgc

SEQ ID NO: 228575 - DNA, 42 bp, Homo sapiens
  chr2:105461272-105461314
  hyper
cctgcagctgccaaaagctcgaccggaaacctagaacatggg

SEQ ID NO: 228576 - DNA, 49 bp, Homo sapiens
  chr2:105461854-105461903
  hyper
gttagggtgactcagcgtttatctcttcgcctccctgctgccccatctc

SEQ ID NO: 228577 - DNA, 38 bp, Homo sapiens
  chr2:105462223-105462261
  hyper
gcccccaaaatggccggagattcgggagaagtcgcttc

SEQ ID NO: 228578 - DNA, 68 bp, Homo sapiens
  chr2:105468471-105468539
  hyper
aggaaaggaaaacacggggtgctggcaccgactattcaaacgtctgcacctggagatctcagattgat

SEQ ID NO: 228579 - DNA, 1581 bp, Homo sapiens
  chr2:105469259-105470840
  hyper
cccctcccatcccccttaactctttcagctgggttagagctgagaaagcatttgtcgccgccagccccatccaccacgcaaatccatctgagacagaaaggaaagaaaaaaaagcaccaccatgcctaagaatagagagcgagcaaacccccccaccgctaatcacacacacacacacacacacacacacacacacacacgaggaagcggtggagcagagaagggcgcggctagccgatcccggttctttcgcccggctcctgctgccacagggaattcctaaagccattggggtcgaatacacttacgatgaatctatgggggaaggtcggactgattgcttttcaaatacatcgcacggctccgctgaccggcaccctccaaactcacaagggcacgcacgctacttgcacgaatcccagaggagggaggagggaggaagggagggagagcgaaggagggagagagggggtggaggagccagggagcggcggcagcgagcggtccgtctcgcacgcgcgggcaccgcgctggtcctgggctgcaggtttcccagatgatggcatccgagaacttaaacaaagggggctgccgccggcgcgcaacggctgcggaaagttgcggtggcggatttccaaggagcgtggccacgaccagagctcttggcgatgcgagcccccgcttcccacccccgccgatcagagaagggggccggctggtgaagggaagaggaaactttgaaaccactggggacacatctgtctataggtattagcttgaatggtacatccgtgccgcgcgctttacaaatctctggcggggcgggggtaagggggtgagcaacccgacgcgtactaggtggggtgggcaggttgctatttttcatgtttcccccttcgttttccttctgattctcttcccccctctcgtccctccctcccttttatctcccctttcttccccccgcccagacctattgcgaacgcccagagccgccgagggaacgccaacgtctgggccggacactaagagttaagatgtggcggagggggcggcgggggaggggcggggaggggaaagtggtgagggggagggaggctggaggacgacagatttccagcttctacgacgctctgcctaaattaaaaagcaaccaatcggaacggccggaaggggggcctcgcgtcctgagccagtcattccgagcctgccaatcacccagcgggtagccaatcagcgggggccctggtgctcgacttccttgtatttgggaaagtgtggtggtgggtgcgcgctcgcggcggagggtaaacattcgacagtccccgctctgagagggagggacagagagcgaactgtcagatcggagcgagagcgggcgcccgagagagggagagagagagagggagggagaggaaaagtgagagagggaaagagagcgcgaacgagggcgcagagcgagctcctgctgcaactctgctccagcacggccagcgccagcgcccgccgtcggtgcactctacgagccgtgcagcgtgcccactggagttgttgtgtatcaaggatcgatcccctatatgc

SEQ ID NO: 228580 - DNA, 113 bp, Homo sapiens
  chr2:105471040-105471153
  hyper
gactgtgactgttgcgaggagaatgaaaaaggactcttgtttcagaggcaaccaagagctccggcaatagcaacttcagagaaatgcaccatcgcaagaagttttcctaggac

SEQ ID NO: 228581 - DNA, 2291 bp, Homo sapiens
  chr2:105471693-105473984
  hyper
aggccggccggcgacccccgcgccctgccgagcggccttgcagctgcagccgggggccgcggcggcggcggcggcggcgggggcggaggcggcggcggaggaggaggcggcgaaggcggcggggccggcgggggcccggggcgggggcggggaaggagggggggaggaggcgggaggcggggggcgcggcggcggcggcggcggcggcggccgcggctgctgctgcggcggcggcggcggtggtggcggcggtggggtggcgggagcggagcggcatggccacggcggcttctaacccctacctgccggggaacagcctgctcgcggccggctctattgtgcactcggacgcggcaggggctggcggcggcgggggtggcggcggcggcggcggcgggggcggcgcagggggcgggggcggcggcatgcagccgggcagcgccgccgtgacctcgggcgcctaccggggggacccgtcctctgtcaagatggtccagagcgacttcatgcagggggccatggccgccagcaacggcggccatatgctgagccacgcgcaccagtgggtcacagccctgccccacgccgccgccgccgccgccgctgccgccgccgccgccgtggaggcgagctcgccgtggtcgggcagcgccgtgggcatggctggcagcccccagcagccaccgcagccgccgccgccaccgccgcagggccccgacgtgaagggcggcgccgggcgcgacgacctgcacgcgggcacagcgctgcaccaccgcgggccgccgcacctcggacccccgccgccgcccccacaccagggccaccctgggggctggggggcggccgccgctgccgcagccgcagccgccgccgccgccgccgccgcgcacctcccgtccatggccgggggccagcagccgccgccgcagagtctgctctactcgcagcccggaggcttcacggtgaacggcatgctgagcgcgccaccggggcccggcggcggcggcggcggcgcgggcggtggagcccagagcttggtgcacccggggctggtgcgcggggacacgccagagctggccgagcaccaccaccaccaccaccaccacgcgcatcctcacccgccgcacccgcaccacgcgcagggacccccgcaccacggcggcggcggcggcggcgcggggcctggactcaacagccacgacccgcactcggacgaggacacgccgacgtcggacgacctggagcagttcgccaagcagttcaagcagcggcgcatcaagctgggcttcacgcaggccgacgtggggttggcgctgggcacactctacggcaacgtgttctcgcagaccaccatctgccgcttcgaggccctgcagctgagcttcaagaacatgtgcaagctcaagccgctgctgaacaagtggctggaggaggcggactcaagcaccggcagccccacaagcatcgacaagatcgcggcgcagggccgcaagcgcaagaagcggacctctatcgaggtgagcgtcaagggcgcgctggagagccacttcctcaagtgccccaagccctccgcgcaggagatcaccaacctggccgacagcctgcagctcgagaaggaggtggtgcgggtctggttctgcaatcggcgccaaaaggagaagcgcatgacgccgcccgggatccaacagcagacgcccgacgacgtctactcgcaggtgggcaccgtgagcgccgacacgccgccgcctcaccacgggctgcagacgagcgttcagtgaagccagggcgcagagcgaagagggccgccgccgccgccgcctccgcagccgccgtcagcaccgccgccgcccctgccgccgccgccgccgccgccgccgccgctgccgccgccgcgccgaccctgcacctgggccgctccgggctccagcccaggcccatccgccgccctcccctccacccagagacaggcatgcccgcccttggaggagaaaacgcgggagaaacggaccaaggaggcatttttgcagtccaaggaaggaggggccaaaaaataaaaagcataataaacacccagactgttttgtatacatatataacaaacaaaaccggaagagaaaaagggggcgatcatgagatctcgttcatactgtggtggtgtttcgtttttgtttttgtttttaaagaagggtgaagatgcctgacgcacgaaaactgcactcgtgaggtttttccaccctgagatgacctacacggcagcggtggacagcacctgcctcgtcttctcctctttg

SEQ ID NO: 228582 - DNA, 169 bp, Homo sapiens
  chr2:105478381-105478550
  hyper
gcagaagcctctgcgtttgcatcctgaactttgcagcctaggaaaggaaatagtgcgcaggctggaggagctgggggtgggggcagcggagatagcaggaggggtacttgtgtaatcagattctttgattttgttagcctggctcatggcctattaattagattactct

SEQ ID NO: 228583 - DNA, 134 bp, Homo sapiens
  chr2:105478910-105479044
  hyper
ggcctgcctccggtgaaaaccccggatcagaagaggcggagggggagggggacccgaggcagccgggcgtccaaagctcgcttctctccgggagggagggcagggctgggcgcggaggtggggcggtggcggtc

SEQ ID NO: 228584 - DNA, 178 bp, Homo sapiens
  chr2:105479224-105479402
  hyper
ttcaagcagggctaagaatatgcaagctttttgtattctcattaataaaaatgccactctgacacagcaacccgactttggatcactgcaacttctgtaaaagccgtaggagaatacaaaccgatcctgcctttcaattacagatcaaaatggcttgaaacgcgatgttttgttcatc

SEQ ID NO: 228585 - DNA, 721 bp, Homo sapiens
  chr2:105479914-105480635
  hyper
gtttgcggattttccgttctgggggtgcagcctcctcccaggagaattgagttgccgcccacgctgctgacggtggagttcagaggggctgagttcaaggcctggctgacccgggctttctctgaaatccacctctctgctgcccagggccctggagccctggagcggaggacaaagtaaagacggatctggacccgtgaccccttgggtcttcccggactgtggcccagcccacagaccagggcccgaaattgaggtggggggcgtactctgtttgtcttcccgaaggatgcggcgcgtggaaggagatgcgctgacttgttccaacccataacctttcgctcgggtccccatgtgcgggcagaagaagtcagagcggaacagcctagtgcactggcagggctcattgtctgggaagacaccgaggtctaggcagctgggactgcggagtggaggcaaggccggaggcggccggcggctttgtggaagtttcgcgccgccaggccctgcgcgccgcacggggcggtggagttcttgggcagcccccggcgcttggcccacgcctccgcttcccgcgtgtgggaaactcgagcaccctacaggcaccagggtaaactgcctgtgcctggcccggtgagggtcgctcccccaggccccgtctccgcccgaggactgcaggcctaggcctgcggggagatcctgagaccgcggtgtgcgggcg

SEQ ID NO: 228586 - DNA, 1140 bp, Homo sapiens
  chr2:105483512-105484652
  hyper
ccgcagtcgccctgcggtggcaggagagctactcattcagcagtagcagcattgcgccgctgcagcatcccgaggtcacattcagaaagcccgttcttccaggacagcatcgccccaatactgcaggcggggcgaaccgtgtttatctgccccaggcacggaggggagattgtaaccaaaggaaaagaatctcgcagaaggggatctggaagagggcagttgatcctgggcagatcccctgcgccgggccctctccgctgggggcgagcccggagggaaccgaggggcccgggagggggagctgctgaaggcgcgcaggctgacaaagctataacaaaggctccctacaaaactagtactaaggatctttaaaggatcacacaccttgcaggcgtgtccccagctcccgggacgcagagcccgctgactgttcccccgggctccgcagacgtgcccgggttgtcagaggtgtggggctggaagtccagcgtctcggcctctgcccctgcgctcccacaggcctgagcgggtaggggtaggtgcccgcgcctgggcccgcggggctttggtcatggctgttccccgggaggctcagttaggcagcagccttgctgggcaacaggccccgcccttggttaatccgggaaggtcgcgggctgcaatctggcctgacgaggcaggccctgaagtctccccgctgggcgatcagaagagcgttcgagaagccgggagctggtggggttggcagggcgtctgagtcacccgagctgcagaacggacgcccccacgacgcgctgtgggcactcacagcggctagttgggcatttcccagcagccaaggctgcgcactccgcccccgctgaggtcccctttggttcccgaggacccagctcctcccgcccctctactcggcgccccctgccaccatagaactctggggtaaccctgggccccgacctccagctggtgggtaggaattgttgggaaaggattggcgccccagcaccgggagactggaagagttgaaatcaacgcaggagaacaattaggaaaaagtaagaaaaaaatcacccggatgacctccaacttcacccccacacccccatggggttctgaaggctccggcgcagctcctacagg

SEQ ID NO: 228587 - DNA, 1892 bp, Homo sapiens
  chr2:105488276-105490168
  hyper
aagaaactcaatgctcaatgcgaacgcagaaagaactcaacaactgaaccgccagtggaatccagtatctgggcaagttcactttattccttcgcaggaagagggtcagcgacggccagcgaaagtttcccccgctctttgaagagggaggtgacaagacctgccagaccttcccacgcgcgggccgcctgggttctggggctttcgtgacgtcttccctcatcgcgctccccacccccgaacacacacacacagacacacacacacacacactcttccttgctcgggaaacttggcttcaacctggctccccctttcaaaaccccctggagaacttcccctgcagggatgccctgcgcccgccggctgcgccctccctctcctcagccctgctcctcctgtccgctccccggcgttctggactcacccggcacggtccttccattccacatacagacaggaaaccggcctcttcgggacaacatttgaaaccacattttatcaacatcatcaaagaccagagcacacacttcgggctctgagctctggagcccgcttcttgcagaaaaccgggtatgggggaagggctgcaggggcgagaaatcctgcttccaactgcgatttcagctttcttatggaaatgaacgcgacggcccgttcgccccgagcctccctcccgttcccagcccctcttcagcttaccctttcctcccgctaacccccgccctcccggtccccgagttcccgcggcggccaggctggtggggacgcactcgctctgcgcccgggtctcggcgcgcgcggaaacccaggccgcgggctcccctccgccccgccggcccgcgtgcagcattaaatattcatagggatgctactttcttaaaggagaacctaccgcgcgggaaagttcacagccaaggagaggcacaaaagaaggtctccgcgctggttctcaagggcgaggagacgcatcccttcttgacagtgcgcctccagactggcattaaggagaggactagggaatgggatcacctatcgtcaagtcacttattttagaggggtttggagaagaggtgaacttggtggtggagagaaagcgcgctccctaatcacctgttaaacagttattttaaaattagctgtcgcatctgacgccctagggtccccaagggccttttcataagggagtctgtttaacttcactggctttgggagcgagaaagtttgccctttgtttctggaaacacgcccacgcagtacgcttaggtaaccttacactgaacaatttccttggagcggctaaaaccgcaacaaccaaacttgcacctgcgccattctcttaaaaacagggcagcggctgtgagcgctgggccggtaagtaagggcagagaaaggggctgtcgtgtgcgtcccagctctccgacccgcacgtccgggacccctttccgcccgcgcaccgcggtcacttgcagccggcgctggctgcttgagcccgcggccgggtcgcccggcttctctccgggagagtggccagggcctaggcgctcgctcaagagggagagcgaagggaaaagaagaaagttctccgccggccgcgcgcagctcctcccgtgagcgcgccccagccctgggccggcccgacccgacccgcgacggggccacgcgtagtgccaggcaactcctgtgccctgtggccagccccgcgcgcgcactcgcactcacacacactcatactcacaccccacggttctttttgttccgggccaggagcactttcacaagtggttagaaagtcttgggcgccatctaacgggagcagcaaaaagttgacgctgggtggaggttaggcccgacaggagcccaggatgggcggaggagatcctctctcccac

SEQ ID NO: 228588 - DNA, 43 bp, Homo sapiens; identical to SEQ ID NO: 198371
  chr2:105654394-105654437
  hyper

SEQ ID NO: 228589 - DNA, 842 bp, Homo sapiens
  chr2:106014886-106015728
  hyper
cccgcgcagaccaccgtgccaggacagcccgctcgggagtcgggcctggaagcaggcggacagcgtcacctccccgcagccgccggctgggacccgcggccagcctttacccaggctcgcccggtccctgcccgcatggcggtgccccacctggtgaggacgcgggctgcagtcctccctctggggatgagtcggtgggctcctctgagctccagcgcccccagggtctagacccctcccattgctccgctcccctctccccgtggtctccccacccccaacccccagggttcggctctcctctcccgggtctaccccacagctcaactcctttctcccggcttctccccgcacggttcgggtcccctctcccagtggtcttcccggacccacagctctgctctcctctcaccagtctccccaactccggctctgctcccctctccttgggtctcgcaccggattcggcccccacttccgagccctggtggctaagcccctcggcctccctccggggcgcagggggttggaggtactcacggcaccgcagcgggccggggactcccggacggggctggagggcgcgggcggctggtggctgcggctccgctgccggccgagtggagcgctgcgcagctcccgccctcgagaaaccccgccgtgtcatttgaccatataaggagatgcacgcctcggctcgctggcaccgggcgtggggcgcggggggcgggcgcccccaggcctcgcggttgccgtgcccccgccccgggctgcggcggtcccggcccgtaccctttgtttgccagggctcctttcttcgtgccctccgggtcttgggagca

SEQ ID NO: 228590 - DNA, 52 bp, Homo sapiens
  chr2:106362180-106362232
  hyper
ggcgaagggagcttttgtgcccggcttcaggctctgcgccctgccccagatt

SEQ ID NO: 228591 - DNA, 225 bp, Homo sapiens
  chr2:106810964-106811189
  hyper
gagggctggtgggcggtgcggcgcgccgcggcgcatgcgcgttccggtctgttttccctgagttaaagcgcgcgggtgccagccgggaggtgcggctggattcgtttcgctgaggtgcgtccccaacccaagggcacgactgcagtggccagtttccgagccccgcccggaggggggcacgcggtgggcattccggtgttgcagtgaaacgaaacttatttgcta

SEQ ID NO: 228592 - DNA, 2243 bp, Homo sapiens
  chr2:107501993-107504236
  hyper
tcagtcccccaacacagaaccggcaaatccgaatgagatggacgtcacactccctactcaaaagaatgcatcaaatatccactccgtaacaccgcggaaagtaaacccaaaagcggagtttgccgcctgccaactacataagaattaacactcgggtatttaggattctaaagatccctactaccccaaacattatagccacagagaaccagaaatgaacagaacacactttaacctttaagaagtgcagttttgtacgggggttggctgaagaaagacaaaaatcttcactcccttccagagccaaaagagccaaaataaaagatcacctttactgagccacaggggcacaactgtatccgcccgtccccaaagcgcaagccgtcctcccgttcgcttctccagaatttcctgcttttccccaaaccaccttcaacattccccacacacgggtctcgctcctaaacacggagtgtaactccgcgcacagcagcgcggaggctgcagcgccaccaagaaaggcgtcgccaacccttacccagtgccctcccttaccagccttcttcccacgccgcgcctcgaagcgcacgacaccgtggtgctcggtgctccccctggcagcgcggcactggagtccaaggcgtgcgtgtcacattttattccccggcagccgctcgggtgcgcgcgctacgcgctcccacactcacgctggcgcccgctagagctgggaccctggccggggtccccgactcacgccgcggaacttgggggctgcagaaggcgagtgcgcggcgggagtcgtcctgccgcaggctcgagtcctcctcctgccaccgtggggtctcggagctgccccgcgctcccgtcccaggcggcctgcgggatcacctctccggggccagcgctgctccgcgccggcggcagctgcaagcgcgggcggcggggcacagcgggtggctcggcctcaaagccggcgggaggctacgctcagccccgcgctgcacgcctcattgtttcgggcagcgcggcggcggctcccgcggccagaggaaccgcggccccgagccccggggagaggcggcggttcccggcccacgcaccgaggctgcgccgcgccccgcccccgagctccgctcgccccagagccccctccctctccgcgatccctttcatccttcccgctccaggctcacctagctggcgggagccgggcactgggaagttgggctgccccctccccgcgcccccggcccggcagctcggcccgccggcgagcgcaggcggggcgctccctggctgcgcgcggatttctgcttgtcgcggagagtgactgcagacttgggctgcgtggggcggtgcggggcagcacggctgcctaaaaaggcgtgtttctccccggccgccgcctccatccagccctagttcttccgaaggttacctgcacagtacccgcctggcaccgcgcctggacacctccggggcactcgggtcccgggcggcggcaggaatgcaggaatgcgcacaggctgtgggcggccaggagggagtcccggcgcctgccccggcggaagtgagtctttgtgtaccctgtccaacacctccccccgccagcgcggaaggccgggctacctgcgcgcctggcagcgcctggcagccggctgggtggggcgcaggggagcgcagcatcctccccggctcgctagctccctttgttcatctcgctcaaccaggctccgcactgccgcctggccctcgctcccagagcttctctaaggatatgggatggacttgggagcgggccacctttcatttgggaagggtagctcgccaagtccggtgacggtgctccctggagacccccacctgcccgcccctccacactgccggtccccaaccccaagagggacggaaagttcttggggtagaagccggcgggacaagtggttgaagcagcctccggagccagtgggcggctgcgagctgggcagctggagcctgcgggcggggccgcggggaggtgcccatcgagtgtcggtctggtcgcgtgcggaatgtccacttgtcaccgcggcccttgcgttttctcgagacggcggcagctggtcctaggaccccaaaccgcgccgccctttgtttgctggtaaatactctcctgtgaacttcagcgtgtctctccgcgcgcactcctggcattgggtgccccaccccgctggttctctcgcggacccaaagagctgttcagg

SEQ ID NO: 228593 - DNA, 687 bp, Homo sapiens
  chr2:108602901-108603588
  hyper
ctgacgtccgcctccggatgtctgacgatcgcccccgcctgccgcccttataaaggggacttttcccaatactcgatcgattcccacctcgccctgcgccgcgcgccctccgccggcgccaacacctgtcaactctgcgcgctcccaggttcttggagacgccgagtgaggagccgccctgaccgcccggccccgctccgcactgcaccccgacccaccccgcaccctccctttctgcaccctcgcacccacacccctcgcggttccagggggcggcggccccgggcggagcgctttcgcgtgcagccaccactccaggtaggagcggagcgggcattcctgcgcctacgggcccgcaccctcggaaacgccttgggcaccgagcccgggcggttttagaggggagggacgcggcgtttttccctctcggtgggatgcgagggcgggtttgctgtctggcaccgttgctgtcagggtgcaagaggctacaaagtctgggcgcaggaaatgggtagagggggccgaggaaaggccgcagggggccgggagagcatcgggctgctgcggagaggaacttgcctgcttggttgctcacaaaggcagagaagacacagcccgcgggcgcttcttttgcctcctttaaattccagagaggctgattctttcccccaacgtctcttcacccac

SEQ ID NO: 228594 - DNA, 104 bp, Homo sapiens
  chr2:109335680-109335784
  hyper
aatttagaacaagtgaccaaaacgcttaagagcccatcacgcaaattgttatctgctggaaatctacgccctaggctgtggacactggcggccgaaatctgatc

SEQ ID NO: 228595 - DNA, 410 bp, Homo sapiens
  chr2:109402898-109403308
  hyper
ctgatggaacgaccggtctatgtggtgagcgcaacgcacaccaaacttaacaggttaaatggagctggagcggagcgctgcaggcaggtgcggggcctcggtgcccctcaacccgtggcacccaggcagccggggcaggactatcgcggggagatgcaatactactcagttacgaggtgtgtagtgctagcacgagaaacttggaggacgcgctgacaagccgggctgcagtctccgggtcgccccgccccgccctttccctgccgccgtgcgtgcctcgggggggcggggtctggcacgtcgtgacgcactgcggccgcgtagcgccgcgggtttgatgaacgcggttcccggggagactggtacggttgctgtgtgctatggagccgagggtcgtcaagccaccgggg

SEQ ID NO: 228596 - DNA, 244 bp, Homo sapiens
  chr2:109648305-109648549
  hyper
tttctgtttgctcaatttcttgtcccgtgagcgctaccacccaccccccgccaccttcttcccctccccccacatccgttcactctctttgaccttttgccaaaactctgaacgctcgctgccctccctcccatttcctcaccgcgtttcaggagctgtaagttcttggtgttcaaaccccctacggttacgtaaacagaactctgcagttatcttctttccctttcttcggagctttgttttc

SEQ ID NO: 228597 - DNA, 1970 bp, Homo sapiens
  chr2:109744565-109746535
  hyper
gactggaacccagcccttcccgacgggaacgcaaagcggccacgagggggcagcgcacggcagggaatcttcgccgccgaccccagcccaccgccaaacttccctgctgctctcggtcctcctgtacgtacttccgttgctctgacgctcccagaagccggggcgtcgggaaggagagcgcgaattcaccctcctctgcgcctccgtaggaaaaaattggagcgggggttcacgagactgcgccgcggcgggcgctagagcccctcgcacagcgtcgccaagggtgcggcgtggagccgggcgcctggcgccagggtgctggtcggcgggcagcggcgccagcctccgacccgcgactccggcgagccaaggctgcgccgggaggagtcggcgcgggccccggggtgcccccttcaactggagcgccttcccctcctgccttgcggcgcatccccacacctacaccggaacgaagctccggggctgtcacttctgcgcgcttctcggaaaggagtctgaactgggagcgctccggggggtcgtcggggaggatgcccgggcgtcggctgtgtccccaagctgctcgccggcgctggcgaggaaggcagtcgggataacgccgcccaaactttccttcgcagcagcgttggcaggaaacgtccctctctgaggctcacgaaaagccgaaaaagactcggacgcttggaggaggcagggccaagcctgcgcaggagaggttccccggagccctggagatgtcctaggggaccaggctaatcgccggcttgcgcccaagcgaagggaagtcctgcaggcacggcgcctccttccctgagccccgcagtgaccgtgacctccgcgcgcacccccgcgcacgtgctcgcggccgaggaagaggaacggtcctgctgaatcctctggaggacagcgactagcgagcaggccaggggcgcatggaggtgccgcgggggcggtgcggctcgccagctgcgcggaggagcgtgcacgccgcgccccggcctccccggggacctggccggccgctgcccgcacttcctgccgctggtctcccaggcgcgagccgccgcttgcagcacagaacccgttgagcttcgtgcccggcagcacccccggtcccccgcgcggggcggacttgcggcgggacaggtgtagcccgcagccgcaggcgctgcgctcaggactgggcgggctcggctggccggtccccgccacgcaggccggtccccgccacgcaggccggtcggtgagccacttcgcaccgccacagccctagcatcgggccaccagccggggtgaagaaagtcacggcggagcccggctccccagtcctgatgctggctgccggtggcgggctccacgccggccccgggacctaggcagccgcgcgagaccgctgcgggcgcctcccccatgctgctcggagcgtcctggctgtgcgcatccaaggcggccgccgctgctgcgcagagcgagggcgacgaggacaggccaggcgagcgacggcggcgtcgggcggcggccaccgccgcgggggcgggcgaggacatggacgagtcgtcgctgctggacctgctggagtgctccgtgtgtctggagcgcctggacaccacggccaaggtgctgccatgccaacacactttctgccgccgctgcctggagagcatcgtgtgctcgcgccacgagctgcgctgccccgagtgccgcatcctggtgggctgcggcgtggacgaactgcccgccaacatcttgctggtgcgactgctggacggcatccgtcagcggccccgcgcgggcaccagccccggcggcagcccgcccgcgcgtcccatcccaggccagagtgcggcccccacgctcgcgggcggcgggggcggcgcggcaggcagcaccccgggttccccggttttcctctccgcggccgcgggcagcaccgccggcagtctgcggga

SEQ ID NO: 228598 - DNA, 2039 bp, Homo sapiens
  chr2:110370721-110372760
  hyper
cttggtactattaacgaaaatagttgtaaccacacttggaaaaccgctggcttactaacaagcgagataaatctacaaaagtaactggaaaggttcaaaacagtgaacaaacgcgttcttttagagtacaaaagagtcaaggcgggaaaaaaacggtttaaaatcccaatggaggaaaacttggacgaccacaccatcggataaaacgggagagcttttgaaaagccaggggagccgggctttctcccggcggcagggaggctcggaagtgctcacggctgcaaaagatgaccgctattcaatcagtccgcactgcgccttcaactccgttatagccgtaagagacccacaaacaccgctgtggatgtaacttttggcaaagaccgggaagtcgttcaagaactctcccaccgtcccgacgctggcgccgcgccccgcgaaccggggtccggccgcgcccaggctccgcagaggctcctctcccgccccaggcgcccggccgccgcggaagccggggagcactgggcgggcggggccggagggggcgcgggtcacaatcccgggccggaccagggggccggtgggtcgagggcgggaagtcccgcgggggccggggagcgcggggctggggccccggcgtcggcgggactcaccaggtgccgcgccacctcggaggaggccatggtcgcgggcaggggcacggtgaagcggctgtatcagcccggccccgagcggctggtcccggcgacggcggcgggaaggccggagggcagaagcaacgggcggggcgcgaggctaggctgcctccgcgacggggaagggacaggggcggggccgagctggaggcctccgggggcggggttggggcggacgccctgtggtgcgcgctgagcgttttgcctgcgccaagcgagcccctcacaggagctaccctcgacgcctgaggactgagcgtcagcgttggggcgggctgaaggagagctgggactccaggaagacggcgcgaggaatgcaggcgggaactgcggagcagtgattgcggccctcgcgaggccggaagtgggcgggccttgaggcgaggccgccctaggtaggtgtggccgagacagcggggagcggaagtgggcgtggcctggtggcgtgggcgcggggcgggggtgcggggggcgtgtccgcccgggcgcggcccagtgaggcggtggccgagtcctctggcctcagacgcgtaggctggcagcccgctgagcccgccagactccgccgccgtcgggagccggccgctgggagcccgtcgctatgggaccgcgctgagccgcccgctggcgggggagcagcgcggtcgaggatggaggggccggcagagtggggccccgaggcggcgctgggccccgaggcggtgctgcgcttcctggcggagcgcgggggccgggccctgcacgccgagctggtgcagcacttcaggggcgccctaggcggcgaaccggagcagcgcgcccgcgcccgcgcgcacttcaaggagctggtgaacgccgtggccactgtgcgcgtcgatcccgccgacggcgccaagtacgtgcacctcaagaagaggttctgtgaagggccgtccgagccctccggggacccgccgcgaatccaggtgaccgccgagcccgaggcccccgacggccctgccgggcccgaggcgcgcgatcggctccccgacgcggcggccccggagtcgctccctggacagggccgcgagctgggcgagggagagccccccgcccccgcgcactggccgcccctgagcgccggggctcgcaggaagaactcgcggcgcgacgtgcagcccctaccgcggactccagccccggggcccagcgaggacctggagctcccgccacatggctgcgaggaggcggacaggggcagctcccttgtgggggctaccgcacagaggccggcccgccagaacctccgtgacctggtgatgggcagctccccgcagctgaagaggagcgtgtgtcccgggggcagcagcccgggcagctcctccg

SEQ ID NO: 228599 - DNA, 374 bp, Homo sapiens
  chr2:110962328-110962702
  hyper
tggggtaagggggcgttacaacctgggaaggtaagtaggttgggggcaagctcccaggattaggtggggtcacggtgggaaggcgcagtgcgcgcagctgcgtccgcctgtcgcccgccccagggccctctgcacagcctgaccatacctgttgcttcagctcctgattgcggcgccgcagggcctggagaggatctcgctgtcgtctcgccagcatctccctggctgcggtgctctgattgctccagttgccagggaaaccaaccggcggcgccagaaggtgacgccatcgatgtgcgcccgcctcccagccccgccccgcccgggccggtcccgggaagggtcaaatgttctcttgcggtggtcatcccacg

SEQ ID NO: 228600 - DNA, 169 bp, Homo sapiens
  chr2:111435569-111435738
  hyper
catggccagaggacgctggccggcagcggccaaacctgaaccgcaaactagaagccgccgccgattcgaataccccgcgcagccgcagtcggctcgccgaacgtttcagggcgcctgcccattggtggcggcggcagaaggttggccaatcaccggggccgttgctcgg

SEQ ID NO: 228601 - DNA, 266 bp, Homo sapiens
  chr2:111490011-111490277
  hyper
gaagcgcccgctcgcgccggacctcccgcccgggaagccagggcagggcggggccggggagggaggggagaggaaggtgaggagggaggagacgggccgggaggggtggagagggagagggcgtgcgcctggggcctcacctgctgggagctggaggaggcgcggagcgaagccggccctgccagccacgcggagaagcagaggcaggtgagcgcgatgcagccggcgccgggtctggggctcggggactcctccctgcaccgcta

SEQ ID NO: 228602 - DNA, 144 bp, Homo sapiens
  chr2:111490457-111490601
  hyper
ggggtgtgcgccgcgcctgagaggcgggtccctgcctcgccgcaggtgacgggctcccctccccaggtgtgtgggcgcagccggccgccgccgacctcttcggccccctgagaggtgccctctcctcccgagctccctccccca

SEQ ID NO: 228603 - DNA, 1139 bp, Homo sapiens
  chr2:111874608-111875747
  hyper
gcctagcattggtccgccgtctcactgtactgaatttcaagaatcatggcctactgccagccaggtcaggaccgaaggcgctagtctggggagactggagcaggtctctagtggttcacctgttcggaggctcttcctgttcagttccctctgcgcgccagagggtggcaccccaggcactccagaggtggagaggaggggacgacaggggaggcaaagagagaggagcggagggaaggaccagggaggaaggaccaaggagggagctttaataaattctcagaccttggtctcgagttcccggctaatttgggggcaaagccgaccgaccccacgtccacgcccacccccttacgggaaaagccggggtttccactgggctaggtgtcagagttgggaatgtctaaaacaaaaaaggcttccgagggttattcatggccaacagtttccacaggagaatccaaagggaaactagtttccggggccgctgtgtgtgcgggtgcttggtgggctgaaagctgctgtcactagatggctgtaagtgtgccaacatctgacctgtcccattgtgttgtgttttgcagttgctggatttgtgcgactcggtgaaggatgatgcccggagggtgatctcgacctttaacattccacacacctacctccacgcaccaatcgccggaatctccaacccgcgggccgcgtgggctttctaccctgcaccgctgcagccgcggccacgggaagaggcgcgctcccggcggcccaagctgggagccaagctctaacgggtgtggcgggaagtgtggtggcccgccagcagctgccacgacgctcgctccaccgacgcccagagctgtggccgaggccgggggctggcacccgctgggccgccactctcggggattttggtggcaaagcggaggtcccgccgaggctggcgaggtgcgcggctggctgctaggaaagagatccagacggtcgcctggtgcgctggatccctgtgccctttccctgaaacccagcctggcctgactgcaacctctcccaacttcagtgccggatcccctagacaatcagggtgggctccccgctgcgagcgcgccccacagccgggtgccgccaaaggtctcctgctgtta

SEQ ID NO: 228604 - DNA, 635 bp, Homo sapiens
  chr2:111876428-111877063
  hyper
ggaggacctcccgacggcgcgggagaaggctgtaagggctcttggcccccgacgcggcctgggtctcgggggacgcatgaacccgccacctctggccggcttccttttagtgccccaaatagcagcgcttagcccgttgcttcccccgactcttgtttttcaaagtgttcacagggtcgcgagagcgagcgacgcgggggcggcgaggctgcaaggctgcacaggaacagacgacaagaaatagggctttcttctgcgtggttcttttccggtccctgtctgagtcgcccgaccccgcggggagcgcggagcattgcggcgtgcggcgggcttcgggctctcagcccgcgcagcaagttgtgttgcttttccccgggtgcgacgcgggacggccgcgaagagcaaagttcgtccgcggtaggaacttcgaggcccggttaggaccgatctccggcctccgagtctacttagccgtgtccacgctcgtgccttttccctcttgcagcgaaataactgggcggggcccgacgcgcgtcctccagcgactccgggaacccaaggcctccttcacctcgctcaaaattcacccgaaaatgcgctgagactttggcatggggctgcgctgtgtcccactg

SEQ ID NO: 228605 - DNA, 713 bp, Homo sapiens; identical to SEQ ID NO: 198388
  chr2:111877553-111878266
  hyper

SEQ ID NO: 228606 - DNA, 161 bp, Homo sapiens
  chr2:111879697-111879858
  hyper
ctcgtgtctgcggcgcaccaggagagagaggaagttgttggaggagaatagttgccacagccagggcggtgacggccgttagggtctgcccccgacgggccaaaacaaggacaagtggcgaggactgggcctggggatggccctgcgggtccgggcgcggc

SEQ ID NO: 228607 - DNA, 149 bp, Homo sapiens
  chr2:112641878-112642027
  hyper
cgtgcgactgatgcgaaccccgaagccggactctgtctgctacagtcctggcgtccaagttctctttagctcatgtcactagggacctgaactgccttatagatctcagggttttttcttctggtttcgcttccgcctcctgaccccac

SEQ ID NO: 228608 - DNA, 213 bp, Homo sapiens
  chr2:112895964-112896177
  hyper
agcccaggggccggcgcctccccgcctcgcgcggactgtctcgtgcgggcagctgcgggcgcacctggaccctcgcaaggcccgggcggcgccgatccccgcgggacgcgctgcgctcggggcctcccgcctccccccctgccccagccgccccccggccgcgcggcgccccgcaccctgcagggacggctgccgcatcgctgggacaaactc

SEQ ID NO: 228609 - DNA, 226 bp, Homo sapiens
  chr2:112939135-112939361
  hyper
ggccctggacgggtcgtctgggtctgtggttgattacttgtctctcctttccctactccagagtaagccctttgagaaggggccgtgcctccgtcttggttctgctcccggcccctacccaaggtcgggcccacggcaggtgcgccagggcccggcactgagcgtgtcttctccccgcagccgcccccgagggcagcgtggccggcgactccgccttcagccgcgc

SEQ ID NO: 228610 - DNA, 148 bp, Homo sapiens
  chr2:113012387-113012535
  hyper
ccggacgtggccccggactgcctccaatccagaagaaactaagaggcggagtcccgctgagcccctgcattcaaaagatgaaaagatatgggatcacctttcgtcagagtccgtggccgttttgccgagggccgggttggggggtttt

SEQ ID NO: 228611 - DNA, 67 bp, Homo sapiens
  chr2:113239297-113239364
  hyper
aaaaccgacgctccgggtctccgtagtcgttaagcaaagaggaagaggaagcgcttcttcattaggc

SEQ ID NO: 228612 - DNA, 177 bp, Homo sapiens
  chr2:113240292-113240469
  hyper
ggccactcggggccgcagctacctcccgacggtgaccggtccctgcagcccgggagacgctggccgccggggctgggacctgaggcgcgagtctagcggctcccccgggccgaagcccccagatttggcgggtccgccgcgctgggcgcggctccgcagagcgggcggctggagtca

SEQ ID NO: 228613 - DNA, 630 bp, Homo sapiens
  chr2:113341821-113342451
  hyper
ccaccagctacagtcggagatttggagcgcttgtgtctgaggctcaatcccgtcaggtgccgcgcaactcagcggcgcattctctttggacccgaggcaccaccatactttccattgcttacttccgttaaaccccgagcgctgccatggcaagccggaaatagggatgaagcaatttagccagaagagggcggaagtggctactcagggcgccgccatgacgagccgggccggaagaagaggtagggcgccgccgtgacagattagtcctaaagggaacggggttgttagttcaattggctaccggaaaaaaccaggctgggctgggcgccgccatgacaaccgataccggaaaaggcgggtcgttccccccggacagccctacgccggcaaaggtctcgagatgtgagtagtgagagcgcctaccccatacgtgctgccgctccccttcttttacccagtgatctagacctagtctaggacctcgggaactaggaccagcctccctccttcttggagatctgaccctcaggattcagcgccttcgctcacgagctccaaccctccgcatgcccaagccccgccctctaagcgtttaggcctcgccccctctcgcgctgcttaggactt

SEQ ID NO: 228614 - DNA, 206 bp, Homo sapiens
  chr2:113522193-113522399
  hyper
tttcttcaaacgccgcgcctgtagccaggaccggcgtgccgcgcgtccacgcgtcctcattggctcctgcgggtttgaaactcgctagtcgtcagcacgggagggcgggacaacaggcaataggctctttgcggttggctctggccttgagaacccgaccttggggccctttgattggaagaacgtgcagcgcacctcggcattga

SEQ ID NO: 228615 - DNA, 907 bp, Homo sapiens
  chr2:114034584-114035491
  hyper
ggcctaggagcgctcgtggttccaggacgcggaccgtaaagaggtgccagggagctctgctcggtcccagggctccccaaccccgccgcgccggggaatggctgcgaggtctctcccctgaggaccttgaagggaccccgcgccttctgggggcagccggacgattctggcccaggtctctgaggggaatgggggccgggagggagcattcgtctgcagctctagagagaacccgagtgagaaatcttccggcgccccagggggttcccgctcccctcctagttgggccatggccctgggactggagactgcgccgcagagcccgggcccccgcagtgcgcttggctaaatagagatctcagcctcgctgcgcgcccgatccgaccctccttattataacaaatgtcccgtttgcagagcgggacatcatattcgcggagaattcattctgaaatattgatttcctctcacttcgccggcccaaatcgatagcgatgcgccctggccccataaatcgccttctctgcggccggccgggctccatccatcactgcgggccgcgctgcgcctccaccgctgtccgcactcgctgcgcgccgggacggctgcgcccaccagccctgaccctggagctccttcccagcaaagaccctgcccagccctggccgggaagggggaaaacaggcatcgcggcctgggagctcgagtgtgtttgaaggccctgcttccgggcgcaggtggggagggggttttgactccgcgagcggcttagtcctcaccagccggacgccccgcgcgcggcgcccggcctgcccggtgctgggccaggaggagtcggagagcacctgagtgcgctgccggctcccgggcccgggaccaccggctccattgccgttggcttgagaga

SEQ ID NO: 228616 - DNA, 88 bp, Homo sapiens; identical to SEQ ID NO: 198391
  chr2:114035831-114035919
  hyper

SEQ ID NO: 228617 - DNA, 185 bp, Homo sapiens
  chr2:115918656-115918841
  hyper
cagttcttatggtttttaaccgacctttaggagttccaccgacgtgacccaagcagctggtaggagaatctgggctggattcggaaggcgcagctacaggacgcccgctgccccggatcggaaggcgcagcacctcaggccacaatctcagacacgccctcgggtcccgacaggtgttgcccgcc

SEQ ID NO: 228618 - DNA, 178 bp, Homo sapiens
  chr2:115919261-115919439
  hyper
gcctcgccgccgcggctcgctgcgctttgggtggcggggggcggggagagcggggagtcagagggtctgcggtggccgagggagggaccctacgacggggagcccgcccggtgccgctcttcttcccctccccgcccctccgctccccccaccccgtcccttccgccgattccgggag

SEQ ID NO: 228619 - DNA, 1166 bp, Homo sapiens
  chr2:115919619-115920785
  hyper
ccgcggccaggccctcccgggaggggtggctccagtgcgcgctccgcccgcctcccgcttcccaggctgggctcccgcgcctccctcttctcaccctcccccgccccgccccagttccaggctctcctgcttctccacggactctgcgggaagttagagcctctgcgtgcgctccggggcccggcgagaggatgcgcaaggtggagagccgcggggaagggggcagagaggtaaaggctgaaggtgccccggggaaccccggcgggcggcccaccgagggagggagaggcggccgggaccaaggaatggggcctcttggttccccattaacgcacgctgaagaaatctgctgcgctcctgacggccgctcaccgggttcgagccccgtcctcctatagccggggcgctcgctggccaaagcgacccgagcaggcgaatgacctttaggcggacggggttttccctctgctttcttgtttcttttgaggagacgggtgtgtgtttgtgaggtggggatgggggaagagtgtcccagacatccgtagtctgctgagcggaacggagcttggggagcggcgaggcattaacgattaagtggagccgggaaggcgctggctttggtgatgtgttgggtttggatgtgtcgcgtctgcacagatgaggtgccctgcgtgggctgagggttattcctgtctctttcccgtccgtctacacccgccaacccctttttgttttggtctttagaaatctgtagcataaccgtaccgtcgtggatccccatctcgtctctgtccctgatctggggtgattgggacttcggtgtcgctctttttccaaagttggagggtcgggagcgccgagacaccctggcgaggaggaggaggaggaggagggaggctgcgctgagccgggtgcaggtgcgctcacgtttgcatcaattaggaactccgggcagagagagctgcacttaggtcagggattaactgtggacccgcgggacccaagcgctggggtaggaggactggggatctttgttcggagtgcgctgcgaaggctgctggaggcggacaccctcccagcttattgctagcgtgggatagagggagcgcacgcggctaggctccagcagcgactcggcttttcgcgtattctaagcactgaagagc

SEQ ID NO: 228620 - DNA, 178 bp, Homo sapiens
  chr2:118572162-118572340
  hyper
agatatcacggtgcgcgcgtctggaagcatttccgctctggagcattttcgttccgccgggtgccagcgttcctgtgacgcgtttcctgttggccgagctgcgcacgtgcggccggaagggaagtaacgtcagcctgagaactgagtagctgtactgtgtggcgccttattctaggca

SEQ ID NO: 228621 - DNA, 212 bp, Homo sapiens
  chr2:118771324-118771536
  hyper
ctcacccgcccgccgccccctgcccatgcaggggtacctgctccccgcctccaagaagagggtcggcgcttccctgaggtggatacgcctgaggaagggggcggggcgcccctaacgcacccagggcccgctcagcccgccgccccgcggctcggccctctcttcaggaaccccgacgtgtcagggaaggaggaggcgttcttacctccggg

SEQ ID NO: 228622 - DNA, 1354 bp, Homo sapiens
  chr2:118981042-118982396
  hyper
taaaatattttgctttatcacgcctggcgtgaaaagaaccaagaacactgaacccagggcagcagcgaatcccacgccccacgctccctcttcccaaacctcaatatcgttgcttaaaatcttccgggcttattgtgaagccaagggcgcttggcatgggaagagagccgctcgtgatttatttgggagagggatggggttttggaaaggaaattggggggtttacaaggaggacgggtgggttttactcaacaacttattcttgggcgttttcgtggactggagaggagtttcgatcccgtctcgggctcacctgggaagccccctcctggcgcccgctttgtttggcgttcctttaaagcccggtgttggcagagcgacccacaatgaaacaaattctcattttatgacgtctttccccccgtaggagtccgaacaatgtctgggggcttggcacgcatgaagataaaagaattttattttaaatgcgatacatgtcaggattagacagcgtttcctttcagctaaactacagagcgaatcttcatttcctgtttcactgcttcccccgaaagaaacttttctttttctttttctttttctttttttttcttttctttctctcccccagcagagagtccgagagaaaagtgctgggcacagagctccccacgaggtccccggaaagcagacttagctcctgatcgttgtcaatctttgggcaacccggggcctcgcaacggctcgggtttagtgtgatctggggaggctgcagcccagttccggctaccgtgggcgcctgagcagagccggggcgagttgtaaacctcagagaaaggcacttgtccccagcaaaacgcttggagaggaccgtgcacgctgtgctgcccccgccccgagacgcgccgggccgccgggtcaccggttttccgaaagggacccggcagagacaaagtgccttcgccgctgcgataggttggttttactttgcaataaacagcccctaatgggaccgggcgccgggcggagagctcggcccggggcgcggcctttgccgcctggctctgcgggccgccccgccgggcgccaggttttggggggtggcccggccccgcgtccgccactgcaggccgctctcctccttcccgcgcacacagcggagaaaaaaggacgcaaacagcattttacacttttcccactttagcgggaatcggaggagccgggcgagaaagcccgaaaagggaggcggttatttacgaccggcgggttggagtctggcaccagatggtgggggtctgtcaggcccggccgccccgcccagcgccccgcaaacagcgcccggttggcagcgtcg

SEQ ID NO: 228623 - DNA, 731 bp, Homo sapiens
  chr2:119067606-119068337
  hyper
ctttactatcagcattaatccggcttagcccgcttaatgatgccacttgtggcactccgaaggcagcggagaagtctataaactacttccattaaaatgcaaatcgggcccgctgagaaaacaagtgacacaaaaagtgggcgccgcgcggccgccgcccgcgatggcgccgatggctgatgccgcgattacgccggcgggggcggcccgcgcgccacgaacgtgcccgacaagccgcgccgcttaatttctgaagagatttatattttttttgttgtcaggaaatgaacaaatacttatcaatgtaaaaactgctatctccgatctccccgccgggtttttcatactgatattctttgcaccccgtaacacaggaaatgaaaatcttctccgcctctcacgtcgccgctgcgccttcaaatcctctgcgagcagactggcctccccccaccggccccctcccgggctcccctccccggtaaacagaaaagaaaacttctgtgggcgaaggagggagaaattccaaggctctggctttccccagccgacttgggtttcggggcagcgcgggctcccttctttccagcgcaggaagaaggggtgagggaggaggggccggggtgctggcactcaacggtaacatctgttttacttaagcagctcgatttcgttttaggatgaaaaagtattccctttcagcatgaggaatcgtgggccctggggcttgtatt

SEQ ID NO: 228624 - DNA, 545 bp, Homo sapiens
  chr2:119532059-119532604
  hyper
gccactcgactttgcggagggggctgaaagcctcagtagcggacccggccgggaaaggcggagccgacagctgtcgcggggcggggcttccagggccgggaggtggaaggcggagagcggcgagggctccggctccggacccagccgagcgcgcagcgtgaagcggagaacgccgggttagcgccaggctgaatcctcgctctgactcctattgcggtgggatgtggtctctgagtctccgtttaccgattttacggaatggaacttataatgaacactagccaacacaagcagaggtttgccttgagtgacttctctgaaagtggcaccttttaccattttttaggtaacagaaactgacctgagggtgactaagcccgagatgaaaagctgttaaagggacctgcatggaagcaaaccggtgtgcggcgccgagcatagggtgctgggggcgccttttttctgtgctggcgtcccccacccccggcttgctgtcctcgtgaaacctcgctcccgcactgcagctgggtcgggaagcccttcct

SEQ ID NO: 228625 - DNA, 301 bp, Homo sapiens
  chr2:119566105-119566406
  hyper
catcgtgccaggggcgatgaggttcagttgtgcttctggaaggatccagggttgagggttctccaatcgcagcaaagggcccgggctgggtgttgccgagcggtcctcggctccccggtggaccatgcccctccagaggtctggcccagcgtcgctctgctctgcaaaaaagtggctctccgctgatctcgaatgcaccagcgagcctccagattctgggtgaagccgattttggaaatccatatgccgccctagcaaacacatcaggattgaggttaccgcataagagcagcctgcagag

SEQ ID NO: 228626 - DNA, 3454 bp, Homo sapiens
  chr2:119590509-119593963
  hyper
aagcatccctgatcgcggaggagacaaccgccagatcacaaggtgagttttgtattccagagtttcaacggctctggatctgtttccaaaatgacccaccctttctaggggcgtgttgcctgctcttaggggctgtatttggcagacatgcaaatataaaacagcctcaccaaagtgcttactatggacacagcctcttggccaagcacggaaaaggttacaggggctggtgtaaggttggatgggaacgtgaatgagatccaggatatggtacatggggctcctggctctccctgtgtaatgtgccccaagttcccctggattccactgaaaatagggagtggaagggtgggtttggagtgaggataaccaggatcgtcacactcacataagcacagaacctcagggatcttcagggctgacaccctgaacgcccaccactttccctagcccccagtgtctcagctctccaggcggggcctctgaggctagaccgctgtctcgcccagggatgctcgcggactgcggcactagcgaacgcgcaattcccttccccagggaagccacgcaggggctttccccgacggcgtctcacagccaagtgagcttgtgaacacggagacggccgaggatccgagacaaggagctcgctcgctcggtttttcccgggctgtgtttgccattcgcgggaataaatgaagcatcggtaatctccataaaagagctttcacgcttcattctctgaaactaagttgaggcttagacggaaaggagaaaagagacttttaatttaaagtaatgatcatcaacactcaggtgctagagggtctctggggaaagggggtccctaccccacccggggtagcgggagggaggccgcctctctgcgcctagccgggcgggccttgacttgctaggattggtgggccaaatcccatctccggggagccttcaaataactctcccatggggaactgaggaggcgcgggagcctagggcggaaaaagctgaagagccgtggtcccggagaaaaggaagtgagcagtctcaatggaggcccgagcctctccaaggccaccctgcaggcagcagcgacttcttcctggggcaaaagtcgcgcactacctgcgggaacgtccgctgccagggcgccgcccgggaccccagagcatacctggttcccttcctggtggccggtcctgtttggggccaaagtttgcatgcgatgggcacaaaggactctgcgcctcctttccctaaccccaagccctgggcggtcggagaacccaagacgggttcaatcccgaaaagcaaactttgttaacttctggctgaatttggcacggcggaggggggagtgggcaataatccctccattctcccctccaccaacacccagggtccctcacttacatcgcagtccccaagtcaacactcgacttgtcactttgcaccacaatgcggtcagccctgtgaggacatgaagaatggatatgaaactcgaggccagataagcgtggaactaggttcagccgtcctccctggggtacctacctccctactcccgacagagctgtgagcctccgcctgctgagaggagggcacttgggcggacctgaagttaagaggcccggggtgaaggccagagctcaatctgcagggatagaaggcgcgggaaatccagcaaaggatggaagaacagtccctgccaggccgcggcctcctcgcccccgcctgcccggcctcacccttctggaagttcctccaggcctgggtgggggccgccagggaaggcgcagagggagggcaagttggcgccgctagttttagagaaatcctaagtaaacagtgaacccgagcaggaaacctcagctttgcctgggtaagagaactggccacacagctccaagaaaggagaggaggagaacaaatctctgcgccctgaggatggtggctttattgcggaaagaggtggtggggccggagctgctctgcaacttcctctcgccccctcaaaaaaaaaaaaagtatcccgcagcgaggatttcagaaggggctcacctggtgcaggaaaagttcagttggcagcccttcgcgagcaggtcctccccagcccgcaccgagaaggcaggcgcccgggccctctgactccagtggctcagagccggctcaggactggcagggcgaggagccggcgggccgagccagcgagggtttgggctgcccgcggtgtgtgtgcaagagcgcgcgcctcgtgtaaccattcaggaccagttgaagcaacacaaataaagtcaggtctcttcagccttgctgtccacccctccccctcttcctggtttgaccctggcctggccgctctgaggcccagtttgcgcagccgacattgcgtggctactctcattaccaggggaagggcgctccccttttccctggtaatactccgggagcccctactcggaagcccaagagtcaaagggatacaggggtgactggagagcagcgggggacagcgtggcctcacccaaggtcagcgctggtccccacgtgtcggccgggggaggggaggggagcggacagtcggagcgttcggatgtccagttgagccgcggcgcggggcagccgggggcgcaaagttggaggcagggctgggcgacgaggagagagggagggccgggagccgaagggacgcccgggtgcaccccgctgcagaggccgagtccgagcggccggagaaggctggtcgcagaagggcggcctccggtgcaaaaaacggaaaccttggagcagaggatgaggaggaatacggaggcggggagcccacagaaaaagatgttgaggaaagaagaggagaccccggcctaaacaaatcgaaactgtgcaatgaacgtggcccgggagaaccgggggtgaggggcgatggctggagctgcggcccaagcacagctttcagacgcttgcccggaccctggcgcggggaggcggccgggactgcctttctgcgcgcgtccctggagagcgggtgggcaggacctgcgccccgcggtgggcaagaagatttggggtttcgcagttcctggggtcgggggcgggggtgaagtgccctcagagacctcggcggagccccagttgcgctcccatctccagcccccactggagagagggggtccagggccgtaccctcctgcggcctgggctgcgctgaccggaagtgcctgtaagaagcgccctccgcggaccgtgccgggcgcgggcagctccagccgggttggagcaaggccaagacgcccggatggggcgggccgtttcggcggacccagtctggacgcaggtgcgggaggaaagtgtgaggggggaaactgctgattgtgcggggataggggcatcttaatctgggaaaagatcggaatctcttgggacgctaatctgagacccgggtcggaggtgtagagta

SEQ ID NO: 228627 - DNA, 289 bp, Homo sapiens
  chr2:119594491-119594780
  hyper
tcgttactgggactcgcttttgttttcttcaggattcagtattgaaattgggagtgtggaggcggcttctccccagctctctccgtccagttttccactgtgttctatttatcagatggcagagccgtgggtctcgctgcaggaaatggttgctgtcagggcccgattgctgctgtcagggcccaagcccactcttgcagtagtcgtggttgaatcagaaattctcctgggtcccttctgtctttggactctcatctctctcacaggaggctcccgcccctctgcgctg

SEQ ID NO: 228628 - DNA, 36 bp, Homo sapiens
  chr2:119599150-119599186
  hyper
gggcccaggagatccgagccccgcgaggctccgcag

SEQ ID NO: 228629 - DNA, 1592 bp, Homo sapiens
  chr2:119599476-119601068
  hyper
cgcagcccaggcagcgtttccgaagccaggactgtggttgtcggcctttgagttcccttgaacgcaatcggagaccaggcgtgtcccgccagacccttcagacccaggctaaacccaaatctgggtcgcgcttccccttcgccctgcattcgttgtgcggtgatcgcaaggcccggccggctccccgcccggcgtgcgcaggggcgctggggcgctgtgtgcccggacccacgtccttcccgagcccgcaaacaggagagccgccagcgctcgtgagcacagtgtacactttatttcagactacaggtttctgaacataataaaatctttggcttgtagcggcggttcagtctcgcagtctgtggggtcgtatttctcaacaagtctccggaaaacgaaaggggggcagaacagacagaccgacagaagggacccgggaggtgggggagaagaggtgggcagacacgaaaggaaacacactctcgcacacaaagaaaagtcccagagaaaccagggccggcgatgcgggtcgggaggcaccggagaagcaatgacattcaaatgaaaaaggcaacgaaaacgaaactgggcgggggcagcgaggcggtgggggaggggataaaataattataataattataataattataacaataataataaaggagattaataaaaatgtccagcaaatagagatcgctacacgtatgtgttttccttacctgaaattaaatatatacaaggtcgtaagcggtttggctagatagagctttaaggagttcgcagtttcgtcccttatactgggaatagagaatggatcttatttttcgatagcacctgtccgagtctttctcccttttcaaaaatgctgcgtttcaacgtcattgtccattctgaggctctctttctgtctctctcgctcttttccctgcgctccctccctccttggagcagatgctttctcccccagcgaggggccgggagacgacggcggcggtgccgggagggggcgcgggcgcggccccggcctgtggcggctactcgctctcgtctttgtcctggaccgtggtggtggagtggttgtacagtccctgggccatgaggtgcagcgccaggccgttcttgatgcctgtggctttcttgatcttggcgcgcttgttctggaaccagatcttgatctgggactcgttgaggctgagttcctgggccagggtctgccgccgctgctccgtgatgtagcggtttgcctggaactccgccttgagtctctgcagctgctcggccgtgaacgcggtccgcggccgcttgtcctccttctcgttcttcttcttcttcagcttcctggtgcgcggacctgcagcggcggagagggccggggtggggtgggggtggggaccgagggcagaagggaggggggagagggcaaaggaagccgtgagaatagcattgccgagctgggccgcgagccccgcgcttccggggcgatctcggaggccctgctgaacccctggctccctcccgccagccaatccctggatcgaagtgcccctcaccagaccactggggtccccgggttccctttgggagggcaa

SEQ ID NO: 228630 - DNA, 871 bp, Homo sapiens
  chr2:119602479-119603350
  hyper
cgtaattagctgagcggggagaaatagcccaagaaatgcacacagccccaaaaaggccccactgcccgttctgcatccgggacatgttgaagtgttgttgtatgtgtgtgcagaggcacggactcttgtaataaaatcgttcctagtctcccggccagcccgagccgtgcagcctgacagctcaatcactctatccatcaggcgagtcaatcaaagcagcttttcggaggttcagggagcccgacgtgtcaataacggggctcgagatggcgggagctgatagtgcgcatcgatccgcgcccggccggcagctgtggggcggcgagagaccagccagaggaaagcggcgcgtggctacgttgttcccggccccctgccggaccgggtgtctggagtgctgatcttgggccaaagcttctgccgctctcccagacactgcgggccggggcgtcaggcaggccttggccttctctcccggagcccagctcaggtctcctcctcgggttcgccaagcgcgaggggcacacggaaaagtggtggaaggaaagccgagaaaaacaggcctacggatgccagaagtctgctggatgtgcgggtgaaaaaaggaaagcgccgcgcggggaggatgcgggaaccgttccgcggagaagctacggaggaaactggctctcatgcccttggacacgcttcctggcctgagcctgacctgttttctctcctctcccactgtttttcagctccagaaaaccaggggctgccagcacccacctttttggcaactgcctttccctggtttctacccacccgggtcagactcttttcgctacccagccgggggagagggacggctttcagacgctttcctccctgt

SEQ ID NO: 228631 - DNA, 464 bp, Homo sapiens
  chr2:119603629-119604093
  hyper
agagttcaaaatcaaagaatcgagacccgagcctcctgtgccacgagctgtagcttctcgggtggtggccgcagaggccaggatcgcatagctggatgaacattcggttgtgactggaactggggtgaggaagcaggcgtgagagactggagtacccgaggccgggtttgctctccctagcgccgcagcttggcgttctggggcggtccgcggggccagaaggcatggcgcagcccggagttgggtactcaccggaggatggacgatccgaataacgtgtgcagtacacccaggcgggccatacgagaggctgctgcgagtcagttttgaccacgggcccgccgttggctgagcccataagtaggatagccgggttgccgtgctccgggtatttggtgccctgcgctccggggctccccgcgccgcctccactgccgccgccaccggtgtccgagggcttggct

SEQ ID NO: 228632 - DNA, 763 bp, Homo sapiens
  chr2:119604153-119604916
  hyper
ttcccagctttagacgcgcccgcgccggcggcggctggctgggagccgtcgggtgggccacagttcgcgtccggggcgcacaggagcgaggcagcgcctggcgcccgggtgcccaacgggtggacagggtctctacctgcggcagtctggcctctgtcacgctcgacccggcctcctcctcctgcgcctcctctggccgccgcagccaccagaagctgcggtggcggctgctcctttttgcagccgaagtccggcctcaggatgttgtcgatgaaaaagttggtggtgcggtgcagctgggccgctggctgcggctggtgagcaggcgccgcgagatgctgaggcggcgggggcggggggtgtggggggaggtgcgggtggtgggccaggggcggcaggcaaggcgccgcgggcggcgaggggggcgcaggctgcggggacaccggcacgctgtctccatcgctgccgctgccgctgctgccgctggcgcccggactgaggctcaggctgaggccgcccggagtcgccgccgccgccgcgccgagggccgagtcgcgctgacttttaggttccggctgctgttcttccatgctcggccgccccgccgccccggccgccgcgccggcccccgcccccaccgcctcgctccccaccccactttgccagcggcccgtgggggtgcgcggaggaaggaggcaggcgaagcctcagcgaaggcacggggcgggtgcaggaaaaaagctcaggcgtctggcctggatcg

SEQ ID NO: 228633 - DNA, 361 bp, Homo sapiens
  chr2:119605264-119605625
  hyper
ttttgcagggagagcgcgtctccgccagcgccgggctgtttttttttttttttttttttttttttttttcaaatctctgacagctcggatctttgcacaaactctctcgcttaaaaaaaaaatcacccaggcacactttttgccttcaaaccggaagcacgtgagtcagggccgcacgtgtgcggagccaatggcgagccgggactcgcgctgacactcgggcctcggcccaatgggcgcgcgcgggactttgcggataaataatccgggggcgtcaaccgctggcggagagggggcgcctcggcgctggccctgtgcgtcgggtccgccctcccccacccgcgcccgcacccgcgtccct

SEQ ID NO: 228634 - DNA, 720 bp, Homo sapiens
  chr2:119606041-119606761
  hyper
tgcgcctagctagcgtcgcacgtttacgtttgtacgtctcctgccggcccgctgcattgctttccctttgtggggaatccgcacccatgcccttcccggtccagactttcgacaacaccctggagctgccctggcgccatagagccaagcccagagggctaggaatagccccagagccagttgcctggaccttccctggcagtgggagtccgggcaacgcagattaatctcaggagggccccggggccggcgagtcagaacgcggatgcgcgctaggccctagcttttagagttcagggtaacctctgtgttagatttccctgcaaagtaaaatcaaataaatgaaagcgctgcaccccaagtatttgccctggctagctgaagttgtgaacagggagtttccctcaattgccgggtgactgaatttcctgggattgctcccaactccctgggtgcctccggctccagctctgtgcgttcttccctagtttgagggaaatgccgttcctccagctgctatcattctcccgtctgccgatctctttttcgctatttcctggtcgaggcacccccaaaattttctcataaccgggaatgtgagggacgggggtggcgtgtggactgaagctctaggcacctgcgggacttgtctccggattcgttttggaggaccagtatccgactatgctgaagcctgcggtggccgagaaaggcgtcagc

SEQ ID NO: 228635 - DNA, 1087 bp, Homo sapiens
  chr2:119607049-119608136
  hyper
aggcgagggtcccccgatttccggggctgagttcccggctagacttgcgctgcagcctaggggagaaaacctctctccctaacgctgcgctgcagtcttctctaccttcccaagccgcctccaaccccaccttggagtctcccgagtcctcttcagtagcacacccaagggctccccgaaatctccaggcgcccccaccccttctccccgaaatgggggtgggattttatttatatttaagttcgcaaaattgaaatctttatcccgcaagcaagcgtgggtacttaattaaattctaattaggacactatcaatatcctatttagctgcgtagcttttgtgcgccgcggtccctttcagcgcggtaaatagggtctcgacgccttatctcgcctgcaggagacgcctcgagaagggctgcggaagataatttataggttttaattactcttcattccgcctgatcagcttggcgttcatcacaggcctgtgaataaaaccctggtcaaaagctctgtcacatcgcgctggcaagacgcttaatcaaagtgagcggccccgcgcgccgcgcggcccggctcctccacgtaatttccagccagctgataaagccagctgaataatacggcggccctttggagacaccatttacagaaatgactttattgacggcttaacgtcggtaattcattttacctttcatgtagtggagcccggatttgttacagtaatgggatgataaatgcacccgcggcccacgagctcgagctggattaggcggcactctgcgcgctggctcgtccccccacctccccgaggcccggcctgggccggacgctcggtaccccgcgccgctctgcgctccatgacctccacccagaccctacgccctcttctccctcctgcaaatgaacatgccattgggaactctgtgtgagcgcattggcgtcttgtcaagcatgcgagtgaagtgtgtgagggctgagtgaacaaatgttggccgagagggatgggtgagggtttcacaggactctgagtgagcccaggattgggcgtgtgagtgaggaactacgggcagggtgagttg

SEQ ID NO: 228636 - DNA, 457 bp, Homo sapiens
  chr2:119609396-119609853
  hyper
tggtaatcgcatttcgagtgtagatcagatggcggtggggcctcgtggtgcgggacatgaatgagttgtcgcaacacaatagcgtgcagccttcctacggggactggatgaccagcggttttgttgggagtgaatgcgaggagatttctgctacaagtgccgcgttattatgagctacaaggtcagactatacatcgcaggtccccaaagcctatggaccttgggaaatgtggggcctcgagtcacgtcattgtacctgacagtctttttcaatagactaattcaattagtgctcgcggtttcggtcttcatctggagcccataataatgtgggggtgggtgggtgctggggattcgtttgggtattggttagggatcctaagcaattctgtccaaagtggagtgggactaggggaggcagcaaaggaaaaaaaccggtggccggggggtgcatggg

SEQ ID NO: 228637 - DNA, 1816 bp, Homo sapiens
  chr2:119610099-119611915
  hyper
tgtccccatcatccggtcttcccccagagttttctccctcttatctaaggcagttcacagcatggaccgttttgttctagaaatagtgcctctctctctcctctctctctctcaagctcagacaaactgagacctttctcctcttgactccccgcgggaaacggtggaaagatatcaatgatttctgtacattgcacccggtggccaggattcagaaagcgctcctggggccctggtttcctctctgagccccgccggctgtccacaggcccgcgccgggcgcagagggcgccagggtgcaaacacccgaactgtcgccgctcgcgggtttgcaggcggccttcgggctgcgcggggatgtccgggagcccgacgcagggccccttggctcggattacgggaagaggagccttcactggcccccctcggaatttcaaacctcgctgggactgtatcacacagccagacaggcctctggagctgagaattttagacttcgctgctccgggaagcaagaggactacatacaattccctatttatttttcttcactttaatctgacatcccgctttttatgcttacactgaatcctacccaaaccccagaacccagacccgaatttgggtttaacccctttctctttcgccgaaaaaaagaaaaaatccggagttaattcaatgtctacgcctgaattttcttctatttttttattttgcttttctccctgtatggctccctcccactccccaaaaaattccccgaggtcggtgttctcaggcctaggggaccctctcccacccctggtccccacctgtccgagtggccgctctcgcctggatccggcttggcgcgttcggtgtccacacagactggccttgggcttgtgagagtgtgggagcgattgaggaggggccagcgcggcttctgggttctgctacccccacccctccgctcagtccgtggtctccaggaggtctgaacccgacttcaaagctgggaacggaaaacgccagaaaagaagaaaaaacacaacatccaagtcctttgtgcaggaacgcccccgtgactccaaaaccgttctttttgcttgtcccagaattaactgtcttccttctcttccctttgactcctgtaggggtgcgggtggttgtcccggggctcttttcccactgaccctggaaaaggagacaaaagttcgcgcacctggctctcggcgcctaggttttctgcctctgccggccccggagcccgatccaggccgcgcctccctgttgcccaaggggcgtgcatctttgggaccctcttcccggggaggtgcaagaaaagctccgggttccagcagaggtcggcgctgcagggcccaggcgggaagatgtggaaggaaaaagtttagtacagaaggtggggcggtaagggaacggaaagtctcaagagcctgggagcgggggagaggggcgagaacccgtctgtctcccccaccccgcccacctccttcctcgtattgaatcggatgcggggggcgggagggggtcactgcaatgccaaggccttctcgggccatcttccctgttcccctgctccagcagaaagctgggaggggaacgagtgtgtagccccgcgcgtgcgtgtttgttcgtgactcagaggctctgggtgggtgcgtgagtgagtccaagtgtgtgcccgagtgtgcacgcaaaaattgcgttcgttttgtctctctaattctcgtgtggttgcgctttgctgtgtcggtgtgaaagtgtgtgtgcgtgtccacgtgaatagtctccatgtgtgcgtgtcagtgagtga

SEQ ID NO: 228638 - DNA, 46 bp, Homo sapiens
  chr2:119612308-119612354
  hyper
agctcgccaaatcccgctgggaagccgcgggcgtcccagttttgtt

SEQ ID NO: 228639 - DNA, 84 bp, Homo sapiens
  chr2:119613269-119613353
  hyper
aagcccgagctcccccgccgcaccgcttccagtcccctttctttccatagagcgacccgaagccggcggtggcgcagggagccg

SEQ ID NO: 228640 - DNA, 359 bp, Homo sapiens
  chr2:119613533-119613892
  hyper
ccctgaggcgggagagacaacggaattcccacaaagggatccttctcgggatctccccacctcaagacagctaaagctggaggaaaagcccctccggggggtggggggtgcgggtttgccctgcgattccgaaagcagaaaatacccgagccacacagggacgggcgccgcgttggtagtcggggctacgttcctactccctctacctcccccgcgctgtgtgaccctgggcggaaccccgctgctctctgggcctcagtgttcttattcgtaaactgagggcgttggatgagattggtcctctcccaactctgaccttgaaactgatactgaatctgagcagcgtctgtagacacctg

SEQ ID NO: 228641 - DNA, 1519 bp, Homo sapiens
  chr2:119614242-119615761
  hyper
cccgtaagaagggccgaggctagagggagagcgaagactgagccaacgacgcacctgagccctggggtgggggtggagacgtggctcctaacccaaatctccctgccaggcagtgtccgacgagcatcgacggcaggcgtcgagaccagtgcagggtagctcagacctcaagccacgcttgacctttccatgaaatgaataaaactcgaaagccagggaaaggggacagtactttgatccggagatcgcttataacctctgcttggagttccgagttcgtgcggctcaagggaggctacagtccagcaagctctgggctccaagcgtggggacggcagcccccaagcttggcgcacccctcgggaagccccggaacggtcctcgccagacatagccggctgtcctggtccttagcttcaggctggcggcgcaaggccagagcggctgccttctaggcacctgggtggaggtctcgcatagcattccctgagaagcgaaactgcccttggggccgcagcgagcctgccacatcgaactggagaccctctgctttcgggatagatgggacgtttctgctctgtccttcttggagtcccggaatcgttctggggccgcgtgctgcctggaggcggtgaatttcagggtcttgagaagccgcgcacacacgggattctgggcgagcgtcccgtctcttaattcctattaagagacgggaaaatcgagggactggaggtcccatcattgtcgcgtgagcagcctcctgaacaccaagcgagacctgagggttccgctggggcctcgccctgacacccgggccctccgtgtggtcgagagtttgcgcccgctcccgctagggcagcgaggtcccacttgcggccggctggggcatggtggcaccggttgtctactccccacttgtgacaccgacagcttccaactcctcagacccaccccgtggaattctggactttgtgagggccgccggggtcctggccctggggtcagctgccatctgactaagccaggacggcggagctccaggccttgctccagcactgccggtgcgtcggggcccgcggagagcccagggcgggagctgtgggctgagccgggtggccgcgtggacacagatgcccggccggactgagcggcagccaagactctccgtccatcccgccgctggactcgactctcccagacccgccacggaacccagatttgagcacgcaagataaagacgccagaggcgagtgcgcggcggagaactggccgcgacacgggaagcttctggggcgcagaacgctggctccgactcgcgcggcgcagaccagcttctgtggttgcactcaattgaacaacaggcggatttacgttaaactttgttttcacctttcactaagatgtttccaatttaccaaggggatagaatgagagacagagatgtgagagatacagagagagagatagagagtgcagggtcgggggaggaggcagagagcggaagcggttctctttaggg

SEQ ID NO: 228642 - DNA, 1310 bp, Homo sapiens
  chr2:119615983-119617293
  hyper
taccaagcgggaaacgaagcaccgaatatttccccagctcgtaggaagccagatgggggccagttccctcaggagacgctccaagtcgccctgcgggctccaggtggggacaggagttataaccttccctgcccttccccctgcaacacacgcgaggtctcagcgctcccaggcgctccagtggggccgcgttccccgccagggtgggtcaggggaatactctgcctgcgccctctccgagggtccgcgcagagcgagcgcctctttaggtggggcctctggctccgacccctgctcccaacagggatcttcgtttgcatcacccagaggagctggccagagagccgcgccggaggccgcatctccccttgttggtattgttgtcggcttgctttcttctggcttcccagctcagtgaccccggaaagggtcgagcatccgactccggcatgctggttggctgcccccggaggcggaggtagggggccagaaatgctgacctgggcaggcccccagccctgagctcctggggtggacatctcagggtcccgggcctccaagctcatggccggtctccgcggcggcggggtgacccaccaagggcaagactttttcagacttgcctatggtcaccaggcaatgactccgactggtacgtgagggagctcgggtcccaccttgaggacaaggcccagccttccccggagccgcacctcaactgtcagggtgcaagtggtggtgatccgggagcagtcgaggcccgtgacaaaaccaggatgacccagcgttttctaaccgcgctgaggcagtcgcctctccgggtcgctccactcccggactccggcagcctgttggccttcctgtcaccacctcgcatggagcaccctgccctaagccctggaactgggcccctggctcgcaaggaagagggtgggggtggggtagggaggaaaggccgggaagcctgctagagagaaggaggtgactgagggccagcatcgccaggaggcatagttccactagtccccagtcccatggttccaccttgaccccagttcacctgcagggcggcagggaactcctctgattcccgaacctgcagctggtgctgcactggaggggtttccgttggtccaacgcaccccggtgaagggaattccctggagaagagagaggaggtgccagaacctggctgtaaggggggtgcaggtgtgcagagagaagcgggttgtcccgggctgtgggtcctgcagcgcagcacctgagacttcagtttccttccttttccttactcccgtagtcttccggga

SEQ ID NO: 228643 - DNA, 70 bp, Homo sapiens
  chr2:119769050-119769120
  hyper
ggggagtttcacgtcgctgggctccacaaacatgacctggggctgctccacccctctgtcccttctgagt

SEQ ID NO: 228644 - DNA, 899 bp, Homo sapiens
  chr2:119913860-119914759
  hyper
gtcaggagggaatgcggtgtggagaggtgaattttctgtttgctggaattctgctgtgggtggggttttggctgatggacagggaaatctgcacaagtatttcgggtcacaaagaaggacgccccaggaagcccgcgctccctctggcctacctccctggccagggcccggagccctccgcttctaggcactgggaggaggctgtctgaggagggcaggctcccggccctgcctgtccagtctaatcaggtttgcaaagtctgtgccgccgcctcaagggctcgggcgtcccttcctcccttgccgggatggggatggagaccaggagcacagccctgagcgtggtgggtcgcagacgcactgaggccaggagcggggcagggaggacgcagggatttgtcttttccaaaggagatgtcaggaagtgttatgaatcgagagtggcctttgccaaggagccgcgcccgggcggagaccgggcggcctgcagccaccccgcctcgcaccccccgcgcccctaatccgggtacagaagaaagcccgagaacgtgctgtacttgttattattgcctccgtgagccttcccgccatccagcttcacatacacttcgtcccctgaatccaagtgcagcaccacgctgttactggcgtagtcgtagttctggtcggcgtcctgtgcaatggcgctggcccggacctggggacaagcggtgggagcaggtgagccggggcacctcttcccgcgcctttgctcagcccacaccaggcgcgccactcacgggcctcccgcctgctgcttcagggtccacactcccaccccagctccatgttctctctccaacttagtcaactccttccaggtcccccctcctcctcgcgccgacgagtctgggaaatag

SEQ ID NO: 228645 - DNA, 727 bp, Homo sapiens
  chr2:119914969-119915696
  hyper
aacatttggctctacgtcccggtgagcgcggcctcggcgcatcgggaagcggagatactgtggcaccgaggcgcgttcattcccggggctcgcagggtagcccgcgggtggagagaaaggaggctggttccctgggaggttcagggcgcgggcgagggtttacgggggccggtgagtgtaggggtcactgacctgcccgttcttgcagaggtccgcccacatgctggtgccgtcgccgccgcgcatgaggatgtggtaggtgaagaagtagatgccgcgtacctggcagctgaacttgcccgtggtggggtcatagtgattgccgaggttggtgaccacgtcatcgaacttcagcacctcatagccttcgtgggggctcttgagacccacatagaaggcgatcttggggccgctgaaggtggcgctcagcgcactggtcacttcaccctcggaatcgccacctaccccggccccgccgcccaccaccccgacgccgctggccgtgcccgccgtcagttgcagccctggcagcccgggccgccccgagtcgcccttctctcccggagggcccctgggtccaggcgggcccggctctccagggggcccccgcggccctggcttgcccggtcgccccgggtcgcccttgggtccctggatgaaaggaggaggagggttggcgctgaggtcctgcatgacttccagggcggcggtgctgggtccgggtggc

SEQ ID NO: 228646 - DNA, 458 bp, Homo sapiens
  chr2:120189853-120190311
  hyper
gtgagaaatgaggcgcgtctggggtggagggacagaatcgacttgcaaagtgaggcttatgtaacagaggatgcgtctcttgggaagttagacctttctgggggtggaggttaggaagaccgtctccctccccaaagctgcgtttggggtgctgggctgggggtggacttgctgagtcgcgcggacacctcagggaaaggctctggcgagggaagaagcccgtgtctccgaagatttggcttctccttagcgtagtgcacgatgtttatgttggctaagaacctacacattcctacccgctccctcgggcctgctgctccccaaagggaagtcagtgggtggcggtaccgctgcccagcgggcgaacttcctttccgcgcaactcgcccgctgcagagtctatccgctggactgtctccaggattagagaggcccgttgacttcgtgtacaaacgctc

SEQ ID NO: 228647 - DNA, 677 bp, Homo sapiens
  chr2:120281412-120282089
  hyper
ggcactgccacgggcggctccagaatttccgtgtaggagagtttcagaagccagaccagaggaaggggtcggtggtgggcacagggattcatcttagagccgccttcgtctggcgcgcacgatgtttttctttgggaaagggtccctccggagaagagctgggagagattaatgttgggaggattgggagggaagagtccctattcctcatgggaagatctgctagtccctctccacctgcatcctgcccgaggccggagaaagggcgagactgtcgctccctcgggtccccagcctgcagaagggcgcagtactcaccgagtgcgcggcgcaggcgagcagcaccggcagtagtagctgctgcagcggcggcgacaggtggggacgcatggtgcccgcacgttccccgagggcgccccgacgtccgcctgcccgtgccctctgcccgctcgggagctcagcgccccgcgcagggtcccgggctccggccggccgctgcgccccgaggagccatggctgagccacccgacctgcggcgggccccgggactgctcctcctcggaccaggtggccgcgcgcgctaagccgcccgccccattgatcaggacgcggctttgccggcgcgcctcctccacccggcagggactggcgcggggtcggcgcggaggctggcaggg

SEQ ID NO: 228648 - DNA, 660 bp, Homo sapiens; identical to SEQ ID NO: 198412
  chr2:120301687-120302347
  hyper

SEQ ID NO: 228649 - DNA, 138 bp, Homo sapiens
  chr2:120516995-120517133
  hyper
actgaggttggggcgacctgctgccaactggtctggttttcccttttaacacacgcttcttgcccactatccggtccctgcggtcagtgggtgcagcaggggtcgcagtccaaacaaccaatcgcgacgcggctgcgg

SEQ ID NO: 228650 - DNA, 33 bp, Homo sapiens
  chr2:120771151-120771184
  hyper
caagggaaggggaaaaacgaactgagtttgtgt

SEQ ID NO: 228651 - DNA, 198 bp, Homo sapiens
  chr2:121101033-121101231
  hyper
ctgcttctgacttcggtcggcaaactcacacccgccctagttttgcccgccagcttcgggtcggttcctccgattgggagggagggggcgctcggcttccagacttgcaggccgccgcgggcctgcggtcccggccgagctccacggtggcagggctggcccgagagactggcggtgggaggcgggggcaggaggcca

SEQ ID NO: 228652 - DNA, 193 bp, Homo sapiens
  chr2:121101970-121102163
  hyper
ccagagcggcagccgccggcggagcctgcctctggcatcccaggccgcgccgcaccccgctcgcctcgccaggctcggccgcgagggagcgccccgggagggccgggggcggccacggcggcgggagtcgcctctgctggttggggagggcggcagctgggacagaggcagggcctgcgcggcggcggggagg

SEQ ID NO: 228653 - DNA, 142 bp, Homo sapiens
  chr2:121103346-121103488
  hyper
cttccccagccgccggccgaaccgccgctcccactgacgctgctttcgcttcacccgaaccggggctgcggggcccccgacgcggaaaggatggggagaaggctgcagatgccgaggcgccccgagacgcccgtgcggcagt

SEQ ID NO: 228654 - DNA, 1533 bp, Homo sapiens
  chr2:121103741-121105274
  hyper
gccctcgtcgccagcggcgcaccatggacgggctgcccggtcgggcgctgggggccgcctgccttctgctgctggcggccggctggctggggcctgaggcctggggctcacccacgcccccgccgacgcctgccgcgccgccgccacccccgccacccggatccccgggtggctcgcaggacacctgtacgtcgtgcggcggcttccggcggccagaggagctcggccgagtggacggcgacttcctggaggcggtgaagcggcacatcttgagccgcctgcagatgcggggccggcccaacatcacgcacgccgtgcctaaggccgccatggtcacggccctgcgcaagctgcacgcgggcaaggtgcgcgaggacggccgcgtggagatcccgcacctcgacggccacgccagcccgggcgccgacggccaggagcgcgtttccgaaatcatcagcttcgccgagacaggtgggtccggccctccggctgtctgccgcggtccccgctcgctcccgctctccctctccttgctagctccggctgccaccgccgccaccgcagcccgcgcgccctggggcagcctggactcccggcagagctccttcggccgtggccctgcgcgctccgcccgggttgcagtcctcttcccccaggccgcagacccttgcctgctgcctcaaccccccgccgccgatcgcctggccctccacccctgctctccggaatcgggccccagcgcctctgggcgcgcgtccccctcccggcagatgcgcgcggccctggctctgcgggcacttgcttggtgattgcttaatgtttttgtttcccacgatcggagtgtaggcttagcagtgtggatggagatgtgtgtgcttgttgatatacgtgggccggaggagagagagagtgtgtgtgtatctgtgtgtgtgtctgtgtgtgtgtgtgcctgcgtgagaggcccctggggccgcttccatcaccggcggcgtgggcttgccaggattgctgaagcctcgctggggagagctaggcaacctctcttccgattgtgtgggcaccggaatcgggcggaaggcaggcttctcaacaggtccatcatttacacagagaaagccgcggttcggggacagccccgtgcctctcggcttgcctggcagctgcagcagacccctcgcccgagaggcagagtcgtagttaacaaagggtatggctcctttctggaatccgcccccccccccggccccagattgcaaatctctaacactgtctaaatataaaaatcagggagagaaaaatctttcggaactttaaaagaaggagaaaaatgtgcccgcgccaaaatgctgcaagtgctttcgactccgctgtccttttcaggacttgaatgagccaggctggcttttgtgcctggagctcggccccatttgtgccgaggggactgcggagaaggtcgcagagggggaagccccggtgcagttagggcgggggcaagcggggagcctcggtggggggagcggttgtgcccctggc

SEQ ID NO: 228655 - DNA, 1182 bp, Homo sapiens
  chr2:121199617-121200799
  hyper
gtcatttgccgggcgttccgctttctccactgtaccatgctaatttttcgagggacaattttttgacaatgagtcctccagcccgaacagaaaccctttatggggccggccccagggaggccgcggcgctgccaaggcaaacaaaggctcattgctgccgcggaacatgcctgcgcctttcagggccgggttcgcagagcgcgccgcctccagcccgcgccgaggtaacacctggtccgccaactcctggcgcctaatcaagatatcaatcacggcgcgggggcaggggggcgcacgggccccgaaggctccagaacccggcaagtgcaggtagccggccgcctggccggccagggctgcttggcagggagcgccgggatctggggggaaagaaatcaagccccgaagctgaaggcttaattaggctgatatcatcccgcacaaatgttcctccgagaggaaggcttctgggcaccaaaattattttgtgattaaaagcgaaaaggaaggagaaatgattcggcctttggaggagttcggagggctgggggtggcagcaggaggctggggcgcagcgcagcgccaggggcgcgggacccagccaagctccccactctgcccccactgggacagagaggcgcaagagtccaccaacccctgccacttgtggcctttcctgactgcccagggcttccaacaatgtagaagagtgacagtaaatgtccaggtccctgcatataggtgtttctttaatctgcacaccaggccggaaaggccatgcacgtcgtcgtcatcccatttcgtagatggggaaaattagctcggagaggtgacatcttgcccgaagtcccacggctggtcagtggcaagtggacagtggcaactgcgcctggaaaacgccgtccgtggcgcggtcgcggcgccaggggcatgcctgacagccaccttctctcccgtgaccgccgggctccgcatcagggcgagccactcggctcgggagagcaggaaactggggagggccgagcctccggccacgccttgtcagccccggagcctccaccaatcccgggcccggaaagaccaggcccactgccggccccgcccagcacctgcgcaggtagcgcgcgcaggcgaaccgcaggcccgggcttctggggcctcacgctgcgcggagaggctgcc

SEQ ID NO: 228656 - DNA, 112 bp, Homo sapiens
  chr2:121344943-121345055
  hyper
ccgctttgtgcccgcggccggcggaggtgggggccgcgcgtccccggatccccctgccccggcccggcccgcggccccgagggggcgcccgccacttcgccgccgccagccc

SEQ ID NO: 228657 - DNA, 176 bp, Homo sapiens
  chr2:121412044-121412220
  hyper
ggggcagcggagggcgcagaggtcaggcagctgcgggagggctcgtgagagccaatgagagcgcggaaggcggcgagcgagccaatggacgcggcggtggggcagggggcggggcctgggcgaggccgggggcggaatgggctgagtgccctgtctgaatgcggggaacgtctggg

SEQ ID NO: 228658 - DNA, 2052 bp, Homo sapiens
  chr2:121493196-121495248
  hyper
tctaaaaaaagtgtcggagattggcgcgtcctttggttcctttctcgaactttccttgtaggtgcgttttctttccttggtgctgggtggggagagtccctgtgctccccctttcccctccccccgccccggcggcgttcgggtccccctgcgtcccccggcagggagcgggcgggctggctggcgggttcttggggcccgggtgtgcccgcaccgtgcgcgcgggggcgctgcgcagtccggcggcgctgatggattgcagaagtgccggcgcttgccagccgaggcagcacggctccgcggactttttttcaaactcccatcaatgagacttcgaggaggagcgggcggcggcggcggctgcgactgcgaacgcggaggaaggccaggagccgcaggaggagccggaggaaagagcttgggccgcgcggcgcgccgcagcctcggggagccgcctgctcgccggcggtaggggctgcgcggcgcccgcccgcctctcggtcccctctcttgcctggcccgccccgccccggctggctggagccccggcacaaggcagccagccgagggtcgccgcgccagccaaggtgggatgggggcccacagccaccgcccggcgcccgagaggccacctgcgtgctagaggcaaacttttgtctctctcggtaaagttgcattggccttcttttgcttgcttttcgtgacgaagcgcctcccacctcggccaagcgcgggccgactgggatgctgcgccgtctcggggggtccctcggccgggtaccggcgcctaggccttgggatcggggccctgggcttcgggggactagaggctagtaggcgcgaccccgcctggggctctggacgagcagggcggggacgtaaggagagtcctggggcttggagctcgtggccagaggtcgatgttgcaccctctccctacctgggggagagcaccactcttctcggggtgcacagcgagccggcctccgcgcgccggcgggggtctgttttttcagggggtggagggtgggatcggaggctgggatgctccgaagctgccgtaggtgggcatgggagcgtgtctgcgggcgtactgagcgcggaggggctgcagccagccacttgagaacttcgaactccacttctccgcgctgcgcgtcccggagccctgcctttctttcttccttcctcaatccttcctccccctcgcccggcccggccgccccctccccctctgctgggctctcctcctcggccccccctctttgcctctcttctcctcctctcctgccctcggccctgagatccgcttgacttcccaaagggatccgcacgtaatcctttgccgggtcctccggttcccccttccacctcactttcatccctgcccccctactcatcgtctctccccacccccgacaatctctcaacaagtatatttgctgaggaatttgaaaaatccactactgcaacttgatctgtatgtgatggatggggagaggcgcggagagagttgggcgccaatcctattaagggtttagagaggggagtcttttccccggacggggcgggggcggggagctgggagggagcgtgtgcttgcgtgtgtgagtgtgagcgcgcccgccgcgctggagagctgggagtccacccagctcggcgccttttcagcccggcggtaactgctgtcatttcctaggaaacccgacttttaccgcgcggggagctggggatggagcccgtgcgcctcaccctgggtgatcggtcgctgaggctctcggggacctcgagcccccccgagggtgcctctttccactaccttctcttttgtgtaattgttctgtggctcctagagttgatcccagctggaaaagtagacctgtccctactgtctggtcccgcgccctgggagtcttgtaggcgtccctctgtcccccagcccgggcatcccgctcggtgcgcgacctctggcacgggctttgcagctcggtggccgcagcggtgtcccgggccccctctccgccgctcttgccgggcgtgtgaaggtttaat

SEQ ID NO: 228659 - DNA, 505 bp, Homo sapiens
  chr2:121499189-121499694
  hyper
ctcctccccgcccccgccgtctggaccttcctctccctccgcgccggcttttccgccacgcggagcgctggctggcgaggccgcgtgtccgagcggcgccgaccgtgccgcggccgggggacattccgtgccccgagcgccccgggcccgcggctgcggccctcccacctgcgcgccggcctggtttgcagctcccaaacaatggccacattgtcgcagccgcacaccggccgccgccggcgagtggcgggaggccggactctgctcgtggcgagtcgggaagaaagccaacgggccaggtccccacagccgcgcccggagcgcgcgagcggctcccacccgggaagggcgcgggttccgaggggcgccccgggtcttcctcgaccccgtttcccattggcctgccctcttgcccgcttccccaggaggggcttccagttgcctttacagctggcgaagtgaatgagagcactccacgggagccgggaagagagaggccccgtga

SEQ ID NO: 228660 - DNA, 182 bp, Homo sapiens
  chr2:121834574-121834756
  hyper
gtctgggaagcagacgctgagacggagtgaggggtgcaatagcgtaacggggagcaccacctgtaagaggagagggaagaagcaaggtgggcggggccggccatcctgatgcatcctccctgcacaacctgcacctgccagcagagggcgccggagcaaagcgcgcccgtcccatctcagga

SEQ ID NO: 228661 - DNA, 1052 bp, Homo sapiens
  chr2:122042061-122043113
  hyper
aaccacgcgggcctcgggcgaacacgcgcaagaccatcgcgggaagtggggcggcctgcccctccgagcccgccgcccgcccctcgtccaaggaagggcactgcagagggcgcgaggctgggagaggggccccggcggagacgggcaaagagcaggggacgaacttccccgggccgggcaccaggctgctggcaggaagtttcctctgcttctccgatacgcgggggagaggagggccgcagggggcggacgggccaggggaggcggcgggccggcaggtgcgcgccctgcaccctctctgccgcctgggaggagccctcgcagacatagggctctgcgcgctcgcctccccagcgggcccccaactccgcacgtcgggtcccgccggcgtccatctgtcagtccctaggcgggacgctgggcgggtctctcagtccccagagggcggacagcggggaggccagggcccagcaggggcgccccctctccgcccctggacgtccaacggcgcccggcccgccggcccggcccgagacccgcggggaccgcgcgcggcccttaccgcaggtagctgccggagttgtgctggttgtagtgctcgggctgcgtgtgccagaagagcatggctggaactcccagcgcgccgaccggggcgcggcagcaagcgcagacgcggggcgcgccgaggacccagcggcggcttcgcgctccgaacccgcggtgccggccggctcggcgcatttatcggcggcccaggggcgggacagcggtgagacccgccccccaggaagcgcggcccggagggcggctccccgcggcagccgcacctggctgactcccgcgcgtgcctttccggcgagcgagcgcgcctccggggcggccagaccagagggctctagggccggccgggtgctctccccaaactccgatgtggggctcaggtgacccttgccgcccccaacccgctccacacggcccctctggcctctgctccccactctacgcccagggccggtctccagagcggctccgagatttccagcctaggccct

SEQ ID NO: 228662 - DNA, 111 bp, Homo sapiens
  chr2:122288274-122288385
  hyper
gccgccgcttttgcgacccttcgggagcctcagaaaacaaagaattggggtgtcgtcgaaagctgtggaggctggaggtaagctagctaccagaccgactagggcgaggct

SEQ ID NO: 228663 - DNA, 108 bp, Homo sapiens
  chr2:122407190-122407298
  hyper
ctctctatggtaacgccccgcgcaggcgctggcctggccgtgttaggcttcgctggcgtaaagtccccgggagctttgcccctcacggagaacgttagttgaccctga

SEQ ID NO: 228664 - DNA, 265 bp, Homo sapiens
  chr2:122408113-122408378
  hyper
ttcgaaagtgctgggacagcaggagtgagccaccgcatctggcccggaaagtgttttggagcgtagaaaaatgcaaattatagggctgccttcaaggatcccgaaggacccacagatttgccgcatcaggctcctatgcacgccggtaatttgatgtgttgagatgcactgcccagtgcgttgtttttactggaggagcttgtgtgcggagctccttgctagtgtatgtgttgggatgggagagaagtgcgggagaactatgaga

SEQ ID NO: 228665 - DNA, 217 bp, Homo sapiens
  chr2:122512896-122513113
  hyper
gtgcatactctttcgttgtcaaatatttccctccaactgttgttgtgtatgaaataaatacacacatataagctaaccagccccacttgcccgcaccacctacacgcccgtccccgccctccctcaggcccacgtgctccgagggccgccttcgcaggttgtttctggcgatgcctgtctgaaggcctcagactgaggccccgcccactctccctct

SEQ ID NO: 228666 - DNA, 1085 bp, Homo sapiens
  chr2:124782246-124783331
  hyper
cttgcccgaagcaacgcgccaacagcgggagggagacgcagacgcgaagaccggcgagaggatgtgcggtgggagtagctgcggggtctgcaagcaggggagcgcgcacaacgttaaaccttgaaaccagaaatcccgatcctatcgagacccatcagcttttcccatttgggaacgagcgcaggggaaattaaatgcgtaattcaagctctgttttcccctcccctccaaaggtgaggtgggggaacgcgtctcgttagctcattacaaagctttccgtgggaaattccctcttcctaatgcgtctgtcttgcaactcctattagcatccttcgacagcggcctttgaaaatctcctttaaatttcaatacctctactcgtttcccaaatggggggaagggaagagaaagccggggggtagagagaatttccttcccctttccctcccaggtagccaaagcgcaccgcagcggcttggcttcctggaggaaaagcgcccgagcggggcaaagacccgcccaggctgctcttataggcgagcgcggggcgggcctggctgggggcggtgccgcgcggccccgctcgcctataaggagctgtccgccacccgggtgctgattccagctctcgcgcccgacgaggtggatttggctgtccaccgagctccggcgcctgtcgttctaattgggtttggatttgcaccgttaaggaggggggaagagaaggaagaggcgggcgaggaaggcgagtccagctagcggctgttgcggggaccgtagccccagctgcagctccgaagaatcccccgccacggtttcggtggagcgtctgggcacgggatggagtgaaagagcgagtgcctctccaagcgggggtgggagggggtcaggctgtgcagaggagagagacagcgagaagaagccgcggctggctactgcgaatttgggattcgattgggagggaccgctcactcgggggaaatggattctttaccacggctgaccagcgttttgactttgctgttctctggcttgtggcatttaggattaacagcgacaaactgtgagtacgaggagctgggggc

SEQ ID NO: 228667 - DNA, 208 bp, Homo sapiens
  chr2:126339277-126339485
  hyper
ggcagccaggacaacggcagcactacagctgggaataaatgataacaaagcatattgattccccaagcctgctgaccacgtgatttcctcaccagctccttgctagcagagataagaaaagcaatcaagagcaaagcatggcaatgatgatggtgaaggacttaaatgttcttagtgtttcaactttgttccacggtctaatgtctaa

SEQ ID NO: 228668 - DNA, 277 bp, Homo sapiens
  chr2:127413347-127413624
  hyper
cgcccagctatccagcggccgcgcagccagccaagatttcaacacaggtctgccctatttggtcaccatccccgacagtgctgggccaggccatcatgtcacattggggagttttccctgcactccagggggaattctcaaccacaacctctgtatccggtagtggcagatggaaagagaaacggttagaaaagcgtggttcttgcgcaggaaagttggagcaaagaagagttcagaagtgggcgggtgtgtgtttaaaaaaaaaaaagggggtgga

SEQ ID NO: 228669 - DNA, 90 bp, Homo sapiens
  chr2:127414284-127414374
  hyper
agggtccgaccggccaggctccggtgaactccaggcaactccagccttgcccagggacttgctcgctccgctgggcgccgcaaaggcaca

SEQ ID NO: 228670 - DNA, 195 bp, Homo sapiens
  chr2:127643929-127644124
  hyper
caggctcacgtggccgaccctcccagccccctaaccccggtcgggcccatcacccagagccccaaacgcaccctcgcggcgcttcagcggggtgggcgtggtctggtcgacccggtggtgccgccccacagcgccccctcgcgtgcgccagccagctcggcctcagctccccgcgctcctgctcctgcctaagga

SEQ ID NO: 228671 - DNA, 613 bp, Homo sapiens
  chr2:127782975-127783588
  hyper
ccctttcagggaccctgcctcgaactccacgacatgggaggcaggggcgggccttttgcaggggaaggactcccccagcaggacgtttactgaatctggagggagtcgccctgcagatatcccgcggaagccggaggagacccaggtgcgccccaccggctagctgcgcctgcgggtgcccaaattggtgtccgggccatcctcaccgcagtgactcctccgcagcgccaacgcactccattttccttccaccctgccggtggggggcgtttgcttgttctcactctgcagccgcagccagtggcgccgctaccaaggtccccgcctcgccatccgggtcctgcctgagcatccttattggtgctcagggctaggcgtgcattgctgctaggggcgcggaaaggtttatcgtgggtggatgctgcccggggcttgagtggtttttagaggtcttgagtggctcactctccaatcagcgctttctagagacagcgtggtcagcgtacttgcttactttcaggattgcgagacgtctttaacccttgctgatcggctgacgctgcagcttcctgtggcttcctgctcatttcccgcaagatagcactgatagggt

SEQ ID NO: 228672 - DNA, 188 bp, Homo sapiens
  chr2:127864115-127864303
  hyper
gtagcctggagcgcgcgcctgagaagagcctggagcagggccggccactgctgtgcagccgagccacgaaggtgcaaagcggggccctgtcctgccccggccgggtgtggggagacagaggacgcaaacctaagagggcacccagagcgccggggaacgcagcctggggacctcgaagcccctcgaaa

SEQ ID NO: 228673 - DNA, 58 bp, Homo sapiens; identical to SEQ ID NO: 198427
  chr2:127865204-127865262
  hyper

SEQ ID NO: 228674 - DNA, 1313 bp, Homo sapiens
  chr2:127976386-127977699
  hyper
gtgcgtgctgggccgggcacccggggaggcggacgatgggcgaaggcatcggagggcgccgccgcggctcgggtgcagtgcccctgccacgaagggcgcaacggaggtgggcgtgggaaggacagcactcaggctccaagtgggaagcgtgcggaattcgccggccccaacgccctagcgggtggctgggacccctgggttcctcccacgtccctgcctccagtcccggcgcgaactccaggtgtcgcccccaactccggcttagagcctacggcaccccgagcctccgagcctccgtcccctcttcccccgccattacaaaatacaaaaaggactagaaatgaatacacacggtctcggccacctaaggacaccgagctccgcagagcctagaggagctagggaacctagcgctcccctcgggccggccccaggcagcagcccccctcagccccaactccgcgggtcccgccagctctccactcccaggccccggcggcgtccaccaggcgcccgctgcccctccccaagtctcctcctccgggacctcagccctggtgccctccccgcagtcccattcctggtttcccttcgcggcgccccctccccaggttccccaaccaggcaatccctgcctgggtccctccccgggaccagtccctggagaccctgcccgccgcctctctcgggctaccactctccgaaactccatccctgactcccctccccgctacctcctccccaggggtcccggctggggcccctccaggggacccctccctgccgccacctcccgagacacccatttcccccgcctcttcccagccgttcctttctggccccgttcctcagctccctctgcctgctgcccctctccggggtccgcttcccgaagacccctccccaacgcccccgccccgctcccggttcctgcctcctccaccccggatcgcctttccggcgtcctctccccagcgccccttcctgcgaaccttaaccggacaaccccagtccagctcccccaacccaccgcggcgcccagtgcccggggatccctgcccgccgcccctccctgggactccccaaccccgcgcccctccctggcgccctcccgcccgcgccgtcagccttctgggcagcagcccgggctggctccctcccggggcggcgcgcgctacctggatctcgtggatgcggctgaagccgtccctgcagaagaactccgccaggttggcgagggtcctcggccccggcatggcggcgaggctccggggaccctcggctcggccccctcccggcggcgaccccggccg

SEQ ID NO: 228675 - DNA, 47 bp, Homo sapiens
  chr2:128051796-128051843
  hyper
gtggctggaagagcggagagccagcgaccgccgatctgttagctcgt

SEQ ID NO: 228676 - DNA, 217 bp, Homo sapiens; identical to SEQ ID NO: 198428
  chr2:128165843-128166060
  hyper

SEQ ID NO: 228677 - DNA, 578 bp, Homo sapiens; identical to SEQ ID NO: 198429
  chr2:128173487-128174065
  hyper

SEQ ID NO: 228678 - DNA, 164 bp, Homo sapiens
  chr2:128284009-128284173
  hyper
gcatgcgagccggcgttctacttcctagaagcaccgctggggccaaaatggcgtctgcccacgaccctcaaaggaatgcagcgcgcaggcgccgcaacccgtcaaccggccaatgagaagacgcaacagcaatgacgccaggcacggccggaaaggagactcct

SEQ ID NO: 228679 - DNA, 168 bp, Homo sapiens
  chr2:128284484-128284652
  hyper
ttactaactggcgcgatccacagcgcctcctctcccggcgtcttcctctctttcattctaaacaacgatttaatttccttgttaagaagccatttagccaacagtaagaagtacacgtctttgcttccagaagggttcccctgatgaaacaccggaggaaggtgaagt

SEQ ID NO: 228680 - DNA, 346 bp, Homo sapiens
  chr2:128421745-128422091
  hyper
cagggcccatccgacgccggggcagagcccacggcgtcggagggccccggtcgggtttccgagggaaggcctgccctgccgccgcagctttccggccattgtccccgccacccgccccgcccctggccacctaccccgtggctggcggcgggctctgccggtgctggcgccgccggtacagccccgacgcggccagcgcacccagccgggccgccatggcgcggggcagccgccttgaggtcgcgggcgcgggccgcctggtgcaggggctatgggaccacctcggaggggaggcgcggccgcctggggccagacaccaagacgggacgggcgtgtgggcgcctcc

SEQ ID NO: 228681 - DNA, 446 bp, Homo sapiens
  chr2:128433044-128433490
  hyper
gcgcggccagcggcgggcgcgggtcaagtccttcccaacccgggctctgctcgccacctcctggattccgggcatagctttccttttaaagggagtaaagttataataaacgcgaacaagcacccccacccccacagccccgccgggacgccccgcccggcgccccctctgcagtccctgggccgccccaaccgcaaacgcgtgcaggagatggtaggcgtgggggcgatgctgagaccacctccctcccgggctttcctagcccggagttcccaccgcggatctgggcactgactccctcccgaggcacccgggaccgccgagtccacgcagtcccgcccccagggaggctaaagccgagaggcgtccctcttcagtcgcaaagctgctttccccgggaaattccgatttcatcccccgttgcgggccatcgccctaacttggcg

SEQ ID NO: 228682 - DNA, 71 bp, Homo sapiens; identical to SEQ ID NO: 198432
  chr2:128848514-128848585
  hyper

SEQ ID NO: 228683 - DNA, 362 bp, Homo sapiens
  chr2:130635073-130635435
  hyper
agcgagaggctccgcgattgtcccccccaaatcctttcccccttttcgggaatagcaagcgagtccaagagatgaggtcacgtgatgccgtccgaccaatctggtgtgagcagaggcccccattcttccggggagaggggcgggggcggggccgggccgggagcggaaggagcaggggtggacagaacagcctggggagggggcggggacagggcgaagcagggaggggagggggcgggaacagggccaggtggggcgggcgcgcgtgtgggggggcgggcgcgcgtgtcgggggcgggcgcgcgtgtgggggggcgggcgcgcgtgtcggggggcgggcgcgggggcgggcacagcaggcg

SEQ ID NO: 228684 - DNA, 240 bp, Homo sapiens
  chr2:130763501-130763741
  hyper
aacgacggtgcctccggttgacagcaacctgagcggacccgcgcctaggccctccgccaggcctgcgctgcctcgccccgggagaggaagactgagcccggctcaggcggctggagcgcgcgggcccgtttcctttcagcgatcagtcccctggcgtcccagcagcgccttccccgcgatcgcgcgtccccagcgcacgtcgcggctgccagctgctgccctgaccgccggcccagacgt

SEQ ID NO: 228685 - DNA, 300 bp, Homo sapiens
  chr2:131099730-131100030
  hyper
ccttgtcaccctccgcagtttggcaggacagccaataggcacacgagatcctccatcaaggggcgttcccatctggggatccccacgccggcagcaccaaggcctctgggtcagcttctttaagggcaagcgcccttagagaagcagcacggaagcaaccaatcaactggtttctccaattagcccccaagtggatcagcctgctgaactgtcggctagggttataggtggttctgagtccttccggaagctgccgaatcttagaagtcgcgccactgttgtggcgatggaagaaggcga

SEQ ID NO: 228686 - DNA, 246 bp, Homo sapiens
  chr2:131129984-131130230
  hyper
gcaaggtgacgccgcgcgcccagcgacccggggcgcacgcggaggacgcgagggggacgctgcctggccgcggtgagtcgaggcttgctccttctcagggcatcatcctgctgtgatccgcagggcggaaccatcctgcagtggtccgtcaggccctggcggccgcggggaccccagccgctagcctggccacgccccgacgctgatgtccaggcgtccctggccacgccccggaagcgccccctg

SEQ ID NO: 228687 - DNA, 769 bp, Homo sapiens
  chr2:131484802-131485571
  hyper
ggattgtcatttaacgagtttccctctcccagggaatctgcattctaagaccccaaaggccggcgagggtcgttgtgctgggctggacagcagagagaggctcggccttggccctcagccctgcagcacacagggcacccgcgcagagagcgtggcctgcgaatggctctgctgcctctcccggcctggggccgattagaccggtcagagcatctgtaaagtacaaggggcccctagggagtgcaggccagggcagctggggcagggaggcggggtccgccccatggcatcgcggtttctctggaaggggtgatgggctttctcagaaccacctttagtttctgtaccgtaatcggccaaaaaggcgcaggcgctgctgctcctggcagctgcgtaacaggctctcagaggaggacgcggttccgggctgcggcgggcgtggtccggggctgttctgggcgtggtctttggctgtgatgggcgtggccttgggctatggagggcgtggtcccagggctgcgatgatggtggtccggggctgtggtgggcgtggccccgggctgcggcgggcgtggtccccgggctgcggcggacgtggtcaggggcggttctgggcgtggtccctgggctgcggtggacgtggtctcgggctgtgacgagcatggtccctgggcagcagtggacgtggtctcacacccagagtctgaaatttctgcctcttcctggccctaaaaatatcctgcctgttcccacgcggctcctgccttct

SEQ ID NO: 228688 - DNA, 393 bp, Homo sapiens
  chr2:131513891-131514284
  hyper
gcgctccgacgcggtgcccgagcctgtcgcggccgcgccctgctgcactgcgggcccccagcggtaagtcgccaaggccccgagaggctgcgttggtcctgccccgcggatgtggacccccggggagggcaaggattggggaatttggtgcattctctggcgcgatggacgggctgagggcaggaagcagggtcgacaccctccacccagcggttcccggcgcagtcaggggcctgggagcggtgacccttttaggtctgggctagggaagcggagaaaccctccgccggcggatgcaggagctgagggagagccaatatcgctgtgaggcccatctccttgcccctgggcaggccaggaccgcccagaggcgccctccaaggaggtgggcca

SEQ ID NO: 228689 - DNA, 744 bp, Homo sapiens
  chr2:131594562-131595306
  hyper
aaggtgagagccggcgtccgggacttgcggtcgggctcccggcgccctgcgcgggtggggaggagcacagcccgcgctggctgctgcgccccgggccgtcccctgggcacccggtgggtggggacaccctcgtggctccccgccgctcccaactttccgacgtgcagaccggaggcggcgtcctgcaaagtggggccgtctcgagcgcggggaaggacggggctccgttgggggcggtagggacggcggcccggggcgagcccctgagagggcaagggcgagcgcctgagccggcctccccgcacctggaccgtcctgggcgcgcggggcactcggagccgctgcctggaccggcctgggcgcgcagggcactcggagcctctgccgcttggcgcagtaccagctgttttgggaaggagggctggtgccggcccggtgggtacgggagaagtggttgctgttgttattccccaggctgagagtacgcgagggcgcagcagcggcaaggggctggaactggggtcggggctgttgggctcctgctcggggtgccccctctctggcccgatttccgggcccgctcaccatccgggacccactcagttgggacgcctccacctcgctgcccccacaggaaccccaagatgggccgggggctccggggcactgtcaggggtggccggccacaggttgccaagcccgacctccccaggtgagccagcgggagggcggttgcgacgctgg

SEQ ID NO: 228690 - DNA, 1247 bp, Homo sapiens
  chr2:131721034-131722281
  hyper
tgcggtgaaaaagtgggcgcccaccagccctcctcaccaccgcggctgcgacgagcctgggcgtcgcctcctaaggatggccctgtcctaacacacgcgtgcggacacaggtggcggcggcgcggccctgcggcaccgaggacgacccggagccccgcgcccgcgcccgccgccgcagccgctccaggcctgcgtgcgcgcgtgcgtgagcgcgtgccgaccgggcccgcgacccgcactggggtcgccgttgaggctcagcgcccgccgggcggccggtagtgggcagcgagctgacgcgctgcgctctgccgggagggcgcctggcctcgctccgagccgcgcgcgccccgcgcctgccaagggtcccagctgccgcggccacagagcccgagcggggggtcggctgagagcctccttaacggagccccatgatgtcagccggcccgcacgcccctcgccctccgactgcgaccccggcccgggctcgcgcgccccgtcccccggcagccccgcggccgccgcaccgccgcccccggcccagccttccccgagcctgtggctggagctcgggcccgcctgcgtgcgggcgcagcaatgccccagcgagtcaagcgggcagacgagtggcgatctcggcactagcagcagcagcagcgccgggctgtccccgggctccgactcggacagcagcggcgtggtgtgtggcggccgcggaggcaacgggggcatgcgcggcgccgtgtcccgctcctggagcctggagagcctgcgctcggccaccgccggtaaggacgccgccatccccgcgccgcacgcgccctccgcgcccgggtctgtgctcttgggaccccccgcccccctcctgcctttccttctcctccctcactttctgcctgtcgtttccatctcctggtcccttccttcccattgcttcgccctgctattccttttctttttctggtttccttctgattcccactgcctgtctctctgatccacgtctaccggtgggccacctgttacagccgggaccttgttggcccccataccagagcgcgctgtcaactgggaaactgattaaggtgagactagaatttggtgcccgatgcgctgtgttcctttccccaaactgttcttgaccagttgcacctgtctggctttacctaccgcagctgcttagcctctgtaaagccaggaggatggaagggggccgctggccgagggtggaacggattgcgccacct

SEQ ID NO: 228691 - DNA, 985 bp, Homo sapiens
  chr2:131792016-131793001
  hyper
caatgctgctcggacgctgcggtcagtgaagaggggcccctcagggtggatcgctcccaccggagtttaaatcctgcctccgccatccctgcattcctgcgcgattttatgactgagcagaatccctaacctttcagagccacgtttactcatctgtgaagtgggggcctgcggccagtccttgtaaggaatcagagtccctggcccatccctccccaaagcgccggtgccaggcgttttggcctctgtatctctgaaacgaggaggtcccggggcatccccgagcgcccccgtggccatctgtgccactggccagcccagggccaggactgctgtgccggcgtggagattcccgaccctttccaaggaggtgccaagggcgcagcgcagcgcacgcccgagccgccgcggtccctctgagcctctccagcccgccgccgccgccgcccccgcccgcacagccggcttggttgccagggttgccagggcttggggcctgggaggcgccgcgcgcacggcgccggcttcgcgggaggagccccaggcccgcgagcgcaggcgccccgcctctccccgggcgctgcgggccaccggctcggccctgtgcggcgggatctcggggccgcacggagcgggaggccgggcgccatggcgagggccccgcagccccggcgcggccccgcggcgcccgggaacgccctgcgcgccctgctgcgctgcaacctgccccccggcgcccagcgcgtggtggtctccgccgtgctggcgctcctggttctcatcaacgtcgtactgatcttcctgctggccttccgctgagcggccgcgcagggcgccgcgccggggtgagtggcgcgggcgacggcactccagccgttgccacccgcggcctccgcactggtcgcggagggaaggcctccttccaccccatgtgctcactaccagggcctggtccgggggtgtcgccgagcgggtgcctgagggg

SEQ ID NO: 228692 - DNA, 82 bp, Homo sapiens
  chr2:132088799-132088881
  hyper
tcgctgaaaggaaacgggcccgcgcgctgcagccacctgagccgggctcagtcttcctctcccggggcgaggcagcgcaggc

SEQ ID NO: 228693 - DNA, 382 bp, Homo sapiens
  chr2:132121378-132121760
  hyper
ggaagggcgggcgccgagctctctgcgcccctgcaagggccggtggaggagcccggctggagggcagcaggactctccacagactggcagccgccgccgcctcccggcagagtagccgagcaccgagcgaggcccgcggctgggaagggaaggagggcggtgtcggcaggagccaggggtgtgctttggcttcccaaggctagggccgttcccttcttcctcacccggctccaagacctgcgggagaaaggcggagggtggcggagccggaaccgcagacgtatctgggatctctcacgcgcggcgcttcggcttccccagccgccgccgccgcagcccaacctgctgagtgcgcgagcctctggcgcggggcgagccaggg

SEQ ID NO: 228694 - DNA, 255 bp, Homo sapiens
  chr2:132152276-132152531
  hyper
gatctccgatgtccctgctccgcgggcgcccgcagtgctgagccgaagctcggcggggctgagctccagctgggggcgggtagctgacagcctctaggcccgggctccctccagaggcagcgttgcaccctgaccctaacttccgcctgcggcgttcagatgcggaaagcagggagcctgaacccaaagctgcgatcagagaatcgtgtgtgtgaagggtttcttgtgtcctccgtgttcccctgtggaagcgag

SEQ ID NO: 228695 - DNA, 224 bp, Homo sapiens
  chr2:132250191-132250415
  hyper
ttggcggtcagggcgtccctgatagacttgcattggtcgtgctcgcttaggtggcagcacccagcccagtgccaggcatacattgggcgctcagtcaatacctgtttcaagaaagcgtgcaattttctggtccgcaccggtgcaccactaggggtcgctcttcggggggggtggggggcactaatcaacaaccctgcttacgcgcacgcgcattccttgctagg

SEQ ID NO: 228696 - DNA, 155 bp, Homo sapiens
  chr2:132439907-132440062
  hyper
aggggcctttcgtcgtcccctgggctgggcagaggctcagcctgtgccgcaaccctaagcggcttctggcaagtccgagccgcggtccctttaagagggggtggagcttcaacctggcactagggatgctgctagcgtgcgtgtccctacggagc

SEQ ID NO: 228697 - DNA, 120 bp, Homo sapiens; identical to SEQ ID NO: 198435
  chr2:132795464-132795584
  hyper

SEQ ID NO: 228698 - DNA, 38 bp, Homo sapiens
  chr2:132795966-132796004
  hyper
ggcggcaaaaagccgcggcggcgggggcaaaaaaaccg

SEQ ID NO: 228699 - DNA, 139 bp, Homo sapiens
  chr2:133062237-133062376
  hyper
tccaaatgcacggacgtcaaaggctaccttcacccgggtagccttgcgaatggccactgctgcgagtggggctttctggggattgtagtccataggcctccttgcgcaagcgcgtggtaccagacgcaagctaggggcg

SEQ ID NO: 228700 - DNA, 754 bp, Homo sapiens
  chr2:133173628-133174382
  hyper
cctgcgcagaacaccggcaggctctggggaaaggcagggattctatagtgaatcctgcaagcctgcttggggccgacttcctggagcagcggctgcaagcagcgcagagcccagctgtccttggcaaacaccccacagaggaggcgagggcttgctggctcctctgggacgccccggtcaagccaccaccaaacgggccgtgacctcgccttcgaagggggcccccagggcagcggtggacgtgggggcagtgcgggcgagaggaagtttgtctttctcccagctcgggagggtcgccagcttccccggggctgcacctccttgggacgcttgtcgggttggagcgccgcagctgcctctgcggctgccgcctgggtgacggagggtggggcgggggtgggtcgctcgtagctcgagagccacgatctgatttcagggaccgtgcctatgtgctgagtcaaaccccgccgctgggctgggtctgcagccgggccgctgagcacaatccgctgtggttaatgattaatcgctgaccaccccgcctcccgcagctcgggagagggtgctctgggaatgtggaccggggctctcaagtgccggcagctggaaaggaagaggagtgctgcgaggcggagtgcgccctcggcgaagaggggcagaggcggagcgccaggtgctgcggtctcactcccagccagccaggagtttagaacgttcttcctccgccctctccccgcctcgccccagccacata

SEQ ID NO: 228701 - DNA, 2187 bp, Homo sapiens
  chr2:133426115-133428302
  hyper
agacagacgcagtcgggttcagatccggcccccacagagcccaccccggaaatcacgaccatcccacgcctcagagccaggcggctcccagcctctggcaggcttagaccactcctgggtctccgggtagggctggatgtggctgacaccggcagggggcggcgcgggtacctagggtcctacggaagaaagtggaatagtgcccgccacccctggaccccggctctagacacaaagcgcccatccattaccaccccaggccttttcccaagaagttgaagggagggtggggacggtaccaccgcaagagtgaagtagctctggagatgtgcgttagctccagcctaagccaaaggatttgcctaattgctaattggttacaaattacttaattactattttggcaccattcgtgattacattcgcagacgtctttttagtttttatttatttaatttttaaagtcagcgtttctgtgccagggctctgaggatccctgagcgaccacctgggaacaacttgggtggaggtgccagacgccaagcgctgctgcgccgcaagtccccgagcccgggtcggcggcccttctccggggccgtccccgcggcgacccgaatggccacagagggtgggaaagggcgtttgtgagcgcgcgcaccctggatccccgaccccgcagccctttcttccaggccccggctttcaggacaaccgttcgactagggtcagtggtcggggttccagctctgcagagcttagtcgggagccagtaggcgaactggagagaggacgcgagacctttgcgcctctggacgcttcggcctggctgttctcggtgtacgcgctcctgtctagacccaactacccacgctcccgcagccccacatctatcgcactctgagcgcagcaacccagcttcagcgtggccgcaggctgcctcgcgcatcgctcacctgtcggcggcgccactcccacggggtgccggaggcgccagacaacttggcagggttcgggagatgtcgccccctctccctcgcccagaacccagcaccgctcggaccctccctcctctcaagcccagcttctcccgacggtgcagccggacaagctgcagcccggagtcccgcaaacccgccgctccccgctctcctcctgcagcgcgggacttggacactttcccagcctcgcgccccggggcaccagtcgcggccgccaactcccgctgggcagccccagcgcagggctggccccgaggtgggcgccttgggggcaaaagggctggcgggtagatggattgtgcgcacctggcctcggctgctggcctctgggtattctcacctggaagcaagaacaatccgcaaaaagttgccgcgatgcctaggacccacattctcccggagtcccggggccgggagagggcaagcgcatcagaggaggcgacagcagcggaggctgccccggctgcagcggctgtggctgccgaggctgctggggcccgcgctgctgccgcggagacgacggtcgtagcttagaggagccgcaggtgccgctcgcggagcctgcatcgcccgcgctcgggctcccggctgcgggtctctgctcctcccgctcgcgctcccgggccgagcaccgcgcctccggagttggcggctgagactgaaggaactactggcgatcgggagcacccacaaaagtctcgccttttctccccacctcccactccaggcatcacgtgacggctgccgagttggggtgggggtggcgggcggggaaggctgggacggtcgcttcacatccccacccccttcctgtcttcctcttctcccgcctccgcacgttcctgggaaaggggcgccggggggcgggagagaactggtagttttctgagatggggaggttgggggagcggcgaggagggcgcagcaggtgccgtggggacctgccgggtgcggactagggtctgaggactgcgtgcccggctggcccttcgcacataggaaggcagcctccccactccacgtcctctgcgccttccaggactggtcggtaccccagcgactgggtccagcccacacaactgaggctgtcccgctgcgggccgcgggagcctggcgccccgggaggctgacaggaagggcgcgcgttcccgtgcgcctggcaaagttccacgcccgcaggctccgtagg

SEQ ID NO: 228702 - DNA, 813 bp, Homo sapiens
  chr2:134023959-134024772
  hyper
aagcatacagtctgcggggacaaggactgaacggggtagtgggagccaggtgccgaagggctggggctagggtggcggcgcgcagggggcgcgcctgggcggggagtgggctggcgtctccttacctggccttcggtggagcatgctgctgcgggctgggggcggggtgggcgctgcgtccccaggggttgactccgcagcgccttcacttcgggggcagcaaggcgcgcgctgcagagccgggagttgccaaacttgccatgtccagagcgcggaggcagcctgggccacgcgctcaccgcagcccgggcacctcgcgctcctccgctttgttgtgttccgccgccagtccccctgcgcctgcctgccagtgtccccgagccctctcctgccgcgggacgtttcactggcgctcagggaggcccctcgggtgggcagtgccactttcctcctggaggcgcgcgttaaagatctgcctgggagcgcccggcgggcggctcggcttgcgctctgatgaggaggctggggcccatcgattcccaccccctacccactccccctcccctcccctccgccgggcccccccatcagaagctgcttaggatcggcgctgtcaaatccagcccatctgctgcaatcataatcagtctcaaccgaacggttctgacaaatctccgcctggagctggagttggagaagctggagagtgaggggcggggaagggaggtgggggtgaggggacgatggggaccgggcgccctgagagggggcctggagccttctattgtctgcccctaacggaggaactgaaaa

SEQ ID NO: 228703 - DNA, 224 bp, Homo sapiens
  chr2:134325852-134326076
  hyper
tccagctaaaaatttcctcccgcggttggttatcctctgtttatttttgaagcattcaaaggccacgctaacagaacagactcggttttcctgaacatccacagcggctgggaagtcctgccgtgaatgcggagcaagtttgcggagacttgctccctgggctgcggctccgtagttgcttcgagcttgtaaatacaagctccgtggacaaagtcccaaatgac

SEQ ID NO: 228704 - DNA, 601 bp, Homo sapiens
  chr2:135476412-135477013
  hyper
gggggcggcagccggtggcgcgtggccccggggcggcggcgggacggtgggcccctgggagctgcggcgctggatgcccgcggccggctccatggcgcggggctgcggatcccggcggcggcgacgacaagcgcggcggggactcgagtcagaagtgcgaggcgccgcggctctggcgggggcaggagcggacggactggccgcgtggacagggagggagggcgggcgggcgccgcggagtggaggtgcacgggcgggggcggggacgagcggagagccgctcggctccgcggccggtggcggaggctggggccgcgttgttgccgccgcgctccgcccctgggggcaggtgcgggcggcagggacccgccccaaggcccgggcgcgggagccggcgcaccgaggcggacgagagggaggaaccagcgtgaggacccacaggcggccctggcagagcttggctagggcgtagcggggacccgccccacctgcgccgcgggatggtgcccagaggggacccctcccactggattcctctggggtccgcgaagcccgcggccgcgcgtgggtagcagacagcgcccctaatttggcatctttc

SEQ ID NO: 228705 - DNA, 225 bp, Homo sapiens
  chr2:135809730-135809955
  hyper
taacagacctgggcgaagaagcagcactcctacttactagggcaagactcatgaacagggggcgggggctccgggggcggggacgcgccccgttctctttcgctcttcttcccggcagccttagcgccaggcccggcgctcctcaagatggctgccgacagtgaggtgatttctttgctccctacttaatccttgtcactatctaaattcgttcctcatgtcttc

SEQ ID NO: 228706 - DNA, 325 bp, Homo sapiens
  chr2:136289442-136289767
  hyper
gcggctgcggctccggctgcagctgcagccactgccttgtgcccaccgcccccacccgggggccatgtgaaaagcaaacccctcgaggcctagcggaggaggcaggggaaaggtttccgagtccctgccatggctgctgctgctgcctccgcggctgctcttgcagccccagggactcgggagccagccacagcaggcctgccaagagcgtggtactgctctctcgtgtggctggcgccggtgccccgggctcccccggccgccccacggccgcatcccctggccttgcaccaagagaattttcagcttcgaccggttggtaaaa

SEQ ID NO: 228707 - DNA, 134 bp, Homo sapiens
  chr2:136499398-136499532
  hyper
aggttgcgggggccgcagagccggacgaagacggagggcggagccggcttcgggactgcggagactacacaccgagcgagcgcctgggcccgaagggagcgatgctgtggttccagggcgccattccggccgcc

SEQ ID NO: 228708 - DNA, 141 bp, Homo sapiens
  chr2:136873851-136873992
  hyper
ccactcccaggcggcgtggggggtggggtgggtgctgctaggaggggcagtgattaactttttgtaagaagtttttcgcccagggagggaagaggggagaagggaggatcacggggggagggcgggggcgttgcaaagact

SEQ ID NO: 228709 - DNA, 89 bp, Homo sapiens
  chr2:136874352-136874441
  hyper
gatccagttaacccggccggaggtgggcagctggaagcctccaggcggtgggcacgcggggggccgggtcgtccagccccgggccgccg

SEQ ID NO: 228710 - DNA, 701 bp, Homo sapiens
  chr2:136876121-136876822
  hyper
accagtaggcggcaatgctggaagtagggccaagcttccaacgccattccccgcgctttcagcagacgcagcccattcaggaggtaaaaggagtaaagatccttccttcggaggatgtagctatacttgcacattcacagcatcactagggtcaggtgcagataattaggagatactttcagaagaaggtaggatttggcataattctggagactgatcagatgtagatatgtattgctcagtaatttcataatagcggtaaccaattcgcgaatagtgctttattatcctaaaagtatgctttattataagagtaatttagcgaccagtactttttgtaacagatcactaggaacttgcacagaatcactcattcattctcacaacaccgtgtgggtattaccatcacagagatgcatttagtccgatatttatagaaggacgaactgcgtgccacgcactgttctaggcgttggggatccagcgtgaaccagacaaggcccgcattcggagaaaccagcaaataagcccggagagatgaaatgccagggatgggcagggattccaagccgggcttgaacccaggtcttcggtccccatactcggcgtcttccacgattttgagcagaggacaagctttggcacgaatcagaaattaggttgaagaactgggcggggcggagtgggggtgggggtcagac

SEQ ID NO: 228711 - DNA, 252 bp, Homo sapiens
  chr2:136877062-136877314
  hyper
tgcccagactgcactctacacacgatccctcttttctatatcaaaagaggaaacatttcagtctggagtgttccagaggtagttcggaggcagggaaccttttctctacagagcatgactttccccctttgtctgggacccctccctaatgttggtggttaaaggttctcatctactctgcactttcactgacacaggaaagatgatatccgggccgggagatgggactctcagaaacgaacgagttaggac

SEQ ID NO: 228712 - DNA, 116 bp, Homo sapiens
  chr2:137181205-137181321
  hyper
aggccaggcacttggatttgcgcagccaagggcgtgcgcagcccgcggccggaagcgtcccggcagatcgcagacggggtgttgagggaccccgcgcttttgctttcttatgattt

SEQ ID NO: 228713 - DNA, 407 bp, Homo sapiens
  chr2:137522037-137522444
  hyper
agtgtcagagagtaagcaaacgactttctgagctgtgactctgctcctcgactgcccacgtgctctccgctgtctgcactcctgcctcacctgggctgactcggactctccacctcctttgctgcttccggcatgagctacccaggagcctaaggcgctccttcccgcaactccggtccccgcgccccgggactgcaaatcctttaaacagaggccccagagctaggggttttcccaggctctggtgggcgtgggctgacagtcgctgggagccccgcaacaggggggatgtccaggcaggtatgcacccagctcccggcgtttcccggagtcaccacaatgtttccctttctctctcccccacgtatgctgctaggggtactccccagataggattttctttgtct

SEQ ID NO: 228714 - DNA, 56 bp, Homo sapiens
  chr2:137522864-137522920
  hyper
gcgcggcagaggcggtaggaggcggaggagaggggggagaaagagggggcggtggg

SEQ ID NO: 228715 - DNA, 630 bp, Homo sapiens
  chr2:137523490-137524120
  hyper
cagtgtgcggagaccctctaggcgggcggggacgccccacgcggcgacctgagcaccgacctcatgcaacgggaccgaaccttgggacccgggcagcaggagctctgttcccttcacctccagcttggtttgagggatactgatgaaggaaaccgggggtttcccgtcctgcgcggagagcctcggcgcccaaaatcgaaaggccgggagttgttctgcaggctttgcaaacaggttgactgagggtttcctttcccgtagcgctgactgcgaaatctgtgcataggcgttcagtgccagtggaggatagctgagcaagccaagaagttttgcagcttcctctgatttatcggtggagtgtcaggaggctgtagcaacagtttacatttcccctgtccctgcgagtggctaggggcaagctgggctcggacgtgatatcctgctgtttgtggagaggaaactgggaacggggcttgagagtgaggggcagggagggggggacaggcatattttctactgcatcgcccatctgcacctgtcccctttgctgtcttacatgtcccatagtattaaagttatttgaataagcaaatgaaccccgctctttggtgaccgcgtattttgaagttg

SEQ ID NO: 228716 - DNA, 492 bp, Homo sapiens
  chr2:139536964-139537456
  hyper
ggaggagagcgtggcgcctcgcgggaagagagaagagagtgacaacgcgaaccccaaaccacattttaatacgtttcttattcctcagcgcctccgagccacccagaccaggcgggcggtctccctgaaaagacagcttcgagatgcccgagagggggctcctgcgcggagctgggcatgaaagttatatcttgtgtccccagctggcagaaagccccatcccagtccctagcgccagacggaaaacgaagagaaatccaagctgtcccccaaatccgtattttgcctaagttttctcccagcaaggcgccactacctggctctgagaacgaggatgcatgcactatgctgtgctttgggagaagtgtctgtgtgcatctgggcaaaacaccacgtgaaaaataaacaccaccaagcctctcaaactgtgaacaggaggaaggtctttctgccccttctcatcctatcaatttactttccttcctctccttg

SEQ ID NO: 228717 - DNA, 31 bp, Homo sapiens
  chr2:139538056-139538087
  hyper
gcctgcggggcagctcgagctccggcacgcg

SEQ ID NO: 228718 - DNA, 1243 bp, Homo sapiens
  chr2:142887729-142888972
  hyper
ggggcctgaatcggcgctttcgccgctccacggacctcgaatgcagcaggtaaggaagttaacctgggagctaagttgagggcggacacgcttaacgcggagaacctggagctcgcaaaagctcgcagttgagggccatcgcggagggaagtctttcggaaatgcgaattctcattccaacatctgcagcgcttagaattcgcggacagaagcgcacagccaagtgcacacactcccggaggggacaaaatggggaccgggaaacggccaaagggaaaagctgtgggggtgccgaggactcaggcacttggttcagaaatcccgcaccgcacctctcacccccgcacagggccagcgcacggtggtcacccggtcccggggagcggagctgcaaggacttaagtttcacactcacttatctgcaagcatcgcccagcaggaaagccaaggaagtcaggggaggggagcggggaggtgttctccttacctcggtcggctcccacggtcagcaccctggcaatcggcaataatcccgagagagtgagtaaggcgaggagaaactcggacattgtggtcgcccggtaaggaagcctgcgctggagactgctcggcggcaccttcggcccggcggcggcggcggcggcaggggccgcttggagcctggaatcgagcggcgtcatttacaaatgtcactggaaattcttcagctcaatgagtccagccagtcagccttctcctgcctggagcaggatgtggaaggtggagggatgcgcgcgtgcgggagagaggaggcagagcgtgtgtgagcgcgagcgagacgcccgtgtgtcttgacttttcaatgcagggtacgtctgatcttacatcacgcaagaggggcagtgagagatgccagcggatgggaattcactgattaatcaccgaatccaccacacaccccttcgtcgttcacataaatcacatctattacttaataagaggcatttaacacaacaggaaaataccaccgcgaacggagagcgccacaaatcacaattattttaatccccttgaagggaaagtaactcgaagctggttctgtggggatttgggtctttggagaagggagagacttctgcattggcctgagccagccaggcgcctacaatgctccgcagttcacagccagctgagaaccctcagccgagcacagggctgcttctgcaggcaaaacaaagcttctcccttcgttcctcggaagctt

SEQ ID NO: 228719 - DNA, 205 bp, Homo sapiens
  chr2:145273833-145274038
  hyper
ccaggcgccttccgcgctcttgccaatcacttttctcttttattcccacgattttgtttggggtaatacctagggggtctctctctcactctcttcctctctctctgtttctctctgtccccccgcgtcccttctctggctgtctccaaaacggacctaccaaactctcacccccccctttaatatcccacctctgatctgcgtg

SEQ ID NO: 228720 - DNA, 92 bp, Homo sapiens
  chr2:145275418-145275510
  hyper
ggaaacaaacaaacaaacaacgcgaaacagcccctggatgaagcacactcgggcaaattgataatagtaattataggaagcccactcgccca

SEQ ID NO: 228721 - DNA, 250 bp, Homo sapiens
  chr2:145275690-145275940
  hyper
ttccccccacctcactcacacacatgctcccccacactggttcccttaaatagttccagtagaattttttttttcccttaagaaaggaaagagaaagtccaaccactacggcaatacttttaagctctactaaatgatcgtatcctttctggcttcgaaacttttgtacctaaaaatcgagagaggcgctgcattttttcagttgaaactgtcaaaacttggagaagggggacctcggaggcaggcagga

SEQ ID NO: 228722 - DNA, 462 bp, Homo sapiens
  chr2:145277488-145277950
  hyper
gaggaaaaaaaacctacctgcgaagtcttgtttgtagttttggccagaaatggtgagaagaaaaagcatgaagaagccgcgaagtgtgggggagaaaaaggtggaagcgaagaaacagctcccggagcaaactgtacaaaaacctcgccaagagtgtcgggaggcaggaccgttattcctgcagagcaggttagaactgatctctttcggccactccaggaaacacaaacctggggacggactgacgtgttacgcctcttctaatgacatttttttctttttcttttctgtaggagagagacgagagaccctgaaacacgcgccacctatctttgtggggagggataattgaagcgccctgagcgtgagcatcatgtgaaaacgtgatcgccaagtttctctctgggaaaggatctgggatagattataccttgaagtctccgcaaacgctttagtggaaga

SEQ ID NO: 228723 - DNA, 489 bp, Homo sapiens
  chr2:145281302-145281791
  hyper
tgtgtggaggaggtggggggcggcaggggtccaagccaagccaaacggttttctcacgtgcagactcgcaatccaatccattcggagttgagcctaggataggaggggaaagtctattaaaaaaaaaaaaaatcaggagcatctctctgagaagccctttcaaacaaaaccaaaacaggaccagagaagctcagaccgtccctaacatccctgctgcgagacccgcaggctgtggaatctcgcacgtcacctggccccagcagggcggccagctgaggggttgattttattttatttttttgaagtaaaggctgaatctcggcttcagggcttttgccaacgtctccactgacaggaaccagcaaacttcaggacccaaatgagcatcttaatttattgatgctaaacaggtctggttgttgtccccaattttccgcgcgctctgccactcccccccccacacaccccgccccaacccccgccgccagc

SEQ ID NO: 228724 - DNA, 190 bp, Homo sapiens
  chr2:145282031-145282221
  hyper
agccgcggccgggaggtgatgccgggggctgattaccatgagaaaggctgtgcctggaaaagcctcctccacgcgactgtcaatctcactaaggcttggggggcggggagcggggggggggacggaaaggggccctgtaggagtcaccagaaaacttggagtaagttggatgcgacgcaggcccgaggag

SEQ ID NO: 228725 - DNA, 390 bp, Homo sapiens
  chr2:148601211-148601601
  hyper
taaacaagtatttgcgcacctattacgtgcaaaacagttttcaacacaatgctttgtgtgtaaaaggaacggcgggaatggattcaagttgcgcatcgtgataaatggcgtgaatatcctgagcgggtggacagcccttcctccgtgagttttttctttttcttttctagtcaccaagacagcacgcgtgtgcagaagctgcagcggtgggacgcagtgctaagtctgggggcgcacacaccagctcgcgcgtcgcgagctcgcctgggcagctcggcgggcgcggcgaaacagctcccacgtccgccttccaccgactcctcggtatcagagcggacgaggcgtccccccagaggaaagactgggcgccgcagacgccccttggagaag

SEQ ID NO: 228726 - DNA, 266 bp, Homo sapiens
  chr2:149267061-149267327
  hyper
tggggggcaggctccggagcctcaggtgcgtcagagttaagctgtttcccaccccggaacacgcaccggcatttcagccttcacttgctcaactccagagccaggacgctccagagaggacagagggagctccctagtggccagagcctgcagttcagcccctccgcccttcctctgatcacacagtcaggctgactgagaaagaaacaagaagcaacacagggccggctggagccagggagcatgaggggcgtctctgggagagg

SEQ ID NO: 228727 - DNA, 142 bp, Homo sapiens
  chr2:149402958-149403100
  hyper
gcagcgctgcttacgctgccgtaagggggccttgccgtaagcggcggccgggaatggcgcaggggatgcgctggccgctcttggcgtacggtctctgtttacctttccacctccctctctcaggcgcggggctaattaatgg

SEQ ID NO: 228728 - DNA, 669 bp, Homo sapiens
  chr2:149634024-149634693
  hyper
accctctgatgcgcctcacgctgggtggagaggaggctgtgtccacatctgtggggcgagggggctcagagcgcagtagccccctgtgccaagagcagaagttacttcgtgcggctcggacccccctccctctctatctcccttccccaccttttctcccccaccccctccccctacttagctccctctctgcagctggggctgctggtagggggagggaacaccaatggattgtagttcttaaaggaatctgtcagatgaaacaaaccagctcggtcccccgccccttccccgcccgctgtccgtagcgtgtgtggctgatggtgccccctttgtatgcgagccgcgtggggagggaccgagttaatgggagcctcccggtccccgctgacacgttcctggcagcctgctccaggctgctgatgcagccttcccgtccccagcattgattaagtgatgtcatcctgatcactgagcatgctccgactaaccccctcctccccttcctccagtggctggtgtatttaggtcaagtgattgacaggtgacagtttaccgagggtattgcaggagtccgcctggcctttctcaagcgccagaggccgacgttttccagcccgggcggtccccagcatctttgccaaggttgtctgccgcagtcgcagcgaa

SEQ ID NO: 228729 - DNA, 688 bp, Homo sapiens
  chr2:149645384-149646072
  hyper
ccctccccacgctagtagtacgcttcggttactttgcacttctccgtagctgctttacatgtttgcgttttgaatgttgttgaggaaagatgcgaaaaagaatgtgtgctggaggctggaccctccccgcccctatcactaccccttacccccgcagcaagggctgcgaccccgcgggtccccgctgagcaccgcagcaattaagtacgtgcaagccatttgcggcagcgggtttgagatgcgttcgtagtgggtgacattgagaacccccagaggcgacacgggcgcctggtctctgagaggtggcatgctgcctgccgccctggtgcctggctgccccggaaggggcccccagtcgccggccccgggaaggtgctccaggctcgcggctcctcgggggtcgcctctgcaggcggcctgtttccaatttccaggcgaggagcgacgccgtgatgcaaatctgccacttaccttctgtcaccattctgtcgctaacgctaggaatgatgaaacctcctgttctggaaatgcatttccctttagcaccagcgccttctaatgaggtccctctgccccgcaggacaaaagcgcccattagggggccctgtggtgggaggcggccactccgcttggcgccgtgagggaaaccaaggaaaccgtctttgtcgctcacaggtgcctctttttg

SEQ ID NO: 228730 - DNA, 173 bp, Homo sapiens; identical to SEQ ID NO: 198465
  chr2:149894865-149895038
  hyper

SEQ ID NO: 228731 - DNA, 36 bp, Homo sapiens; identical to SEQ ID NO: 198466
  chr2:150061862-150061898
  hyper

SEQ ID NO: 228732 - DNA, 56 bp, Homo sapiens; identical to SEQ ID NO: 198467
  chr2:150061932-150061988
  hyper

SEQ ID NO: 228733 - DNA, 497 bp, Homo sapiens
  chr2:150186117-150186614
  hyper
tggggaggctggttccgagtttccgggcatatccgtggagtccttccagaccttcctggggaccttccccggtcaccccggctccccgccggccccccgcgctgctcaggggagagtaggactatgacccacttccactctaaggctctagatcgaaccgtccaggggggtcaaacacgatttacaacaaggaagagaaaaaccaatacgtcccaagagggctgcaggggctttaactggaggaagggttgggcagagggtggcagtattatgccctggacttttttgcaccaaacccataaccggattcccacttcctaagacctgccttcctggctcttcccaccgcctccatgctccgccccgcagcttaggtcttttactgcaaacgtcaagtggtctccgccttccctgggttcggagcttcacttgctcttgagctctgcggtccggcggatttcgcggggcccaggggatggcggggagtgagatttggc

SEQ ID NO: 228734 - DNA, 353 bp, Homo sapiens
  chr2:150187334-150187687
  hyper
tgagtccctggaactacccgatgctagggcagtcccctggggccagaggaactggggtcccggcctccggcgttttgcccctagtgggcagagagccccgcgagtagcctggacgggtccagaggggcgtgtgtactcgtgtgtgttgggctggcgcgtggagggtgggatggaaaggtcaggagctgccaagttcaaggctggaggaacctttcccaggagtaattcagcatcttctcacggcccaacatgcgtccaccaggaactccagccggagggagttcctgggcggcggactggcagcaccccacatgttgctgcggggcggggggcagtggcggtagcccggctgc

SEQ ID NO: 228735 - DNA, 2068 bp, Homo sapiens
  chr2:151341765-151343833
  hyper
agaggcgctcgctcgtgcgagacttctcgcttgcctttgtgctgggactgcctctggcgaccctgtcagtctggttccttcctcttgctctctgaacccccgcgtccctcgggggctccagcggttcaagcccagcggttctgtgggaagctcacagaaacacctccacgaggccactccccgctgggcgcggctccacctcggggcctccccgcctaacagcaaacctgcttgttggcacttgcgcgttcctcctcgccagtttcacccggatttggctcggtccgccagcaacccagctccttgctaaattcccagccctaagcgcaggggcctttacccagccttcccagtgggtcctgcttttccatagccgacacccttcttggaaacaaactcgctagacaccgctggttagggcggcgggtgcctatgtcccagcccaagacctcagatggtgcccccctgccactccccggcctttgacctggcctaaacccctaactcagccggggggccggatgccttcccaccgggagggtacctagccctccctaccaccgcgcgccaggtaggtgggtgggcgcatgggaaagcaataacccggccttgaacctcagacccatgaatataacccaccgcggcgccaataattcaagtagactggaaggtcaaaggcgaatagtgttgcccgcggccttggaggcaagccgagtgggggatgcaatagaggtcaggaggggctggtgtggtgaaggggaaacggacgtgatcactgggatggagtgggggaaaaagggaaaagctcggtacaggtgggcaccgaggcaccgcgggcggccggcagcgcgaagaggaggttcagctgctgcccggcccctgcgccaccagcgcattcctgggtgtaggcgtcacgggcgccgcggctgcctgcgctcagtttctttccctcaacagcggcaattgcacgtaaccgcgtcgcctctgggattttctcccgcctcccatcacccccgcggcgctccccgcctccccgccaaccagcaggttagatctaggaggggcgcccgccttgagccgggtggttccgccgaggcgcacgcagcgcccatgcaacaccccacagtatcgggccacctcggccgacccaaggcgacttgaccacgactccgcgggcggactgcgcctggccactagtggctccaaccgcggggtcaccctgcgggcacacagcgctctcctctccccactgctatctcctcgtccacgctgtcgtctgccgcccccacccagaagggatacaattttcgcccaacagggaccgtgggaatcccttgggaggggcgcagacggcttgtagcgcgcggtttcccgagacccgccgcgcatcccccagcgactggaaacccgccccaagcgccacgcggtcctcccactcttacccgaagtgtcccacaggctcaactctattctttgtgtgtcgatttcaaaactggccgtgtaattctcaaacactgtaggaacgtaattctggatagacaaaatgggcaaaagaggaaggaaagagggcaaagaggttacgtttaaacgcacgacacccattgaacacccttcccctccccgctccccagttaagaaagaaaaccttcacacatcagaccacacactaagcacatggaccctttccgaaacccctgtcctactccccactcaccccacccggctctcacagatctgctgacccgaatctcccaaccccaggttatgcacacaggaacgaacaagtttcaggagctaaccagcccatgtgcaggcgcgtcccaaccctaaaagcttccagcgcactttccctttccccgcagtctaatcaggggaaagtagtaaggaccgagaaagacttttttttttctttttttttttttttaagggaaaacggatgaaagcggggaggcccacctcgggactgggatcccactggccgaccccctcgtggaagccgcggccggccacactcacctcggggaagcagtccttggcgaagacatggagcagcgcagtttttccacac

SEQ ID NO: 228736 - DNA, 304 bp, Homo sapiens
  chr2:151344062-151344366
  hyper
ctctgaaacgcggcgcagacgaggaggagagcgagaggagcaggctggttactcccctccaacaagttttaagcctgactcctcaccgcgcctcccaagtccaattccgagccgactgctttgtttcacgctctctgcgcggctttatacgcccggccttccaatcctcttctttctcaatgagaggaggaaactgatctgcctcctccccttttatggagcctgggagcgagcgctgttggcgttgcatgccgaaaatgtaagcagtgcgccctctagggtgcccattcgggatctattttag

SEQ ID NO: 228737 - DNA, 297 bp, Homo sapiens
  chr2:152118445-152118742
  hyper
gtgctgttgccagcgcctgcccagacgccctccgtagttttgcaacttgtggaagcactctggagagaggccgagaggattcctcgacaggaaatttgggaattctctgggtgatgcatcagtgattgcaattttgtttttacccgttttgctaagcagcagcaacaacggcagagttgatttaaaaaaagaaaaaacgcaaaaagggaaaacacatagtaggtggtggccgcttcctgtgttgatactggggggctacgcttttcctaacatcaatcatctcgtagttgcagagag

SEQ ID NO: 228738 - DNA, 109 bp, Homo sapiens
  chr2:152685152-152685261
  hyper
aggctgtgaagaccgcaagttggggcagatggcttccgactgcttgctgttgcgtccccgagtatttatatttccctcgaattttctccactgcgccataatgtaaaca

SEQ ID NO: 228739 - DNA, 795 bp, Homo sapiens
  chr2:152954361-152955156
  hyper
tgaccggagcttgacgatctctcccaagatccagacagataagagtattcaaattaggacaaaacagaagaaaccactaaatctcaactcgaatcaaaccaggtccccggccccgaggggtctggttactctaggtcgagttatacgaattaaagacatttctccacgcaccaaagatacaaccagacatatttccagctcttaaattcaacgtccctgacttaagccaggtccccaccgaactgtccacacacatgcacaaactaacttcccggggcggtgcggagacgccgggacgcgaagacgtcaagagcccaggctagagggagagggactgagcccgagcaccggccgaggccgggaagagacgcgcgcgggcttgacccgcagctcccgcacgtgtgggccacggccggctccaggacccccgcgccgcgcgctcggcctcctccccatcctggtctcccgcctccttctcatacctgtctgaggatgaagctggtcgaagtggtgctgccatcggatcttttcaacctgctcctccgggttgtggtgcctcgggccacctggactcgacacacgggggccagagagaagccggtgaggaccgcagcgcagagcggggcgaccacccccggctggagtccgcctccggacccgctccctggggtcccctagagcccgcacccaagtctcctccgcgactcccaaatacagcccccacccccacccacccactgcaagcctcgactgctgaaaagatgctcgagaagagcagcccgcaagcacccacca

SEQ ID NO: 228740 - DNA, 175 bp, Homo sapiens
  chr2:152955492-152955667
  hyper
ggtcccgttcttggcgtaggaggaggaggacatcgttcagagccgccgcatggccagcccgtgtgcggtgggcggagggggctggcccccgaggctgggctgcggacggagggggagggcgcaggacttccccacccggctccaggacccgcgccggcgcccaggctccctgccc

SEQ ID NO: 228741 - DNA, 52 bp, Homo sapiens
  chr2:153032646-153032698
  hyper
gtttgtttcagagcggcaggactcgtagctagagaacgaggacccacgacgc

SEQ ID NO: 228742 - DNA, 327 bp, Homo sapiens
  chr2:153191510-153191837
  hyper
aatggtcccaacccggcctggcgctctagagcaggcgtggtttctgcgcgcggacactttggagagaaactacgcgtcccggcagtccgcggggcgagtgggcggagccgggccgggggcgggggccgggcgccgggcgagaggtggcattgtgtaggggagcgcggagctgcatttgtctgctccaggtgctagccaggcaggcgcagccgtggccggctagggctggaagtgtcagcggcggccgcgggcccggcagaaggccgagtaggagggaccacgcgccgggggccgcgatctctggcagggggcggtgtgccagcggag

SEQ ID NO: 228743 - DNA, 131 bp, Homo sapiens
  chr2:153192137-153192268
  hyper
ggattcgcagcagaccgatttcagggcgcacaacgtgcctttgaagctgccgatgccagagccaggtgaactggaggagcgatttgccatcgtgctggtaagtgcgcggcggcggtcgggcgcggggaccc

SEQ ID NO: 228744 - DNA, 411 bp, Homo sapiens
  chr2:153192448-153192859
  hyper
gggctcagggccggctgcccaaccagcctcgaacccattgtctggctggagaggcacctcacggcgcgtgtgcccgggaggtgcggcgtgggcgtgaagagaaggtggcgcgggctgggaggaggaggtggcgagccgcttaggctttttttttaaaaaaaacaaaacaaaacaaaacaaaacaaaacaccctgagcccctgcggaccatccctcgggcggccagcccgggacctgcgaagtccccggcagatggggcgcatgtggccggccgcgggcgccgcgccgggcggtgagcggaggcgaacttggagggctcacgtcgcggcttggccaaggggagcttccccgaaagggaaagcggagacccacagcagtgcggcgccccggcccttggcgaggagcaggggca

SEQ ID NO: 228745 - DNA, 392 bp, Homo sapiens
  chr2:153573952-153574344
  hyper
taccaacaagaagcgatctgagtggctggcgcccactggggctaaaggttaaaggctgccctgcgctacggggcgggatcagcggggccaacaggctgacgggcttccccgctgtccaatcagaatgcgccgccgacacgcagctctgcggcgattcgcccccagcctcagcctcactcggcgtcgcctgcatgggggggggggaggaggaggacggaggaagtttctgcgccgagtcctccgtcgggaaaactctaccaacttccccaggggaagggaagacaacagtgtcccagcttcccgagcttagaccgcctcaccccgtagggggtggggcagtgggggtctgccaccttcaccctccccgcccgagttacgtacgccccacaaac

SEQ ID NO: 228746 - DNA, 2490 bp, Homo sapiens
  chr2:154333303-154335793
  hyper
tttaccctagggagcattaacgtcactaacgtcactgtgtaccttagcagctacttttcctcgcattttataattccccttccctccgccccccggccccacccgtgggcagcatcccaaagccgcctggctgacgttggttagggtagagacgccctccctaaaggctgtccaagccgtctcttcctttcattagcggtgtaatcctgtgttcccgccggagcctggcacggaagtgtaatcttcccgcgggggcccttctgtcgtctcgcctacctgagagctgagactaaatgaaatataaaatattcacgataagaggaaacaaaggatgctgcctccaggacggctactgtgcctgaggctgggctccttctcagtcatcccagggcctctccgtctggccccaccctcgcccctccaggggatccacaagttgaatcgcagctctccagggttaattgccctggccgggagccagactcctcaccgccgccccgttcccccctgctggggagcgcagaatgaccaccaggaggccaggaacaaaacgcttaaatgttgcatttattaaggaaatgttaaataagaaaaaaacaaaaagtcaaaacggtgtcacggatgtcaagagcacttttgtggcgtaaaccgtgcagtcacgagctacgagttctattctgggtctttgtcccagggccagcaggaacgctagacgcctcccaaaagacccagtgggaaatgcactaaaagaaacaactcaccccgttcaaattcgcaggctccccctccccccaccccttctcccacaatgacaaaactgtaactcctcaggcaggcaaacaggccactggggcagaaaaagacttatcaaacatttgtattcaagcaaacaaacacaaaacctcttaaaacggcacgttacaatcaaaggtatttatcgcccctcccctccagggcagggggggagcaggagaagagtgggagcgcacccggacacggatttgtgagaccccatgagtctgctgcgtggcttttaacaggtcactcttccggtcacaaggcgatcagtgccgctgggtctctcccctgcccgccctctccacctgcccccagagcttggcccacctgcgggtggagaagggccttcgcaccgtcggtctccccgcattccaagtaagtagcagcttccaaagttctgcgccctaatcgccctcttcttgccactttctgctgagttcagagtctgggcgctctcctccgactgccaggcatgaggactttcagagggcgagggagaaaccggtcgcttctttccgaaaggccgaagtcgagagaaataattgactccgacaggtttgcttcgcccagtctctgatagtgaggggcacagccgggctagcaaagtgggcaggcgtgggagcggttgccgcgggggcagagggcgggtcagtagggccccacgaccaccgcctccacctccttagacggcctccggtccttcacgaggaagttgatcatgccctcggacttgatgagcagattgcagccgaggaagaagatgccgaagaccacggtgagtgagagcacgcacatgaccgcgatctgcaccacgcgcattatgtacaggctacgctcgtccgggcctccctccgcgaagccgtcgtcggtcaccacggacgcctgggtgcagcagcgcacggctcgctccagcgcctcgctgctgttggccaggaacaggcccgccacgtccgtctggttgcctagggccggattcatcgcaggaacgggcgggcgccgcgagcggcgcgggtccgaggggtgggaaggcggcggcgctggaggaacaggtgccgggctgagcgctcactcgcagactagcgcgtgcgagggctcctcgctctgctttcgaaagtccctgggccgtgggagtttcccaggagcctctccgacgcgcgcagcagctaggctcttctaaagccgtccgctccagccctggtggtgctcgttcccggcgctcgctcgagggggggctgttggaacttggcggggctggaccagcccggccgtgggaggtgcgggccgcggcggctgcagcggcggggtggctgcgctgagcaaacagcggccccttccggccgcaccgccgcgctgcgcgctgctcttgggaggtggaggaagcaaaggggcgaacctggtcttgctttttattgcttgcttcttttgcaaactccaaaggccaggcagaggtcactgtactcttctagcttgatggatgattaaagagtttgtcgggggagggtgcggtcagctgaaagtttcagaggaactgggacacacgagctctgcgtgtcctttgcctgctgcccccctgacctctgggcgaatggaaagtggcgatgaatcgcaggtgccagatggtgccggctgaggcacccgcccactgcctgtgcttgactccgactcgcctgcgttggatttctagtggagtgg

SEQ ID NO: 228747 - DNA, 1291 bp, Homo sapiens
  chr2:154728881-154730172
  hyper
tgccagagtgccggggctaggtgccgcaaagtcccgcggcgagtgccggggcgcggagccgagcgccccgggccggtcccagggcaaaggcaggggcgcgggcggacctggcgacgcggcctcccgggagctccgagtgcgctcgcttgcggggctgcaggtgttgcgggaggaccgcgtggcgcggaactttctgccgccgcccaccttctgctctgcttttctggctaccccggtgagttgttggtggcgggggggggggggggagcggctctggccccctctgcgttctggtgacgttcctccgcgggggtggctcggcctccaagcccagacaactttctcgcaccagctgcaggcagccccggctgcgttgcgggcgtttctactcgacccgacaccaggcgctccctgggtcttgggtgtcttcctcgacggttgccttcgtatagtgccccctttgcctcgctttttcagagtcctcttgcctctcattctcgccgtgtgtgtctctgcctctgtttctctttctgagccttggtcccctcagtccacactctccggccatgtatctgtttttttctcttattctgtttccctctttctttcttgggatatctgtgtccctgttaatctgtctttccttttgtctctccgttttgcaacatttgttctctttctgtgtctgcttctcgcagcttatctctgtctccctctgtcatctctctgccccgtcttcccgaacaccagccccgcgatcccgaagcgccttggttaggggagcaagccctggcgcatctaatgggtatctccaggtgcagagattttcctgcggggtcagtggggacgcggaggagacagcctgcccttgtccaggctgtcgtggacctgaaggaggggcgcaaggggttagagtggagggcaccgcagcaggctccccttgccgggtccgagggcgctgcgctgctgcgaacctgagcgcactgaggctgctactctggacagcgaaagctgcgcaagcccctcccgcatacccgattctttgactatggttagttgaatttccaggaggagagtctgcctccccaacctttatagccagctgcagaagaacggacagtgagcaggcaaacatagatgctttggggttcagggaaactaacctcgaaagggtgggagctttcttcaggcaaaggtgttgctagcagaggagaggagctttggggactgaggtatgcctgccttaaactaccatgcattcattgcttaggaaagcggtttccttggagag

SEQ ID NO: 228748 - DNA, 62 bp, Homo sapiens
  chr2:155553936-155553998
  hyper
ctgcaggctcaactgaggctcggaggtgcaattcaggctggtggagcagcgggggaaggcag

SEQ ID NO: 228749 - DNA, 343 bp, Homo sapiens
  chr2:155554718-155555061
  hyper
taaaagataggagacaggtgcgccgggggtgcggggagcggtcccagggggcgggagattggggagcggcggggaggggggagggtctggtccaggcaggtaaaggcagcttcttaggcagccagcgagttggcaggtgggttgggactcgcttgtcaactcattaattttaagcagtcagtttgggggtactgcaggataatcaggagggccgtggggagtcaagaggtgacccgggatgccggtggtggggaaagaaaagaggagcctctggaagcttggaggcaaaattgcgcttgggttcctgttccttgcatccctcctggcttgagtgcgggagaac

SEQ ID NO: 228750 - DNA, 281 bp, Homo sapiens
  chr2:155555241-155555522
  hyper
cctgcgccttcgcttcgcgtttgaatctggctcgccccttcgtattatgtctgcactccgaaggaaatttggggacgattatcaggtagtgaccacatcgtccagcggctcgggcttgcagccccaggggccaggccaggaccctcagcagcagcttgtgcccaagaagaagcggcagcggttcgtggacaagaacggccggtgcaatgtacagcacggcaacctgggcagcgagacaagccgctacctctcggacctcttcaccacgctggtggacctca

SEQ ID NO: 228751 - DNA, 1352 bp, Homo sapiens
  chr2:157176353-157177705
  hyper
agcgctcccagccgcgggaagataagcgtacaggcggccccaaggcccctacaggcgcagccctgatctggccacttgactagacgctcgctccagcgctcgcaggcctagggctcattacatgcgttgcgaggagacctgaaagcagggcgggaacgcacaatctatcttcagagctttgggtcgtgagcacacgtgtggagcatggttgtggcatgggcgtctgggcccctctcctagacctccacgaggtgcggacgcgcctctgccccgcccttttgtgcgccctcaccactagaaaaagagttttccccagtgtcgcgtgggaggtcgccccagtccagctcagcgttccaagagaccagagactgaccggaaatcgttgggtgcagggagaagcaggagacgcgctccgcctcctgtgctcgtgccctagcgcaacagacgcgacctagaggcgacggcagcctgttgcagccttcgccctgagggtggggggcgggggggtgtagaacagctgaggaagacgcagggagcagctggggaggaaagggagggacaccgaggaaacaaagttcacccaagtgaatgcgtcctaattgctccaaggctctctccgcaaagtctacgactgcaagccgcaaagtcaaactacgtctccaaaacgcagtgggcagagcaggagggcttgtgtctccattttcgccgcagggcggatcgcggacacaagtcctctccagtaattccgaagcctcgaaataagactatgctgggaggaggggttggggggtgactaataagaaggcgtgggggtgggggtggggagtacgcggcaagaaccctgctttctggaattctcccgccactgtctgcagggcccagagcgcacttcgcggctagggaacaaaattgccgctctcttcgagcgcccccagcgtggggtggggccctgctttcccgcgtcaggaccgccccaccaggcgccctccgacggaagctggacttttcctaaggaaaggcaaagtcaaagtcggaggaaagatctttcttgcggccccagctgtcgctcctaatggtctcggggaacatactaaaggaaaatgactttaaatcacagtcttgccatcctaaatagttatgtgcaatattttggtttctagcaaaatttaaaagtaaaatggggatttccatatgttcattttattattaaaaacgaattactaaaaagtgatgacctgtttggaattcatatcttgctttacgagcagtcagccagtatcgactgaacacaataaatgcaggggtgcgaaacgtgattgctcgggttcgagttctgtcggatgcaccgatct

SEQ ID NO: 228752 - DNA, 337 bp, Homo sapiens
  chr2:157177922-157178259
  hyper
cctattctgacagcggggacaaatggagaggggaccttacaacctcctttggagaagaatatatgagaaactcacttccagacctctattcaatagtgaaaataatactgagaaaaagttttaaaatctccaagaatagatactctcctttccccttccaccttgagggaaacggtctccatttttgacctggatttgagagcatcggggcttgagacaagcgcgtcttccacagagagaggcgaggcccaggcagggagccccccagcctttactctcggcacctcggcgctgccgcgcggcggatacaaaaggaaacggacgagcgtgcgacgcg

SEQ ID NO: 228753 - DNA, 31 bp, Homo sapiens; identical to SEQ ID NO: 198485
  chr2:157188949-157188980
  hyper

SEQ ID NO: 228754 - DNA, 257 bp, Homo sapiens
  chr2:157189513-157189770
  hyper
gcgacacttcactttccccgaagcccctgcgcccgcgcagcggctcggccgctcacatgtggggagggtgcaacaaaagcaccggcggaaggcaaggccggcgtggccaggtagtacgcacctggagccgcacggaatgggatgtgccttgcagcgccctaacctctcccacccaccttcgtcacccccttagcggaagagcgtacagatgtcccatgacacgagacgctcagagggctcacgcagttcgggtggga

SEQ ID NO: 228755 - DNA, 232 bp, Homo sapiens
  chr2:157190094-157190326
  hyper
cagacaatgcagccgagcagcaggcaacaggtgcgccttctgcagaaaggtactctgattcccaccttctgcaaactctaatactttcgatactcctctgtgcccaccaactcgtaccccttccacgagttttaagggaataaatcgatcttcgtttgaaacacaaggtctatcacagcctcaatcttagagcccagaaagactggacaagaaaagcgaagcgggtggggat

SEQ ID NO: 228756 - DNA, 63 bp, Homo sapiens
  chr2:157198322-157198385
  hyper
gcctctattatctcggcttctcgggaggagcctcatctagtcagtcacgcagaagtttctctt

SEQ ID NO: 228757 - DNA, 598 bp, Homo sapiens
  chr2:158484494-158485092
  hyper
taaagatcgtacctcgaaagcaatgtgcgttgcaaaccacacagatttaagctcccactctcgcctccatagcttggcatctgcggcttttggggtattccccgcctcctaaaactcagactaaatcaccacctcccaccaccaccatgccaccatccttgagcagctctcaggggcttagcacagagcgcgtccgacgcatacctgcagccctccaggtccctgcagggtgaacccagctcccagccatgcgcgcacccacaaacgctctcctattttctccgctgcaaactgcccacaaattagtcacccacctcacccctactacttattcccccacgtccctgctgccttttccctcttccgggcggcttcgtccccaacacacctgtctacccctacggctgccagacgtcaggtgcccacgctgcaccctatcccgcgccccctcaatccgactggcgcttccctgtccgccccgaaggtcagtttgctcggagcaccccctgtcccccacccccgtgctcacccgcagacctcctcccagctcccaccctcgcgggcgtcgggagagaaaccagcaccgtacctggcgaga

SEQ ID NO: 228758 - DNA, 378 bp, Homo sapiens
  chr2:158485512-158485890
  hyper
ccggcagtgagatcgcccagagctggggcgaagaaagagggggcgtggggaagcagtgcggagcctccgggactagatactcaggaatggggcttctcacgggaggaaaagccccactgagactttagggaaacttcaactacgcggcgattgcgcccaggtgatccgctctataacctcccgcagaagagccagcctcctagctctcctgacgtttgttgtccagggtccttaagtccaaccaggttgcgctgtgagagccccgcgggcttcctactggcttgtcccacccctgcgtcctggccatttgtgcctctggggaagggcgccctctctgttcatccctggaaatgaccagttgtccgactgccttctgga

SEQ ID NO: 228759 - DNA, 115 bp, Homo sapiens
  chr2:159314779-159314894
  hyper
cgccgcgcagccagaggtcaccggagcatcttcggagctggtgagcctcattccactcctctcctcccatagcttccctccatgcggcagaggggaagcgcggtaattctttggg

SEQ ID NO: 228760 - DNA, 1567 bp, Homo sapiens
  chr2:159825050-159826617
  hyper
agaggaaggtgccttcgggaacacgcgcaagggcggggattcgcgctgccaatgaggccccggtgtgggccgagcaaggcggggggacgggccggagcggaggctttgctgtggcagctgctggagcggcggccgcctcgggagccggaggagaggcagccgcggagcgccgagctggcctcgccccgaggcccggccctgggtgtggggaaccgcgctgaggagctggaaactttcccggcaggtaactcccgcagcccggactccgccgcgggcctgcgagcgccccgggcatggccagctgccagtgtgcggagaggtcgagagggacccggggtggagagggtgatgggagaagggaaaggcgtgtgggaaagtttctggagcgccccctcctccgccgggcacacccgggagctttccgggaataggcacagacatgttgggcgccccgggccttggtctctcggcggctttggggagtccgcaccttccttgcgcggttcccccgcgccggaccgagccggcctcccctggaaccggtgtggtgggaaccgggaacgcttggggcacgctcgagttctgggaccacccccgcccggcgcgcccgctcgccccctttcccgccttctctgtagccctcgggcttggcaagggcctgggctacgcctggtacctggcgcgggggaggcggggggaggcgcgcctggcaccgcggggtcctgggcgccccccggagtgttggggtgcgcgggtcgcgaagttgccgagagaacttaagccggaggcatggtattgccccagtctgggctgaaagtctattgctttgcttccaagaacactgcgattagcatatccacactcctttattgggggtgggggtgagttaggattagacgttgggggtttttctttaggggtggggcgctgagaagagcggtaattgtcaagattgtgagcccccttgttcttggatgcagagtggtcattttcgggggacgatatcagggcactggcttcctggaggactttggggtgcgggcgcgcagcgctgtgggtgtgcggggctcccggctttggcgcggcggctttccggaacgcctggctgggaaggaagctctaggcattgtgtggtgtgtttgcagacagaaaggtccctggaccggtgttctcaaaacttactggacttattgtgtaaagctccgggaggaaatgtggcgttggccaggtagaaacgcggcgctgcggccaaggggcggaggacgccaggctcggcaacggccttctcccagccccctcctgccagctccagatccgcgtgcctccagtgttgggaccgttctcagtggcgttgttccctgctggagttaacttgggaggtgaggagggaactttcatcttgaacttgaccccagaagcagcgtcgtccgtacaggttacaaggtaaatggaagctgagtcttaacgtgggttggaccgcaaactctggctggcgcggaaaggaagttcctggttcagaatctttgaggaaagggctcaagattgctgagatcgctcgctctggaaa

SEQ ID NO: 228761 - DNA, 857 bp, Homo sapiens
  chr2:160472081-160472938
  hyper
tggcagacgcagctcgtcagtccgacagggaagagggggcggaggcaaaaaagggcagcaggaggcggacgggggtggggggtgatccagaaactaccccggcagggagtgggggagcagcggatattccggggtaggaacggccatcgcaacgctgacagaggttgttttttaagaagcaaaactgttggcggcgacctgagcgctggaagccgaaggggaagaggaaggagacgcgaagccagggcggccggcacaaaggcggcggactcgcggcggcagcgcctgcccggccgggagcacaacccacggccctactccagcgaagtcccgcaccggcttctaggaataaagtttacgttctcctgaggccgcaccccccacctcccacccaggacggcacatctccgtgtcctcctcccccaaactccactcgggaccccgagaaccaccccagccttccggccaccacaacaaagagccgcaccgaccggcgaggataaacagcggcggagggcgagagggcggcggggcgagcgcctccacgcagcaactccggagtcccccgcttgcccgagcgcagtttctccgctgctgtttccaccggctttgtaacactgggaatttacatcctcacccgcacccctcacgcccgaggattttaaactcacctttactctcgaactgagagttgcggtagatgggatttttgccttttccccagatggttgaaggttaagatttttggaaaccccaccacctccttatttctattattatttctgcaagaaaagtataaagagagttgtagtggaggtgagatttgtgatcgggaaagccttcgactccctccttct

SEQ ID NO: 228762 - DNA, 138 bp, Homo sapiens; identical to SEQ ID NO: 198494
  chr2:160569034-160569172
  hyper

SEQ ID NO: 228763 - DNA, 71 bp, Homo sapiens
  chr2:160654718-160654789
  hyper
tgcgggtgggcggcagcggctgcgcggccggagaggagcggggcggggcgggagcgggggcggtgcttctc

SEQ ID NO: 228764 - DNA, 849 bp, Homo sapiens
  chr2:160918583-160919432
  hyper
agggtgccgggccgcgcaagtggggtgctgggcctagacaagaggctgcaggacaccacccgctccccccatgctcaggactgctgacacacgaacccctacaaacgcggccgcccttgcccgccagcttggcccctagcttcgccccttcttcctctccttcgaccaccccgacccccctccccaacgtaccgatccagtccccgaccctgggagactcaccctgccactccaggagccgctcgggggtaagcgccgccgccacaccctcggcgcagccccgcggcgcccccagcagcagcagcagcagcagcgacggcgacagcagcatcgctaaccactgggctctccgggagccccttgtcccgggagccccttatcccgggagcccagagccgcgtcccaagcacccggccccgccgcgcggaagcggatccgtagcctcctccgcgccccaccccctccgggggccttgccagcccagagccctggagacccactccgccaccgctgtctccacagtgaaccgacactcggggctctgggctgggatgcgggaaagtcgcggaggttttcctcgccccacccactgcggcttggggaaggaggaggaggaggggtgggccatctgcccatcccagaaattcctgcctttggggtggggacaggcggagtgaggctgctcgggtcacactctccgctcctctagcttgcagccctgctctctcctttctgggggaggccgaagaggagttgtgggtgagcgatttgagaatctccgggacaaggagcctgacatccgggtttgcaaaccacctggattctggtaaacaccgcggatttgcagcg

SEQ ID NO: 228765 - DNA, 429 bp, Homo sapiens
  chr2:161126281-161126710
  hyper
agtctctcagagtcgcataaaacaaccgaattctttaattcaaagccacgttttcaattctgagcagcccagagacctgccatcgctttctcgcgccgagtcacgtggtctggcaaggcgcgcggtttcctccctagccgcccccagctgccctgaaccttcaaagtcacatttcagtcactccccagtctgaccaacaacgctcacaatgagggcgctgccagcacaggcgacggcctgcgctccagtcttacgaggaaccccaaattcaagacccctgtgacccaggcctgtgtgccccgacaggctaaacctccgcccaggggcttcccgatgtcggctgcagcgggtctgggttttcggcctgcagagctcgcgtctgacggctgaggaacaaaacaccctccctctagcggctcaagcgcacac

SEQ ID NO: 228766 - DNA, 295 bp, Homo sapiens
  chr2:161264451-161264746
  hyper
accgcctcgcgccgcgcccaggcccacccgcgcctccccgcccgcccgctgggcgcggcgcctgccgccccatcgcccgcccggcccccgcgctctccctcccgggatcggggccggagccggggccgggcggcccggggagcagccggcgcccccgctctggtgcaatggttgggtctggctccccgcatgccgcacattcctcggagtagccaacccccctcctctgttctttttccccctcggttctttcctaagcaccagcggcagctttgcaccccggctcgaagcccct

SEQ ID NO: 228767 - DNA, 42 bp, Homo sapiens
  chr2:161349352-161349394
  hyper
ggaggctccgcgccacggcgaggggagcgaagagttacagct

SEQ ID NO: 228768 - DNA, 227 bp, Homo sapiens
  chr2:161349623-161349850
  hyper
ccgccgccccgcgcgccgcccggctctgcccaggccagcgctatagttagcaaccttccagcaactccgcccggcggtggcgggggttcgccgcgcgcccccctccccaggcctgaccctgcgcgcgtccccgggccccctcctccggccgtcacctctccccggcgcccctttaccttggcttgcagatactgggggtaatagtaggtggcgtactgagggtacat

SEQ ID NO: 228769 - DNA, 211 bp, Homo sapiens
  chr2:161350274-161350485
  hyper
gaaagtgcggcagcggcggctgcgcttggtgccaggcggcatctggggtgggtgcgcccgatgtggagagaggagaggggctggcgttccgaggccgtgggggaagggcgggcgggggcggggcctgggcgccgccgagcccgggacccgctggaggtgagggctgagttttaaccactcctcacctcccaggctcgcggttggacgggcg

SEQ ID NO: 228770 - DNA, 153 bp, Homo sapiens
  chr2:161560560-161560713
  hyper
agtcaggaaatgggaaactccgccttcgcaagagcttgagtcgtctccgtgacctctgtggcctcgttgaaaggctttctctgaattgaatgacaacacggaggctgagggtaagattgcaaatcagagaacgtgggtatgaatgggaagctt

SEQ ID NO: 228771 - DNA, 531 bp, Homo sapiens
  chr2:162094180-162094711
  hyper
gaggtgaatgtcctcgggagggcccccccggtgcagctttccccggaggctgaggctgctgccagcggggacatctgctttcttacactccagcctggctcaccccgccccctcagccccgggttgcgtggttattttaccaacacggggggagggagagctcgaggaggtagaaaaggggtggatagaagcttagaagattttcttcccactccccccacgtcccctcctttcgtcacatcttttaaccttcaaggtaaagacttaaggaaacaataagcgtgtccgctggctcgcaggcccgccggggttctcgggcgcggggccttgcccctctccatcctccctgagtccttccccgagtcgggccgtgcttcggcggttcggctgggcgcaggggccggccgggcgcgcccagcctgtggcgcctcctctcccgggctgctgcctcgacagctgcttgtagctacagtaattagactgtcagtgcttgttagaggagagaggggaaaacacgcttctgacagcaga

SEQ ID NO: 228772 - DNA, 126 bp, Homo sapiens
  chr2:162164662-162164788
  hyper
tttcctagccagtcgtctcccgggctggatgtgccgccgtcccagatctcagcggcggccgcagagcgcagaggtagggagagaaaaaggaggcgtcggcggggcgcgagcgaccagggcgctaag

SEQ ID NO: 228773 - DNA, 63 bp, Homo sapiens
  chr2:162165218-162165281
  hyper
aggaggcctgggccgcgagggaggagcccggcctccttcattctcttcgcctgctctcagggc

SEQ ID NO: 228774 - DNA, 480 bp, Homo sapiens
  chr2:162271966-162272446
  hyper
acattaaggcatttcagcccgacagcttatgattatttcaaaacttaaaaaggagatcatagattgtcactgtttctgtactcaaccaagaaaccgaaccttcctgaggtgggtggattggtgggtgagttgctgcttttcgccccctctcctccccccttctgcttgtcgctgtggctctcagcagcagggatttatttatttatgtttgcagtttaaaaggtgggggtgggggcgccgaggacatgtaggatctgctcacaaagcaccagctcaggtgttgtgtgcttttgtattagctggaaaagacagactctggaacttttacagggcgagaagaggccaccggctcgcgctttgtatactttgcacttgaaatcgttacattcaactgaatatttggctcattcagatccgaaaagtctcctagcatcgtcgaattccctcctccgcccctccgctctaaaggggggaaggggg

SEQ ID NO: 228775 - DNA, 968 bp, Homo sapiens
  chr2:162272997-162273965
  hyper
attcaggcggatccgagcttgtcttgcacgatcatcccattatctcgaccactgacaacctggagagaagttcacctttgaaaaaaattaccagggggatgacgaatcagtcagatacagacaattttcctgactccaaggactcaccaggggacgtccagagaagtaaactctctcctgtcttggacggggtctctgagcttcgtcacagtttcgatggctctgctgcagatcgctacctcctctctcagtccagccagccacagtctgcggccactgctcccagtgccatgttcccgtaccccggccagcacggaccggcgcaccccgccttctccatcggcagccctagccgctacatggcccaccacccggtcatcaccaacggagcctacaacagcctcctgtccaactcctcgccgcagggataccccacggccggctacccctacccacagcagtacggccactcctaccaaggagctccgttctaccagttctcctccacccagccggggctggtgcccggcaaagcacaggtgtacctgtgcaacaggcccctttggctgaaatttcaccggcaccaaacggagatgatcatcaccaaacagggaaggtaatactacatttttggctgccgctgctctaggcgcagccggggacaagtgcacctaggctgtgactgccgcggcagcgacgatttggggtcgggagcggagtggaaggcgccctagagttggctagttttggaaagggggaaagtggaagggataaccgccagggtgatgttggtgggggggaccccgttctaggaacatagtgggagagccagtcagtggccagaggaaggcaagaaaaaggaagagccctggccagcggctgggcgatgggagggacgcatcaacactggcatgcacggacaggtggagacgcaggtcgccaacctcgctctccacctgggcagtgat

SEQ ID NO: 228776 - DNA, 243 bp, Homo sapiens
  chr2:162274211-162274454
  hyper
aacatttctggtctcgatcccacggctcattacaatatttttgtggatgtgattttggcggatcccaatcactggaggtttcaaggaggcaaatgggttccttgcggcaaagcggacaccaatgtgcaaggcaagtccttccaattaacacattttcttgacacttatttaggtgagaatgattaattaaagcctttgtggactggctcgagcgacttttaaaacgatcggccaatgacttct

SEQ ID NO: 228777 - DNA, 411 bp, Homo sapiens
  chr2:162274750-162275161
  hyper
gggctcactggatgcgccaagaaatctcttttggaaaattaaaacttacgaacaacaaaggagcttcaaataacaatgggcaggtcagtggctcaagcgctcgtgttttctctctctctcaccccttcctccctgacatccagttcgtcagtgtaaagcagcatatggaactggatacacgtttctttgcttcattaaaaagacttaaaaattgtatttccaccctccaaatttatattaaatctgtaaagttgttctcattggcaacacctccgtcggcccaattttggagtgcccgaccttcccaagtactaatactgattgattttgagaagaaaccccacaagatctgcaggttgtggaaatctttgttcctccttacaggaggactaggagaagggccctgaggat

SEQ ID NO: 228778 - DNA, 168 bp, Homo sapiens
  chr2:162275641-162275809
  hyper
gctagggtactagcagcgctaacatcagcaacagctggctccgctgtgcgttttaaggcttagggctcggggcctgcccacggcacctttcctaaataccaagccggtgggaaaaagctttctatttgttttcgtcgctggtcacccgggccacctttgaggtggcca

SEQ ID NO: 228779 - DNA, 607 bp, Homo sapiens
  chr2:162280281-162280888
  hyper
cactggccgcccgctcggctactacgccgacccgtcgggctggggcgcccgcagtcccccgcagtactgcggcaccaagtcgggctcggtgctgccctgctggcccaacagcgccgcggccgccgcgcgcatggccggcgccaatccctacctgggcgaggaggccgagggcctggccgccgagcgctcgccgctgccgcccggcgccgccgaggacgccaagcccaaggacctgtccgattccagctggatcgagacgccctcctcgatcaagtccatcgactccagcgactcggggatttacgagcaggccaagcggaggcggatctcgccggccgacacgcccgtgtccgagagttcgtccccgctcaagagcgaggtgctggcccagcgggactgcgagaagaactgcgccaaggacattagcggctactatggcttctactcgcacagctaggccgcccctgcccgcccggccccgccgcggcccggacccccagccagcccctcacagctcttccccagctccgcctccccacactcctccttgcgcacccactcattttatttgaccctcgatggccgtctgcagcgaataagtgcaggt

SEQ ID NO: 228780 - DNA, 39 bp, Homo sapiens
  chr2:162281107-162281146
  hyper
cagcgattccgacccgccaagtctcggcctccacattaa

SEQ ID NO: 228781 - DNA, 43 bp, Homo sapiens
  chr2:162283133-162283176
  hyper
cctggagggcgctgcgtctagtgaagtccgcagaactctttac

SEQ ID NO: 228782 - DNA, 577 bp, Homo sapiens
  chr2:162283416-162283993
  hyper
attccgccactagacggcgttccgtggagttttgtctgccacataaaaaagcgaggactgaatttcctttgtgtttctttcccctcctcacatctaagaactaagtaagaggacaaaagtacaagacacggtgcatgtgtggcgagtgaagtggagcagtgcattcgtgtcatcacccacccgaccccggctgcgctcctccgaccccgccgcctactcccgccgaggaggaggagcacgtgcggtcggtggggcgcagggccggggagccaggggggtgccggggctcgaggccgcggggccgcgggggccgcgctctgctctccgcccaggctgggccactggagcgcgggagccctggagcccggcgctgcccggcgctacccgccgccctcgggacagtcaccgtgagcaaaagagtcggtgtcatgtgcgtaaacgaagctcttaggagccgaggatagatttcacaggaacgtagtgccttgttctgaaagacgcgctttggttgatattaggaagtatttttaaaaaattggggaggtcgtttcccttgcagctccgccaccatctgctg

SEQ ID NO: 228783 - DNA, 261 bp, Homo sapiens
  chr2:162284265-162284526
  hyper
cctgagaggaacggcgattcctctccgtaaactcagatttcctcagtttttaacagtgtattttcaaaaagaggacgaaagaagaagacgagcgtgcggctagcactgtattctggctcgtgtcttcccgccactcgcaatccgcgccatcttaactaactttcaatgtccctcggggctgagcgtgccggcggcgggtgctgctcgggctgggagatgctgcggcctgggttctcaaccttccgggtggacgccgcccgt

SEQ ID NO: 228784 - DNA, 91 bp, Homo sapiens
  chr2:162284567-162284658
  hyper
ggaggcaggccggtcttgcccccacaggctaggctgcagcttggccctggtgcacccgagcccagagcagcggggacgggcgtccgggagc

SEQ ID NO: 228785 - DNA, 133 bp, Homo sapiens
  chr2:162930082-162930215
  hyper
aggatttgcaggtgggagtgcgttagaagagggagaccgcgggctgggggtgggggtggcgtctggagtgcgccagttggagttctctaaggcgggtgcccttgaacttgtgccttcagagcacattagcgtt

SEQ ID NO: 228786 - DNA, 92 bp, Homo sapiens
  chr2:162930755-162930847
  hyper
ccccctgagggcggtgtagggcgctgggcggcagccggggcgcagagtgcggggcccggaggagccgtgggggaggggaaagggcgcgcggc

SEQ ID NO: 228787 - DNA, 34 bp, Homo sapiens
  chr2:163174877-163174911
  hyper
caggtgaaatgtgcgtgccgctgtccgctgccca

SEQ ID NO: 228788 - DNA, 912 bp, Homo sapiens
  chr2:163694782-163695694
  hyper
taatatcagaagaacactcccgctgccattcgaacctcctggctcggtttcacagcctcttaagttgacagagcctggagttgccggtctccccaccttggaagcggtggacgccaagtgcactaacaaggcagaaagcgagggcgagagaagagaacaaacgaacttactttgcccttcaaatttccgaatgatggtccccagaaatgtattttgtggtgccacatgccccctgcgcacaggcatgttggccccggtcttccgaggagcgctcccccggagctctggagttctcccgggatctctcctcggctagagcccaggccagcgcgcgagccgctctttgtggcagagcatcctcttttgaaaccagaattctcttcccattagcaccacttctagacacccgctttccccaccggagtccaatccattcccctcaccttccggagggggcctcgcaccggactgccgcgggtgagagggtttgggggtggggaacgggaaggaggcggggtgaggggaggtggcgggggagggaaagagggagggagctgtgggggtggggtgggaagggggcggggagtcacaagggcaatcgatctgtttctcttctcccaaacagcgccaatttcccagtgcaaatgggcttaacctggcggttgcccagagcagtaaggaatggctgaggggggatggaagacttgtgccggttttgctggaaggagagagagaaaaggaggctgggggtcggcggggttgacgtttctatccccgccctctccccctaacacacacacacacacacacacacacacacacacacacacacacacacacacacacgctctctttatcttggtagcttgggcgccgccacagctcggattactcaagcgtgctttagcggaa

SEQ ID NO: 228789 - DNA, 152 bp, Homo sapiens
  chr2:163695927-163696079
  hyper
tttagcctcagggtgcagctcggatccctgggttcagcggaggtgggtgccgaagcccgaactgaattggcacgcaggtccctgcccagcgctgagccgcgcctcgggaaagactgaaagctgcccgtgccgctgagcatgcccagtttctg

SEQ ID NO: 228790 - DNA, 960 bp, Homo sapiens
  chr2:164592553-164593513
  hyper
gcgcaggcgcagagcgccgcagagccaaattcaaatcactttcacactaagagccaaagatcagttttcaaaggagagagggagaaagagacggaggctgccgtgagggagagaagacgggaggcagtggcgagaggcgggcagtggagagagacgggcagcgggaggaccaggagggagagggagaggcgcacggagcccgcggagctggagggggagaaagggaggcgggaggcgagccggcgagcgagctagagacgcgccagagattcatgggcagggagggctcaatggccgcgccgcgccggccggccggccgctcgggtcatgttacacggccggggccgcggcggccgcccagcctcgccgatgcgctcacgcggcccggagggggccccgaggtcatgattacgcgcgcggggactcgcagctctccctgcacgcactctctggcggcccagcctggggaaaggggagcagcgccgtagggggaagggggctttctttcccacgcgtgaccagccggcccctgcgctccccggcctgcgttggagggcccgggacagagccgcgctgctccccggcccgcgggctcttccctgccggttcccggccctctcgacagctgcggcccgtccgcccttccccaccccctctgcgcacgggacgggatctggtctcgagagcctggacctcaccggcaccctccccggggcccccagcaccagccagaaaacgacttgatctgcttagaagaggcaacttcggggagaaaattcgcgttcgcccagttcccctcccccgcctccctgtgaataaataaaatcctaagtgtctaggtgtgcggtcccctctcgcgctccctggctcccctccctacctcccccaggcggctcgggctggagaaagcagcgcccggggggccctggtgtcggcggctggtgcgcaggcatagacgtt

SEQ ID NO: 228791 - DNA, 114 bp, Homo sapiens
  chr2:165477434-165477548
  hyper
gctatttataaggcgctgtgagatcgcaatgtcctgctgatccggtaggagccagctcaaaggggattgtcttcagagacttttacaaacttggcccagctctgggcacatggc

SEQ ID NO: 228792 - DNA, 63 bp, Homo sapiens
  chr2:165478028-165478091
  hyper
gtggggagaggggaggagcggccggtgggtgggggccgcgggcggcgaggcaaggcgcggagg

SEQ ID NO: 228793 - DNA, 32 bp, Homo sapiens
  chr2:165478271-165478303
  hyper
gcggggacccagccgagcgggcgctcccgctg

SEQ ID NO: 228794 - DNA, 246 bp, Homo sapiens; identical to SEQ ID NO: 198507
  chr2:165873393-165873639
  hyper

SEQ ID NO: 228795 - DNA, 197 bp, Homo sapiens
  chr2:166649934-166650131
  hyper
aacagagagagaggggtgtccgcgtcccggccacagagccctttccaaaccactcggaaaccatttaaatggctcggcggccgcggtttgcagcctagaactgtttggggtccccggctaggaaagttgcctggcaaagccatgtctttcgctgtcgcgggatgtcctctcgggcagagaggctggaggagacaggc

SEQ ID NO: 228796 - DNA, 34 bp, Homo sapiens
  chr2:166651211-166651245
  hyper
gtttcgtgagcttccttcccgtgtagtcttgatt

SEQ ID NO: 228797 - DNA, 197 bp, Homo sapiens; identical to SEQ ID NO: 198511
  chr2:166810403-166810600
  hyper

SEQ ID NO: 228798 - DNA, 452 bp, Homo sapiens
  chr2:167232258-167232710
  hyper
tccaggagagggcgcgggcctctccttccccggcgctctctcagggctgcttctttttctctgggctcctgttgctcaggggacgcctgccgctagcagccactggcacccaggctagcccagcctcagccgagctggcggaattggaaagccgacagccgccgctggagcgctggcgaccgcctgcaagcagactgcgcccctcctgccagggcgcgcccgtggaggtagcagccccgcctccccgagggcagctgcgccgctttgcctcctccactcctcccagcgcgcccgggtccccaccccttgctccctccctccctccctctctccactcctgcgggcggcgcagggcggggacccagctaggggcgcggtggtggcgacgctgtagcctctgcaccatgcgctaatagaaggcggaggagggggttgcacgacctgccatccac

SEQ ID NO: 228799 - DNA, 130 bp, Homo sapiens
  chr2:167232955-167233085
  hyper
gagccagacaacaccgccaggccagcgcctccccgaccttgggctctgaagagtctaggctgggaattggtttcttccgtagggctttgctcacaaccgcgagtggggcggtgacgctcaagaccggtat

SEQ ID NO: 228800 - DNA, 128 bp, Homo sapiens
  chr2:168150437-168150565
  hyper
gaagttgggggtgggggtgggggtggaggttactcttgggggagtggcgacttttaggtgtctgaagccccgcgtgggaggcttgctacacttttctggagcgcagacttgaggatggagagtcccac

SEQ ID NO: 228801 - DNA, 201 bp, Homo sapiens
  chr2:168150865-168151066
  hyper
gcctccagagcgtttttgtttcatattagattatcttatttgataaagctgttgagagttccacccgtgctgcaaagccttccgcagaaggcgaattctttgcgctgctgcaaatggatggtgctactgggccagatccgaatctccgtagttcagtgcagtgggttctccatccctgctcaggacgcacaaacttactct

SEQ ID NO: 228802 - DNA, 269 bp, Homo sapiens
  chr2:169104269-169104538
  hyper
cccgctccgctggcggccggggaagttcccaccaaaggagtcaggccgctttgtgtgtgctttcggggccaccggccctggttctcctcctccctccctgctcgccctgcgccttggccccagacgatcaggcttgccggaggacgccccctggggaccccgagggcggggtcgttgaacggccgccaggttctcacattcagaattctcctgccaccaaagagaacctgaagttcatttacaagttgacgagcgggatacctacatgg

SEQ ID NO: 228803 - DNA, 322 bp, Homo sapiens
  chr2:169312409-169312731
  hyper
tgacccaccgcctccgggcgcacgggaagaggactgagagccctgaaaccccagcggggcaggagccagcattctgagcatgtgcgagccagccagggggctagggcggatttggggggtcgactttaggtcgtcgccctaagcgcaaagcgaaagagcggtgagagcaggggcgggcgacactccccggagcggtgcccctgcgcccagggcgcagcgactgcgccctgccctgcgggtgtgggcgagttggccgcgtgtgtgcctcgctgtttgacgcgaagacgagccaatcagggcgggcggcccgagctgccatgtg

SEQ ID NO: 228804 - DNA, 828 bp, Homo sapiens
  chr2:169312971-169313799
  hyper
tagcctggttctggaacgagaggttttggctcccgcacaatgtcacctgggcggacctgaagaacacggaggaggccaccttcccgcaggctgaggacctctatctcgcttttcccctggccttctgtatcttcatggtgcggctcatcttcgagaggtaagaagggctgaagcccctcctcccctccccctgcgcacacacacgcgcgcacacactcgcgcgctctctggcgcacgcccccgcgcccccaacgctcgcgttcacgcctcccaacctttgtgttcggggaggggttgctgacccccctgccccgctggctttctgggagccagaaagggtctggcttgccacggatttcctcccgggcgccggggaggagccgcggagcgttagggtcgccccctgccctcctcctgggccctgctctcctcccggcaagggcaggcgaacaaaggtgagcggtggtcgggctcaggacccgccgcattccgcggggctcgcccctctccgccggcgcgccacgcaaggctgccaggcagggcttcccgccggggcccgcgccacccacctgacagccaggaacgttccggacgcgcggcccggagggaggaggaaccgcgcacacttcaatctttatgctccggcacacggattgtaggggttgtgcttcaaaagaattcgccagggacttcctggcttctggtcgctgtttggtttttatccgtgaaactatcaggcccacagtcctggcaaataggggataatagcatttcaggttatcagcggtttctttaaaagaggatgtgacaggacgggtccacatcctg

SEQ ID NO: 228805 - DNA, 73 bp, Homo sapiens
  chr2:170218319-170218392
  hyper
tctgggggtcaccgcgggaccaagtttcgccggtggtgggaggagtgctctggcccgcggccctgggcgcgcg

SEQ ID NO: 228806 - DNA, 68 bp, Homo sapiens
  chr2:170219472-170219540
  hyper
gccctcgcctctccgcagggtttgccccgcacagaagccggcgaggcggctcacggggaaatctgcac

SEQ ID NO: 228807 - DNA, 536 bp, Homo sapiens
  chr2:170219963-170220499
  hyper
tgaaaaagagcgaacgtcttctccatggttccggtacccttttataagaaggagaaacacgagaggttcagggaacccctagcctcccttctttggggccgctttggacaggctggcaaggggcccggaagccaaaagcacaagtggccttacacccgccctcagcgcacgtcctcagcctgtacgtgacatcagagcccacagggaggggtaaaaaaggagggttgatgcaagttatttcccggtggtgggaaccctgtgtgagaaggggctgtttgcgggcctgaggccatcccatcatctccagctccagcccctgaaccagcgcggcagctagtcccaggctccggatcctggtccaagaagtcaggagccctttccctccagcgaaggggccgtgacgcatggaggagacagccctgaacgcacgtggtcgctggacaggttcccgctgcctcccttccccaggggcgagaacctgccaattactgccagcccctttccccggggcacaggtcgtccggggctctgctgac

SEQ ID NO: 228808 - DNA, 99 bp, Homo sapiens
  chr2:170430256-170430355
  hyper
cctggtcccaacacggaacgaaacaggctcggatgtctcgcccaaccctcatatctcagggtttataacctttcttcgagagacatgacctttcccatg

SEQ ID NO: 228809 - DNA, 87 bp, Homo sapiens
  chr2:170655249-170655336
  hyper
ttgggattgagggcgggactccagggtccctgggaggccccggcagccgcgcatgctcagagcacagggaccgctccacctcgtccg

SEQ ID NO: 228810 - DNA, 85 bp, Homo sapiens
  chr2:170655875-170655960
  hyper
ggcacggggtaaacgccggagggttctgtggagcctatgggactgactggaggccaaagaactttgggccgcagatgtacaccag

SEQ ID NO: 228811 - DNA, 1038 bp, Homo sapiens
  chr2:171567967-171569005
  hyper
ctgcgattcagtgccgcattagcaccggggaaattctgtccccaccctcccagaacctttagtatagcaacgatttaactaggcagatatgggcaactgcaaaattgagtctccttggcaaggagtggggagatccagccgattaagcaacatcttactgtgaaaggccaaagcattaagaatttgctgaaatgatctaaataatatctagatttttaaaaaatctagcttgagaggggtgactctctggttggatttatgccagaggcatgcgtcccttctagctgcaagaaaatgcccgaggcgaggtaccaagcttgggctggaagtagcaacccctgacttaatcccagagcgcgcagagctggtccgtcccctgcgcaagtgtcactgcgggttcacctaccggcctcttcctctcgcaggtggcatgcagtcggcgctcgccgcccgcccgcaaagaaacggcaatgcaaacttcccagcctgggaaccccgctgcttggagagcagctccgctgtgccagccgccgccaggagactggtattcaacctccccgccccccgccacggttaaagtttgctccacattcgcagctcccaccccacccccatctccgccccgaggcaggaggaccacataggagttcctgggtccaccgtgcgcaaacacacccaccaacaaaagaaagcccattaaatcttccctcctgtgaactcgcgccccaacggatacctctttgaactgacccccgcccccgcagcccccgcgctgtctggggcgcgcctggccctcccgggcttactctctcccccacagctgcgcacttttgcagcgcgctcggtctttgatgtctctttacattatggcagagcagccacacgctcttcccgggcgcggggctttgtgtaatggaactgacatttggccttgatacctgtatctcttggtgattacaacaaatttctaaaataaatattgtactttgatctcccagcattgcatttttaatggacgctctcaacattacttcatta

SEQ ID NO: 228812 - DNA, 2780 bp, Homo sapiens
  chr2:171569931-171572711
  hyper
gggggagaagggggcgtgcgagtgcaggatgtgcgagggacccattgtatttgggtcgcaagcagcccacccgtcttgagtacgatattctcattccgcaggcgcgccctgggcgtgggagaaggtgggcccggaggcatcgcatccccgacccctgatggaagtgcggagggcatccttatacagtccagattccgagtccgttgtagttaggctaacctctgacgctgcatcgggagataggtcaccccgtccgtcccggtcgcagtgcggttcccgtgaggaagacgggcagagaggccgggcgcgaactgattaggggctcccccacggccggcggcctggagagtggagactgtgtccgacgggaggtgggtgggggagaggagtaggccgagctccggcggccactccgcagtgcgctctcgcgagccggggccgcgaggcctccaacgcggttccgcacccctaatgccccagggcggtgagcaccccgcggttccccgcccgcctcttcctccttccccgcccgcgcgcccgggagaggcgatccccgcgtccgcagtgccggggcaggacgcgccctgcgccctgggccaggaggaggcaggtggccctcctcggcaggaggtgagccgccagggagggatgggggtcacccaagcccctgcaagcgcgaccctgcccagagcaaagcacgccccgcgcctggtgaggaactttttctttccaaaggtggcaggaacaagtctgtactgacttttctcccgccttcgggatcctctctcgtatgatttgtggtttgtgggaccacaacaaccaggcttcctcgaccgcgccttttttccagtagctcctggtctgccaggcttgcgagagggcgcgctggcttggcggggctccgggcgagaaatcaccagcagcgctggggctttcggccccccacagcccagcccgggcctcctgggtggcctggggagaagggggcgggacagcacagcttcttcccctcgggtgggcatgacgggtcgccttgggtgtcctgccgagctcagctttgagggtatgcgcggcgcgggtgtttttcccaggtccactctgcaaaagttgtggcctgaggaaaacttccaggtcgccagcaggaacgtcacaggagagccccggtcgctcgtcaggcgggcggccctggagcgtgcgcgccacccaacgccgcgctgggcggccgcccggccccgccccaggtcacagccctgccctcggccccaccgcggcgggcgggggacacgcggcgggccgggcgctgtcggtcccacgccccaccggggatctcgcttgggtccgctgtgtgcgcgggcgggtgcgtgtgcggcgagggtgcagggtgtgcaagtaaatacaggggagagttacactctttgccgtctcaaagtccggcgcctggaagccgaaggcagatttttccagagataacaaagacactttgtcactttgggcgctgcgtcggtgcaaatctttaattgcaagtgtgtgtgtgtgtgtgtgtgtgtatgttggggggggcgggaagagtgtctcgagcaacccaagcgcgggtctccaggcggcaaggccccctttgatcaggaaaatccaattatttgtgtatatacatttcccacatagtgattacttcattaattgtcccgcctttatctcctcccttcccatcccccctaataatcagttcttttatccagaccaacaaacacaccataggagctttgtggattcaaaggatttgctttcgcttctgaaagagccgctattctttgatgattgggtagcggcaaacttcaaagccataaatcttccctctgactggctggcggcccagcaaagtccttatcaaattcttggaggtgatcctgaagcgctcagaccgcgcgcggggcgagcgagcggggcgcggcgaggggcaagggcggggagggccccggcgctcagagcaggcgccagggaggcaggctgggcggcccttcgtcctcgccttcgggtgtccatgcctcggcggcggcgtcccgctccgcagccaggggcctgcaagccgtagccatggccgcggtggccgtcctccggaacgactcgctgcaggcctttctccaggtcagggccgagcccggagggggcgggagaaaggtggaaagggccgtgtccggatctctcctggtactccgtgcaccttgaacctcaaagggaaccccgccgatgggtgcagctggagccaggcctaggggtgcccacgccaacttcacacctaatccggtgtggcctttgctggagggacgcgtggatccgggattgttcggaggtgcccggctggccgagaacaggaccggagctcaccctgctgggccctcctgctgatttcagcctggggcgggccagggaggagcgcgaaggcagtgaggacaagagagcttaaaagatgggagggagagcggccggccggcggggttgtgggtgtttcccgactcttactgaccacggagccgggaggggcccgtcggatgcctccccctcccacttcgcgcctgcttcctctaaggctggatggcgtctcagtgcaccaagtagtttagcaagaagcgctcgcgggccccacgttcaggtagcgcaggcaccaaaagtttccctcggccggtgggtgcgtgcgtggggtgcggtggcgggggagggacggccgggacggaggaggggcggcggtataatagcgggcgtgggggcggcgggctggcccggag

SEQ ID NO: 228813 - DNA, 32 bp, Homo sapiens
  chr2:171627946-171627978
  hyper
cgccgttcgtgtctacacgggtgtggagataa

SEQ ID NO: 228814 - DNA, 996 bp, Homo sapiens
  chr2:171669897-171670893
  hyper
cccagttctcgtctcgggagacagacgtttaaccggtgagcactgccattttttttttcctttctggtcataaattagacacttaaaatagattttaaggagccagctgaaacgaaccaataccatggctctaaattacgtttcctggaggctaaaaattctaattgcgtcaaaaaaaattgacgtgtcctgtctactcaccttgactgaccacgttttaggcgtgaagatctccccgcagcccgtttgggcgctccttcaacgcctcacgctcctcctactcacccgtttttccctttgcagaaaaggcttggccccaaatccggttggaatatctttaaacaatcccccacccacccacgacggggaaaggaataaagggcattgtgggcggagggtcgtgttcccaagtcccagcggtggttgacctaaggaaacgttatcctcggcagacagggtggagtagccggggctgcaagctcgcaaatccctaatgccggagagagactggaggggtcgcatatcgccccctccttcttctgcctttgagcgccgcgttcccatttcttcaaagcgcttcaaatacaatcgaaacagctgggcggacaccactcccttccgggccacccctcatcaccggttcgagtccccggagaggatatcttttttccacccccattatcccaagaatcctcccccaggaatgataaaagattaaaggaagagtgaaagacataaacaaaaatataggtttcaaatgttgtttagagccgaatgacaaccacggccactcttagttcaaattcctaccggagagaagagcagtgggcgaaatacctcaccccccaactaggcaaaacaaacagcagttactgtcaggagggaggagggctggggcgagtctggtgggttggcccatagctattggcggaagcaaacgaaacagaggcatggggaccagaaggacgggcgctgtccttcgtgctgaaagatcta

SEQ ID NO: 228815 - DNA, 841 bp, Homo sapiens
  chr2:171671330-171672171
  hyper
ttcattggctaaaacgttaggggtgttttgaactctggggtcaaaggaggaagtggttggaaatgtctcaatctcgtgccacaggtgaagtaaacgaatcttcctttccagggaatcacgggttttgggaaaaggttgaggcgagcgggcgtctatgctggacaatgaagaacgaggggcaccgggagatgtgttgcctcctccttcctgtctcctgccccgtgcgtcttgaatgatttagcactggcacctggctccctgattggtgcgagcgtctcgtttagggaaggctctaggagggccggtggatggaattccgagcttcacctggttgtatgccgcccacttcaagcagcgcagagcagctgccggttgagtggtttggggggacgtttcctacgtggagcagacacccccagcctgtccagccccaagcctcagtgcccggggctgcagtcaccgcgcgccccgccgtttaggatgttttttgtgtccttaaaaagtgccggggatttcatcgtcaggtggagacaaggcgacaaaacagtagtttctttagtaccaaaggcaacgcgattatttcaaaccccacagcgagatccctcttgctgatcaggccatgtctgcccagggcggacccttcgatctcccttatggaactctcggtaatttataatatttttgtgtgtgtttccattgtgttgtggtgaaaggcgataaggcattcaaagaaaacggacgggcctccgctgaaccagtgaggccccagacgtgcgcataaataacccctgcgtgctgcaccacctggggagagggggaggaccacggtaaataccagtaa

SEQ ID NO: 228816 - DNA, 2443 bp, Homo sapiens
  chr2:171673094-171675537
  hyper
ttccctcctctcacccgacagcctgcctatttccaaaggaaaaaaaaaaagcgtgttgagtacgttctggattactcataagaccttttttttttccttccgggcgcaaaaccgtgagctggatttataatcgccctataaagctccagaggcggtcaggcacctgcagaggagccccgccgctccgccgactagctgcccccgcgagcaacggcctcgtgatttccccgccgatccggtccccgcctccccactctgcccccgcctaccccggagccgtgcagccgcctctccgaatctctctcttctcctggcgctcgcgtgcgagagggaactagcgagaacgaggaagcagctggaggtgacgccgggcagattacgcctgtcagggccgagccgagcggatcgctgggcgctgtgcagaggaaaggcgggagtgcccggctcgctgtcgcagagccgaggtgggtaagctagcgaccacctggacttcccagcgcccaaccgtggcttttcagccaggtcctctcctcccgcggcttctcaaccaaccccatcccagcgccggccacccaacctcccgaaatgagtgcttcctgcccgccctagtccctgctctccacgggtgcgctgcgcagggacccccccccccccgcctccctcgtcactcttcttatccctgccctccggattcacgccccggggaagcacggaggctgaggctctagttgaagtggggcaagagcgattttcccttgagcttccatgctgcgagcgcctgtccctccaaagggcgcctgggcagcagcagccgaaggcgctactaggaacggtaacctgttacttttccaggggccgtagtcgacccgctgcccgagttgctgtgcgactgcgcgcgcggggctaggagtgaggtcggagggagggtgtggaggcgatggccggtgggcccttctctgtggggtcctcgatctacccagattagcccgcaatctctctgtcccggggccttcgggcgccatcgcgccagcgccgagagtcgagcaggggcgccgcgcaagatctttgtccgccgcctcctgcgcgctgcgcgcaagttcgtttccccggtgacgttccccatgcttacttaccccaccctctctggatctgtaccgcgagaaatctggggtcctcagggggctaggtagaggagaaacgctgaaaccggaccgaaacctcgccctaggcttagcgatggctaaaaaccggctgggataagagggaggcaagcaacattccgactcgctgctttctggctgtctggagtgcaaggtgactgtggttcttctctggccaagtccgagggagaacgtaaagatatgggcctttttccccctctcaccttgtctcaccaaagtccctagtccccggagcagttagcctctttctttccagggaattagccagacacaacaacgggaaccagacaccgaaccagacatgcccgccccgtgcgccctccccccgctggcccacacgccggctgctgagtgcccaatggggcttgtagcggctcggctggaaaatcgctcactgagcgctcccctgtgctcctagcctagtcccccacacccttgcgtcttgtactggccttggacccccaccccgaccccgaccccgcctcgtctcggcgcttcactccaggtcgcgccgatgcaccgccagactcgagagcggcccagggctacgctccctgcgccccagtaccggagctagcgcgcacgtctcctccgctgcccccacccctgcgcacccctaccaggcaggctcgctgcctttcctccctcttgtctctccagagccggatcttcaaggggagcctccgtgcccccggctgctcagtccctccggtgtgcaggaccccggaagtcctccccgcacagctctcgcttctctttgcagcctgtttctgcgccggaccagtcgaggactctggacagtagaggccccgggacgaccgagctgatggcgtcttcgaccccatcttcgtccgcaacctcctcgaacgcgggagcggaccccaataccactaacctgcgccccacaagtaggtcccgccccaattttctatcaaatgaactgcagggaagatgggggcgctgggacgtcgggaggctgagctggcggaaagggaagggggagcgcggagataatggaggctgggaaataaatggggctctgaccccgtccctgccagaggtcattcggctgtcagggacgctaggtgactcccagggcaccggaaagcgaggaccacgcaaggtccgagcagcggcgatcgttgagggcttcgcggaggaggaggggcgcgcagccagggtgttgtttttattctgttgtgtgtggtttctttgctccgtgggacgacaggggtcagcgcagggggcggaatgaagagcta

SEQ ID NO: 228817 - DNA, 279 bp, Homo sapiens
  chr2:171678073-171678352
  hyper
cttgaactcttccacgaccccatttcatgccagtttattttaagctgccactaggctggagacccgccaagaaattatgagacgtttcggtcccagatgcctgtgttccctttctgggctgctgtggtcgccctttgagtctgcggggcccggccagtgggtgttgggcagctcgatcggagcctggccctttgcgtgtgggtcagccttcacccaactccgaccccacctccggagctgccgggcgggggtcgcttacgggcccggaggggcgccggg

SEQ ID NO: 228818 - DNA, 177 bp, Homo sapiens
  chr2:171678791-171678968
  hyper
acagccagcgaccacgctcccctacaggccctgaccctcctctgcccgccccagacctggtccccaggggtcttttcctctggagtccccaatccccaacacccagtggagcgaacgccgggtgccctgcctgggcgcagaagcgggaggaaagcgcccccgcgcggcaaccccgcc

SEQ ID NO: 228819 - DNA, 250 bp, Homo sapiens
  chr2:171830079-171830329
  hyper
ggggactacagtgcgcgccacgggccaccaggtggcgccgggagcctgggaaagccgcgccccgccagcggccgcggggtctccgggccgccctcgcagggcccctgggcggggccggggcgtcgcggtggggcgctttccgttctttggaagaagggctctggtcccccgctttctttccatctcagacccagtgcggaaacgtgggggatgagcctgggcgccttcaccaaacggaaccccctttaat

SEQ ID NO: 228820 - DNA, 32 bp, Homo sapiens
  chr2:172017402-172017434
  hyper
catcagttacaggcggcggcggcgtcacgcgc

SEQ ID NO: 228821 - DNA, 75 bp, Homo sapiens; identical to SEQ ID NO: 198533
  chr2:172289937-172290012
  hyper

SEQ ID NO: 228822 - DNA, 158 bp, Homo sapiens
  chr2:172291205-172291363
  hyper
tgtgccaggtgaccgccagccggccggggcgggacggagggccgcgggcgcgcggcggccgagcctcctgcggggatgcggttttaacgcgctggggcctccctttatagggtcacatgtgatggggaggaggatacaagcccggaatctgggatagg

SEQ ID NO: 228823 - DNA, 56 bp, Homo sapiens
  chr2:172379778-172379834
  hyper
ccggagcgagaatttgcccgtatttgtaacatcctcggccctgggtaaaggggctg

SEQ ID NO: 228824 - DNA, 155 bp, Homo sapiens
  chr2:172380074-172380229
  hyper
ctgcctggcaccgagggatgcctctgctcgggatgcccccggcgcaagctgcgtccgtgtttggcccgcggcgagccagccccgggcctgcattctctgggctgaggctggcgcgggggaggggctcagcagtcgctggcaatgtttgttgtcat

SEQ ID NO: 228825 - DNA, 152 bp, Homo sapiens
  chr2:172543932-172544084
  hyper
actgctcgtcgcacgcaggttttccttgttgccggggtttgtagttcttctcgatcgtgtcagtttgtaaggcgagggcggaagttggattcctggcctgagaatattaggcgtagttttccagtttttggcaaagcggaaatacttaaggc

SEQ ID NO: 228826 - DNA, 456 bp, Homo sapiens; identical to SEQ ID NO: 198536
  chr2:172750647-172751103
  hyper

SEQ ID NO: 228827 - DNA, 306 bp, Homo sapiens
  chr2:172945905-172946211
  hyper
cccacacgcacgcacgcacgctagaccgtttgctgcactaggaattcgagcttgggccccactcgcccaggtgtgaacagtggctgattagtgggcggtctagtctctaaaatgacccctccccagactggcccttctcgcatcgggacccgcgcttgcacgctgcaggagccgcaaacgtcagctgttctggaaaccgagagggtcccagagagaggagatacgggcgcatttgagagcaagggcctacttggccgggactgaagcttgcgagttgagctccagttcggccggcagttccatccc

SEQ ID NO: 228828 - DNA, 751 bp, Homo sapiens
  chr2:172947570-172948321
  hyper
cacattgagaaaccagctaccgccagcggctcggcatcagagggcccgcgctcagtgctcctccctagacctttctgagctaagaaataattccggagtgtagccatctcttgctcacacacaacccgcttctaaattaagcaaggctctgaaacagtatcccgaggggctcatgccggacttttgttccaagaaggcaaccaggtcccctgtgctaccgcaaaagtctttgatccttttccagctgtggacacagagcacccaagagactgtcgcgatgtgcggccgtctctccccttcccccaccttgcaagtctctggaatacactgtccctaggcggcccggccgtcgggtttcctcacgccttgccctgagctccgggaattaccaattccgctttccccggtcccaaccccgaccccgcgcccgccgcggcgatcacttacttgggcaaggccctcagggcacgcgcgagagacctggggcccggcagtatccgagcgactgtgctgggcacacggcgtggcactccataccctaaaacaggcactaggaaggagcaattaaaaccacaagtgcgacacagaaatcaggacgagccgagcggctcccggagttgcctggtggcggaatcattagctggctgttgctacaaagcctcaccgtgtggttcggtgattaagaaaaaaaaaatcttttaaacgttggcaaacccgttattggtttggcgtattgggttttttttgcttt

SEQ ID NO: 228829 - DNA, 1566 bp, Homo sapiens
  chr2:172949181-172950747
  hyper
ccacaggcctgggtttgctgcgggtttcggtgtcccccagggactcctaaactctggaagtcgcgctagacctcaggaggccggaaaatgaccacctggcgtcggtggctccagcagatctgagcccctaggccccctgggctccacgctgagccgcgctctcggggcgagtgagcccggggctctccgcgcatggggagtggagaagggagggggaggaggaggaaggctgggagggaaagaggatgtgtgtgttgggggagggggcggtgcagccgcctttcctgggaggagaagcgcgggttcctggctctccacgcgcactgctttaatcagacccgtgcagcctcgagctggagtggccagctgggcctggagcaatgcgagcgggccccagggagcgacagcggcgttggcgcagcggccgagtgagtgagttcgcagggagggcccctaagccccgactccagggatgcggcagagcgtaccggggaggcgcggccggataggcgctgcgctaggcacaaggctcttaggagaacctctgtctgttggccgcctcgggcgcccccagtgcgcgactccgcgctccagaggcagaggtcagtctcctcctgagccgccctagctctgcgccgaactgagtggcagcgacgagaagcggtcccgggtgtccggtgttagggaccgctgaagggtggggacagtggtaggggggcggcggcgcggagccgctggttggttcctggggaggaaagcgcgcgagggaggcgggaggccgatgagccgcgggccgcaggggccccggcgcagacgccgcagcccattgtgcttcctgcccggcgcgctctgttgcagaggagccccggccgggaagtgtggatgcgtcttacccgaggccgggccgcctcgcccgctctagtccagcggagcccgagcgcctcggaccaatccccagtgattatgcaagacagcggaccaatcagctccgccagctcatgaatatttatgaccttcgctgagtcaaagctttgaaccgagtttggggagctcagcagcatcatgcttagacttttcaaagagacaaactccattttcttatgaatggaaagtgaaaacccctgttccgcttaaattgggttccttcctgtcctgagaaacatagagacccccaaaagggaagcagaggagagaaagtcccacacccagaccccgcgagaagagatgaccatgaccaccatgccagaaagtctcaacagccccgtgtcgggcaaggcggtgtttatggagtttgggccgcccaaccagcaaatgtctccttctcccatgtcccacgggcactactccatgcactgtttacactcggcgggccattcgcagcccgacggcgcctacagctcagcctcgtccttctcccgaccgctgggctacccctacgtcaactcggtcagcagccacgcatccagcccctacatcagttcggtgcagtcctacccgggcagcgccagcctcgcccagagccgcctggaggacccaggtacgtgcgcttgccagggagagggagag

SEQ ID NO: 228830 - DNA, 1199 bp, Homo sapiens
  chr2:172950953-172952152
  hyper
ataaatcccagagcgtctcctggcactggctgggcctctgggcggctcggtgtgcagagcacacaatgccccgctggaaaacagaaacccacatgtgcacgtattagtctcggtaattatttattgcgtagcgctataaacaatgtatgcaattaagggtaattaaacctcaactaccgcctgcaaaaatagcaaactttccctgcaaaggcaggagctgagctcctgggaacggctctatccctcctgcagcgtcccgggacaggccctcggattttgggggacccttccctggctttcagagtttcttgaacgttctctccctggtgctgcctccgccacccttcggtagccactcgctctcggctgttcgcactaaaggcggcccctcgtattaacaacgggccctacttctgctgtccctccaggggcggactcggagaagagcacggtggtggaaggcggtgaagtgcgcttcaatggcaagggaaaaaagatccgtaaacccaggacgatttattccagtttgcagttgcaggctttgaaccggaggttccagcaaactcagtacctagctctgccggagagggcggagctcgcggcctctttgggactcacacagactcaggtacctcgccgctgccgctccgttctgccacgcaggctttccgcggccggcctgcgcccgggtcttcatttgttgctcgctgggactcagggtcggggtgtcactgtgtgtatgtgtttgtgtccacccctggctctcagcgtgtctccttcctccctcattccctctgccctagctctgtcactgctctcggtatcccgagctgcctgccgtccggccctctgtccctggacaatctgattagggcgcaggaaggatttccccagacgatttgtttgggaactcagaggtcacacgtgcctaaacaactggaacaatagactccgggcttaatccctcctttgcctttaaattgtgtgactaatcactcggggcctgggtccgcgcctcagcctccctcctcctcctccttcttaccggttgggggtggggggagatcctttcctccgccctctcacctctcaagtcccagaccttagagaagaaacgggaccttccttcccggctttctgtaagactccggggagcccgtgagcgttcctgacggcggcgggcgcgggtttccgacgtc

SEQ ID NO: 228831 - DNA, 148 bp, Homo sapiens
  chr2:172952394-172952542
  hyper
ggcgctgtatcttccgcaggcggtagccacggtcggactgagcccctggcaggctaaggcctggatcccggttctcccctcatcacaactcctccctggctctctgagagctgcccccgtgggctgacggcggcgggaggttcggcct

SEQ ID NO: 228832 - DNA, 301 bp, Homo sapiens
  chr2:172952840-172953141
  hyper
ctccccacccgtgccgcccggctggaaccctaactcttcatccgggaagggctcaggaggaaacgcgggctcctatatccccagctacacatcgtggtacccttcagcgcaccaagaagctatgcagcaaccccaacttatgtgaggttgcccgcccgtctccttcttgtctccccggcccaggtccctcccgcctccaggtccatccatcccgtccggaaaagaaggacccagagggaagaaggaacagtggaggcgggacgccctccatctcctcggagccccgcgaggtccggcccag

SEQ ID NO: 228833 - DNA, 150 bp, Homo sapiens
  chr2:172954812-172954962
  hyper
agctcttgagaggccgggaggttgggaggctgagaggcctgaaagcagagacactgctttgcctctagccttcctccggatcaggcctccctgcttttgcatgcccggaggcgctggattccgtcgcggaaaagacgcagccagacgcca

SEQ ID NO: 228834 - DNA, 710 bp, Homo sapiens
  chr2:172955235-172955945
  hyper
tgggagcacctctagtgaagcgcttgctcagattagtttcctccagaggaacacgggcttcaagggactagaaccagattggttcccttctcgtggccctgcgtcccagcccagccccaacccccaccccagatctcgcagccgagccgaggcagtcccggagagctgcgggcccagacaggctgccaagcgctgttcctacttctcccgcactcgccttccagcgctgctgcccgcgggagctggccctccacctttggggggtcttttcaggcgcgcggtggggagcagagcccggaaggcagtgatctgtgttgtgacaagcacccatttttcaattggtgctggtgaaagatcagatgcgccaggctcttccgacgccctttgggaaggggaggaggaagtggtggggctgctgggggtggggggaggcggtgtgatggaagcagggaaagtagtcgggggtgggggaatgatgccggggacctccaagccccttccaggcctgagattgggacttctccgcagcacctagaagaaccagcgctgatgggagagatcagacctcagaaaccaggatgtgggcagtcagatgggcctcaaagctgaggaaagaatgaatttcccagctcccgcgcggggtagggggtcttcctaggttcaatttcccctaggagatgtgactttgctagtgcgaagatttctgtccg

SEQ ID NO: 228835 - DNA, 365 bp, Homo sapiens
  chr2:172957708-172958073
  hyper
aagaaatcctcctccggtccccagctccacaacaaacccctagctccagcgtagacagacaaacggctgtaaaaagtgccttccccaggctcaagaaacatgtcacccccacccaccgctttcctaccccctccctcatcccccaatcttcgaggattaacacttcctgaaacatcaagtgtttttataaaaaggaaaaaaataatcctgacatcgctgacaagaagttttgatggaagaattagctggtgcatacataatcactcccccaccctcctactcccggagcgggagccacggcggcgggcgcagcgcagccttccaaccctctgaaaaatgaaaccggtttccacccttaccttctt

SEQ ID NO: 228836 - DNA, 178 bp, Homo sapiens
  chr2:172958322-172958500
  hyper
gcgcctcagagcgccgcaggctttttgcagcgctgcgcttgcagaataggactgaaattttcggctatatagcctctgtctttatagctgatgaaaaaaattgcagattattagcataaatgtttactcttcattacgctgatgacattgtgcactcgagatcttggtaatctttggg

SEQ ID NO: 228837 - DNA, 189 bp, Homo sapiens
  chr2:172959062-172959251
  hyper
aatccttttccccgcgtacctgctctccccagttgaatgcccgggaggccccgaggggctccccaccctaaaagcagcaactgagaaagtgactgaaccggataccccctcctgccacctcctcctttctttttctttcctgttcccccctcctccttccttcggccccattcccggattctggcaaac

SEQ ID NO: 228838 - DNA, 1642 bp, Homo sapiens
  chr2:172960505-172962147
  hyper
tcctgctagaggccgccagtccccgcaggacctagtgccctagcgccaaggctggaagtaacgcggcccccaggatagcgccccatcctacagcttctaggattcctggaccccaaagttgaattcgaagggaaaggacctatctgtatttttggaggaggagaggatctgtagcttaattctcaaaggagtctccgaccctaaacaggttaaagccactggtggtcgctgttccatggagggaaaggagcgggcttttgacttttgagcgagttcgggggacgccaggagtgggggagttgcactcgagttttactgcccgtaagaacgactttttgagaggggacggggcttcttgctcccggacattgttctcttgggcggaggggaccacttcagagcttctctttgcacccgcctcttctgcccctcgtcttctaccactgaactgtttgtaaacaaagttccagtcttcccccgctctctccgcctccaccaaaccggtatttctcccaaattcgctccatcagtctgggatcgttacacagggcggatattcacaattttcacaagtgatcctgaaagaaggcctaggggaagcctcctaaacggtcccacattgcagcagggctggtgaggcctgggatccattctctctcttttctgcccttcccatcccggagtctcggggccggcggcgggaattccgcgcagccggaggggggtctgcgcccagcggagcgccgtgctggggcgaggtggctgtgggcagagcgtgcaccggggttggggggagaaggggattgaaggggcggggggcgcgggagtacctgggcggcaggcagttggccctggagctcagtgcccgcgttctgcctgagttgggagagccctgccagagggtggagcggagagggccgtgcacccctcactcttcagcttccctccccctgcttcccagcgcttgtcatatcctgtctctggcctgatatttcacgcgagcaattggaaggagattacaatggagatttatgtgtgttctgagcactgctagtttcccagcgtagagagccgagatcgctgcttcccatttccatttttcattcgcgctttggggagctcagtagagcacggggggagcgtgtctgcgcggcggcgggctgatcacaggactccgcgtctccgggcgggccgggagactgtgagaaaggcttgccagcgcgtcgcccccggcggggctggagccggcccccgcctccaggagccaggctttgtttcctcccttgcctacccctccccctttccgccccctcatttctgggacctgggcgcgtccttgcaaccccttctctttgcccttctcgtggtctgcggaaacacccccttcctctggccccttcaccctcctgctctcggcttcgcaggctccctggggaaaggcacaccgtggcccggcccgaccctgtcgtcactgggtgccgggtaaggtgactccggcgagtctgtggggcctcagcccaccccggagctgggagctcccgccctcccgactcccaggcttggctcatgccaaggcctgttgcgtgattccaacttgggctgacattccctgccccgggctctccagcgtaggcctcttaat

SEQ ID NO: 228839 - DNA, 550 bp, Homo sapiens
  chr2:172963629-172964179
  hyper
ctcgagcacggccccgtgtcgttggggtcggcttgcattccagagcagccagccatgcctcccgagggtgactcacagagctctcagttcagtcccgaagggcggtgggacaaacggaggggaaggttcaaagtagggttccgaccctcaggctgctgcagagctcaggtccctgacaggaggtcccccgcggcggctggggtgccgagcctggccatctaggcgggcgcgggggcggtggcgccggcgccggaggggcagggcaggcggaggctggagccgctccgcgctgagtgagtcaccccgccgccggccggagaatccctcgcggggactcgggagggggcggggcgtgaaacccccggtgcggccccacgcccagcgcgcctgtcctctccttgccgcacctcgcggtgtcgcagcctcggaaagatgtaaacgtagctctcggccggctggcttcccggcctgggcagcggcttgagctctgagcacgtgactgaccggaccctggcaccaagaaaaaagcgcacacatccaatgaaaacaa

SEQ ID NO: 228840 - DNA, 2561 bp, Homo sapiens
  chr2:172964665-172967226
  hyper
tgaggagagagctgagggagcgctcctgggggagcgcggtgggggtaagataagggatgggggctccgagggctgggaactgcaggaaggaaagaagcggcggggccgcccgggtcaaggggccacgtgggggagggcgggcaggcgggaccgggaggtcaataactgcagcgtccgagctgagcccaggggagcgggcgaggagaaagaagcctcagagcgcccgggaagcctcgcgcgcctgggaggcttccatctcccgggacccagctctcagcccggggcgaggaaggcgccagacaggctcacccggaggggagggaaggcaagtccgaggcggggctcgaaacagccgagacccggggctcaggtcagaaatgcggccttttagggaggcctttgccaagctgctgtccggttcccccgagagaggggcccgtttggtggccccgggagtgagcagggcctgagacgggccactgcaggtcgcagcctgcaggagaggtgggtggcggcagcgggccgggaggagggaaccccggctcggggtaagcaatgaggataagtggtctctgctctcagtctctggcgagttctccctggggttagaaaatcgtccccgcgctcaccggggcgcccccgccgccgtgatggtggtggtggtgatgcggctgcggggtctgagtggggtgcagcagcggcgccgtggcctgcaggtgtgaggcggatcccgaggtctggtggtaccaggggtagttgcccagaaaagccgaggccgcgctgctcgggctggagcccgagctgccggcgccgctgccgccactgcccggaccaccgccgcccgccatccgctgcggcacaccaaagtcccaggaggccggcgctgagactggcggcgaagcacaaggtggagaagcgctggccccagggtgctgctccgaggggatctcaccacttttccacatcttcttgaacttggaccggcggttctggaaccagattttgacctttgaggaaaaagacctgagcattagtggaggaacctagtcttggggcagtaggggttcgaagaggagaaaaaagaaggcagagaaaaaccgctggctagcggtgggcagcgagcgccctggggagataagaggatcacgggcggcggccttcgaggctctgccggttcctgctccctggggaggtaattgccaaaaggccaggactgctggtgtacgtgcactgtgatgatggtgacagcgggagggtgaggagggccagttatttcacccgcttaatcagtagcgagaggtacgggatttctgtccacccggtccctttccttccctcccacggcggccccttgggggtttccagctttgggcctagaagcttacttagggccgctcgaggcgcaggcctggaaatccttaaaagtacttaaaatgaactttaaaaagcattgtcctaaacccgcctgcttcccagccatctcaggcccgcgctctcctcgcccctgcagggcgcgagccccacctgagtctgggtgaggcccagagaggccgccagctcggctcgctccggcaaggccaagtattgagtcttttggaaacgccgctgaagagccgccagctggaaactggagtagatggtgcggggtttccggactttctttggcttcccgttcactatccgaatttcaggctcaaggtcctccttctctgcaacgataaagaatcgtaagaacagcgcaacccaggggtcctggagttcccgccctcctagagggcccggcgggggggacttggcttgagcaaagaggtgggtgcactgaactgtggcgccacgggcaggcgcaacttcgcagcgtgcgatcggagccgccaccgaccccgggagctgtaccctccagggaagggggagacaagtgcacacccaagagaaagaagctggtggcaaggagatgcccttatgaggcaggcagagcacgcccacttggctcttgaggccaccaggtcctaccaaaggagagagggacgtaaccggcgacctgcggcagattggaggctggggagggtaaagggcacaagcgggcggtgagcaggcagcgtgaaaatccagagctttcgaaggccccccgccccaaacacgtttacccatccatcccattaactagaccgactcggcactcttgacttcagcgttatgcataccaggctcgttgttggctggggacgaactggttccatagggagcgtaggaggtgtaggcggcggtgtagcccaggtcatagctgctcttggcggagtaagggacgttgttgaggccgctggcttggtactggtaggaacccatgtgcgcgtagggcgagcccccgccgccgccgccgcccgccgggtgctgctggttggtgtagtagctgctgtcggtggcggtggacaccggaagggtgggcgactcctggggcttgtggaggctgctgctgctgctgctgttgccacccgggccggcgccgccgccgctcgggggctgctggtgctggtggtacgtgctggaggcggcgatctgggtcg

SEQ ID NO: 228841 - DNA, 388 bp, Homo sapiens
  chr2:172967606-172967994
  hyper
ccgagcggctttacgattgtctgccaggcgggctcctgaagtgtgggcatttaacactcgtcacgtgagcgctggcgacgtcacctagcaacagccaatcagaagcaaacggccgcggagctccgggaacgcccggccaaggggcgggcgtcacatggtgggcgctgtggctgcggctgcggctgcagcggccccaggtgcaaacagactgccgccgaatgtgagcagcgaggcgaggggtcgaggtagcgaggagtcagggtggcccgcagcaggaagacagaaggcgtggagacagactggcgttttgcctcagaggaagaagtggggtcccctctcccattctgtgagcaagtgccagttccagtgattcgtactttcatgtccg

SEQ ID NO: 228842 - DNA, 226 bp, Homo sapiens
  chr2:172968670-172968896
  hyper
aaccttggcccgacggtgatggactgcacgacttgctggactcccaagtccgaagttcctgcggcagcgcttgctttgtggcgccacctggtgggcagtgtgcgaggttgcggggggcggggtagacggtctaatcacgcccaggcgccagcctctgaaaccccccaaaagaacaaaatagtaattaaaagccacaaaattgtgctagtgcgcaccatctgaagca

SEQ ID NO: 228843 - DNA, 604 bp, Homo sapiens
  chr2:172971056-172971660
  hyper
gcgctttgctctgccgggctattgggcgtcctccgctgcacagaaagccagcccagttgggtattactggggagaggatgcctcctgtcggcagggagctagggtgggcgcccgggtgccctcagtgcgtggcggggccaggcccattttcactctccttcctcactcgggggatgggagggctgcatgcgctgctgctcctactcctcacagtctcgtcgagggtcccggagacgggagtttccgggccgctggtccaagaggcaatgccagtttcggtacctttgtgttttcgtccccgaagtagtagctctaggaacctgcgctttcgaatccctttggggtttgtcctaaaactcaaagacgttggaagagggcggggatttggttatgagaacctcccagctcagcctttgcgaccaaacccgcagtgcttttgttcttacttcattggctaattgcagcttcttgggacaactctggctgggtcctttcgcattgctggtctcctcaacctgattttccctgcgacccctaaggcagcctcgagggactccgggagccatcagctctccgcagccccttgggccggcaggcagacgcg

SEQ ID NO: 228844 - DNA, 373 bp, Homo sapiens
  chr2:172972856-172973229
  hyper
acacttacttctcccgggcctggtgctgccagctccgcggaacagattggaaggggcattggccgtcctgagggcgaccgcgcccctctctccccaaagagagtcctggaaggggggttcccctgggagaggaggaggcccgcccggctgcgcagagggtagccccgggaagattcctgaacagactcgagcctctgcggagagggcgggatgcgggtgccccctggcttggcacgtgaagccaagcttgaggacctgatgttttgttcccgctgggattccgccccaagttatctttgctccctgctggggtgtaagtaaaccccaggggcttgaaccgaaatcatcggttactcgacgcttccagccgtgg

SEQ ID NO: 228845 - DNA, 124 bp, Homo sapiens
  chr2:172974002-172974126
  hyper
ccatttgtgcccggcgttccggggggaccgggagggggctgtgcttggggggcggcggggcgggggactggaagcgagggggtaagtgtagcagggaggggaacgtcgccggggggtcttggac

SEQ ID NO: 228846 - DNA, 456 bp, Homo sapiens
  chr2:173037293-173037749
  hyper
tgcaggtgagggctcgggcggtggcgggccgtggtccggcgcagtttccccgcggcccgctgggtcgcactgtggccttaggaatgtgggccggggcggggcggcttgggagcgcgctgcagccaacgccgcgttcagccccgggcgcaactgcagccgtgccgggggcctccggggccccgaccgaccgacagctctttcagaccgcagcgaagtttgcacacacgacagcacgtcccggggctaggatcttgcccgcctgcggggctgacctgcaccacccttggggaagcgcgaactgccgccccgctgccgggagttaggcgcccgggcctgggtcgcccccacagacggctcggacggcacgaacgagcggaccccaaggatagtgggctggggaggggtccagtcgtggtcacggaaacgggtggtcctcgcgccgggctgcactcattc

SEQ ID NO: 228847 - DNA, 783 bp, Homo sapiens
  chr2:173099598-173100381
  hyper
ggggacactggggggagcagcggcgggcatctggaggcatcgggggacagcgggggacattgaggggcagtgagggcggccgagttgtcggcggtgggcggcgccgggggagccgcgctcggggacagctggcggctcaacggcagcatcggcagcatcgagaaaggtgacgagttctgcaaataacagctgcggagcaatcgttatgtttggacaacgtgggaagggccattgttcacaaattgttctcttcaacaacacctgcatgcacagataataatccattgtcggtctccggcttcaaagacaaaaggcagccgcggagggaggagtcagcagagcctggagataacaggaccactttgcaaccggggagagtgcaaacgaggactccaagtcgcgtcccgggtctgccgcgacggtcgctcaccgcaggggtctccttcctcttctggcagcgagtgcgacctcttttatcctagcaggccaccaccttcgcggcaacaaacatcatttcctatgcagttgcaaagcatgctcccttgcaatcagcgatcaatactggcaaagtggctccaggataggaaaggtcgcacgtgtgttggtaaatggaaaggtttatgaggcgcaggtggtcgtgctccgcggagattgtggtattagcatgtcaaagacaaaacggaaccaaggtatacaggcacagagtctcttcctggggctccgggaaagcttggcacgaccctcttgagccttcagtttaaaatgaaacgctggcgccagatg

SEQ ID NO: 228848 - DNA, 38 bp, Homo sapiens
  chr2:173292254-173292292
  hyper
ggaggggcggggccggcgtcctcgtcacttgataaaac

SEQ ID NO: 228849 - DNA, 380 bp, Homo sapiens
  chr2:173292962-173293342
  hyper
aaacaaagtgctttccgccggttcttccctccgggcgtgtttgctgggaccccggcaggtggcacgctttgctgagcttcacgtgtgtgtttggggctggggtggcgttcagggtcaccgcagcgctgctgtgggtttgcagggagcgtagttccaggatggtctaggcctttcccaaactcacggtgcaccccgtctcccccgcagactggcgcgccccgcacaagttggaaagccactttccatgtgtcctgcatgactttctcagcaaggcgggggcgctccttaggagatacttttacatgcctttgaaaaaaaaaaaaaaaaagatgggggtgggggcgggaattaaccaaacacctgttcgctggactagatca

SEQ ID NO: 228850 - DNA, 1067 bp, Homo sapiens
  chr2:173600370-173601437
  hyper
ccggccaccggggtcgccacccccagtgtcccccagcagcgggaccgcggggtccccaccccggggcggaatccccacccacgggcgccgcagtgcagcggcgggcgggcgggcgactcggccctccccgcacccgcgtcccgccccccgggtcccctccctctccccaccgccccaggccgcgggagcccgcggggagggcgggcctgtcgcagccgcgctggtcgccaggcgtccgggaggagcggggtccgcgcggcggacgaggcgggggcggaggcgcaggcagagcgagcgcgggaggtcgccgcagccagggacaccgcgcgccgccgctcaacatggtcgctgcgcacgctgcccattcttcctcctctgccgagtggatcgcctgcctggataaaaggtagctcgccgggggccgcagccgggggccgagctctgcggtgctgcccgggccctgagaccgccgcagctccgcacctgggcgcagcgcggccgggctgcgggtggccggggtccccgagcgggggaaggggttgaggtcctcgtccgggagacaggaggacaaggatccccgcctctcgtggggtgccagcggcatgagattattacacgtggtggagaaaatgcagcgcagtaaggggagagagcacccacctctccaaccccctgccctgccgcgactccaggctccgctcctgggtgggggtttattttctcttggcatcacgggacagaagaatcgatgcataccctttccggctattcagaccttgcggggtatgaagttttaaagaggggtgggggcaccggcaggtgcagagtaacattctttttttgttcttgaaagcaaagtgtgagggacccggtggagctgtcgaatcccttgctgaaattcacagctctctgcccccgcagtcgctcgctcaaggtctgtgttagagaaggtcatttgggaggctgctttcgtcttaatacctgcttctcgggaaaagatctttacgctaaaaataattaaaaccataaagcatgtaactcccgacgacagctctctctaaggagga

SEQ ID NO: 228851 - DNA, 1193 bp, Homo sapiens
  chr2:174219195-174220388
  hyper
aaacgccatggtgcgtgacccgcgccaccctcacgctgctctcctttaccccccagactccacttttcctccgccaccacgaaaattcttgcaaatcagacagctaaccccggggcaatacgaaccattttcgcgccactcgctcaggaccgcgcagctgcacaaggagagtggtccccgtagcccctaaagcccccctttctcaaaggggattttaggagtgcccaaggctatcctttgaggtcagaatatataggggggtcgtgttttttccagggggccacctagtcttgcgccatgtctggccgttaccacagcttgcaggacctgtgtcccaacgcgggaaagacagcccgagccccgcccctccgggcccgggtcggcgcgcccagcctgccagccgcgctgctgctgctcctcctgctgtgggaccgctgaccgcgcggctgctccgctctccccgctccaagcgccgatctgggcacccgccaccagcatggacgctcgccgcgtgccggtgagggctgggcgggcgaacccgaggggcgggcgcggtgggtgctggacgcaggcgggcgcgggccgaccctctccaactccgcagcctagcgctgccttaactggtggcctgcctaggcgttgcccgcttgggcaagcccctgattttgtgcacctgggataactgagggccatggggacgttcctgcgtggcgtgcgcacccgaagtgcgggcggcgtggagacttgagtcgtttgcaggatggctagcagcgctggaaagccctaggcacgtgcgtccgccaaaggccggacagcggccgggagcgctggccggtcccgattttgcctgccaggcagagccagcctgcctgccccctgggaggttgtcccgcagcggcccagccctttcccgcacacaactcggagccagtgcgtggctcgccgcgtctatacccgcgctcagtgggtggcccttgggcgcgcaccccgcccggcaagagacgcgtccgcttctaaccgctgagggccagcgcgtctgaggtttaaggtcttgcgaaccggtctcctagaacttgggctgcgcacgcagtgtgaagcgaccgtagtcccgggcggtggttaagtgcatttaaagggcttggtgggtcaaagcgttcgccgaccatttgctcgtttcctacttcctccacccc

SEQ ID NO: 228852 - DNA, 1746 bp, Homo sapiens
  chr2:175190729-175192475
  hyper
acgtccgacttgtccgggaatggagcagagaaagaggaaccagaagaaagagaaactcgcgacaacagagttgccgaaagagaagtgttggcgcctcaaacttgaggatcagcttcttgggccccactccagggtgtcgcgggggtcgggttctttccgccgccccccgaaagattctcagctaaccctttccccgccgagaccaagaggccctcactctgacaccactccgggagccaagctactgtaaggagctgataccacccctcgccggcgcgaaccgcccatctccccagacccgcccaccccctgctgcgaatccctgacgttctagcccggcgaaggtcctcttaaattaggaaacaatagctatttaagaagaagcgcaaataacccgcgctctgcgcgcccaatcgtgggattcttgggagttccccgcgggcaaggaagtctgctgctccccgcagctgcggaggagaggagggagcctgcgtgctggggcagggtgtcgcgaacttggggcaacccacctccagagccccgcccccgctttcccgcctgccggggacctgccgaacgcggaaccaccctccttcctgaggcaaatttgggaggggagaggtccagaagctgtagagtcggggcgccaagcgccagattctgccgctcggaagttgggggcagtccccagtcccgcctcaggcccccgcgctcacagggcgctccgccgagggcgcgggccaggcgcgcggtgtcacctccacgaagtcatttacttgccctgaaggagctggccctcgaccccttggaggatggagattcctcccattccctcctccgcctcccccaggtcggcgaagagacgtggaattgagctggaccgatgattccgcgagctctgtaattatgcacacactgaaatcttcaccgttgacttaagttacttggcgctgcgagggctggggccctgcatattgattaaatgcagcctctatttacctaaacaataaatgtagagattagcaacgttcacttgatcacaataatgggattgacaattaaggggcaatgcatcccagatgtagcggaacctatgggctgcgtgcagcaggcagagggcttctcagagaggggcgctgggcagttgcggcggcggaggtagtgcagagcaggaagcagcgcggaagcacagcgggaggcggagggggacgcccagcctcgtcaaggtcttcggccaccccgcccgggaggctcgaaactggctttggggtacctgaatgcctcgactcccagggagacatcgggagctcggagccactctccctgtggcgatggcacctgcctcaaggccgtctcgcttgctgatgcctggccgggaaggaggatggacgccgctggcatgtgccctggtaagtgtgtctgtttgtcatcagtgtacattctgcatgtggcagcagggcgagggggaggcgcacgtgtctaaagtgcacggagccttcctctacccctatgtatatacccttcagtcaatgttccaagaagcgggtcagggcggagggtatccatctggactctggaagggcgtgggtttgacatcggtaggtgtgacaggaaagtccagcctgtcagagttgggctctacagtggccgaaatcaagaaaggatggacgtgtcggcccagggctggcctgtttccggatatgtcacgggggtgcctcgttcctcgaggggagttttaggatgtat

SEQ ID NO: 228853 - DNA, 71 bp, Homo sapiens; identical to SEQ ID NO: 198555
  chr2:175192823-175192894
  hyper

SEQ ID NO: 228854 - DNA, 717 bp, Homo sapiens
  chr2:175193195-175193912
  hyper
actggcaggaatttccttgtcgtgagaagatggacgagtgtgtctgcagccgaggagacaactacaaacagactttgggcagggaaggcgggcgggcgggggtgggggtgggggcgggggcctgctttgatcgctccagctctgttgtaattttgtcttcgccagatagattagctggaaccgccagccctagcttggagttccgttccacggagtaccctccctccccacccccagcgtcatctcgcgcctggagccgggtcgccgctccttccgaagtctcgctggaaacttcaagggctgatggttctgtgttcttgacgtaattaggaggccacgcagctctccaacactccgttaaacaaatatgtaagtcgtcctccccctctctggggacagactctagggaaggaggcagctgggcccgctccgggtggtgtccttggctagcggagtggcgtcgctgtgaccttccgccgcccctcggggccttggtctttctaagctctttcttaggaagcggagagaggggcagaaaacgtgcacctcgccacccaccggacaagccgagaggaccttgtctttgcttgaaaagttttctagataaatcgctcgggtggttctaagctatgacgaactagaggctgggcccggttcttctccagaacagcgtgtggatgtaaaggagatgaaatcgtcctcccccactgctttctt

SEQ ID NO: 228855 - DNA, 3419 bp, Homo sapiens
  chr2:175196962-175200381
  hyper
gatgaaaaaaatctgtcagacgaaaaaaatctggacttcctccgaaagatttccttggggccccaccttagagttgaagtggcccgggtgtttgcctgcgttcgtttggaagatttccctaacttttattgtgatgcagacgcgtgtatctaaaggaatatgcgagtgcccacgtctagagtctgacagctggaactacggggaaaacggcgggagggggaggggaggggatccgaggggaggaggagaagaggaaggcgagcagggcgccggagcccgaggtgtctgcgagaactgttttaaatggttggcttgaaaatgtcactagtgctaagtggcttttcggattgtcttatttattactttgtcaggtttccttaaggagagggtgtgttgggggtgggggaggaggtggactggggaaacctctgcgtttctcctcctcggctgcacagggtgagtaggaaacgcctcgctgccacttaacaatccctctattagtaaatctacgcggagactctatgggaagccgagaaccagtgtcttcttccagggcagaagtcacctgttgggaacggcccccgggtccccctgctgggctttccggctcttctaggcggcctgatttctcctcagccctccacccagcgtccctcagggacttttcacacctccccacccccatttccactacagtctcccagggcacagcacttcattgacagccacacgagccttctcgttctcttctcctctgttccttctctttctcttctcctctgttccttctctttctctgtcataatttccttggtgctttcgccaccttaaacaaaaaagagaaaaaaataaaataaaaaaaacccattctgagccaaagtattttaagatgaatccaagaaagcgacccacatagccctccccacccacggagtgcgccaagacgcacccaggctccatcacagggccgagagcagcgccactctggtcgtacttttgggtcaagagatcttgcaaaagaggagagaaaacacgggaggcacagttccacatccttgtcacttgcaccggctccgcgacaactcgtcgtttgcacccgagggtttggggttggtagtttaattttttttttttcctaagaagcagggtgtgggtttagtggggagtgtgctatattaaaaccagtgcccaggtctgcccgagggcgctggtatttctggttcaaaaacagcttctggctaccctggagaagaaagagaaagcggggcccagaaagagaaaaacaagcaggtcagcggttgctgggggactcgaagacgcaccctggtctgcttgaggacgcctcttttcacactgacaaggtccagggaggacttcaggatgcttccagcctgcaaaatgtggaagcgcccacgtgtggcctggtcctccgccctcccgggtgaaagtcctggagagatttctcgggcgcgtccgtgaaagcagggcactaatggggagcctacctcttaaaacagcgcacttgccctacggacgagcctctaggccctggtggtctggaatgggagtgggttggagctgggacaagaaaactccactccaggatgaaacgcgacatgcaaatcttcaccgggttaaacaaacagccgagcaagctgcagcttcagcggaggtggaggtgggggcggacgccgctcgcgccggtctctgtttccaaagttgttacagtgagaaaataagcggcttcgtgcagcgtgttgtatgggctgatgcctcccacccccatgccagcccacagcaaaacccggcagataatcagcacatcccactgtttagtcatatttgacaactgggttaacctggtatctaagcgctggcgaaaccgtacaaagggtgccctcaattaccaccagaagcctctagcgtgagtggcacttgtattaccccccgggtcagaggccagagcgacaattaggaagtcacttacaccgctggggggaaatggcgggatgcagcaggctccaggccctcccaacaaatctgtggatgtagatctgtacagagaggcctatttcgctcctctcggaggagctgtcccttcgcgccccctccccagtataactgtgagagtgaaattgaatctagtggaataaggaattgggtagaagacacacgaaaatgataaaaatcacaagcaagaatgatagatacaagctgaagttgtgttctgtaggcaaaagcctggacacacaaagtgagggctcacatttccgtctccacttgggccctgctggtgcgggctgtgtctgggtgtctcctcccctcctgcctcctttcctacaagtggggagtcgagtaggactgtcagccctaacttgcaacatctcggggtggtttgtgtgtgggggggtgcttgtggctcggtttcattggtacttaaacctggcttggtgcgtgagtgtaaatttttaattgcactgtaatttcttcagtccccagcccgccctcgccccccccccgcaagtatcccccactactcccccccacccccgcggccctagctagctgacttgactggcacgcgccgggagcccgggctcgggcccctcggagcgtctgattggctgcggggcagctccggtctgctctgcctgcgccctcattgggcgagaggcgcagccagcggcacttcaaagcgggtgctcctcgcacttaggctgagtttagccggcgggagcctggagtccgctcggcacgagcgcggggacgcgggagccgcgcgggacccaagcagtttttccgagcagccgccaggctcagccccgctcccagcctcgctgcgcagccagagacctgctatggccacgtctatactcggggtaagtcgcaagcgcggcaacgcatttgcttgttttaaccggagtaatttttcgttatggcttctggggtctgcggctccggagaaactgttgctgctagactgcagcttcagcttctattagcactttccacatttctgggactgatttttccccaagtttttggaacccagaaagatgcctttgcaagaaaaggccttcttaatcaagtcctttttcatttggtttcaaaaaaaagctagaggtttcttttcttcccctcgtgatttataccccatcccccgcattgctttggggattttgttgcaattatgcgacaatggtgtttccagaaaacagtcttaatcgttttgcagtccatctagtcacgctaataaacatttacatttccgcggctccccaattcgcccatgactttgaaatctgtctctggccgcttatcctcggattattgttttcataatcgctgtttttgtgtgtatgtaaactttaaaaccaaacgttttctattaaaaaagaaaagtcaagtcgtagccaccc

SEQ ID NO: 228856 - DNA, 897 bp, Homo sapiens
  chr2:175201821-175202718
  hyper
ccgggctgcggcaaggtgtacgggaagacgtcgcacctgaaggcgcacctgcgctggcacacgggcgagcggcccttcgtgtgcaactggctcttctgcggcaagcgcttcacgcgctcggacgagctgcagcggcatctgcggactcacacgggcgagaagcgcttcgcctgtccggtgtgcaacaagcgcttcatgcgcagcgaccacctgagcaaacacattaagacgcacaacgggggcggcgggggcaaaaagggcagcgacagtgacacggacgccagcaacctggagacgccccgttccgaatcccccgacctcatcctgcatgactccggcgtcagtgccgcccgggcggcggcagcggcggcggcggcagcggcggcggcggcggcggcggcctccgcgggaggcaaggaagcagcgtctggccccaacgactcttagaggccgggcgagaggcgcgagcacacaagcgagtagagacaccgagaacgaacgagaggttcggagggcgagcgagcgggaggcgggagggcaggggcttcagtgacgcccccagggcccgggctgggcgcgaggtggagccgctcagggctcccgggctgcggttcgcccgctgtgcgaggagctcccctctgccttccgcgcccggataagaatcgaacgcgtggtccggaaacaaaagcgaaccatcctccgacacaaacactttaaaaactgtactcccagacgtacacatacaccggagacctacaaccacaagcacgcacactcgcgcgcgcacacacataccactcgcccaaacttctcgagcgaagagcaatacatagaaaggctccctctttgcccactctccacctccctccaacacccgtctctttccttttctcaaaa

SEQ ID NO: 228857 - DNA, 212 bp, Homo sapiens
  chr2:175203999-175204211
  hyper
agataaaatgtaaacgttttaaaaagcccccaaactaagcacttgatttgataactaggctttttaatgttatggaagacaactgctcctttccttttcaaagacggctgatctatgcaaatagtgaattggaaatgcctaggtccccgcgccgtcaaatggccctcgcaggttatttgaatatcagtggcgctgcttctgaaaaggttcaa

SEQ ID NO: 228858 - DNA, 1287 bp, Homo sapiens
  chr2:175204628-175205915
  hyper
ttttgattactgtccgccttgggaatttgagcgaagattttgatttttaggaaagaaaaaataaattcttgttattaacaatcagcaaaatgttttctcggaaactgttctgaaacaccaagtcgcaaagtagcgataaaacagaacgaaggtccccagcagggagtttgcagcgtgacattcaatggcttcttccttctccttcttgagctccccgcggccaggctgccccgctcttcttactcgagtttttcttcactttggccattttctctccccgatcaagctgttcataaccgggagccccccactccctaagcgcctctggtcgggggatggtcttccggagagccggctggcagggacgcgttttccggaggggcttcgggccggggcactggaggcccagagggtgcctggcgcgtttgggggccgcgggctggcggcgcggagtagagggtgtggtgggtctccccaggaacgcgggcgcccgggcgtcgggcccagggagctttgtttctcgttgataataaaggcagatcaaagggcccggtcgtgcaggtcccgctggccgcgcggctccctccgcaggccagtgatcaaggcctgtgtgcgctgcctctgccccgcgggtcagcggacgtccatcacccaggctcccgggagcggcgggcggcggccccggaccgagcgtccagccgggagacagcagtccgcggaacctgagcccagaggcagcggggccccggggccccggccgaagccaacaggcgaaaacagggcctaggccccctgcccggcctcccccaagccctaggcgcccctgggggcgcggggaaccttgacctgagcgggtggcgaccggccggccggtgatgaccaaattggagacagcgcgcgtgggaggcgagatcccgccagttacaacacgagttcggtccccaattgcggtggggcctcgcctccccagggccacctcggggccccagaggcctgtgcctttccggctcaggggccagaaggagctggaggcggtggtcaggggcccaagctcagaggcgggtagcggcctggaggtcggtgggggcgggggacgcggcctgggggcccagagtctcgcccgggcccggtaagggcagtgcgatttcgagtcccccggtttccctggcatttcctgtcccatagcttccagcgcaacagaggaacgaaaagcaagttttcctcggccctgcgcccacccagccacgatccgcaccatcctccagcgtttccttttctgacaccagt

SEQ ID NO: 228859 - DNA, 1218 bp, Homo sapiens
  chr2:175206394-175207612
  hyper
gccacctagagctccgaggcggaaaggccgtcgcctgcccggctcgcggctgtcagcgcgtggagaccggcttttgccgcgagcagcagcaaccaagaggatcctgcgaagaaacgcgacagtttgcgttccagcggggaacgagccctgctattgggggtggggagcactacatggcagtggcttttgggcaaaagggtcgtttctggaacgtgctaactgaaaatccaaacaaaacaaaataacgaccggttggccctggtcttagaattgtccatttaacatccttttcaaggcaacttcagggtcttccaacttaagagttgagagggctgaagcgttgtcggcggcgacgtggaccccaggatgtggggatccagctgtggacgcagacccctctgactctgcatccgtggctcccggcccgcgaggcccgcgtggactacccggggcccggctggaaccaggccgattcaaacaggccaccaaaccatcccacccccctaccccctcgtgggcaatcagggaggcaagggacccgccgctttcgcagccccaacccgaggcgggccggagcagccttctgcattgccttcgtcctccggcggacaccccagcccgagtggggcgcggggggcggctgggcaggcaggagccgggccggtcgcgcagggcccccgagggcggcgagaagcccccaaattccccgctcgaggcctccccaaagggtgcgcacaccctcctggagcaaaccgaccccttttgtcctctccttttccctttgaaacccaaatctgaaatcgggtaacagttgggggcgttggccgattttctctcctctcagcgtatcgtcctccccctgccgcccctttccctcctcttccagtccactatctccccgaccccagcccgtcttcatactgcgtggagtgacttcctcctcctccatttttgtgccccccacccccagcgcgtatttattgtattttaatttaaaaagcgacaccttcaaaccctgcgcccgaggcggcggaggcgccgtcacccgcagccgcgagagcccggccaaggcgcctgggtgccgggctccctgaactcgcgccggggagaagcagtgcgtttccggggactcgcagccacctttgcggcgggtaactcggctgggtttgtatttgctgttttaatacaaaccccgccgcactgcctatttcaaagatg

SEQ ID NO: 228860 - DNA, 975 bp, Homo sapiens
  chr2:175208099-175209074
  hyper
ggaaagggtttcagaatgtccgtggggacacgtccctccagggccggctgtcgaggacccggaaaaccacagcccctaagagttccagattttccaagacccttatactctcttcctgtagaatttcatactgggggttttgcattgttttgcaggcatgtaaccatttctgggtgattcatttatctataaaggaaatgcaaagtggcagggtgtctgccccagtccgcattctgcttgcagattgctgacgaaagttgatatcttcatgtttgtcccaggagcttcataaagcgccctcttcacctgtggagcccgagcgaccagaaaaattcgctcgctttcctaactgctgaaggcgagtccggcccgcgcgggggactgcgcccgaggcccggcaagcttaggcggggactagcagggccctcggcgggcgggcccccagcgaaaaggcctgagaattgcttctggggggtggcttgggccaacgggggcgagggagccgcgcagagggcaggccccgacccttccccgccgcaccttgtgggtcgggtgttgggcggcctcctggcgcgggaggcgcatctgctaggaagggtgtgcgctccccccttctcggcctccccatttcggtttggggtgttttcgcaaggttgccagacggtgcatccagaaggaaaccaccagagcacgcaggggggcgtcgcctcaggatgggaaggggcgacctcagccaggattcatcccatcaccctactccacccccattccggcttcctttaggtttagggcgacgtcctcctgggaagccctgctctgtcaacccaggagccctcggacctccacttctgtccaccccctcgcgaagcccttcaagcccaagggactggagaaaggcggctccggggcagctcgggccggagggtgcgtttcttttcattccaggcagctctccgcgttcgtcccgcacatctt

SEQ ID NO: 228861 - DNA, 318 bp, Homo sapiens; identical to SEQ ID NO: 198563
  chr2:175260398-175260716
  hyper

SEQ ID NO: 228862 - DNA, 91 bp, Homo sapiens
  chr2:175351635-175351726
  hyper
gggagctggtgctcgcagggtgccaagcagggagaagaccaccgtcatctcccgcccccagccctcttcgccgagcgcaaccgggtgccag

SEQ ID NO: 228863 - DNA, 113 bp, Homo sapiens
  chr2:175546698-175546811
  hyper
aacaaaggctcacagcgactgggtcagctgctttcccttacactcacaacgctaacagttctttctttaaaaagaaaagtatgtatagtagaaaaaggtaggggacgcgagac

SEQ ID NO: 228864 - DNA, 1024 bp, Homo sapiens
  chr2:175547051-175548075
  hyper
gagccggccccaggggatgcccgaacgtccccctctgtcctagctggggtgtaggtgcagccccagggcatcgccgcgaagcccctgctcgagacctacggagatagtgggtcccgagccccacggggcggccccgggtccgcggagtccagcggtgagctcagcccgaggcgcgggacccaggctgtccacggccccttcctccccgggccatcagcgggcagcagaacgcgcgggccgctggcctggaattgcgcccctcccgaggccgcgcgcccgcgcccaccgctcgcaggggacgcggcctcgacgtccccagccgccccacccgcgtcaccggtgccaggcggcacttccgtgccccgccgtcgagcccagcccctcccggcgtctcccccggcccccgggagcccggaacccgggtcgcgccagaggcgacgcgtcccttaccgcgcagcggctccggacgactccgcagccccgcgccgcgctgggcattttttctgggaaacttctcccggggtccgcagggctgagccgggcgggcaggaaaagcgctcagcgccgggaggctgcgaccatccgggaacttcgccgagatgtgggccctcccctccggcgccgccgcccccccgccgccccgccacatgtggacgcgccgcgaggccccgccggcccgcgccctgccctccgcgcgcccgcctgccccgccagcaatggggctctgcgcctgcagcttcggcccgcagaggatcgcggcggggcgggatggtcggggctggagtccgcagtttcctcagtcccgctcccctgcgcggcgaggggaccgaggcaagaggacaggagtttgcagaggggcgggaactggaaggggagtctagcccagggcctttccccccaactcttgaatcttctccaccttcttgcggctgctggcggggggatcgggtgggggtgttccctctgttcgagccggaaggaacgccttttcccacgctttcccgtctgctctcaaaaaaagagt

SEQ ID NO: 228865 - DNA, 231 bp, Homo sapiens
  chr2:175870274-175870505
  hyper
cggggccggtgtgcgttttagctgaaagcccaggttttttcttgaatggaatttgaggaggcgcagagaggagaaaaacgctgttactcgaaagaggaagagtcacaggaggatgctgagtgaacgcagcgcccaggcagggtcatctggggacctggtgcgtgtgagaacatatttcttctcctggcgccctccaggctcactgtggctggagccggtgacctgaagctg

SEQ ID NO: 228866 - DNA, 571 bp, Homo sapiens
  chr2:176937678-176938249
  hyper
gaaggtggaaacaacgggtcaccgccgccctgaatcagctcctgccaaagggctcattaaatccccctccagagcccccatcccaggactaagtaagtcatttgctggtctggcttggatgaaccaaggatcgcaggaggctgcctgtgtgcctacccgtccccccgcccgagtcccctagtgggcgaacgctgggccgggcacggtatctccctggcgagcacagcctgaacccaaggctggttttgaggtggcagttaattactagcccggaaagccgaagccccggagccgatgtctgggctgacagggttccctcctcagcctcggggcagtcagacgattcctaacaacttctcccaaggaggtagatccctgtttatcaaccagcacaccccgtcggcccttttctttggtaaacactctttaaacaaacagcccatccgccctgttattgccaaagctgctcagagctttaataaaagcccagggaagatcagaacccgcgtccaaggctgctgcttaatccaatgaaggcaatttccgaggataattgcgaacatgttttaat

SEQ ID NO: 228867 - DNA, 368 bp, Homo sapiens
  chr2:176940204-176940572
  hyper
atatttctgagtttggagggcggggatgccagggtaagcttcctccgagcgactaaggagcagcaacaagctctggaatttcctctcggggtggtccgttccaccttaaataacttgggctttttggtcccaaacgcgccctgtagttcaggtttttttgtcctccctgcagcagctgtcaccctgcattactcgcagtcagctaaatgaaacattattctaaacatatgcatcgtaatcagttcggtcacacttacaagaacacgcgttaataaggcaatcaatcaccctggaacaagcaagttgttctgtaacagctcataaacagtgtgtaatgaagaattggaggttaccgtgacatgcgttga

SEQ ID NO: 228868 - DNA, 1290 bp, Homo sapiens
  chr2:176943315-176944605
  hyper
tgagatgataagaacgtggctttcttctgcgaaatcacttcaggtaacagagataacattaaataacatacattctatgcaccaagaacaatgttttatgtaccgagtctcttatccgtctctcctaatgacttcccttagcgggttgttagtacttgacagcaggtctccgtgcggggaacttttctccaattccacattcaaaggaggtccatcagagagcatgattggcaattttcgtcataatctgcacattattagcatcaaacttgacgtggcagttaacactagtgggttttgatgtacctttcttcaagttcaaggaaacccctccagtagccgggttggcagagcgggtctcagcaacccagcggtggctttgcagaggcgaaggcgcaatagacatgcgtgagaaatatgccaagaaccatttcacccgaggaaaaggaaagcgaggagagaaggggacgagggacatagagagttctaacttagaaaagtgtctaaggaaatgctttaggataatattaatatatctagagattcaagtatttcccagatcgagtggaacccggtagttggaaaactgagctgaaaacgcctctccaaatactacagcgatctatcagtcttacccctaccccaactcccttcctttcccttccctggccgtggcaacctcttttgccatcactttttgcataaaatatgcaagatgcttccattccatcagcactgaaaccaaagaccaaaagagagaaaggtgttggaccgaaaaggaggcggcgcaacggccaccccttccagcacctcggctttgtccttcccggggaaggcggccacatccctacccgccttgctcctgaacgtagtaaacaatctcacaaacaaccaccgctgcccacgctctccatccgtcctcccggccttatcagacctccgttctcccgcactcttcgggcagggtccctaataagctcaggctgaaagaacgtttgccacctcccccaccctcgttgaaagaaaaggaagaaaaacagcagcagcgagaaacctccggggcgactcctcccccgcccccaagcaccagcgcacagcatccccctctgtctttgttgtggttctccgttgcttcgggccacgccgttcagccaagcaacccggacctgagagtgcacagccaggactagcttagggggcgaggggttggtctttgggaaaccaagcgctcaggacagaggtggaaagtgggtcccgggagccagaaaagagagagaagggcagacggct

SEQ ID NO: 228869 - DNA, 415 bp, Homo sapiens
  chr2:176945565-176945980
  hyper
cctgcggggagagacgcgccgcagcctgggttagggagcgccccgtgttcccagctcctgtcccaggacctctgccccttccggacctctgaatggcttggtctacttctctccgaccaagcccaaccccgagtaccctgtggtctcccagctgggaaagtgtggacggcagtgtgtggaccgccgtgggcacaccgtcctcaacgaagagggtcctctcccccgcgtccggctgctgctgctcctcaggcttttattcccttacttcttgctgcacttttttgtcccaatccaacctttcctctccctcccgccacccaccagtgccggtctcgctgagcacccgtctctcaatcccaggatttgtacggggattctgggcagcctttgaagagaggctgccgctcagcttttc
